United States Patent Application Publication US 2005/0228172 A9 - sequence listing, part 37

SEQ ID NO: 131347 - DNA, 480 bp, Homo sapiens
agatctactctttttgctgtttgagacagggtctcactatgttgtccaggctggtcttgaactcctgggcttaagcaaccctcctacctcagcctcccgagtagctgggatttctggcacatgccaccatgcccagttagagatccactttcatctctctgatttgttcttttgccctagcagtggaaccttgaactcacyactgaatctctgagcctcagacagcccatccacaaaacaggagaacaacaatgtctgcagtggaagccccagcttggaggctggagccctaaccaccccaacacaatcccatccaccttcctccaaagcataattcactcatttgacaaaatatatatttggggacatctttagaaaatcaccgtaagttgtgcctatgatacaaacactccatgacaatcccctactgctctccttccaatgagatcatgcctttaagcactctatatatctccacag

SEQ ID NO: 131348 - DNA, 560 bp, Homo sapiens
aagctttcacctacctttcttatatatactatactattaagataaacaatagtaaaagaagagaagcatctctttatgaaagcagaaaatgaaaaatatagtagacagaatttctagaatgatgaagtaagaataccaccagactctctctccagaaaaaaaaaataatgtatctggtgaaattattaaaaacaactgttaaggtatttagaaattatcataattgcatacaccaaatggagaaacatttattcaagaaaaatttacaaacttttggtaagaacaatggacctatggcgtttaagccaygacctactccattatgtgcccttcacctcataagctccaagtaatggaaactctaccccattagagaagtttatagtaacctcactttccagatcctagtgtcaggttccagtttcacgcaagtaagggcagcctgcctgcgtttctcattctcactactccccagacaccggttgcagaagcttgattctaggcaaacaaggccaagagaacttgagctctcttattttgacaagttctatcttgtataa

SEQ ID NO: 131349 - DNA, 575 bp, Homo sapiens
aacagtttttcagttcatcaaaaagtaaaacataagagttaccatatgacacagcaattccacttctattttctgcagaaaatacaaaggacgatggcgcatagtgaattgtatcatgcatttgcaatcagccacatccaaactgtgagaaactccatagttcaaacagcctgtgttttcaacagatacattttaagacaaaatgatgagggataagtataaaactgtcaaggaaatgtttagtataaaagtyggtgtggtggacaaaggggttgtgtttgaaatgtggtgcacagaaggggcttccagaatgtctaaccgagttctattttctgacctggtcatggttaggttacaagatgtttgccttagaataattcattaagtaatgcattttgctctgtgacattttctgtgtctgttgttagtgggcttttttaaatatgtttttttttttttagattatgaaaactttctctttaatcaaggattttaacatgaacagacttcttgaataatatggaaagtttccaatatattgaatcataaatccacaagtcaccatacatacaaca

SEQ ID NO: 131350 - DNA, 575 bp, Homo sapiens
aacagtttttcagttcatcaaaaagtaaaacataagagttaccatatgacacagcaattccacttctattttctgcagaaaatacaaaggacgatggcgcatagtgaattgtatcatgcatttgcaatcagccacatccaaactgtgagaaactccatagttcaaacagcctgtgttttcaacagatacattttaagacaaaatgatgagggataagtataaaactgtcaaggaaatgtttagtataaaagtcggtgtggtggacaaaggggttgtgtttgaaatgtggtgcacagaaggggcttccagaatgtctaaccgagttctattttctgacctggtcatggttaggttacaagatgtttgccttagaataattcattaagtaatgcattttgctctgtgacattttctgtgtctgttkttagtgggcttttttaaatatgtttttttttttttagattatgaaaactttctctttaatcaaggattttaacatgaacagacttcttgaataatatggaaagtttccaatatattgaatcataaatccacaagtcaccatacatacaaca

SEQ ID NO: 131351 - DNA, 508 bp, Homo sapiens
gagaacctctattgtgggaggttggctgtgcccataggggaaggggaggggcatggttacagggtggacaagaagcatctgtactaaccctgggctcccattccctaaaggccagttacagccrtcagtattcctgatactaataatcccaggtttcattggagttaaaactaaccacccatgatggtagttgggaggagaaaaccaaataataatatggaaggtgttgaaaatcacatatacataattactactagcagtgactttttcttattctttttcattttaaaactgactggaagtatcttgaagcagtgattttttgatgttaaaggtcatgggtttataaaatagcactacttactttggggaaagcatcctacattccagccagaaaggtatccatcatatagagaattccttaattttccagaaatgtttaccatcccagtaatcatggcaaacacttgttgagtacgtagggtgggccagcaggcactgtgctgag

SEQ ID NO: 131352 - DNA, 561 bp, Homo sapiens
atatatatatatatatatatatatatatatatatrtatgtatgtatgcaaaataaaatgaacagtaattatctatatactcacaattgttaggttaatactgaaaactgaatcctaagtaccaaataagtagagaaattaaatcaagtatttcttcaggactggcatcagcttttcagcataatcttttgagactggtgattagtaaactgtatcttgtgttacaggtcagttattttcaaagtgtgttttctggataagcagcatcagcatgaccttggaacttagaccccagaactactaaatcagaacctttgcattgggtattccagcaatcttcattttaacaagcccttttgggggattctgatgtattctaaaattttagaaccattgatctaggtaaaactatgacacactggtgtaatctagaggtagtttttttttatttatttgcttatctatttattgagcttctactaggtgtcaggccctagacatattgtgagcaacataacctagtccctgaccttgagcggtttacaatctagaaacaacagac

SEQ ID NO: 131353 - DNA, 581 bp, Homo sapiens
acagtggggtaacagagaagaagcaccaattttttgaatgcatactattcttcatttgcaaattaagctgcaaatggcaagtaatggcatgtctttcttggcaatttttagtacgatttccatcagatagattgctgtgtgtaaataggctatttgtatgacttttgaaaaatgtatactaatttttggagtaaatttgaactcaaataaattccaatgatacctggagttatttgaacatcacagcatagactatgcttttcaaaaatttttgttyctgttatccaccttcacagtgccttccccgccacagtcatcagaatgaaacattgatatcacgatgatcataactcaaaatttgacagtcatatgcagtatttaaaaattacttccagtccctgggacttactcagcaaataggaaaaggtttattttttaaaaaactcacaaatcttcaaaaagtggattgtttcaacattaatagaagtatatggaagaagcacattatataagaaaatatttttttcttactagatatgatttaaattatgaccattatgatgactctttattcttacaac

SEQ ID NO: 131354 - DNA, 581 bp, Homo sapiens
acagtggggtaacagagaagaagcaccaattttttgaatgcatactattcttcatttgcaaattaagctgcaaatggcaagtaatggcatgtctttcttggcaatttttagtacgatttccatcagatagattgctgtgtgtaaataggctatttgtatgacttttgaaaaatgtatactaatttttggagtaaatttgaactcaaataaattccaatgatacctggagttatttgaacatcacagcatagactatgcttttcaaaaatttttgtttctgttatccaccttcacagtgccttccccrccacagtcatcagaatgaaacattgatatcacgatgatcataactcaaaatttgacagtcatatgcagtatttaaaaattacttccagtccctgggacttactcagcaaataggaaaaggtttattttttaaaaaactcacaaatcttcaaaaagtggattgtttcaacattaatagaagtatatggaagaagcacattatataagaaaatatttttttcttactagatatgatttaaattatgaccattatgatgactctttattcttacaac

SEQ ID NO: 131355 - DNA, 622 bp, Homo sapiens
ataagatcaaatgaaaattgttttcctctaaaacagcgtttctcaaccataacagaatacaaaaaacccatgaggagcttttaacaaagtactcacgtccagatctcaatgaacgaaccgaacaaacraaagtcaagattttctggtgatgagacccacacattggtattatttcagagctccccaggtgccgccaatgagtagctagggttgactagaaaggacaatgtacacacatacacacacacacacacacacacacacacacaccacaaaactcccaaagtagtcatttcaagattccagtgaattggattaaaatttattccctgagtttctaagattcatagatagagatgttccctaaaccatagtggcaaaatttctcatggatattttgctgaataagaaatgcacacgttttccaaaatacattagttggctgataaagattgaaaaagacttcaaagaggatagagttgagcacagcattcctcagttcagaactattgggggaaattcataagacttcaagaaccaagaactgtgtttatcagaaataaattctttaatactatggttgcttttatgtttttcttagaactgctaaacaaatttatgg

SEQ ID NO: 131356 - DNA, 564 bp, Homo sapiens
gtgtctagctcaggtttgtggatgcaccagtcagtactctgtatctagctaatctggtggggacttggacaatctttatgtctagctaagggattgtgaatacaccaatcggcactatgtatctagctcaaggtttgtaaacacaccaatcagyaccctgtgtctagctcagggtttgtggatgcaccaatcggcactctgtatctagctaatctggtggggacttggagaatctttatgtctagctaagggattgtgaatgcaccaatcgtcactctgtatctagctcaaggtttgtaaatgcaccaatcagcactgtgtgtctagctcagggtttgtaaatacaccaatggatactctgtatctagctaatttagtggggacgtggagaacttttgtgtctagctcagggattgtaaatgcaccactcagcatcctgtcaaaacggatcaatcagctctctgtaaaacagaccaatcggctctctgtaaaatggaccaatcagcaggatgtgcgtggggccagataagagaataaaagcaggctgccccagccagcaggggc

SEQ ID NO: 131357 - DNA, 354 bp, Homo sapiens
aattctgcccatactatacccattcttactccactggaaggagtggggagatggttttcccattacttcatcgaatggcaccaagggaaagaaaatatatarcaatattttggcatatggtttgcatgtttgggatttttgttcagaagacttcattctacgtaggtcagagcctaccagaggagcagtgagggttgactggatgggaacatgcccagctgacaaaacctgtattcatgacagcaacatcccaagaacatggaattctcatgagacactgctattgactcccaggaataatcaagagagactctgaagctctgtttctttgcaaggggtggtggggacactgag

SEQ ID NO: 131358 - DNA, 548 bp, Homo sapiens
cattaatggcctgctgtgggccattcagggcccttttctcctggcatctctgatcaggagtcaagattgttaagagtcttggcttctgctaaactagactttaggttattttcctcaatcttgcaggtaggtcagccttctgtgagagatgaaataatatttattcctggaccagcattctcagtggctcagaggtcattggaaggacagacagcrttgccccagagcacattacccagagtggttatgacggaggcgattcacacaagcagagctgtgtactatatgcactcctacctggtgccagcccacacacatgcttgctttgcacttactccaacaatccattgagcatctgctatagtttggatgtttgacatctccgaacctcatgttgaaatctgatccccagggtggcgatgttgggaggtggggcctagtgggaggtgtttggttaatgggggcggatccctcatgaataacttggtgccattctcatgggagtgagttctcaccctattagctcccatgacagctgtttgttaaaa

SEQ ID NO: 131359 - DNA, 529 bp, Homo sapiens
acctgccctccccagctccatgcagagctgctgcaaagtagtttctgcacatccatcagtctgcatgttctacttggctttgaatctctctaattggattaatatcagatgggagtttttctattgctttggctcactatctcctattgtgtacagaagaagagtgtttggcgggagggggttctagtcagtacaaagttcctctgaggctgctactgccgtctctcacagacctttcagatccagtgcttcagatacttgagggagctcaggtctcacaccccactaaaattgatgattttcaccaatgaaacaaamttcgttgctttttgctgtacataaatttgcttttttatttatttatgtatttatttatttatttttgaggcagagtgctgctcggttacccaggctggagtgtagtggctcaatcacggctcactgcagcttcaatctcctgggctcaagggatcctcccaccttagcctcctgagtagctgggattacaggcatgcaccaccacatccag

SEQ ID NO: 131360 - DNA, 529 bp, Homo sapiens
acctgccctccccagctccatgcagagctgctgcaaagtagtttctgcacatccatcagtctgcatgttctacttggctttgaatctctctaattggattaatatcagatgggagtttttctattgctttggctcactatctcctattgtgtacagaagaagagtgtttggcgggagggggttctagtcagtacaaagttcctctgaggctgctactgccgtctctcacagacctttcagatccagtgcttcagatacttgagggagctcaggtctcacaccccactaaaattgatgattttcaccaatgaaacaaaattygttgctttttgctgtacataaatttgcttttttatttatttatgtatttatttatttatttttgaggcagagtgctgctcggttacccaggctggagtgtagtggctcaatcacggctcactgcagcttcaatctcctgggctcaagggatcctcccaccttagcctcctgagtagctgggattacaggcatgcaccaccacatccag

SEQ ID NO: 131361 - DNA, 529 bp, Homo sapiens
acctgccctccccagctccatgcagagctgctgcaaagtagtttctgcacatccatcagtctgcatgttctacttggctttgaatctctctaattggattaatatcagatgggagtttttctattgctttggctcactatctcctattgtgtacagaagaagagtgtttggcgggagggggttctagtcagtacaaagttcctctgaggctgctactgccgtctctcacagacctttcagatccagtgcttcagatacttgagggagctcaggtctcacaccccactaaaattgatgattttcaccaatgaaacaaaattcgttgctttttsctgtacataaatttgcttttttatttatttatgtatttatttatttatttttgaggcagagtgctgctcggttacccaggctggagtgtagtggctcaatcacggctcactgcagcttcaatctcctgggctcaagggatcctcccaccttagcctcctgagtagctgggattacaggcatgcaccaccacatccag

SEQ ID NO: 131362 - DNA, 433 bp, Homo sapiens
agccatagaaaagaatgtgatcatgtcctttgtgcaacatggatggaactggaggccattatcctaagcaaactaacataggaacagaaaactgaatattgcatgttctcacttataagtgggggccaaasattgagtacacatggattacaaaggagggaacaacagacactggaatctacttgagggtggagggtaaagggtggaaggagggggatgataaaaaacaattacctatcaggtactatgtttattacctggtcgatgaaataatctgtacaccaaacccctgtaatacacaatttactggcataacaaatctgcatatgaactcctgaacctaaaataaaataaaaggtagctcttttaaaaaaattgtttttaatagtggtaagcagattcaagaaagggttatgagcaaattatatttccc

SEQ ID NO: 131363 - DNA, 543 bp, Homo sapiens
tgttccataaacacaagtaaacctaacaaaaaagcaaaataactcttagcagtaaagctgttgcataaatggcattttaaatcgttacccccactgatagagatgacttcagctcactgctacctgagagtagtaacaaatatttataaagtactctactgagacattcggaacatcacactgctccaacagacgatttcaggctagagtgaaatgggcaggataaaagtaaacaaaaataaaacttcagactggatcagctgtccacttactctgttctaaaataaacaagagtaccattttcaatttctactgctgggtggaacttccacatgactaaaaataaaacctcctcacaagttaagtggttagaagaatgttcttaatcctccacaggtgargcaaagagtttgtctggtatagttcccatgggccaggaatggaaagtcagggcattttttcattctttatgctgagtttgtctgtctcttatcagacttctagttagaaagaaaaatatttccattaggagaaagtttcccc

SEQ ID NO: 131364 - DNA, 590 bp, Homo sapiens
cttcatcttatattagggctaggatactttgttttttatttctttaaatttaaaagctccaagtttttgaatatgtcaaatttatttaaatgaaactgaatcttgtgattctttcttgacattttcaaatatgattcaaatttgggaaaattttttttgccagctagtaaatgattgctgaaatcatgaattgaaatttctctatttaaatggaatgccatatttataaaagtaatagcttgcaagagattgtcagtggcattcaaatcwgaatctaaaatatatttctttcattaaatatttgcacaaagttgttatatatttatataggtcattccctgggacgttttatacattgtcatttaaaaatattcattcttaaagagatacaatagaaacatgctttatgtatacattccaggtgcatgcttgtatagtactgtgctgtatccattatctgcttttgaggctgtagctgttatttatagtgttacagttactgtacattaatttgttcttgattttagcttttccaactgtccattttcattatcaaggagagaatctggctcacagataaaatttctcac

SEQ ID NO: 131365 - DNA, 590 bp, Homo sapiens
cttcatcttatattagggctaggatactttgttttttatttctttaaatttaaaagctccaagtttttgaatatgtcaaatttatttaaatgaaactgaatcttgtgattctttcttgacattttcaaatatgattcaaatttgggaaaattttttttgccagctagtaaatgattgctgaaatcatgaattgaaatttctctatttaaatggaatgccatatttataaaagtaatagcttgcaagagattgtcagtggcattcaaatcagaatctaaaatatatttctttcattaaatatttgcacaaagttgttatatatttatataggtcattccctgggacgttttatacattgtcatttaaaaatattcattcttaaagagatacaatagaaacatrctttatgtatacattccaggtgcatgcttgtatagtactgtgctgtatccattatctgcttttgaggctgtagctgttatttatagtgttacagttactgtacattaatttgttcttgattttagcttttccaactgtccattttcattatcaaggagagaatctggctcacagataaaatttctcac

SEQ ID NO: 131366 - DNA, 590 bp, Homo sapiens
cttcatcttatattagggctaggatactttgttttttatttctttaaatttaaaagctccaagtttttgaatatgtcaaatttatttaaatgaaactgaatcttgtgattctttcttgacattttcaaatatgattcaaatttgggaaaattttttttgccagctagtaaatgattgctgaaatcatgaattgaaatttctctatttaaatggaatgccatatttataaaagtaatagcttgcaagagattgtcagtggcattcaaatcagaatctaaaatatatttctttcattaaatatttgcacaaagttgttatatatttatataggtcattccctgggacgttttatacattgtcatttaaaaatattcattcttaaagagatacaatagaaacatgctttatgtatacattccaggtgcatgcttgtatagtactgtgctgtatccattatctgcttttgaggctgtagctgttatttatagtgttacagttactgtacattaatttgttcttgattttagcttttccaactgtscattttcattatcaaggagagaatctggctcacagataaaatttctcac

SEQ ID NO: 131367 - DNA, 516 bp, Homo sapiens
tactgtaattttatagtaagttttaaagttgagtagtgtcagtcctccaactttgttcttctttaatactgtgctgactattccggatcttttgcctttccatgagaactttaaactctgtcaatattcacaaaataacttgctgggattttgattaagactgcattgaatttatatatcaagtttatattcctggatttcatcarggcctcccagctctgtgagttcctgaactttaaactcagtttgtcaatattcacaaaataacttgctgggattttgattaagactgcattgaatttgtacatcaagttgggaagaattctctcaacaatttgaagtctttctatcaatgaacatggaatatatctccatttatttagctctctttcatgaaagttttcctcagatagaccttatacttattttgttaggttcatacacaaatatctcatttttagggtgctacactgtagttttaatttcaaattctacttgttcttgctggtatacagg

SEQ ID NO: 131368 - DNA, 448 bp, Homo sapiens
ataggatgccttcttccacatgtcatatttcaaaactccttaagaagtttttgctttcatttgttgagtaagtctgagtgtgacatttgactttgaagggaagggggaataaactcccaaaattatagtaatttattaacctatcttsctgagctttgaggctaaatcaaagctttgtgttacaatagcgtttgctaaagttacagaagccctaaaggattttaaagtattaaagtatctttgtttgtttgatttatgtcctatatccttggccttaaaaaattcagctacattttatattaaaatattcataaatattttatgaatataacttacacagctcagctttctgggcctgctgatttatctacatttttttttccatgagcaatagttctccacggtggatgtgtgatcatcttcctatcatgtaaaggtctgagggtgg

SEQ ID NO: 131369 - DNA, 576 bp, Homo sapiens
tgtaagttatatgattattttatgggacatattatttattggaataaaaattataaaaactttgtaatggaatacttcaaaccaggatataggatgccttcttccacatgtcatatttcaaaactccttaagaagtttttgctttcatttgttgagtaagtctgagtgtgacatttgactttgaagggaagggggaataaactcccaaaattatagtaatttattaacctatcttcctgagctttraggctaaatcaaagctttgtgttacaatagcgtttgctaaagttacagaagccctaaaggattttaaagtattaaagtatctttgtttgtttgatttatgtcctatatccttggccttaaaaaattcagctacattttatattaaaatattcataaatattttatgaatataacttacacagctcagctttctgggcctgctgatttatctacatttttttttccatgagcaatagttctccacggtggatgtgtgatcatcttcctatcatgtaaaggtctgagggtgggtttaaattatagtgatctttgtttttatcagcgtgcatg

SEQ ID NO: 131370 - DNA, 437 bp, Homo sapiens
atgacccttgaatctctcactgatgtcataaagatattcccttttttkgttttttagctaatatgaagtatgtttgtcctttgcaatattaagggtcctcataatcatagccttttctgctgactcatgtgacaatctagaattatcttttttcttctcagggactccttcccatggaaagcaagacttctgcatatcagagtggggtcctcaacacatttggttgccccagaggctataattcttctatattctatatgagtgttcccctattgaagtataattacattcctcttttccatttcctgagagggaagagtgtgttaacagtcagcagcagggacttgaaactgctcgttttattttaatcaccaaatcactcaagggaaaattcaccagtaatcaaaaataaaacaaagggaaaatgaatattgatt

SEQ ID NO: 131371 - DNA, 529 bp, Homo sapiens
aaccctgaaagtttaaaaaaaaaaatgtaacagcaaaaacacctatacgaaggacagcaacttcaaaaaatgaaggaacagcagtctacacagatgataaagaacaagtacaagaactctggccactcaaaaaccagaatgkccaaatgaccacactagttctccagtagtggttctcaaccaggctgaaatgactgaaatgacagacagaattaagaatatggacagaaatgaagatcatcaagattcaggggagtccaagcattctaaggaatacaataaaatgatttaggagatgagagatgaaatggccatcttaggaaggaaccaaagtgatctgatagagctgaaaaactgacttcaagaatttcagagaacaatcacgagtattaacagcatgatcaaccaagctgaggatggactgtcagacctcgaagagcagttctacataataattcagtcagacaaaaataaagaaaaaagatgaagaatgaacaaaacctccaagaaatatgggattatgtaaaga

SEQ ID NO: 131372 - DNA, 476 bp, Homo sapiens
ctgtgtacaaaatgaggctatatggatgcatgatgtttatcttcaagaatgaaagaaaaaaatactttcttttggtcttttgatacttaacaaagaatccttatgccacccctcccccactcccacccccccagtttgggctcagtacccttttttccctttgttttttgtttgtttgtttttaagattatccattctgggttcatcactcatgactgatgttcttgaggtgctacaagtgctactgcttctggtggtaaatacagagatttgttgaacaggagactcccacagagyttgtggatgctacagctatttagacagggactttatgatacatggcctcagaggaacacagtgactactgagatttcttcatgaattccaggactggggcacatctcctctggtttccccaggaagtcaagtttggcaaaattaaataaacatatccttcctactctgtgatacattca

SEQ ID NO: 131373 - DNA, 547 bp, Homo sapiens
atactttagggtttttgcctatggmgtcgaaatagtttatcattttctgactgtaattcctgtaacatatttaaaaattaaaaactaacttttttcatgttgaattatattggaacaatgttttcttccttatttttatattttttcttttaagtttgttcccaatatcaacaaaaaatatatttttaatgtgcctttattttatctccactcacataactcctgggaaaattttttttcttgaggatgaggaactattttaaaaatcatattttctgttctttacgatgcaaaacactctatgccaatccctttatttgccttgtggccagtctcagtatttaagatggttattagtaagctatccaaagacatgtaaaaactgaagctcagagaggctaggtaatatgcttagctattagcttggtgcaaaagtaattgcagtttttgccattactttcaactctaaaaaccacaattacttttgcaccaacctgatacttagcacaaccagctagttactgagcaatggaatcaaaattggaac

SEQ ID NO: 131374 - DNA, 547 bp, Homo sapiens
atactttagggtttttgcctatggagtcgaaatagtttatcattttctgactgtaattcctgtaacatatttaaaaattaaaaactaacttttttcatgttgaattatattggaacaatgttttcttccttatttttatattttttcttttaagtttgttcccaatatcaacaaaaaatatatttttaatgtgcctttattttatctccactcacataactcctgggaaaattttttttcttgaggatgagkaactattttaaaaatcatattttctgttctttacgatgcaaaacactctatgccaatccctttatttgccttgtggccagtctcagtatttaagatggttattagtaagctatccaaagacatgtaaaaactgaagctcagagaggctaggtaatatgcttagctattagcttggtgcaaaagtaattgcagtttttgccattactttcaactctaaaaaccacaattacttttgcaccaacctgatacttagcacaaccagctagttactgagcaatggaatcaaaattggaac

SEQ ID NO: 131375 - DNA, 651 bp, Homo sapiens
caatgttttcttccttatttttatattttttcttttaagtttgttcccaatatcaacaaaaaatatatttttaatgtgcctttattttatctccactcacataactcctgggaaaattttttttcttgaggatgaggaactattttaaaaatcatattttctgttctttacgatgcaaaacactctatgccaatccctttatttgccttgwggccagtctcagtatttaagatggttattagtaagctatccaaagacatgtaaaaactgaagctcagagaggctaggtaatatgcttagctattagcttggtgcaaaagtaattgcagtttttgccattactttcaactctaaaaaccacaattacttttgcaccaacctgatacttagcacaaccagctagttactgagcaatggaatcaaaattggaactcatttattaagccaaggtttctctttgttctagtatatgaggttgcctgtggaagagtcaaaaaattaaagatctgactgtagcacttttgcagtttttctgtttcatcatttacagttttgctattggggtttgttttctatgtattccttattatttaaattttcagtaacatgacaagttactgaaagagtgaatagtgttttataagttaaagg

SEQ ID NO: 131376 - DNA, 537 bp, Homo sapiens
ttcagttaaagaaactgccagtgcaaaagctacaaagttaggggtatgcctggtatggttaaaaaacacrgggacaccagtggggagggagtggagagattgaatgtaaagtactagaaaatgtggtcagagaagtaagggagggagcacatcatgtagagaaatgggagacactggagggcagaagagtgacccaatttctcttatgccttaaaaatggtcaattttggcccagcatggtggcacatgcctgtaatcccagcatttcgggaggctgaggcaggaagatcgcttgagcccaggagtctgaggctgcagtgagcaatggtcacagcaccgcactccagcctgggtgacagagtaagactttgtctctgaaaagaaggaaggaagggagggaggaaggaagaaaggaaggaaagaaagtcagtcagtcagttttgtagctgtgttgaggatagagaacaaggatagaaaatggatgagtgataataatgggccaggccagagtggtagatgtggagctggtgagaaggt

SEQ ID NO: 131377 - DNA, 537 bp, Homo sapiens
ttcagttaaagaaactgccagtgcaaaagctacaaagttaggggtatgcctggtatggttaaaaaacacagggacaccagtggggagggagtggagagattgaatgtaaagtactagaaaatgtggtcagagaagtaagggagggagcacatcatgtagagaaatgggagacactggagggcagaagagtgacccaatttctcttatgccttaaaaatggtcaattttggcccagcatggtggcacatgcctgtaatcccagcatttcgggaggctgaggcaggaagatcgcttgagcccaggagtctgaggctgcagtgagcaatggtcacagcaccgcactccagcctgggtgacagagtaagactttgtctctgaaaagaaggaaggaagggagggaggaaggaagaaaggaaggaaagaaagtcagtcagtcagttttgtagckgtgttgaggatagagaacaaggatagaaaatggatgagtgataataatgggccaggccagagtggtagatgtggagctggtgagaaggt

SEQ ID NO: 131378 - DNA, 502 bp, Homo sapiens
agaggaagttgagattcagagaccaaacacctgatcaaaagtctcacaactaaaaagtgagagccaggacttgaagccaggtctggctgaatccagccttcatgctgtgctgtctcccttctcagactaacagtgggtattggtcatgtcagggactgtccttcccccggaatatctccctctaggccttgtttttttttatttgtttgtttgttttgttttcttcatacagcgcagtagcttttgtgcacttggcattttgatttctcagcagtagacatatacttcatgaatgggatttccttttctctkttccaccagaatactacaccataaagagtttctttagaagctggtcagtaatagtcacttcatttcacctgtttttaaaaattttgacatttgttttctgaccttaatcttaaaaacaacaatattaatgataagaagtatttcttcaaattaggtctataaacttctttgacttcctctacatatgatt

SEQ ID NO: 131379 - DNA, 502 bp, Homo sapiens
agaggaagttgagattcagagaccaaacacctgatcaaaagtctcacaactaaaaagtgagagccaggacttgaagccaggtctggctgaatccagccttcatgctgtgctgtctcccttctcagactaacagtgggtattggtcatgtcagggactgtccttcccccggaatatctccctctaggccttgtttttttttatttgtttgtttgttttgttttcttcatacagcgcagtagcttttgtgcacttggcattttgatttctcagcagtagacatatacttcatgaatgggatttccttttctctttkccaccagaatactacaccataaagagtttctttagaagctggtcagtaatagtcacttcatttcacctgtttttaaaaattttgacatttgttttctgaccttaatcttaaaaacaacaatattaatgataagaagtatttcttcaaattaggtctataaacttctttgacttcctctacatatgatt

SEQ ID NO: 131380 - DNA, 575 bp, Homo sapiens
ctcctccaattcccacctatgagctcaattttgctctgagctgaatgaagatttacctgtacttcggtcccttctctcctccagggaacctagcctcctcccctgcmtttacctatcccaaaagtttttctggggaaaaaaaccaatctccttttgttattaaatatacttatgtattcaactacgttaatatctaaaatctttcccaatgggcaaaatctttgctgaacacagaggcagagcttcgtgctcacatgtgatattggttttgacagaactggctagatgtactctagggaaggagtgtttgttaggtttgctatcctttttcagaaccagacttcatcactttaatttttttattagaccaagaatacacataaaaaataggaaattttatattttaaatataaaatatgtatgtaaaattaaaaatataagctaaaaaaacttaatgtgtttgaagtccccagcaaagaaagataactcttcttaatgttttagtgcatttcctgccttctagacttgtagcagtattgttaaaatgggttttgttgcatttgatacattccatt

SEQ ID NO: 131381 - DNA, 164 bp, Homo sapiens
ttcaaattaatttatctagtgtcctcttcgaatatagggaaaaacagaaaaaaaawctgtatagtgtagtcagaatatattgtttgtattggacacatccgtcacatgggttaatctacattctgagcccaaaactacaattacaccgtttacacttctacttt

SEQ ID NO: 131382 - DNA, 552 bp, Homo sapiens
tcatatataatgccatatataaatgycatggcacccattattagatatgatgccagtacactccaagaagttccataatccccattacagcatagcttcagatcaaatgaccacctgtaggagaggagaccaagtgtgaagacttagctctttgaattgtttccttagtagtgtgtagtgaatagaaggaaagattgaaagacatggtgattaaatgaccttcaagcgacctttgagcatcaacattgtaattcgaaaagttttattacatcaactttttcatgaactaaatgatcatgttcttgatactgaagttgtaatttactggatgtatgctaacattacatcaaactagcatttctcaatgccaaataatattctagagctcttaattgaacaaactctcttgattagcttaaacaatgctttatactgagagatctttcgaaaagtcagaatgccctgtagccgattaaccttctgggtaatcttgcagcaaggacatatttttaatgcttcaacaatccaatttatttccttagcacgttaatt

SEQ ID NO: 131383 - DNA, 552 bp, Homo sapiens
tcatatataatgccatatataaatgtcatggcacccattattagatatgatgccagtacactccaagaagttccataatccccattacagcatagcttcagatcaaatgaccacctgtaggagaggagaccaagtgtgaagacttagctctttgaattgtttcctwagtagtgtgtagtgaatagaaggaaagattgaaagacatggtgattaaatgaccttcaagcgacctttgagcatcaacattgtaattcgaaaagttttattacatcaactttttcatgaactaaatgatcatgttcttgatactgaagttgtaatttactggatgtatgctaacattacatcaaactagcatttctcaatgccaaataatattctagagctcttaattgaacaaactctcttgattagcttaaacaatgctttatactgagagatctttcgaaaagtcagaatgccctgtagccgattaaccttctgggtaatcttgcagcaaggacatatttttaatgcttcaacaatccaatttatttccttagcacgttaatt

SEQ ID NO: 131384 - DNA, 552 bp, Homo sapiens
tcatatataatgccatatataaatgtcatggcacccattattagatatgatgccagtacactccaagaagttccataatccccattacagcatagcttcagatcaaatgaccacctgtaggagaggagaccaagtgtgaagacttagctctttgaattgtttccttagtagtgtgtagtgaatagaaggaaagattgaaagacatggtgattaaatgaccttcaagcgacctttgagcatcaacattgtaattcgaaaagttttattacatcaactttttcatgaactaaatgatcatgttcttgatactgaagttgtaatttactggatgtatgctaacattacatcaaactagcatttctcaatgccaaataatattctagagctcttaattgaacaaaytctcttgattagcttaaacaatgctttatactgagagatctttcgaaaagtcagaatgccctgtagccgattaaccttctgggtaatcttgcagcaaggacatatttttaatgcttcaacaatccaatttatttccttagcacgttaatt

SEQ ID NO: 131385 - DNA, 546 bp, Homo sapiens
aattagtatcattgccatgtcgcttcctaacctttcaaaagtcctggaatgacagtgctctcagaatgggaagaagctttagaacattccttcaaaacggaagatcaatgtgacatcattcccaactttcccatcttttccaaacaaataaaaatcctggattaactattttgaaaaataaartatgttgccaaccttgaaagcaatttgaattattcggaaacaaatgggaaggtcacaggttacagcagttataattacatcagaagctgtgcagttctagtcccaaagaaaaagctcctattccttaagtttcccatattagactttagagttacatgttaatttgtctgtacactgagtttaaaactgctttgtactagcatccatcatgcagccttatttctgccttttagagtcatactgaaagatttaacatttttacgtaaaggaattctttgcaaatataaaaatagtttttaatccaattgctacacttcttttttctttttttaaaaaattatccaacttaaacttagtttgcat

SEQ ID NO: 131386 - DNA, 488 bp, Homo sapiens
attcaggcttttggaaaagttgtggacccaagaatactaggcccgcattttcttatgtcaacattctttccaggatgatgaatggactgttctctttggccccctttccatttatccactcttcccaccaaactgaattatccttccttaaaattgagatgsagagaattttagatatttcatatttaaatcatatggttctttttaaattgagtctggtaaaatatattaaaaaataatagttcattagtctacctaaattagttatttactatttcaggcactggcatgttagtcaacaggtggaagttatagacggagacagaatgcagcttaaaataagttaaaaccttgattttcattgtctgccttccaaaatagagaatgcactctttgttagtgttcaaacagagtgctgtaaaggagtttcctgaattataaggagggttggactagtttattaaagtccctcaaactccacacctata

SEQ ID NO: 131387 - DNA, 501 bp, Homo sapiens
gaattcctatttttggtgttgatataattttttttcattaataaattaccaatgattttaatattgtattgtgcacacatgcacataaatattttgctatgtgtgaatatatatttggagaatcttatgtttggggaaagaagggagagagtaagttacatttttttcttttagttttaatttatactcagatggattataaattttttagaatgttacattgttaacagcatgagagttaaaactatagccaggaattgtgacttttccacaatcttgggcttctaaacagaagctcactaaatgcatgttgatggattgattggatagcaatcaaacctagtgaatataagcctatgttcaaggtaagayaaaagaaaattgacctactcaagttgaacaagatagaataagtcaaaataagtctgtaaaaatcttcaagttcatttattgggggtagacacggcccttaaaaatactctgtaaatgtaatggaagagt

SEQ ID NO: 131388 - DNA, 575 bp, Homo sapiens
aaacacttgccagtggccaccagagaaggtcagttagactcagagcaattacataaattaccctgaaagacttcttcaaatacctgtgaatagagcttgcagtgggagctaggagactgaagtcctttatgtttttgtttttgttccaaaattttatcactgggtcattcactaaccttgctaaacttattaagttctcttttatgcttgtggtaatgggaacccaccttagtgaaatgtttggaggcttaatcatgtttcaaaagcaccttgagcatgaatcattagttcattattagaatggtggcttgggtggtgccatcaatcatcgatgctttatcaccatcttagcctcatggttttctgcaaattgacagtgaaggtcttaaatcaaactttgtaaagacgctagcagattcttgaaggttacttattgcttatggtatggtagcactgaagtgtgcacarttatctgaagaaaataggacaattatagtgtactcattatactatctgttttcagattaaatggacaaagtgcattcaaattcataatagagatttaaaaaaaacac

SEQ ID NO: 131389 - DNA, 607 bp, Homo sapiens
tctctctatttctctttcttctgacaagagtggccacatcaaaactgactgttttctaggaagtattttcttggaagctgaagacaagcctagaggagaagactgaatggactaagcctctcactctgtgcttttgtgagcataagtatctgaagagggacagagagcttcagcatttaaagtgggcaaggatattccccttgtcttgagtgaagcctggcttttcttcagcaatacaacgtcaccgcagccctcctgcatttgttttctactgatacacaacaaattactacaagtttagcagcttaaaacaatgtacatttatcatctcactagttctgtgggtcagaagaccagacagacatagcttagctgtgtcctctgcctggggtttcacaaggcaatcaagatctcaactggggctgtatttctttctaaagctcaagtcttcttacaagctcatgtagtggcttgaagaattcagttcctcgtggttgtagaactaacacccttattttcttgctggccctcagccagtggccartccccagaaggctctcatagtctttttcacagcacagttgcttagttcttcaggaccaagcag

SEQ ID NO: 131390 - DNA, 563 bp, Homo sapiens
ggtcagaaaacaataccccaaaatgaaggcctcagaagcagcttcagaagtaaaagtttctccttgagcttctcctgcccttatgtctctgtcctattcttccccatggttagtcatggaaacaagaatccctcttccccaatgcatgtcatagagaccagaactcctttcctcaaagtcagccatagaacataaaaatattctatgcaaaaactggtcatcaaaattatctgacctacttactttgtttgactgtacatcrtaagacccctattccagagaagatcttgccctacacttagaagaaaggaatactgcacagagaggccaagaagaatctagacaggacttgctagatttccccactatgttaattagcattagatcttaccctttttgtccaattatatttctacatgatgtttatattttgctgaacctaagcataaacatagacaatttcctgtgtctttggatcttcattctgaagcctctcatgtatacacattaaataaatgtgaatgccttttcgcctattaatctgccttttgtgagttgatttt

SEQ ID NO: 131391 - DNA, 496 bp, Homo sapiens
cctggctttcacttcaatagcatttttggggaaggaaatggtttagaataatctctgatgcacaattaaaccaatgggcttaacatttttaacagtgaaaatgttttgcagattgtcagagatgaaaggaatcttagaggagcttgtctagtggttctcaaacactggatgggtagtcaactacatcaaagtggcctggagaacttgattcaagtacatatgcactggccttggccttagggattcaggctcaggtttgggcaatgaactatgtatttttaacaagctccctaggtcatgctaatgaggagaagtggttaaaacacactcaygcttcattttagaaagggagaaacattccatctcaagtagctgatgcagtaaaccttaccctccagcattttttttttatggcacagctgccattttagataattcctgtggttccttctagctctaacgttaacaaaaaatacatgctgcaaagtgaaataag

SEQ ID NO: 131392 - DNA, 550 bp, Homo sapiens
gaaaatagctataaacagaggcacagcttcatctttaaaattagtacttttaaaaccaatgtatgtctcaattgataagatttgtaatgcagaaagtcacagtattgtctcatttatcctataaactgtagaaagtgggtcttgattttaccttcaatccatttcattgaggctagcattaacctagtattgacctagaataggatttaaaaaagtaaasggcaaatttggttaactcttacatataagcacagactcgaagaaatatatttgaatcttccagcaaatattacttcaaataaatggtttttaatactaaagataacttcttccttatgtatataaattttgatatacaaatttatgataatttctcatattttattttagtaatcactatacattataaagcacacaagactttctcacctcttattttggtaataatatatattaaaaatatatttgtggaaatacttgaacacataatgaacaaatatttaatgagcatcttatttcatgctcggtattaagcaggcaccagcaaacc

SEQ ID NO: 131393 - DNA, 535 bp, Homo sapiens
aagcttgaatatatttgaataagatgcttatatamgatcagcagtatggctttcttttatatttatttaaaatgcttctgtctacaaagatagtattctataaacaaagctctcttatatttggtaaactctgaagtccacatttttcttaaatccaaacatatttctctgaggtctgataaaaagtttgttggattaatttaataacactaaatcaacaatttcggaaaaccagacttctatgctcaaacgtgcattttttcttgacatggccatgaattctatggagtttcaggttttaaaaggccaaagacgaacaataaaagtatcttaatttgtattgtggtcctttatgactaaaagaccacattatcattgtaaggaaaaggaataatagggaaaagaaaagaaaagaaaagaagagaacatagacgctaatttgaaagtttctgtaaaggataaaatattgacagatgtgtttatgaagcagaaatacccttcatatgcagaaggcggtctttctgtcagtagagaa

SEQ ID NO: 131394 - DNA, 535 bp, Homo sapiens
aagcttgaatatatttgaataagatgcttatatacgatcagcagtatggctttcttttatatttatttaaaatgcttctgtctacaaagatagtattctataaacaaagctctcttatatttggtaaactctgaagtccayatttttcttaaatccaaacatatttctctgaggtctgataaaaagtttgttggattaatttaataacactaaatcaacaatttcggaaaaccagacttctatgctcaaacgtgcattttttcttgacatggccatgaattctatggagtttcaggttttaaaaggccaaagacgaacaataaaagtatcttaatttgtattgtggtcctttatgactaaaagaccacattatcattgtaaggaaaaggaataatagggaaaagaaaagaaaagaaaagaagagaacatagacgctaatttgaaagtttctgtaaaggataaaatattgacagatgtgtttatgaagcagaaatacccttcatatgcagaaggcggtctttctgtcagtagagaa

SEQ ID NO: 131395 - DNA, 535 bp, Homo sapiens
aagcttgaatatatttgaataagatgcttatatacgatcagcagtatggctttcttttatatttatttaaaatgcttctgtctacaaagatagtattctataaacaaagctctcttatatttggtaaactctgaagtccacatttttcttaaatccaaacatatttctctgaggtctgataaaamgtttgttggattaatttaataacactaaatcaacaatttcggaaaaccagacttctatgctcaaacgtgcattttttcttgacatggccatgaattctatggagtttcaggttttaaaaggccaaagacgaacaataaaagtatcttaatttgtattgtggtcctttatgactaaaagaccacattatcattgtaaggaaaaggaataatagggaaaagaaaagaaaagaaaagaagagaacatagacgctaatttgaaagtttctgtaaaggataaaatattgacagatgtgtttatgaagcagaaatacccttcatatgcagaaggcggtctttctgtcagtagagaa

SEQ ID NO: 131396 - DNA, 428 bp, Homo sapiens
gaattcttttctgcagaagaggagcctgggcaggtatagatgaagaggaggtattacaggtagaagaaaaagtaaacgcaaattagagaaggataattctggggtgcacattaaggacaacamaaaatttgctagagagcatgggatttgtgaaaggaaattgtgacaatagtgggaggatccatcagtgtttctcaaaaagtgctctacagccattgaaggtcccaagcatttatcaggtaagtcagtgaatggtccataggtagtttggtggcttcagaagaaaactcagtgacaatattttattcatatactgtactggacaatctaatgtgcctcctcacattctcttggcctaatctgtctcctagacgctcagtcaccactctcagtgacggttctatgtgataccacttggaatatctagt

SEQ ID NO: 131397 - DNA, 247 bp, Homo sapiens
ggttaacctaagtgtctccaaaagatgtcaaatattccaggcttaagacacgcataccccaaagattaaataagaacaacaagaaggatgggcgcagtggctcactcctgcaatcccagcactttgggaggtcaaagcgggtggatcaactgaggtcaggaactcgagaccagcctggccaacatgrtgaaactccatctctactaaaaatacaaaaagtcagctaggcgtggtggtgggcacctgt

SEQ ID NO: 131398 - DNA, 457 bp, Homo sapiens
ttggcttcttatcactactacctgtagaacttaaaaaaaaatttctatctccaccatagccttctgaataaaaagcttcacaggtgaggctttgtaatctgtatgttttataactttactaggtgattctaatgaaactaacctttcattgtgcagatagatttttgaaataatcagttcaaaattttagctgttacataaacttacatgccttcagtggccagccacttaacagaagtgtgagaggcagccctgtgtaaaacccaagaaagtggtaaaactgagaatgatgagagcctggattytaacacaatcaaattaatattttcaaaactttgcagttatcagagttttgaaacagagacaatagtataatggttgcccattcatgcagatcacagatagaactattaacaatattttgccatacttgttacatcaatctcttttttcttct

SEQ ID NO: 131399 - DNA, 543 bp, Homo sapiens
ctttctatttggggattttaacgtgttaatctcttctactgatttacgaacactctttaaacaagttaggcattttgtttgattagtacataaagtcttatagttaaattcatttgaattttaaacaaaattaaatgttttaatgtaaagaggaagtataaagcttggagactagcataatcaaaagactggaccggcacctggggttctgatccactgggtgatattgggcctgattattcctgttgtgggggactgtcctgtacatcatggtatgtctagcagcatcccttgcctctatccactagataacaggagacccccmccctgcccagttgtgacaaccaaaactgtctcagacattgccagatattccctgtgctaaagatactatataggacagtccaccctgttctactgatgtccatcccagttaactgcaggaagggccttggtaacatgatctccagcatgccagggattgtcactatgtacttactatcagtcatggggtcctagtttcagtctggccagcaagggacc

SEQ ID NO: 131400 - DNA, 588 bp, Homo sapiens
tgcaactctgtcccctgggtgtgtgtctctatttaagttactggtctaaaagaaatgagaggtggtagaagtgtgccttgtggagattcagagtccccttgcaaggtaactttcttgggtgaagtcagtagaggatctttaaaagccaagggaagtttgaatccttaggcaggtaaggcttgggtgcttctgtagcagtggcgctcagtaggatttgggagttggcgagtgatttgagtgtaatagtatcctgagaatggggagggygagaatgaattggagttttatgtagatccctgatgtagatattaagctaacttttgtgattattttgtaatatgaaggattaaaatctgggtttggctttatgatacactgaccccatagctatgagagatgagagatgagaaattagggaagtctcagaagctccaattctgacaatgcctcgcagtgacaatgaaggctgaggaggaggagcttcactctgtaaaatgcttcagaagttgccaggctgccctgtttgggggcatcaaataccatcaaatccaggttacaggaaaacaaagtcactatgtatttcaagca

SEQ ID NO: 131401 - DNA, 428 bp, Homo sapiens
tagaaaaactggtcaatgaaaatggaacttctcagctggaaaagaatgctagaatcagcatggaggtcaagagggatagagagagaatgttacaccttgtagaaaaatgkaattagctgattttggcaaggaagaatttgtgcataagcagaaaactctccattcacttcagccagtggtatcttacctacccaggggacatacagtgctttcagagactcatcctatttcctggaaggggaagaacacaatataaaacaagcaagtcatcaatatggcttatggtaatagccccatggctcaccattgacgacggcggttaatgccaaaccctgtagctgaaggcatcagagtggggatgggggggtggggatgggacacaggagcctccagcatcatgcttatcttttagtcatgcacatttcaga

SEQ ID NO: 131402 - DNA, 425 bp, Homo sapiens
ggtcaatgaaaatggaacttctcagctggaaaagaatgctagaatcagcatggaggtcaagagggatagagagagaatgttacaccttgtagaaaaatggaattagctgattttggcaaggaagaatttgtgcataagcagaaaactmtccattcacttcagccagtggtatcttacctacccaggggacatacagtgctttcagagactcatcctatttcctggaaggggaagaacacaatataaaacaagcaagtcatcaatatggcttatggtaatagccccatggctcaccattgacgacggcggttaatgccaaaccctgtagctgaaggcatcagagtggggatgggggggtggggatgggacacaggagcctccagcatcatgcttatcttttagtcatgcacatttcagattccact

SEQ ID NO: 131403 - DNA, 421 bp, Homo sapiens
gtcaatgaaaatggaacttctcagctggaaaagaatgctagaatcagcatggaggtcaagagggatagagagagaatgttacaccttgtagaaaaatggaattagctgattttggcaaggaagaatttgtgcataagcagaaaactctccattcacttcagccagtggtatcttacctacccaggggacatacagtgctttcagagactcatcctatttcctggaaggggaagaacacaatataaaacaagcaagtcatcaatatggcttatggtaatagccccatggctcaccattgacgacggcgrttaatgccaaaccctgtagctgaaggcatcagagtggggatgggggggtggggatgggacacaggagcctccagcatcatgcttatcttttagtcatgcacatttcagattcc

SEQ ID NO: 131404 - DNA, 635 bp, Homo sapiens
aactcatcgtggaactcacttttcttaaattttggacttgtacaataaggacttcaactgacattcctcagactgaggtagggcaaaaagttaaaacagtctttttgtttaaaagggacttgtgtgtataatgccacccagcacaaggtatgcatcccaggaagtgaccaatccccattggaaaacaggagagtatgtaactctaggagtcaatggaactggactggcaggaagacctgggtaatgtagatgagagtgagaactcccaatagtgagtgaggttctcaaaggggggaaggaggcgagaagccatttctcttaccgtctgtctctgaagaggaggaagaagtaaaatttgaaaaacaggaatgaagtcagtggcaagaccagccggtgccactgatgacccaccttgaggttaaaaggttaamgccccccccaaactctaaccacatgtgatctcaatccatcatgaccctttcacgtggaacttcttagagttgtaagcccttaaaaagggccaggaactctgtctttggggagctcagctcttaagacgctagtctgctgacactcccgactgaattaaaaaaaccctcttccttctttaatccggtgtctgaggagttttgtct

SEQ ID NO: 131405 - DNA, 635 bp, Homo sapiens
aactcatcgtggaactcacttttcttaaattttggacttgtacaataaggacttcaactgacattcctcagactgaggtagggcaaaaagttaaaacagtctttttgtttaaaagggacttgtgtgtataatgccacccagcacaaggtatgcatcccaggaagtgaccaatccccattggaaaacaggagagtatgtaactctaggagtcaatggaactggactggcaggaagacctgggtaatgtagatgagagtgagaactcccaatagtgagtgaggttctcaaaggggggaaggaggcgagaagccatttctcttaccgtctgtctctgaagaggaggaagaagtaaaatttgaaaaacaggaatgaagtcagtggcaagaccagccggtgccactgatgacccaccttgaggttaaaaggttaacgccccccccaaactctaaccacatgtgatctcaatccatcatgaccctttcacrtggaacttcttagagttgtaagcccttaaaaagggccaggaactctgtctttggggagctcagctcttaagacgctagtctgctgacactcccgactgaattaaaaaaaccctcttccttctttaatccggtgtctgaggagttttgtct

SEQ ID NO: 131406 - DNA, 432 bp, Homo sapiens
ggaattctaagtacgctaggcacaatgtgttaatattttattcattaccttttgctgttacatgattgctgaccatttggtctgcctgcaactggtttagaaagtaggtatgagaaacttagtgctaagctgagtaaatgccaaataaacagggacaagctggtcattctacaagggcaggtacttccacttattatggagggacccaattctaatctakaaatacatcctagcaatgtgcctatttctagtgctatctctgtatgttagtgaggggtggagaggagctaggtttcagaagcacattgcccaacagtcttcgataatctcataccagcctgagatttacagattgagtggtggagccactgaaactcatgtagcctggccctggagccctcagtcctgaccactgtgacagatcaatctttc

SEQ ID NO: 131407 - DNA, 557 bp, Homo sapiens
tgattcttaagggccctaggattttcagaatgcaaaatgagacttggcttcagctttaaagtcgctggctgcattagcccctaataaaagagtcatcttgtttttggaagctttgaacccaggtattgactttctctctctagctattaaagtcctatatggtatcttcttccaatagaaggctgttttcatcttcactgaaaatctgttattcagtgaagccatcttcatcaatgatcttaactagatcttctggattacttgctgcagcttctacatcagcatgtgctgcttcaccttgcacttttatgttatggtaacaatttcttttcttaaacctcatgaaccaacgtctgctagctttaattttttttctgccacttcctcccctccatcagtctttacagaattaaagagagttagggcctttctctggattaggctttggtttaagggaatgttgtggctggtttgatcttctatccagatcactaaaactctccatrtcagcaataaggctgttttgctttcttatcatttgtgcactcactagagca

SEQ ID NO: 131408 - DNA, 578 bp, Homo sapiens
tttgttcccacccaaagctcgtgttgaattgtaattcccagtgttggaggtggggcctgatgggaggtgtwtggatcatgagggtgaatccctcgtgaacagcttgggccatccccttggtgataagtgagctcccactctaagttcacacaagatctggctgtttaaaagtgtttggtgcctcccctgactctttcttgcccctgctttggtcatgtgatgttcctgttccctcttcaccttctgtgaggattgtcagcttcctgaggcctccctagaggccaagcagatgccaacaccatgctccctgtacagcctgcagaaccatgagccaattaaacctattttctttataaattacacagccttaggtatctctttatgcaatgcaagaatggcctaatacagaaaattggcactaagaagtagggtattgctataaaggtacctgaaaatgtggaagcagctttggaattgggtaacagacagaggttgaaagaatttagagggcttagaagacaggaagatgagcaaaagttcggaacttctcggagactggttaaatagttgtgaccaaa

SEQ ID NO: 131409 - DNA, 578 bp, Homo sapiens
tttgttcccacccaaagctcgtgttgaattgtaattcccagtgttggaggtggggcctgatgggaggtgtatggatcatgagggtgaatccctcgtgaacagcttgggccatccccttggtgataagtgagctcccactctaagttcacacaagatctggctgtttaaaagtgtttggygcctcccctgactctttcttgcccctgctttggtcatgtgatgttcctgttccctcttcaccttctgtgaggattgtcagcttcctgaggcctccctagaggccaagcagatgccaacaccatgctccctgtacagcctgcagaaccatgagccaattaaacctattttctttataaattacacagccttaggtatctctttatgcaatgcaagaatggcctaatacagaaaattggcactaagaagtagggtattgctataaaggtacctgaaaatgtggaagcagctttggaattgggtaacagacagaggttgaaagaatttagagggcttagaagacaggaagatgagcaaaagttcggaacttctcggagactggttaaatagttgtgaccaaa

SEQ ID NO: 131410 - DNA, 578 bp, Homo sapiens
tttgttcccacccaaagctcgtgttgaattgtaattcccagtgttggaggtggggcctgatgggaggtgtatggatcatgagggtgaatccctcgtgaacagcttgggccatccccttggtgataagtgagctcccactctaagttcacacaagatctggctgtttaaaagtgtttggtgcctcccctgactctttcttgcccctgctttggtcatgtgatgttcctgttccctcttcaccttytgtgaggattgtcagcttcctgaggcctccctagaggccaagcagatgccaacaccatgctccctgtacagcctgcagaaccatgagccaattaaacctattttctttataaattacacagccttaggtatctctttatgcaatgcaagaatggcctaatacagaaaattggcactaagaagtagggtattgctataaaggtacctgaaaatgtggaagcagctttggaattgggtaacagacagaggttgaaagaatttagagggcttagaagacaggaagatgagcaaaagttcggaacttctcggagactggttaaatagttgtgaccaaa

SEQ ID NO: 131411 - DNA, 609 bp, Homo sapiens
ccatttcacgaaagaaaggtgtgtggcacgtttccagaatcataggagtgcccttttagaacactggaaactaatctcaatttttcaatgccaaagtcaaagatgttggcagcggtaccatgctgtgctcagttgaaatttcacatatgaaatttctcaccaaatcagaaacaaggaagaatcatttggagaatccatacaaattaaagaaactcccctaatctctgaattcttggaagtcattaaaaatattttattttacattaaataaaagttactgtcaaaatttcacccagttttcttcacacatcttcagggtaggataatcagttattaatatggttcactggggaagataagaaaaataatgaagtcacrtgaaggcaactgacatggctgaggagatgaaatttacaaaacgaggtgtgcagccattttgtcacaaaactttatgagacaacctatgcttcagattaaaacagaggctttctcttctttttctttaaaggaactagttctgttcctcttacaacagcaaaaaaagaacaaaaaaattatatttttattaattctaaataaaacttgaatttcaacaacaaaaaatttaac

SEQ ID NO: 131412 - DNA, 532 bp, Homo sapiens
gcatctagcctaattgtgtattttaaagtgtttctgtttcatgcttyaatggtgatgaattttaaggacagtttctcatgacatagacaaactgttttgtttcagtagttaggaatagcaagtcctatagaatctctaaaaaacgtggtacaatccctttattttaataggtggcaaaagtaggtccagagatgtaatgtgactgacacaaactggtgtaacttttttaaaaaaatgcagtattgagacaaataacttgttttgaactgaaaaagtgtggacatgtatttttgagataaagtacatatataaatgtcatagactttttcatagacagaagcactagtaatcatcattacttaaattgcatataagtaacctgggccccagtgatgactggctccaagtcgcccagatggttaattccagagatttacagggaccaccaagttttctaacttcccatatataactgttctattatatgtaaatttttattgattctggacaactaacagccactatgtaaact

SEQ ID NO: 131413 - DNA, 625 bp, Homo sapiens
atatgccttgtaccaaaatgtttttgtcttgctttagttcaagtcctcataatctggaaagtatggtaagtagtggtttgggtcatgggtactggggtcagatggacttacatgtgaatcttgaatttactaactactatctacatgagcttggataaattacctcatctccctaaaccggaaccgtgactgataagtgaaaatgatgcttcacttaccaagatattataaagtttaattgggataatgcataaagaaaggtagcattaagtttgcatattgcagacagcaaataatagttactacacccacaactaataatactaataataaacaatgtcatctgagctrtagttatgatttccttaactgtttgtgttttatattttttgtctttaggctttcctgattctatttcttgttactgtcaaaatgatttttctaaaagtccaaataatttgcttgcttaaatactttgaatattttctgaccaattctatttttgatgctcaacttttttcttcccataaatatataaatattgcttggaatacacacacacatgcacatatacacacatcataaagataaaaatatgttggcaattataactgggttgctcaaa

SEQ ID NO: 131414 - DNA, 475 bp, Homo sapiens
aaatcttccatcattctatcttattttttgatatttgtgccttaatctataaatattcactctaggcagtaaatttacaagcaaggttcaagcttggtaattaatatttgtgcctctctatgtaagttatgtctttaaaatgaggcaattgctttaagcatttaagacattccrcgtatattgcagagtaattactttccaaagatatttccaactgatattttgttacatctaaatatacatttacagtactcagtagaccagaatagctctaatttatatatttggtccactgggttagaaaaagagacattttaaaagtatgtttttaatcagtgtgtttatcccaaagatactgttggctcctccagaatcacacgattttataaaaaataataaatgtggtgtgttctctgagctgatttagactttaatgagagatgacatctcagcggagcatgagcatggctaactt

SEQ ID NO: 131415 - DNA, 634 bp, Homo sapiens
taggtccttaccccgctttcagagagaatctgcaagcagcaaaaccccaatagcaaggagcacgtttaacgctcacatctttgcttctcaaaatagctcaccactaagaagaaccaaggctctttgaaaaaatggtttgttccagggaaggggcagggaaaaaataagaatagcctagaacatcttgtaccagaaagtaaggaatcacttaaagaatcatgagatgcatcaaaaaggacataaaaggcagtctgaagaagctcctactggccaagtctgggacattttaagcatgaaaatcgtaaggtcgtaatgggtaatagctttctgttaatttggtggaactgatttttaaaaagtgaacaaataaatggggacaagagaaactcttctttacagtaaattttaacttgtaaatrtagaagaaatgatggaactgaacattttcatttggcaatcacagtactagttaattctgattacagaattgagacatgttaatattagcgggtgaaagagaaacaacaggatatttacatagtctcaaagtatctcatccgaaaacatttattacttttatagactttattaattttaaagaaaaacaggacaagtttatagtggagaaagctgg

SEQ ID NO: 131416 - DNA, 516 bp, Homo sapiens
tttatagtactacaatactggccaacaatatgtatttcacattgttatgtaactataactgcatttatagttctcagaaaaattttgttttccttttgtatgtcacacatttcttatcagggttactttttcatatttagtggtgtttttggggttttgtttttaaattttgtaaatgggtgcttcttcccccctgcttccttgtattttctgatttgtttttgcaagtatgcagaaaagttttttattctaattgttttataatttcacctttttattcttaactacttaatactggaattcagggatatttgtattgtagggcagttttctaaayatgggactttatcttacttgaaatggatctttttcaaaatcaccatgtagcaataaaaatgggtaatataaatatggaaaaagtgaagcaacattatgaatggatataatctagagagaaaggggagtttttttaggaactgaagactgttcaaatctcattgttactcattgagatct

SEQ ID NO: 131417 - DNA, 601 bp, Homo sapiens
gtgcatactactggtggtcatgagataattttacatggcacacaaaatatttttcttctaacatatctactttattgtaaacattaaaattgtgtattaaaaaataacatgtcatgcccacattttaattgatattttgttaagattaaaattgaagtagatatttaaggctaaaaagatatcaatttgaagaaaaatatttgatagtcattctacaagtattaagaagatggtcagcactggcttctttgagaaggtgagatttgagcagatttggagaagttgagagagaacaaagtaggtatctgggaagagtagtccacgtagagggaagaattagggcagaagtcccaggcaggaatgcctgtgtgtggaaggaacaataaggtggccagagtagcagagaaaagaaagaaagaggccagagagagtatagggaaccagatcatgtagggccttctaagtggatgaccatacmactcatcaaacaatctgcaacacttattagaataacataggacacatttaataattacaccaaaacagcatgcataaaccagggctgtccctgaaaactggaacacagggtcactctatctat

SEQ ID NO: 131418 - DNA, 375 bp, Homo sapiens
gaacttccatagctaaacaataaaaagacaaattacccaattatgaaaatggcaaaggatatgaatagacattkctccaaagaagatacatgagtgatgtgcaggagaagcactcctacttccacatgcctgcatatggactctataggtgactataaaaccctcaattacattataacttcccatcccaaatctccatctgactttctccctctggatgtcccacatacctaaacttaacacttcaagcccaacccatcaaaaatggaactcattattttcttgtctctctctccatgtctccaacatatagacggtggtcaagttagaaaggttgccatcatttgccatttttctctttcccttcaatatctt

SEQ ID NO: 131419 - DNA, 375 bp, Homo sapiens
gaacttccatagctaaacaataaaaagacaaattacccaattatgaaaatggcaaaggatatgaatagacatttytccaaagaagatacatgagtgatgtgcaggagaagcactcctacttccacatgcctgcatatggactctataggtgactataaaaccctcaattacattataacttcccatcccaaatctccatctgactttctccctctggatgtcccacatacctaaacttaacacttcaagcccaacccatcaaaaatggaactcattattttcttgtctctctctccatgtctccaacatatagacggtggtcaagttagaaaggttgccatcatttgccatttttctctttcccttcaatatctt

SEQ ID NO: 131420 - DNA, 592 bp, Homo sapiens
cttgcctacttttacaacctaagtaaatttgcattaggcaaatttttccagttcaaaaatgaagactttcaaatcccactgaaatgaataaataagcacaaaatgggtgaagtacatgagagtactgaacagagagaagacagcagagattgtgactagttctagaagatggaagggggatggaattatatcaacagatatacatacatatgtatatatatatatatatatatatatatayacacacacacacacatacatacacaaaagattatctatatggaaagatagagagagacagagtatgagtgtgtgtgtgtgaaatacaatgatccataacagaacagtaattttcttgaggccccaagaaaaatgccttcaataataaagtgacttactgtaacaaacaatataatttagaaattataagacctcagggaaagtgaagccctgttatttttctttcaacaatggaaaaggaagttaatcagaaatccctagaaaaccaaaggctatacaaagaaagtcagaccaagtatgaagcaaattgaaatatggcatggatttggacaatatatccacgggaatgcaa

SEQ ID NO: 131421 - DNA, 540 bp, Homo sapiens
caaaggaacttgaggaaatctgctgacagcctttacatagccctcaaactgatcatactaaataatatagrggacttttgtttgtttgtcttttaaggttctaagcagcaaagtctcccctcccctgatagcagaatgctccaagttgaggctttcattgggacattagtgtggagtaggagttttccccaactgagggttgactcacagatgggtcccagttttgcacctaagactcctgacaagtgtttcgccttggaggctgtattagtctgttctcacactgctgtaaagatgctacctgagatcgggtaatttataaacaaaagaggtttagttgattcacatttaaaagttaccaaaacaaacaatatattggaatagaaaataagatataaaatgtcagaggacaaaaataaaaatgttttaatttgagattctctttcacactgcgtggctggagaagcctcaggaaacttacaatcaggagaaggggaaacaaggcatgtcttacatggaggcaggagagagaccaagagc

SEQ ID NO: 131422 - DNA, 497 bp, Homo sapiens
tgctttgggaaacttgatgctcaaaaataataataacttacatatatggagagaaatggtctcatgcatttattgaataatagtttttaaatgatccctttgcagcatgtactttgctggggataacacagtggcaaagacagtcttcaatgtcaccaattaacgcacaggcaggaaattgaggaaaagcaaagggcaaaatctgcatgtcagctgagttggctgcattttcaaaagctttccagaaagtttctccaaggacatgtgcttacatctcattgtccagctatgaggaargctgtaaatcataggctatttgcaggcagattgccaccctgaagaaaatccattcttgttaataaggtggaggagtggatagatattgagtaagcagctaggcatgtcttccacaattacctttggtaattgtagatgtttccatctcagttgtaccaaaaaatctagaatctcatgcagtgccaaggcataaagtcctt

SEQ ID NO: 131423 - DNA, 521 bp, Homo sapiens
tctgttctcaactacttccttgtccccataactgatggtttatttctaattgtagggaaatccatttgccttcatgtttcaacctagtcatttgcctacatgtaaaaatcctctccaccctctggaagctggggaattcatggacaatttttcctttctaccctcrtgcatctctccctaaagcaacatttacaggaccaatgacctgcttgaataaaaggatggataaaacatatatttaatattataaagtgttatcctatcacataagagattgtgttttcaatacaatgttgtaagatttctgatatgggtatgcagggcatgctgtaataagccccaggattctgttccagtgggtctcagggatgattttctgcaaaaggtgatgtctaaactgaaatattggtagaatctatccagttgaaaataaaagagggaggaaaggtaaaagagaagaagagagggagagagagaataaaaggcattccatagaaaggaaatagcatatgtagggacaa

SEQ ID NO: 131424 - DNA, 534 bp, Homo sapiens
ccttcagacatttcataataggtgtccaatatatactagagatgtggatatggagttcagatgatatctctggtatagaaatagagcttcacagggggtcctcaaaatacaggcaaactttgaaacaatgagagtgaatgagatattcattttgtaattcagctcttggttatataaaatatcctaccagtattctttgtagctacttttgtttctaatagaaatctccctttttcatcagtgagtcaatggaaaaattatctttgtagtcactttccctacayttcactctctgaatatctttctcatcaggaatgttgcttcttctttaaggaatgtagttccttctttatttcatctgatatatatcatcttatatatcatgttttggttctttaggtacttcaaggactttgctgattactaattaagaacttgctaaaaggaaaacatccttatcttatactcatttctgtattacatcaatgcccctgaaaaaatttgtactcaccaagagcttttccaaacacctcc

SEQ ID NO: 131425 - DNA, 520 bp, Homo sapiens
agataatgcttttttaccttataaaatacacaattttcatttctggatggtcttataattttctttggtgccataactattgttggcttactgaatagaaacttcatatccctctgaatcctctttcactctactatggattattttcaagggcattgtaactcaggctttagagggcaagcaggagaattgactgatagtcccaagttttacttctgtggtcgattgcagctttttgaacttgaagatacactactctggattctcttaagtgcttttgagaagtaatatattttataacacaggaagaccaacttacatctgcattactttactctatggaagagtggatcwaataatattaattcattgattttgttttcaacaaatatttgccatgttcctatcatctaccaggtgttgttctaggaaatggggatacagagataattacaacaatgtccatgtttttacagtgctctccctttttactactgaattaatatgttattagtgttac

SEQ ID NO: 131426 - DNA, 529 bp, Homo sapiens
ggctgtctctggggcaaggatacttttcttatattttagttcaaatagtgactcattactcaataaaccgaatacttcctgcatgtctgttgtaattatctgaattatgtggaataaagagtttctttatatyattcagaacactcaatttgaagaaactatgttaaagaagaattaatgtagttttacagaggaaagagacataagactccataaaaaaagagatgacaaaatacaaaggtccattttttaaaatctcatagaaatattttcacaaccacctgaaaatatttaaatgcaacttagttctttattaatagaaagtttacagttactttggagcatcataatcttttgctgttagaggaatgacttaactgtgagctctaatccctatagcaggaagtatttactctttattattatagatttatgcctgactgcatgaagcaacttgtgcttctagaaccgatgattttccacaatactcttgtctcttcagccaagccttacttaaagattaggtcaa

SEQ ID NO: 131427 - DNA, 563 bp, Homo sapiens
tgtttctaactgtccagggagaaaaagttccgtttgtgaataatacatttcatataccttcttcctgtctttgtctgtcttctctctctctctctctctctctgtgtatacaatcacctatttcaatctttgtgttgcttatttgcaacaaaaaaagagaatgcatgagaaagatttacaggccacagtactcttataaagcatagatggaaagcaattgcttctattgaaatcatggccaattcactcaatttctctgatatgcatatgtacataaataagctaaagtgcttytttaatgcaggcataccttggagatactgtgaatctggatccaaaacacagcaataaagtgagtatcacaataaagcaagtcacatgattttttttttggtttccagtacatataagagttatggttacactatactgtagtttgttgcgtgcaataaaattttgtctaaacaacgtataaaccttaattaaaaatattttattaataaaaatactaacaatcacatgagccttcagtgactcctaatctttctgtaagtgtggggtcc

SEQ ID NO: 131428 - DNA, 563 bp, Homo sapiens
tgtttctaactgtccagggagaaaaagttccgtttgtgaataatacatttcatataccttcttcctgtctttgtctgtcttctctctctctctctctctctctgtgtatacaatcacctatttcaatctttgtgttgcttatttgcaacaaaaaaagagaatgcatgagaaagatttacaggccacagtactcttataaagcatagatggaaagcaattgcttctattgaaatcatggccaattcactcaatttctctgatatgcatatgtacataaataagctaaagtgcttctttaatgcaggcataccttggagatactgtgaatctggatccaaaacacagcaataaagtgagtatcacaataaagcaagtcacatgattttttttttggtttccagtacatataagagttatggttacactatactgtagtttgttgcgtgcaataaaattttgtctaaacaaygtataaaccttaattaaaaatattttattaataaaaatactaacaatcacatgagccttcagtgactcctaatctttctgtaagtgtggggtcc

SEQ ID NO: 131429 - DNA, 630 bp, Homo sapiens
ctaaaagttttttttttaatcatcccaaagcgaaactctgcaaaaaatattttttaaaggatgacattctgctcatagctgccataagtcatggtgcacacacctcaaatgaatcatgattagtactcatgtatgtatttttagaaaggaaakgaattggcttaaaataattattggaaaaatatgtgacaactaatcactaaacctgctcggtctatacagtagttttgattaattttatttaattaatcaggcattttgtataatataaaatttcagtgacaaagtaagatttatgacctagataatcaacctaacgcttgaaaaaatagctgaagcaatgtaaaataaacaaaggctaaaaatgtaaaacctgaacataaattcacaaggccagataaatcaaggcatgattaaactgtagaattctaaatattatttttttttaaattttctaaattaataattacattattaaacaaatttaggtgtgattttgaaatagccttaggtaaaggcccagaataaaagtttagggttcatatataatgctgtctcagccactgatcaaaattgccctgtctttcaacaagcaaaagtaaaatatgaattatagatttactagtttta

SEQ ID NO: 131430 - DNA, 344 bp, Homo sapiens
cctaaaccatatgtctctttttacacctccaagaccatattctctgcatgataaattgagtcatggacctaaacaaggggaaacaaaacagggcctcagttattagaatagaccagatgattatcagaaayaggggaaagtaccaaattcctgaaacttgactatgagatcagaaaatgatctgcaacattgctgacctttgcagagagatgggactattactttcaagctttggcttgtataagaaatacactctcgtgataatggcattaatccattaatgagggcagaggcctcatggctcaatcatctcattaggccacacctcccaagactgttgcatt

SEQ ID NO: 131431 - DNA, 686 bp, Homo sapiens
tcaaaacaggaacaaaatcaagtatgagagaattgggtatgtccaaggaaaaacaagaatttcaggtgatttatcttctgatctgtggacatttggagtgaggaaaatgagtgtagtcacagactgcatcaggaattcagagggtctggagtattatgttaaggagtgtgcactgaatttagatgacaaatagaacaacatagaataaaaatgaggtttgttttgtttattggtttgttgcaaagaaaataaagcccagcaagtttaaatgatrtactaaattcatctagcaaattagtagcagaaaagttaaaaatttgctagtgagttttattatgatgatacctgtataaatctattttcactctgctaataaagacatatgcaagactgggtaatttataaagaaatagaggtttaatggactcacagttccacatggctagggaggccttacaatcatggcagaagatgaaggaggagcaaaggcatgtcttacgtggtggcaggcaagagagaagtgctgaggaaaaggtagaaaagctccttataaaaccatcagatctcacaggatctcactcactatcatgacaactgcagcatgggagtaaccgtccccatgattcaattatgtcccactggatcccttccaggacacatggggattataggaactgcaatttaag

SEQ ID NO: 131432 - DNA, 686 bp, Homo sapiens
tcaaaacaggaacaaaatcaagtatgagagaattgggtatgtccaaggaaaaacaagaatttcaggtgatttatcttctgatctgtggacatttggagtgaggaaaatgagtgtagtcacagactgcatcaggaattcagagggtctggagtattatgttaaggagtgtgcactgaatttagatgacaaatagaacaacatagaataaaaatgaggtttgttttgtttattggtttgttgcaaagaaaataaagcccagcaagtttaaatgatatactaaattcatctagcaaattagtagcagaaaagttaaaaatttgctagtgagttttattatgatgatacctgtataaatctattttcacyctgctaataaagacatatgcaagactgggtaatttataaagaaatagaggtttaatggactcacagttccacatggctagggaggccttacaatcatggcagaagatgaaggaggagcaaaggcatgtcttacgtggtggcaggcaagagagaagtgctgaggaaaaggtagaaaagctccttataaaaccatcagatctcacaggatctcactcactatcatgacaactgcagcatgggagtaaccgtccccatgattcaattatgtcccactggatcccttccaggacacatggggattataggaactgcaatttaag

SEQ ID NO: 131433 - DNA, 686 bp, Homo sapiens
tcaaaacaggaacaaaatcaagtatgagagaattgggtatgtccaaggaaaaacaagaatttcaggtgatttatcttctgatctgtggacatttggagtgaggaaaatgagtgtagtcacagactgcatcaggaattcagagggtctggagtattatgttaaggagtgtgcactgaatttagatgacaaatagaacaacatagaataaaaatgaggtttgttttgtttattggtttgttgcaaagaaaataaagcccagcaagtttaaatgatatactaaattcatctagcaaattagtagcagaaaagttaaaaatttgctagtgagttttattatgatgatacctgtataaatctattttcactctgctaataaagacataygcaagactgggtaatttataaagaaatagaggtttaatggactcacagttccacatggctagggaggccttacaatcatggcagaagatgaaggaggagcaaaggcatgtcttacgtggtggcaggcaagagagaagtgctgaggaaaaggtagaaaagctccttataaaaccatcagatctcacaggatctcactcactatcatgacaactgcagcatgggagtaaccgtccccatgattcaattatgtcccactggatcccttccaggacacatggggattataggaactgcaatttaag

SEQ ID NO: 131434 - DNA, 619 bp, Homo sapiens
atatgctagaaagttgactatctatgcatttgaagaaggcatctactgtttacatttattcttctaagaaaattttcttgatttatgctaattttgaattatgcctggcttctaggcacacagccctgcyatgtgatgctcctacatccatccatacatacaatctttctaaaattttttgaatgttttctgccagccagaaagatcaccatgtcttgagtctgcaatttatgtgtaaatataacactttataactgcaaatatggaaccatacactgaccaagattacagaatgtttaaaaatattgtgaaactgaaatgaggtaagactttattctcaaagcagtgacattcttttatgcacctcctaccaatacttacatcacgctgatcctgtctgcccggtcaagtatctttttctttgcactgaaaggagtcacagtggaataaactactaggcagaatgaatcagcatccagcttgcagaccattgtgaatatttatagaacatttgagtattattagctgagtctttttctcaaagtactgttttgtttagtatgtgagcagaataatatttggttgtgttatatcatttgagaaaaactatgtgagtgtg

SEQ ID NO: 131435 - DNA, 619 bp, Homo sapiens
atatgctagaaagttgactatctatgcatttgaagaaggcatctactgtttacatttattcttctaagaaaattttcttgatttatgctaattttgaattatgcctggcttctaggcacacagccctgctatgtgatgctcctacatccatccatacakacaatctttctaaaattttttgaatgttttctgccagccagaaagatcaccatgtcttgagtctgcaatttatgtgtaaatataacactttataactgcaaatatggaaccatacactgaccaagattacagaatgtttaaaaatattgtgaaactgaaatgaggtaagactttattctcaaagcagtgacattcttttatgcacctcctaccaatacttacatcacgctgatcctgtctgcccggtcaagtatctttttctttgcactgaaaggagtcacagtggaataaactactaggcagaatgaatcagcatccagcttgcagaccattgtgaatatttatagaacatttgagtattattagctgagtctttttctcaaagtactgttttgtttagtatgtgagcagaataatatttggttgtgttatatcatttgagaaaaactatgtgagtgtg

SEQ ID NO: 131436 - DNA, 619 bp, Homo sapiens
atatgctagaaagttgactatctatgcatttgaagaaggcatctactgtttacatttattcttctaagaaaattttcttgatttatgctaattttgaattatgcctggcttctaggcacacagccctgctatgtgatgctcctacatccatccatacatacaatctttctaaaattttktgaatgttttctgccagccagaaagatcaccatgtcttgagtctgcaatttatgtgtaaatataacactttataactgcaaatatggaaccatacactgaccaagattacagaatgtttaaaaatattgtgaaactgaaatgaggtaagactttattctcaaagcagtgacattcttttatgcacctcctaccaatacttacatcacgctgatcctgtctgcccggtcaagtatctttttctttgcactgaaaggagtcacagtggaataaactactaggcagaatgaatcagcatccagcttgcagaccattgtgaatatttatagaacatttgagtattattagctgagtctttttctcaaagtactgttttgtttagtatgtgagcagaataatatttggttgtgttatatcatttgagaaaaactatgtgagtgtg

SEQ ID NO: 131437 - DNA, 619 bp, Homo sapiens
atatgctagaaagttgactatctatgcatttgaagaaggcatctactgtttacatttattcttctaagaaaattttcttgatttatgctaattttgaattatgcctggcttctaggcacacagccctgctatgtgatgctcctacatccatccatacatacaatctttctaaaattttttgaatgttttctgccagccagaaagatcaccatgtcttgagtctgcaatttatgtgtaaatataacactttataactgcaaatatggaaccatacactgaccaagattacagaatgtttaaaaatattgtgaaactgaaatgaggtaagactttattctcaaagcagtgacattcttttatgcacctcctaccaatacttacatcacgctgatcctgtctgcccggtcaagtatctttttctttgcactgaaaggagtcacagtggaataaactactaggcagaatgaatcagcatccagcttgcagaccattgtgaatatttatagaacatttgagtattattagctgagtctttttctcaaagtactgttttgtttagtatrtgagcagaataatatttggttgtgttatatcatttgagaaaaactatgtgagtgtg

SEQ ID NO: 131438 - DNA, 487 bp, Homo sapiens
aataccattttatacaaggaactgaaagttttggtatctgcagtgaggcaggaggggagtagtggttgtagaatcaacttcttgcgatcactaatgggcaactacatagaaggagcattaaaatgagctaaaataatcacctccatgctaaggtagataaaattaatactgcacccagggatttgtcaagataaatagaaagaagarattgaagatgttgacagcaatatctatcgaggtcatgtgttgatgaggaatttagcagaataagaaaactacagtgtatcaaatatagtctacatcattaggtaaagagctgccaaaaagaagaaaaaggaaaagacatataattctgccatcttttctcgagctctgcaagcgccacatgtctgaaagatgccactaaatgctgtttgaggactctagcaaaaggatgtaatccttaagtaactcaaagtgtaactgcacggaaaaggcgctcaacttt

SEQ ID NO: 131439 - DNA, 468 bp, Homo sapiens
attaagtttaatggcaaagaaaacatatgtttgcacagtactagaaagagtagaaaatgtaaattcccaaaggaaagtacagacaaaatactatgtgcattgggaagtggggtggttagggaaaggaattatcatattgagttgtggggatgagaagtaatgtcatgaataagaaatctgcaatttctgtgcatccccaactctggtcataagacctgctacataggtatacatgaaatataggctgagtgcctaactgaatgtggtagaggttgaggaaaaatataagaaagcatccaaatgcataaatgaggagcagtaacatgcaacaagggacccaagtagggaattgtgagtgtgctttggagagtaacaaatkatactttaacagcaacataccttgtgtagggacaaggatgccaggtgtgtggttctgcactttatgatgttcagctgtgctcttctaga

SEQ ID NO: 131440 - DNA, 582 bp, Homo sapiens
tggttattacatcatctgccttcaaggtgaaagcagaggctgaggaggagctttgaatcatgtaattatagtagtcatttgccacttcctgggtcagcaaagtaatgtgaagtgtctccagctctctaagtagatcaaaggtcayttggtgttttcataattttagctaaaaacgtccctgccactagaaccagagtttatactttcagatcccctgacaaacaatgggctaaaatacgtgagaacatttatcaaattgagcatcatcctagaatgaccccttttaaggaagctttcttcaaggcatttatagcagaggtcattgttagattacctgtgactcagagtattatatcaatatggaacttctggaaaatcctgaagacttaggggcaaaggctctgtcctccatgtgctcactaaacaaagctacagtgacctctcagactacctctataccttccatatcctgcactattctcccttgcctcttcttcagagagggacagcaattgttgcaggtgctggagagactggtgagccaacaataaaacacctcaccagggaaaaatagaaaaacaa

SEQ ID NO: 131441 - DNA, 582 bp, Homo sapiens
tggttattacatcatctgccttcaaggtgaaagcagaggctgaggaggagctttgaatcatgtaattatagtagtcatttgccacttcctgggtcagcaaagtaatgtgaagtgtctccagctctctaagtagatcaaaggtcacttggtgttttcataattttagctaaaaacrtccctgccactagaaccagagtttatactttcagatcccctgacaaacaatgggctaaaatacgtgagaacatttatcaaattgagcatcatcctagaatgaccccttttaaggaagctttcttcaaggcatttatagcagaggtcattgttagattacctgtgactcagagtattatatcaatatggaacttctggaaaatcctgaagacttaggggcaaaggctctgtcctccatgtgctcactaaacaaagctacagtgacctctcagactacctctataccttccatatcctgcactattctcccttgcctcttcttcagagagggacagcaattgttgcaggtgctggagagactggtgagccaacaataaaacacctcaccagggaaaaatagaaaaacaa

SEQ ID NO: 131442 - DNA, 598 bp, Homo sapiens
taggccgggtaaactggttcttaatacatatgcccacagggaaaatgttattttaataagatgcttctataagccacatgctacttaaaacaraaggttttctctttgtcttcataagcaaaaattgaaagacccttgtttgtccttaagttcgtagtaaacaaccatgaagtaacttaatactgagtcgcagtctgcaaagtatctttgccaattcagctatttactttaaaaaaacaaaacaaaacaaaactgtaactttcctagaaaaataaatctatgtttaacattcttgaataccactaattaggatacctaaatctactcttattggtccttcagcagttgttcttttatttcgttatccattgttttgctctaactctaccccacaactaaaattaaagtatacaaaataattggaaactgttaataaagcaagagattatggcaaataaatagagagtctttaagaaatgtgaaatgactgattcatatgagcagccaaatcctgatgttgatttacagatttcatctaatggagtataaccactagagattgctcaagactatcaactgaatagtggagaaaaaatgt

SEQ ID NO: 131443 - DNA, 605 bp, Homo sapiens
gtaacaaaaatatgacattctctgtgtcaaactttacattatatcacacacaattttataataatttgataaacatccatggaaatgagctgccttcttcctctacaagcccttcgcctcccagatgatctaagaattaagcgtgggaatatgtgtttcattgccagtaaacagaccagtcttctggatctcttcttatgtcctaagtaaaattagatgtagcattttcagcctggtttctaaacgctttgtctgccagccggcagcttgtcactttgagcagacttaaccaattcgtttatttctctggttcttagctagatttgaatcaggtgacgctttaataccatctcagcaaaaatgtaaactgtgacctctatgatgagtaagtattgtctgggctctggaaatttattttgtgaaaaactggtagcacctgtgctacgttttatggaagacataataatgttaactcgcatttcactaagtgcctttactctgggaacctctgactgttttcctgatgaagaagcrcaattttccttcttttttacctagagacagtgtaagacagacaagttaaatggcattgtgatagcaaacta

SEQ ID NO: 131444 - DNA, 569 bp, Homo sapiens
ggtgaaagaactgacaacatcctaaattaggtgcagttggagaatttcaaacacacagagaagattgcaggaaacattaaaaataaataaataaactgatagatccaagaagctaaattaaccccaagcagaagaagtataagcagaagtatacaccaagacacaccttggtcaaattrcttagccagtgataaagaaataatcttaaaagcagctgaagagaaaaaagatggaggaacaaagataagaataacagcatacctcttatcagaaataattgaggcccaaagacaatgaagaaatatctttaaataatttgaaaaagtaataagctttaatctagatttctgaaactaggaaaaaacttcaaaaccaaagacaaaataaaaatatattaaaacatacaaaaactgaaagaattcattaccaaaagagctatgttataaacaataataaagtaaatcttcctagcggaagaaaaatgataacagagggaaatccatatccatacaaaaaaagaagatttatttattgaaaatggtaaatacttgagtacatatgaaagactt

SEQ ID NO: 131445 - DNA, 569 bp, Homo sapiens
ggtgaaagaactgacaacatcctaaattaggtgcagttggagaatttcaaacacacagagaagattgcaggaaacattaaaaataaataaataaactgatagatccaagaagctaaattaaccccaagcagaagaagtataagcagaagtatacaccaagacacaccttggtcaaattgcttagccagtgataaagaaataatcttaaaagcagctgaagagaaaaaagatggaggaacaaagataagaataacagcatacctcttatcagaaataattgaggcccaaagacaatgaagaaatatctttaaataatttgaaaaagtaataagctttaatctagatttctgaaactaggaaaaaacttcaaaaccaaagacaaaataaaaatatattaaaacatacaaaaactgaaagaattcattaccaaaagagctatgttataaacaataataaagtaaatcttcctagcggaagaaaaatgataacagagggaaatccatatcmatacaaaaaaagaagatttatttattgaaaatggtaaatacttgagtacatatgaaagactt

SEQ ID NO: 131446 - DNA, 561 bp, Homo sapiens
ggatacctgcatatacagaagatcacactacaagaaaggaactctgagtttaagacacccacatcattttataacaagtgataagcattcctcctctctaatctggagaaagacactattattttccaaagaaattcactatactttattgaaaaggtaatctggaacaaagacattcagtgcscctggtcccaaaacacacagaaacaagaaagtcatagagaaaaagaatatgcatgtacaaaacaaaagtaaccttttttgtgtttgaggcctgcttgatactctctccccctccaactcatttagggacatgttttatcagggtgcagagttattcaagatgtagggtgcctctatgttactcctaagtcaattaccaaagttattgtttccctttttatttttcctggtatatattcattgagtaaaaaatatgttctaaagaattaaactattcgttaagttgtgcaaacaaatgaaataaaatgacatattttcagtactttaacatcactgtttagtcttcaaagcattagtagataagttaaaaaaaatcac

SEQ ID NO: 131447 - DNA, 584 bp, Homo sapiens
gttactgccatattcttatccaagatttaatgtttcataaatcccaggattacccatatgaattaaaagttgtgtatttgtaaataagttgtcataatgtatttctattttttattttcataaaaataagcctcatgctgtaattaaattcaaatrtaagtggtatgtagggcatatcagcatagtcacattgctaaggaccaatttcacagttggaattaaatgtttttttaatggtaatgaactatgcacatgacgactattacttttgaaagtaaaatgtaggttttcagcaggaagacaaaagaataatattggtaaaaaaaaaacagttcttttttagaaaataaactagaaattatttattaagtttggataaagttcactaccttttactacactaatccaatgttgttaatattctgttcattatttaatatattgaatcaggtaactatatcccaaaacatagtttcctttaattcagttgattattcagttgatttttccttttcacgcaattattattgctggaataaaatatattcagtattagtaatagcacatttcagtattcttatttc

SEQ ID NO: 131448 - DNA, 584 bp, Homo sapiens
gttactgccatattcttatccaagatttaatgtttcataaatcccaggattacccatatgaattaaaagttgtgtatttgtaaataagttgtcataatgtatttctattttttattttcataaaaataagcctcatgctgtaattaaattcaaatataagtggtatgtagggcatatcagcatagtcacattgctaaggaccaatttcacagttggaattaaatgtttttttaatggtaatgaactatgcacatgacgactattacttttgaaagtaaaatgtaggttttcagcaggaagacaaaagaataatattggtaaaaaaaaaacagttcttttttagaaaataaactaraaattatttattaagtttggataaagttcactaccttttactacactaatccaatgttgttaatattctgttcattatttaatatattgaatcaggtaactatatcccaaaacatagtttcctttaattcagttgattattcagttgatttttccttttcacgcaattattattgctggaataaaatatattcagtattagtaatagcacatttcagtattcttatttc

SEQ ID NO: 131449 - DNA, 517 bp, Homo sapiens
gattgaaatgaaaaaagtccttgttgtcatttttatttcaccarttggaataagttttcaacttgtgaaaagtgctgcacaaatcctggaaactgaaattctttactaaagcacagggaagtgcagggcaatcaatggcaatatcagattgaagctcatgcctgttaataatgtgacttaatcctgatttggggaaaaacattattttgaggatgagaatatcaaccctgagcactgctctgcgtttctactgaaagtaacaattatttcttatcagtgatgatatggagccttcccaggtgaaggatgtgcaaggataatggccatggtggatggggagaggatgggagcagggtaaaagccaattctgctgcagctaacatgctgtgtctaaacactatgcaagatagcagttgtcatacagtctcagcttctaatgctgggtcagtagcttacttgtgaaacttgtataagtcgttttacctgtcagctcttttttttttttttttttttttga

SEQ ID NO: 131450 - DNA, 517 bp, Homo sapiens
gattgaaatgaaaaaagtccttgttgtcatttttatttcaccaattggaataagttttcaacttgtgaaaagtgctgcacaaatcctggaaactgaaattctttactaaagcacagggaagtgcagggcaatcaatggcaatatcagattgaagctcatgcctgttaataatgtgacttaatcctgatttggggaaaaacattattttgaggatgagaatatcaaccctgagcactgctctgcgtttctactgaaagtaacaattatttcttatcagtgatgatatggagccttcccaggtgaaggatgtgcaaggataatggccatggtggatggggagaggatgggagcagggtaaaagccaattctgctgcagctaacatgctgtgtctaaacactaygcaagatagcagttgtcatacagtctcagcttctaatgctgggtcagtagcttacttgtgaaacttgtataagtcgttttacctgtcagctcttttttttttttttttttttttga

SEQ ID NO: 131451 - DNA, 595 bp, Homo sapiens
gcataaatattcaaagcactgtagcttcctgtgccagctttccccactccccatcatttccccattttrcttaactctttcaaatacattgttaatgatattaaatagtaccctggatgaggagatgagtggaagtcagaaagcattgccatctcaggaatggtgttaagctacctcctttggagctcttcagcactagcaagagtgctattgagttggaccctcccttcaaatagaaaactggcaatggggccaggaaaggcaatagcttctcctcttttttgaacactttttaatattcatatcatctctggccaattacctattcaatgacgtatgattcatgcatttacatacttaaatattttttcaggaactatgtttgttagatatgggaataaaataatccatttttacgtattaaaagcactaataaatgccagaaaaaaataattaatcaagtactatacaaataattttttaaagaaaagctaacaaatgaagatctttataaacaatgctgtcttgtaagtccaaattttaaaattcacttctgtcatagtcttcgtaaatagtaatatgacattttctccca

SEQ ID NO: 131452 - DNA, 595 bp, Homo sapiens
gcataaatattcaaagcactgtagcttcctgtgccagctttccccactccccatcatttccccattttacttaactctttcaaatacattgttaatgatattaaatagtaccctggatgaggagatgagtggaagtcagaaagcattgccatctcaggaatggtgttaagctacctcctttggagctcttcagcactagcaagagtgctattgagttggaccctcccttcaaatagaaaactggcaatggggcyaggaaaggcaatagcttctcctcttttttgaacactttttaatattcatatcatctctggccaattacctattcaatgacgtatgattcatgcatttacatacttaaatattttttcaggaactatgtttgttagatatgggaataaaataatccatttttacgtattaaaagcactaataaatgccagaaaaaaataattaatcaagtactatacaaataattttttaaagaaaagctaacaaatgaagatctttataaacaatgctgtcttgtaagtccaaattttaaaattcacttctgtcatagtcttcgtaaatagtaatatgacattttctccca

SEQ ID NO: 131453 - DNA, 595 bp, Homo sapiens
gcataaatattcaaagcactgtagcttcctgtgccagctttccccactccccatcatttccccattttacttaactctttcaaatacattgttaatgatattaaatagtaccctggatgaggagatgagtggaagtcagaaagcattgccatctcaggaatggtgttaagctacctcctttggagctcttcagcactagcaagagtgctattgagttggaccctcccttcaaatagaaaactggcaatggggccaggaaargcaatagcttctcctcttttttgaacactttttaatattcatatcatctctggccaattacctattcaatgacgtatgattcatgcatttacatacttaaatattttttcaggaactatgtttgttagatatgggaataaaataatccatttttacgtattaaaagcactaataaatgccagaaaaaaataattaatcaagtactatacaaataattttttaaagaaaagctaacaaatgaagatctttataaacaatgctgtcttgtaagtccaaattttaaaattcacttctgtcatagtcttcgtaaatagtaatatgacattttctccca

SEQ ID NO: 131454 - DNA, 595 bp, Homo sapiens
acctattcaatgacgtatgattcatgcatttacatacttaaatattttttcaggaactatgtttgttagatatgggaataaaataatccatttttacgtattaaaagcactaataaatgccagaaaaaaataattaatcaagtactatacaaataattttttaaagaaaagctaacaaatgaagatctttataaacaatgctgtcttgtaagtccaaattttaaaattcacttctgtcatagtcttcgtaaatagtaatatgacattttctcccattcctctataacacacacatatatagcttttaaggaaaaaaaataagcactttgtccaattataattattagtatactctgctctgtccacatgaaatctttgaaggtaattttttttctcttgtttactaatagaatcctctgattcctctactgtacaaactagtcattttcctttttacgtaacttctcttagaycatactggccattcagttcttttttaaaaaggagagagagagagagagagaagcttttaatacctttgaatactttccctgacttactacaggtaactggatgaccaatatgcctccataaa

SEQ ID NO: 131455 - DNA, 607 bp, Homo sapiens
ctaaccaaactgctgtggtttgaatactatttccacctcttactaaatgcatgaccttggacaagaatcataatatctttttatttcttttatgtatttctttatttatttactcagtaggttttggagagaacagttggtgctcggtcacgtgaatcagcaagaaaaaaacaagcaatcccttcaaaaaggggcctaaggacaagaatagccaattctcaaaagaagatatacaaatggccaacaaacatatgaaaaaatgttcagcatcactaatgatcaggaaaatgcaaatcaaaaccacaatgtgataccatctttctcctgcaagaatggccataatcaaaaaatcaaaaaataatcgatgtgggcctgtatgtggtgaaagggaacacttttacatggctggtgggaatgtaaactagtaaagccactatggaaaacagtttggatattccttgaagaactaaaagtagaactctcatttgatccagcaatctcactcctgggtatctacccagagaaaaataagtcattatamgaaaaagatacttgcatatacatgtttacagcagcacaatttacatttgcaaacttatggaaccag

SEQ ID NO: 131456 - DNA, 514 bp, Homo sapiens
attgggggaacgtaagggataaaatagtgcaggataagaaaagcgaaagacgagaatgtggtctcagacaaagcttggccttggcctgatacataaacataaacctkctcccaatatttctatgttaagaaaaggagccagccttttatctttttttttcttcgttttttttttttgttttttagtctttctggagtgaggtatctcagccaagggcaattctctaaagacagctgttggtaagcaaaacatacagcaggttccagtggatgtgctgccttggatcatagaaatagtttctgtaataccctctcttcctttacatgaaatcaaggaaaattctatccattatttcttataaatatttcttgatctgatcttatcattctttttctcagtgccctaccttagtttaggttctatcttagaccactgcagcagcctcctaaatcatctctgaacctccacattgcagtcaattattttcatagagcacagactattattttctcct

SEQ ID NO: 131457 - DNA, 514 bp, Homo sapiens
attgggggaacgtaagggataaaatagtgcaggataagaaaagcgaaagacgagaatgtggtctcagacaaagcttggccttggcctgatacataaacataaacctgctcccaatatttctatgttaagaaaaggagccagccttttatctttttttttcttcgttttttttttttgttttttagtctttctggagtgargtatctcagccaagggcaattctctaaagacagctgttggtaagcaaaacatacagcaggttccagtggatgtgctgccttggatcatagaaatagtttctgtaataccctctcttcctttacatgaaatcaaggaaaattctatccattatttcttataaatatttcttgatctgatcttatcattctttttctcagtgccctaccttagtttaggttctatcttagaccactgcagcagcctcctaaatcatctctgaacctccacattgcagtcaattattttcatagagcacagactattattttctcct

SEQ ID NO: 131458 - DNA, 506 bp, Homo sapiens
gagttagataaactatataacacctaaacacactggtgttaggttatatactggtctgtatataccactacaataaaataaaatatttactgaagcatttttttcctcctggcatgtaaaaaaacttgtaactactttctaaacaaacctttctacacatcatttactttcttagatgcaaagttggcatcattattaaacatgtgaacagtggagcaatatgttctgaattacttacatatctgttagaagctggagtcttttccctcatcatttatagtagctgtacatacagagtaaccagcaatcttgggcaagcagtcagaacagtcagaacaaacgggctygatccttcctccaatggcttcatgcaatgtatttctttctttcttaagaaattccctataaaacatcacattcatgaagtatagaaacatttcatgggaggccgagatgggtggatcacgaggtcaggatatcaagactatcctggctaacacggtgaa

SEQ ID NO: 131459 - DNA, 608 bp, Homo sapiens
tgttaattcttccttttaagtattttctctgaatgaatggccaacttagagaaaaaaaaaakatgcctacagaatgtaatgactttgaagaaactgttttgaatgatgtgacatcagcctattctaatgaaatagaggactgtataaagtactagatatgacattaagatgactttcttttccttagagactagctttaaggagtggaacatgtagataagcagtatccctctggagtttacaggcatgagcatttcaaatactgtctggcgatctcactacataatcttctgctagctgaatgagagtcaggctaatcaatccaatatgaattttttgcccatgacagctactgaagtagctcctcaggttcttccttacgatagccttctgcttcattaattgtaaacctgtttttgagtctgctgtccatgacagtctctagaaaattactgaaatgacaagtttccctgatcagctcattggaatatcacagttgcttatcagggagattgaaagccaaaaatccatcagtcaaagggaagtatgatactctccgttcttttgcatgtcttttgagacagatgcaagaaactggaacattctat

SEQ ID NO: 131460 - DNA, 534 bp, Homo sapiens
acagacaccttctggttcactgttttcttgaatggtttaacctctaaagaatagtgttgtaattttataattgtagctggtttaattgaacaagttaagattggaattatgcattttaaatatgtgacaagactcatcagtgaagtttgtatttaataatgatttgtgtggaggcaaaaatgctgaacacagtgcttttggcctttgactaagtgcagtatacagtaatagctcagtaagtgcttgtctctttcagagatgagtctgagaagaaattccatttaaaatgtgaacaagggtgtagaaagctattttgaaagtggagattttgagaaataagcttgtcagctgttctcctgacagccctcytgaatgaaatttccactgtaactgttatataggctatctacaaatggtttttatttttcaagtacgagtaattcattgcttgggagcctgaaagtgagaaaaaaattaccaaaatgagttttatcaggggctataaacagattattgtattgtacataaacataa

SEQ ID NO: 131461 - DNA, 534 bp, Homo sapiens
acagacaccttctggttcactgttttcttgaatggtttaacctctaaagaatagtgttgtaattttataattgtagctggtttaattgaacaagttaagattggaattatgcattttaaatatgtgacaagactcatcagtgaagtttgtatttaataatgatttgtgtggaggcaaaaatgctgaacacagtgcttttggcctttgactaagtgcagtatacagtaatagctcagtaagtgcttgtctctttcagagatgagtctgagaagaaattccatttaaaatgtgaacaagggtgtagaaagctattttgaaagtggagattttgagaaataagcttgtcagctgttctcctgacagccctcctgaatgaaatttccactgtaactgttatataggctatctacaaatggtttttatttttcaagtacgagtaattcattgcttgggagcytgaaagtgagaaaaaaattaccaaaatgagttttatcaggggctataaacagattattgtattgtacataaacataa

SEQ ID NO: 131462 - DNA, 372 bp, Homo sapiens
gaattcaggtaatacacacctattaaataagatcagaaggccatgtgtaactaacagatatttcaccatgagcctgtattttaacctgatgccattcttctgmtggataaatgagccaaatcccagtggagagccttgcatatcattgagaaaactgttagtagcctatgatcatagccattagtctgtttatagaagctaaaaaaaaatattttttttctgagattatcacattttttctagagaaaatctatactgttataatctttatctatccacacaatgactttattatatgactttaaacaattttgctttatttgaataaaacataaattaacagtgaattacagtagaatgattataaaagta

SEQ ID NO: 131463 - DNA, 565 bp, Homo sapiens
catatgtttatatatatgtccccatgtggattttttcttagaataaatctaatattttataggttctccaaggtggttgtaaaactataagctgaaggaccattgctttagggagagtctggtctttctataacacattctggggtttgtatacacagagatatattctcagtaaaaagtgtatctttgtttattgctttccaaattatatgctattggctctcgagtcttcagaatgtccagatggtgcataaggtgacttgaggctcaagtctggttgtttctagccacagctggccatgtctgaggcttcttagagtacagcttgtgcaaagatgcttggaatagcatgctccttagccctagctgacgagcatgaggcaatgcatctgatcacccctactctggcctagcatgatgagwgtaaagagattttttttaatacctagacagtgttaatacacatgctgctgtctattgtgaagaaggagcctatattagttatctactgcttcatattaaagttcctcaaaatgtagtggcttaatatagcaaacatttatta

SEQ ID NO: 131464 - DNA, 579 bp, Homo sapiens
ggttcgttgtttctgctggctcttgcttatggtatcttgtttccttgtttgtattatgaattatgtttgtgagcttacgttgcctgagtctaaagtggattattccagagagaaattgtatttgctcttacagagtgtctgggagtacttactggtccagggatcactttacttgtagtttccttgagaaagggtagttatttctagtttacctttacattaaaggcctggcctttgggtactagctttatgcagggattgtatgtcctgttagactttctactttgggcaggccctggacttggtctcttaactcctgagtccttcaatgacataagaaccaaagctcaagtccagctgtgttgggctagtgccggcagggttaaagctggctgcagtgctctcctgacatcagagggtctaactgtcatttcactttggcttctaaatctttctttctcatttgccatcttataaacacatttaagaacactttatacatgttatccagcatttgttgttgttttcagaagggkgattaatcaggaacagtcagtattaatgcaagaaatggaattc

SEQ ID NO: 131465 - DNA, 482 bp, Homo sapiens
gaatgcactcatcacagagccgtttctcagaaagtttctttcaagtttttatctgaagacatttcctttttcaccataggccacaatatgctcccaaatatccctttgcagattctacaaaaacagtgtttctaacctgctcaatcaaaacacagatttaattctgtgagatgaatgcacacatcacaaagctgttacccagaaagcttctttctaggaaatattctttctgaatatgtttcctttttcaccctaggctttaaagtgatcccaaatatccctttggggattgtaccataacagtgttyacaaactgctcaatcaaaaagaaggtttaactccgttagatgaatgcgcatgtcccaaagcagtttctcagacagcttctttctagtttttctcagaagatatttcctcgtttaccataggcctcaatgtgctcctatatatccctgtgtaggttcttctaaaacagtgtttcc

SEQ ID NO: 131466 - DNA, 606 bp, Homo sapiens
ttttcaccataggcctcaaagcactcccaaatatcgcttctcagattctagaaaaacactgtttcttaattgctgtattaaaagaaaagtttaactgtgtgggttgaatgcactcatcactaagcagttactcagaaagttttctgtagtttttatctgaagttcttctgtttttcccattggccacaatgcactcccaaatatcccttcccagattctagaaaaacagtgtttcaaaactgctcaatcaaaaaaaagttttatatctgtgagaygaatgcccacatcacaaagcagtttcctggaaagattctttctagtttttatctgaaggtatttcttttttcaccaaaggtctcaaggggctctcaaatacaccttctcagattgtacaaaacagtatggccaaactgctcaatgaagagaaaagtttaaatctgtgagatgaatgtacacatcacaaagcagactcccaaaagtctctttctagttttagctgaagatatttcatttttcaccttacacctcaaagcgctcccaaatatcccttctcagattctacaaagacactgttccaaagctgctcaatcaaaagaaaagtttaac

SEQ ID NO: 131467 - DNA, 558 bp, Homo sapiens
caatcaaaagaaattttaactctgtgagatgaatgcacacatcacaaagcaggttctcagaaatctttctaatttttctctgaggatatttcctatttcttcccaggcctcaatgtgctctgatatatcccttcctagattctaccaaaacagtgtttccaaactgctcaatcaaaagaaacgtttaactctgtgagaagaatgcacaaaccacaaagcagttgctgaaaatcttctttctagtatttatctgaacatatttcmtttttcaccaaaggcctcaatgtactcccaaataccacttcatagattctacaaaaacagggtttccaaactgcacaatctaaagaaagttttaaacctgttagatgaatgcactcatcacatacagtttctcagaaagcttctttctagtttttatctgaagatatttcctttttcaccataggcttcaaactctccccaaatatccctttgcagattgtacaaaaactgtttctgaacttctcaatcaaaagaaaggtttaactctttgagacgaatgcacacatcacaaag

SEQ ID NO: 131468 - DNA, 558 bp, Homo sapiens
caatcaaaagaaattttaactctgtgagatgaatgcacacatcacaaagcaggttctcagaaatctttctaatttttctctgaggatatttcctatttcttcccaggcctcaatgtgctctgatatatcccttcctagattctaccaaaacagtgtttccaaactgctcaatcaaaagaaacgtttaactctgtgagaagaatgcacaaaccacaaagcagttgctgaaaatcttctttctagtatttatctgaacatatttcatttttcaccaaaggcctcaatgtactcccaaataccacttcatagattctacaaaaacagggtttccaaactgcacaatctaaagaaagttttaaacctgttagatgaatgcactcatcacatacagtttctcagaaagcttctttctagtttttatctgaagatatttcctttttcaccataggcttcaaactctccccaaatatccctttgcagattgtacaaaaacwgtttctgaacttctcaatcaaaagaaaggtttaactctttgagacgaatgcacacatcacaaag

SEQ ID NO: 131469 - DNA, 436 bp, Homo sapiens
gttgttgaattcagtttccagtatttttttattttttatttttttgagatggagttttgctcttgttgcccaggctggagtgcaatggcgtgatctcagcttaccataacctctgcctcctgggttcaagtgattctcctgcctcagcctcctgagtagctaggattacaggcatgtgccaccacgcctggcyaatttagtctttttagcagagatggcgtttctccatgttggtcaggctggactcaaactcctgacctcagatgatccatccaccttggcttcccaaagtgctgggattacaggcataagccactgtgcccggtcagtttctagtattttttgaatatttttacatctatgttcatcaggggtattggcctgtagttgtgtgtgtgtgtgtgtgtgtgtgtgtgtgtgtgtctgtctttgtcta

SEQ ID NO: 131470 - DNA, 521 bp, Homo sapiens
gaattcagtttccagtatttttttattttttatttttttgagatggagttttgctcttgttgcccaggctggagtgcaatggcgtgatctcagcttaccataacctctgcctcctgggttcaagtgattctcctgcctcagcctcctgagtagctaggattacaggcatgtgccaccacgcctggctaatttagtctttttagcagagatggcgtttctccatgttggtcaggctggactcaaactcctgacctcagatgatccatccaccttggcttcccaaagtgctgggattacaggcataagccactgtgcccggtcagtttctagtattttttgaatatttttacatctatgttcatcaggggtattggcctgtagttgtgtgtgtgtgtgtgtgtgtgtgtgtgtgtgtgtstgtctttgtctagttttggtatcagagtgacactggccttgtagaatgagtttggacgtatcacctcctccttgactttttcaaatagtttcaatcggattga

SEQ ID NO: 131471 - DNA, 613 bp, Homo sapiens
ctattattcccaccctctggtaaacatcgttgtattttctatgtctatgagttcaatggatttgatttttagatcccacaaataagtaagagcatgcaatgtttatctttttgtgcctggcatatttcacttaacttaatgacctccagttccatccatgctgctgcaattgattggatctcattactttttatggctgaatagtactccattatatatacgtatcacttttttttatccattcatctgttgatgaacacttaggttgctttcaaatcttagctatgtaaacagtgctgyggcaaacataggagttcagatatctctttgatatactgatttcctttcttttggtatatatctatcagtgttccatccctttaatttgagcatattgataccattgcaagtgagatggcctcttaaagacagcatacagttatctaacttgccactctgtaccttttaactgggggcttttagcccatttactttcacggttaatactgatatgtgcagatttgatcctgtcatgttgttagctggttattatgcagagttgattgtgtagttgctttataatgtcaacggaccacttacttgtgtgtttttg

SEQ ID NO: 131472 - DNA, 568 bp, Homo sapiens
gcctgatgggttcacacagtaaagcagattcttggctctctggttgaaacttctattttttaacttatgctctctcaggaactctaataccacactcctgtctccacacactcttttgttggttgttcatgccgtggtacaatagtcttggaatctaggyatgccatctgtctctgacttttctatgtttctgctgttcccgagtgccaattccactccagaggcatgttgcaaaagcacagaaatgttggtgactatagtcctgagttccattgtagaggagccaaggattgtagccctttctggaagaggccatataataatacaatctacattcactgggatgagaaagactgtaggagaagcatttttgttaactatgacctggagttcagtttagaaaatgttaggaaatgacagacatgtagaagatacgtctaggctggagatataagtttagaagtcaccaacacataaaaggtttttaaagtcttagaaacataggacaatatataagatttgttaaacactcaaaaatttattagtgtaattcatcacatcaacaagt

SEQ ID NO: 131473 - DNA, 572 bp, Homo sapiens
tcaactcaattgcttggcatttggaattgagtgaatgcagcgtgagaaatctcaatgagcagactgatgttactaaatgagataaacaatttcattgaaagagtatcaaagaagactctggcactggatgttactgaagtccatcatttttwaaaaaaactttatattgataactaattttaaagagacatgtctttggtcatttttttagactttaacaaaattagttgttcacatggataggagttacagagatatattgatgaattgggtgtgttctaaggtttttttgaactactactagctaagatttttagtttttgatcattgtgttgttattttagacttagtatgggtctagcactctttattttctgggtttgactaattttattgtcagagcctgggaacatgaagaggaatgccagagaagtggtacactgtaagccatgtgtgtgtgtctattcatcaactacctgactcactccccagccatgcctctcacaagaggaatttaaagttactacagtcagtactaaagataaagttgggatagcagatgctttggtagc

SEQ ID NO: 131474 - DNA, 577 bp, Homo sapiens
aaacatgctgttatatattattttrctgttactaaaactaaatatttcattttgctatccacatgttattctaatctacaacataatgtaaagattacagcatattaaaaatttagaagaattcttacgtgtacctcagtttcagtgaaatgcatttaagcaaaatgcaaatttaaggaattcacaaattaagttaaaaattcacttctgtaagcagcagttcatttcctagggtcctgctgtgctaagctttgttttagtggagtgtagagggtatgtgctgtgtgtgtaagaagtagggggaaagtataaggcctgattcccattctcaagaaacatatgtaacaacctacttagagaaaaagcaaggttcatataaaacaaacagcagagaagcaaataataaaaaagaaacatgcaataaagaaataataataagaaacatgcaataaagtacccaaatgggtggtgtattaaaggaaaaagtaaaagcagagctccctttccaaatcaaagtgcgtgcacaacaccaacatagaaaacagagaaatgcgatcttttgttactgtaattttgt

SEQ ID NO: 131475 - DNA, 395 bp, Homo sapiens
aactgactttctagtaaatatatttattctgttaagtttttgttttctagttatttatagtagtaatttgtctccttttaactttaggagtgttttttgcctgtttgtttatttactcagtgtttgttgaactcctccaatttgtgaggttctatgcttactaatcggaacaaaatgatatagtgcccagaaggaagatagaagtatacatataacaacaacaacaaaaatacgaagtagatattaagtctgttttacatgtctcarataataccatatactgttagggtcattaacaaagcccatattgttacgataacaagttttcttctatgttgtgtaaattattaatgacattcatcacatttcctttagaatattcattcaacaagcaa

SEQ ID NO: 131476 - DNA, 420 bp, Homo sapiens
cctttgcaattatttgtagacattgattctaatcattgttcttagaagaaaggtataaacataactatttataaaggtacataactataaaggtacataactacacactgagagatcaatttctttaaatttgaaaacaattgagtaattwggagtcactttccatggctttctgtattagatcattagtagaaaaaaattatgtaatgtttattgggggaagggttcctgtgaatagtctttcattgcttcaaaatgccaaacattataaagaacaatgagagaagataaattacccttcatgtcaataaatgaaaaccttgaggttgatagtaagtttactttaaaaagaattaggttgaatattctgaaaattatatggcataattgaatagtgtaacagtgtaaaatgacttttaa

SEQ ID NO: 131477 - DNA, 547 bp, Homo sapiens
tgcaattatttgtagacattgattctaatcattgttcttagaagaaaggtataaacataactatttataaaggtacataactataaaggtacataactacacactgagagatcaatttctttaaatttgaaaacaattgagtaatttggagtcactttccatggctttctgtattagatcattagtagaaaaaaattatgtaatgtttattgggggaagggttcctgtgaatagtctttcattgcttcaaaatgccaaacattataaagaacaatgagagaagataaattacccttcatgtcaataaatgaaaaccttgaggttgatagtaagtttactttaaaaagaattaggttgaatattctgaaaattatatggcataattgaatagtgtaacagtgtaaaatgacttttaaaagctttgatacagtttttaactttgcarttatttctcagtggtttccatttttaaaacattaatcttatgaaaaataatagtttgtctctctaataatacaaagcagctttatgttcatttgaaaacttc

SEQ ID NO: 131478 - DNA, 590 bp, Homo sapiens
tttgaacaaaattttgagtgatacattgggatgcttagaatcattcttagctcaagtgagaaaccattcctttaacttttataaattatctttacctcctgtgttttgtagtcttctgagaatttggcttatccaaaaagagattttatgccttcccaaatgagaaggaaaccttttgtcagcatcttgtctgagttgcctccttggctacacaggtcatgggaggtctrtgttgaacatcagtctttggctgtagcacaaaactagtattgaagcacaggccaactcccagagcacaggggttaaagaggcaattagtcactgcaaagcagagttgtggctgtcttctggtgaggaagtgcttaactctttcatgaatgatgcctgaaatctcatcttctgagtgcttttatattccactaaaataatttagtcttagccattttaaattaaaagtaagcttaaaatacatgctctgttgaactgagactttcatatcaatacttatagcagttaagataaagggaacaggctgggcagagagattatcatcaattatatgtttaatatttcacctaaatttcacggta

SEQ ID NO: 131479 - DNA, 590 bp, Homo sapiens
tttgaacaaaattttgagtgatacattgggatgcttagaatcattcttagctcaagtgagaaaccattcctttaacttttataaattatctttacctcctgtgttttgtagtcttctgagaatttggcttatccaaaaagagattttatgccttcccaaatgagaaggaaaccttttgtcagcatcttgtctgagttgcctccttggctacacaggtcatgggaggtctgtgttgaacatcagtctttggctgtagcacaaaactagtattgaagcacaggccaactcccagagcacaggggttaaagaggcaattagtcactrcaaagcagagttgtggctgtcttctggtgaggaagtgcttaactctttcatgaatgatgcctgaaatctcatcttctgagtgcttttatattccactaaaataatttagtcttagccattttaaattaaaagtaagcttaaaatacatgctctgttgaactgagactttcatatcaatacttatagcagttaagataaagggaacaggctgggcagagagattatcatcaattatatgtttaatatttcacctaaatttcacggta

SEQ ID NO: 131480 - DNA, 438 bp, Homo sapiens
aatggactgttctctttggccccctttccatttatccactcttcccaccaaactgaattatccttccttaaaattgagatgsagagaattttagatatttcatatttaaatcatatggttctttttaaattgagtctggtaaaatatattaaaaaataatagttcattagtctacctaaattagttatttactatttcaggcactggcatgttagtcaacaggtggaagttatagacggagacagaatgcagcttaaaataagttaaaaccttgattttcattgtctgccttccaaaatagagaatgcactctttgttagtgttcaaacagagtgctgtaaaggagtttcctgaattataaggagggttggactagtttattaaagtccctcaaactccacacctataatttgaagttgcttattttaaaatgaattc

SEQ ID NO: 131481 - DNA, 599 bp, Homo sapiens
ctttagcaccagggaggtaaaattcattcaccttcctgaccattatgaatttgaaatttctttttacaaaaaggtgatkgttggttaaaaaaaaaaaaacaagcaatagcagatgtgagaagctgaaaatccatactacttatgtggttttggtttttgcatatcaattagaaaatattttaatgctacttttaaaaaataatcaaaggactgtacagaaaagataactcaattttatgtgctatattatactttaaattccctctcttgtgttttcctatctcttttcaaaggagctagttcattttcagccattctttcataaatgccattgctcaaaaatgtatgaaggtttcagttatgtgacatttttgtcctgagtttattcgtgttttcagtttaacatgtcaataaatttgtataaacttttggaaactacagtagcattaaaattagaaaaaaaaagtgatcaaccatataaacatagttttcccaaaatttatcttccaggttaaaattacattttttgttagatgtttccaccctcaaatctgattcttagaatatattttaaattttcagtgactaatggttttcaa

SEQ ID NO: 131482 - DNA, 561 bp, Homo sapiens
aacttctctcttctctagtcctttctctaactgtcttaaataatagctgaattcactttttgactttaaaccctgtttttaggtctagttttagtcttcagggtggctgcctctagtatatgaaaagggcttccctatggaatttttgtctgtagttcagatattcaactaaacataggacataatttatgaaaaactattcttcttattggttgctcattttgccccagtagaatgccaacccagttcactctatattctcaaagctactaactgagaactttcttcttcttctctttgtttcacaagaaagtagtggtttgtctaattactatactgtagttacarttatagagaaaaggtcagtctagtcattgccaattaaagtaggaaaaagctacatttataaccactaagagccattatatcaatttaatgctgttcatcagtgtgtaacccgttttctaagacatataaatctaatcgtggtattatagtacacttaccctattaaaagcctttggtgctgcagagaagagattattgcaagcaacctatatt

SEQ ID NO: 131483 - DNA, 641 bp, Homo sapiens
tcttgaataatatcaggcccaattgtactaggcattggaataggaaagaaraaaacgtatgatatctacacacaatccaaaagcccacacaaaatcttttaccaacgttattgataagcaaaaagagagagagttttaaattctccatgcttaaattctatggataatgcaaatttagagtgaagccaatgaaaaattggccagatgtgtgagagaaggagaaaatggggagaagtaaagagtttctataaatattagtaatcttgacatttgtagtctgaaatgtattttcttggttgaccttgttttacttttgtttgtaagatatctccaattagctagggtatgttttaaaaataactttagacaaattactgaataacacattatcctaccaacaatcttgtccttttgatttagaatctttaagttatctttgcatttataaagtcctggtcctgagaactttcttaggaagttacaaaaatagacaaaaaattctagaaaactaaaacaaggtaacttaaaatccaagtagtatacagctacaaatagttttaatagctcttgagtatttatcttggaagtgttgtgcccagattatcgatagtctaggcatagataatgtatttcttagcaac

SEQ ID NO: 131484 - DNA, 483 bp, Homo sapiens
  misc_feature (1)...(483): n = A,T,C or G
gataatttctcagacctctagatcctttgtaagggcttaactgattatgtcaggcccacctaggatactttcccttttgattcattcagtgtcaactaatcaggaaccataattatagctgctaaatctctttgctgtgtaaggagaatttccatcctaatcgtgggtcctgtccacactcaagggggcagggattatgatagagcataggccattgggatcatcttagaattttgcctaccatacctgtttattttctcactgtgtttctctcagggtcaggaggtgggggcaaagatcctctttgctctgcatagctgcttttagagctattattttccktcctctcatgaaaaataacaacaaaaaaacactgagtctgagacttggtgctttttgtttcttaccattgtctctttnncattttatgtggccatcccatcccatcccatcccatcccatcccatcccatcccatcccatc

SEQ ID NO: 131485 - DNA, 495 bp, Homo sapiens
ttagaagttgcattactgaatacaggttaccttttgcataattgtataaagctgatgaaatgggtctcttttgctctgattgctttccaaattctacccaagtgaattcacagctgatggttttaagcagagcaaagacagattaactggctcacataaaataaaacctttagagacagaaaaatggaatagtcctaaagcttcacaagatgttatacatattttcaaagtacccagtaattcttatggcaaatatcrtcccccactctgattagcttcactgtggtgtttataacatattttaccttgtgctgttagttgatgttatatcttttagtttgtcaactatgctttacagtgtttagaataataaatgttattggcagaaaaaaatgccatgagaaaattgctttgtcttaagatttctctatcttataagatatattatttatatatttattctgccaggaattctttagatggttaaacattaat

SEQ ID NO: 131486 - DNA, 551 bp, Homo sapiens
gccacctctaatctattggatgcataggctcttcattcacatatcaaattcctgcatggaactgagtcacaatgaacagtaaagattatgaagactatactgaacaggctgggtgtggtagctcatgcctgtaaccccagcactttgggaggccaaggtcaggagttcaagaccagcttggccaacgtggtgaaactccatctttactaaaaatacagaaaattagctggccatggtggcaggtgtctataatcccagctactcaggaggctgaggcaggagaatcgcttgamctggtgaggtggaggttgcagtgagctgagattgtgtcactgcactccagcctgggcagcaaagtgagactccatctcaaaaagcaaaaaaaacaaaaaaacaaaaaaggaaaaaaaagatttcaagactatattgaacaagagggagaatatgaacctgctgactataagaaaggaaacaaatttatacaagtatagacatttcacataaaattatcatgtatatttacttatatacttaagatagtttttttagaa

SEQ ID NO: 131487 - DNA, 551 bp, Homo sapiens
gccacctctaatctattggatgcataggctcttcattcacatatcaaattcctgcatggaactgagtcacaatgaacagtaaagattatgaagactatactgaacaggctgggtgtggtagctcatgcctgtaaccccagcactttgggaggccaaggtcaggagttcaagaccagcttggccaacgtggtgaaactccatctttactaaaaatacagaaaattagctggccatggtggcaggtgtctataatcccagctactcaggaggctgaggcaggagaatcgcttgaactggtgaggtggaggttgcagtgagctgagattgtgtcactgcactccagcctgggcagcaaagtgagactccatctcaaaaagcaaaaaaaamaaaaaaacaaaaaaggaaaaaaaagatttcaagactatattgaacaagagggagaatatgaacctgctgactataagaaaggaaacaaatttatacaagtatagacatttcacataaaattatcatgtatatttacttatatacttaagatagtttttttagaa

SEQ ID NO: 131488 - DNA, 565 bp, Homo sapiens
cattcctactaaaagattggatcagatgttttcaaatgcctttagtaaagatcaccagctgcttcaggcagaccctaaacatagtctttacctcacctgtgtgctcatggttagaggaaatgtacagattttacatctttgcagaaatattgaaagattaaaaccatctctacaatttgtctcctgaaatcaagaaggctagaccagcctgtccctcctgtggaccatttttattcattattagctttagcaaataacacatatgtgaagcccacattcatggaaatgaaagagagattcatgaggctctacaagaaaaaagctcaccttcatcactgtctacaagttgaaggcatggaagaaagctatttcacagaagctgtgttgtttttatcagcactcatacaggagtggccaccactgtatgagtggatgccagaaaaaacatacctgtgcaagatttaccaagcctaagcatagccgtgtatraaagaaaccctccaaaatattttcttaatttcacgttttttctcacctttctgtttcagtatttctttgagattca

SEQ ID NO: 131489 - DNA, 582 bp, Homo sapiens
ctggaatctttactagcaaatcagatcattcttccccagaaaagacttaaagtcatttgttagcctagaggaccctgcttttcacctcttccatctaaaagttcctgcaaaggagatcacaaaagctggcatcttgcccacagtgcatattggagcagcctggctcactgctccaagaacacagttaacaagaacatcctatttcatctctacaaaggtgaaagatctcagctcatgattcctctcagcactccactggtgattgttttaaaaatgcatttgtatgtatacacaatgccttctattgcaatgaatctttcacatttttaaaggcaagttgtatgttctgacactataaatggtagtaaaggtatttcaaattatctcccatttrcttactatattaaccaagagagtacataaagggcaataaagttacatctttatcagaaaagcatactgtgctttggtaagcactgtgttgtcacagcaccactgtctgctcaaagttttgtaatgttttccaaatagaacacaggagtaaagtaacttttatgcagtttgctgggggaaaatattaag

SEQ ID NO: 131490 - DNA, 509 bp, Homo sapiens
tagaaagacttcctatgtcaatggaaaatttatttgcattcatttgcatttattttggtgcactaaagaaccgtaagaagacaaaacatagttctcacaaggctacaatgttcttgataggagaaagaagccattgtagacataaaaatactatactcattgggaaaggtgaagaaaaataaagcaatcacaacagcaactttcacaaagatagttttatggctctatattaatataagtcgttcttcaaaaacaagctgctccaatttcttatagattttccagtgtcctgatgcatgctctctggagttctaaattgcttattaaacacttcaaaacatacgtctggaaatcgccatyagtgaaacagtttcctctgtgcccagaatccactgtatcacatgggcacactccagacacatgtatttcatgtatgactattgcatttagttttcaaaagtccattggtataattttccctattacatttgtttctgacaagtaaaaat

SEQ ID NO: 131491 - DNA, 536 bp, Homo sapiens
tggcttatggcagaaaccaggtgctttgttcatacagaatactccatactcctgatttgcctatggtctaccttagggacggcatgatcatttatctgttagtgaaattaccagaattacagttttgaaaygaataaatatatattctatggtaagtcaaatagtaattatgttagtgtcattagaaaccaagatttttagcatcaaagaaaacaagtacaaatacaagagaaagaagataagcgaaaaatttgtaaccttaaatttgaattgaaaacatcagtttaaatccgagatgtaattttatttttgaaaaaacaaaaccaaaccatttcccagctctgagcaatgaaaaggcctagaagttatggccaaccctgtagtcaagagcacctgtagcacccagattatggttttgcaatataattttccactaagaggaaaggaggctccttagagaaatggcagattccaggtctgaggcagcaaatacacagattgagtctgaacatcttgtcataccaaaaaataagggc

SEQ ID NO: 131492 - DNA, 547 bp, Homo sapiens
attatgaattagaatatgaacaatggtgagtttcagaggcatcatggaatgcagatttatatcaaaataagtttcccctaagggggtatggaagtgaatatgtagtgaatgaaggaagtcaatatacagagatgtgagtgaatatattagtcttcaaaataagaataaaattatttaacctttttaagtctgaacttactcatctacaaaattaatttatggtaaagattagaaattaccggtgttaagggacttgggcatatcaccaataaatgatagcttgctctttttctccttccttccttccttccttttcctttatctttctttcttctctgtctcccttcttccttttgctcctcttttttcctttcctttcttctttcttctcaaaggttgttaaccactttaacaaracaggtggagaggtgggagtagataaaaatgtgggaaaagtcaggaatgtgcacagaggtaagtcacaggattgtaatgttcagtgattaaacactgtatatcatctttgcaattgtcatgtgaggacaaa

SEQ ID NO: 131493 - DNA, 503 bp, Homo sapiens
gagaactgctctattacaatatgcaatgcatatttgaagatgctgtactttgccatgactgaagaaaagacatctctttttgtcagttggcttataaaacaaagaaagctctttaacttctttatgtattgacctgttaagaaagtaaatgatctacatattattcttattatatatataacacacacatatatatcagtttttaatataaaaaatgccattaaataaataacagttaaagaaaaatgttttcttcccttaacggtaaagtacgatgataataaaaagcatgttctaagaacacagtcgcacagataacaagccataaaatgtagcatgattcagtgaaaycattctaaaacaaaaaactgataaaagctaggcatttttcaaagagtacatttcccaatgtacagatgatgctttatacttaacaagagccttttacaaagtgtaagtgatagattttctcaaattgtacatactgttcaagtctcaattgg

SEQ ID NO: 131494 - DNA, 568 bp, Homo sapiens
ggggaaaaaagggaaaagcatctgaatttgttgtaccactaaatggaccgtaagtttgccttttttttttcttctacttatctcttgacctgaacccaatgcaatttggaagttggaagtcagcattgtggttcagacagatcaaagagaaaccctccagttcaggcttgaggagcaaaaatggcaactccgaaacctcagagagagtgagggaaatctcttgatttttttcctcaccttatttttctgttctattgcacygtacacccaggtgaccctgcagctaaaactttaaggaataagaaatttattttccctcaggtggaggtgtgtgtgtctccaagcggatggggcagactctgttggattttctcctgtctttctctcctcctgccacttgattctagaggcagtgcaatcacagaagaggacagtttctgaccagaggactgaaatccagtggtctgaaaaataccagtgagataatagagaaaatagctaggaaaagcaatgattctgtttatgcactcctgggttaacccttgacttatttgagtattaatgtgat

SEQ ID NO: 131495 - DNA, 535 bp, Homo sapiens
aacttggaaaatatatttcaggatatcatccatgaaaatttccccaaactagctagagagrccaacattcaaattcaggaaatgtagagaacccttgcatatttcacaagacaatcatccctaagacacataattgttagattctccaatgttgaaataaaagaaaaaaatgttaaaggcagctagagaaaaaggacaactcacctacaaaaggaagcacattgcattaacagcagagctctcagcagacaccctacaaaccagaagagattggggacctatattcaacattcttaaggaaatgaaattcaaaccaagaattttatatctggccaatctaagcttcataagtgaaggagaaataatatccttctcagacaagcaaatgctgagggaatttgttaccatcagccctgcctgacaagagttcctgaaagaagcactaaatatggaagggaaagaccattaccaacctctacaaaaacccacctaagtacacagatcaatgatattacaaagcaaccatagaaacaaa

SEQ ID NO: 131496 - DNA, 535 bp, Homo sapiens
aacttggaaaatatatttcaggatatcatccatgaaaatttccccaaactagctagagagaccaacattcaaattcaggaaatgtagagaacccttgcatatttcacaagacaatcatccytaagacacataattgttagattctccaatgttgaaataaaagaaaaaaatgttaaaggcagctagagaaaaaggacaactcacctacaaaaggaagcacattgcattaacagcagagctctcagcagacaccctacaaaccagaagagattggggacctatattcaacattcttaaggaaatgaaattcaaaccaagaattttatatctggccaatctaagcttcataagtgaaggagaaataatatccttctcagacaagcaaatgctgagggaatttgttaccatcagccctgcctgacaagagttcctgaaagaagcactaaatatggaagggaaagaccattaccaacctctacaaaaacccacctaagtacacagatcaatgatattacaaagcaaccatagaaacaaa

SEQ ID NO: 131497 - DNA, 535 bp, Homo sapiens
aacttggaaaatatatttcaggatatcatccatgaaaatttccccaaactagctagagagaccaacattcaaattcaggaaatgtagagaacccttgcatatttcacaagacaatcatccctaagacacataattgttagattctccaatgttgaaataaaagaaaaaaatgttaaaggcagctagagaaaaaggacaactcacctacaaaaggaagcacattgcattaacagcagagmtctcagcagacaccctacaaaccagaagagattggggacctatattcaacattcttaaggaaatgaaattcaaaccaagaattttatatctggccaatctaagcttcataagtgaaggagaaataatatccttctcagacaagcaaatgctgagggaatttgttaccatcagccctgcctgacaagagttcctgaaagaagcactaaatatggaagggaaagaccattaccaacctctacaaaaacccacctaagtacacagatcaatgatattacaaagcaaccatagaaacaaa

SEQ ID NO: 131498 - DNA, 535 bp, Homo sapiens
aacttggaaaatatatttcaggatatcatccatgaaaatttccccaaactagctagagagaccaacattcaaattcaggaaatgtagagaacccttgcatatttcacaagacaatcatccctaagacacataattgttagattctccaatgttgaaataaaagaaaaaaatgttaaaggcagctagagaaaaaggacaactcacctacaaaaggaagcacattgcattaacagcagagctctcagcagacaccctacaaaccagaagagattggggacctatattcaacattcttaaggaaatgaaattcaaaccaagaattttatatctggccaatctaagcttcataagtgaaggagaaataatatccttctcagacaagcaaatgctgagggaatttgttaccatcagccctgcctgacaagagttcctgaaagaagcactaaatatggaagggaaagaccattaccaacctctacaaaaacccacctaagtacacagatcaatgayattacaaagcaaccatagaaacaaa

SEQ ID NO: 131499 - DNA, 564 bp, Homo sapiens
ttattaaggcataaacacacagagaaatgtatgtagaagaaagtgaaaagcatttataatcccaacatccagagataattattattaacatgttggcgtgtaaataatgatccccaaccaaaagcaacytaaatgtccattagacaaagtgtgtaatatctatatgatggaatactattcaccagttaaaaggaacaaacactgacatattttaaatcataaacgaacttaaaaagtaacatgctaagtgaaaaaagccagaatgcgagatcacatactgcatgattcaatttatataaaacgtccagaaaagccatatttatagaaacagaaagtagattgttggttgctaaagactggtaatgggaaaggggattaactaactttaagagggcaagaggaaggttattgggggtaataaaatgttctgaaattgatgtatactgatggctttaccactacctggtaaagttactgaaaccattgcattgtatatttgaaatcagtaaattttatgatataaatacccgataaagtggttaagaatatatatgttgatataaa

SEQ ID NO: 131500 - DNA, 587 bp, Homo sapiens
ttaggtattaaaagcagtatcctcatgtgatctaaaaattccacttctgagtatgcacccaaaagatttgaaagcagagtttagaagagtcatttgtccccccaagcttttggcagcattattcacaacagccaagaagtggaagcaagccargtgctcctcaactgatgaatggataaagaaaatacggtgtatgcatacaatggaatattagttagccctaaaaaggaaggaaaagatgcatcatcctacaacatggataaacctcaaagacattcagtgaagtaagttagttctaaaaagacaaatactgtatgattgcgcttatatgaggtacctaaagtagtcaaatttataaagacagaaaggggaatggtggttgtcaggagctagaggctaagaaggaatgatttgttgttgtttaaggagtatagatcttcaattttacaaaatgaaacgagttctagaaattgattatataacactgtaaattgtgcctaacactactgaactacacatgagtatatgcttaagatgaaaaatgttttatgtttaataagcaaaaaagcaaggtacacaatattgaa

SEQ ID NO: 131501 - DNA, 620 bp, Homo sapiens
gggtggcctccctgttttttatgaattcacatctctgacatatcttatttttcacttgtgactatattgaaaatctagagaaacaatgggaaggagataatttctactccttttaacccattgacacaactacttcatatatcaaaagactgactgcttctaaagtagtaagttaaaaccttctttacaatgtatttctcttattttaggtaaaattctggtttcctttaaagatagtcttaacagcataattccattcactctcatgataaatacacatttcttgagttggcaaggggattattggctgagagctcgaatctctctttgaacaatcccagctaccatatagcaaagtggaaaaaagtggaataattctaagctttcttgcagaatttcttgtggcatgatactcstcttacattgtaaattttcatctagtgacctggcctgatatatttgtatattttacctggtccctatgggaatttctaggattcttaatgaaggacaattgtgttctttctagcttttcactataaagatgatgcaaagacagagcctttataagaaatttatttattcaataaacatatatatagcatttattacgtaccagt

SEQ ID NO: 131502 - DNA, 389 bp, Homo sapiens
tgtaactctaccacaacatatgttgtagtatattttaccatggcagatatctctgctttctgcctatgaattccctgaaactagacactacaatcacagtgatagtatttaataaatatttaaagaattgaaacagttgggttagttaactgaaatgtttaggtttaaaataaaggtttgccaagcaaaacatacagtttttgagacttttaataagmactttttcaaaaggatattaaaaaaatatatatatatatgtatttttaggttcatgcttttttacaaccacatttcattaaattaacaaatttttattgagtaagtgttacacatggatttaagaagcagttatacatcaacaagccaaccgaccaaaaaacgacctgtaa

SEQ ID NO: 131503 - DNA, 643 bp, Homo sapiens
gatgatttaattttagcagtacatgtacaagtctagaccatgattttatataaaatgttaacacagaagaatgtattcatcttaaaagtgagtataaagaaaccaattagaaatttacatgcaaaacatgttaatgaagtggcagagttgtgaagtccacaaagttctatttattaaacaagttagaatgttagcataktcctcgggaaatttttaagaaatatttccttaagactcagtggtacaaagaagtgtcctcaaacttcatttgacttaccacactcagatgactgaagctcaggaatattttagatatacatcttatgcaccttggcctctaaaaacaatagttcttcatgcccttagacccagcacttctattcatttcaattgaacagcatttagtaggagtccacctgagccaagatcctgtgctttgagatgcactttttgttttctgtcatgtagataagcaggaaagaaggtatgtgtattcaatggtactaacatcaataactccaggaggcactggtatgagactggccaagtcatactgagaggtgaactagatgggcagtgcccagggctgctgtctttaagggtactaggacattattagaaaattaacaggatggaagaatta

SEQ ID NO: 131504 - DNA, 535 bp, Homo sapiens
ttatatgacacttgcaaaatgttgggatctcttaaatggagttatatgttgaaagaaataaattaaataatactggccaagaaaaatgacagcaaaattgaccaggtcaagctgcatagcttccctctttaatctcagactgtctgyaaatgtattattctcgatcttggaaaagcttttccgaagatatgaaaatactttgttttgttagtacaatactaaactgtgaagaatttacatgtacaaaatgaattttgattcaatcttatacataaatcatcattaaaagcatatataccccatgaattgaagcccaagtttcaactaggatgaatagtaataataataataatgataaatgagatgaaacacatacttcacaaataactgcaacatatgcttcctcaaaatgtttgcttttttatttcataataatcaagctgttcctgatggaagacacatctcaaacaggcaaagtgctcatggtataaaattattgatatgaactgtaaatgaaaacaaagctacttggtcc

SEQ ID NO: 131505 - DNA, 535 bp, Homo sapiens
ttatatgacacttgcaaaatgttgggatctcttaaatggagttatatgttgaaagaaataaattaaataatactggccaagaaaaatgacagcaaaattgaccaggtcaagctgcatagcttccctctttaatctcagactgtctgtaaatgtattattctcgatcttggaaaagcttttccgaagatatgaaaatactttgttttgttagtacaatactaaactgtgaagaatttacatgtacaaaatgaattttgattcaatcttatacataaatcatcattaaaagcatatataccccatgaattgaagcccaagtttcaactaggatgaatagtaataataataataatgataaatgagatgaaacacatacttcacaaataactgcaacatatgcttcctcaaaatgtttgcttttttatttcataataatcaagctgttcctgatggaagacacatctcaaacaggcaaagtgctcatggtataaaattattsatatgaactgtaaatgaaaacaaagctacttggtcc

SEQ ID NO: 131506 - DNA, 596 bp, Homo sapiens
tggtagccactaaacagccaactgggtgcctcacccatgaacacttgtgttgaacaactgactggcccacttatcctgcacatgtccagcctgaaagctggtcctatggtgatctgatcccctcaatagaccactgcaaatcaactcagccctgccatacttgggctcacctgtgtccagcttgacarctggtccagtggtagctacatgtccctggaaagacttctgcaaggccacccagtcctgctgcacctgcttgcacctgcatacaatggcacctggcctgacaaccagtgctgccgtggcttgaacctgtggacagacttcctcaaggcagcatggcatggccatgctcacatgtacctatgcccagcacaactacttgtctggctgcagcttccttcccctgacagactgctgcagaaccacctggccctgctgtgctcatgtacacctgactcaatagccagtccagtggtatctccagtttcccagaaagacagccacacagctgctcagccagttgtaccctgtccaacagctggtctagcaggagccactgccttcatggaaagcccagaggacagtctgtcaat

SEQ ID NO: 131507 - DNA, 596 bp, Homo sapiens
tggtagccactaaacagccaactgggtgcctcacccatgaacacttgtgttgaacaactgactggcccacttatcctgcacatgtccagcctgaaagctggtcctatggtgatctgatcccctcaatagaccactgcaaatcaactcagccctgccatacttgggctcacctgtgtccagcttgacagctggtccagtggtagctacatgtccctggaaagacttctgcaaggccacccagtcctgctgcacctgcwtgcacctgcatacaatggcacctggcctgacaaccagtgctgccgtggcttgaacctgtggacagacttcctcaaggcagcatggcatggccatgctcacatgtacctatgcccagcacaactacttgtctggctgcagcttccttcccctgacagactgctgcagaaccacctggccctgctgtgctcatgtacacctgactcaatagccagtccagtggtatctccagtttcccagaaagacagccacacagctgctcagccagttgtaccctgtccaacagctggtctagcaggagccactgccttcatggaaagcccagaggacagtctgtcaat

SEQ ID NO: 131508 - DNA, 621 bp, Homo sapiens
tgttcaaagttatgttgaaattttcccctaccgtcacccaaaacccttagtacctatatttggtaagcctgttgcctttcaatagaaatctgaagactcttaatgtgaaactgaggttaaacgaagtaaggcttttgataaaatgcaaataggaggtattttggagagaacgcagatatttttctttttggtcactataggcagtatatacgaataaatccccaaaggagcagacgcatgcttacagaaaggatttgaaagaaatgtcattacaaattattttgctttagcaatctaaaaaaaamcctgttcctataaaagatgagttattaactctgggaaccctggagctttttttctcccattatatgattatagagtatcccattttatgtagattatgcgtttgaatttttccaatgaattctcttccctaaataaaaatgtaacaatctcctggaagaagcatgataatactgtaatttctatgaacgactcatctattgaaagattttatttttctagatcaaacaaaaaaatgaagcactttacttagtgtctttcacatactaggtactgaataaaatgtctgaacaaacaaaatacatgggaagaaagaac

SEQ ID NO: 131509 - DNA, 600 bp, Homo sapiens
aaacagcaacacaaagcaaaacaaaaaactgtggagctgttaggtgattgaggggcttaagaacacccaagagtaatagtttagtcttgctaagattgaagcgacatgacaaaaccattgtttcatacagaaatttatattagtgacatatagtatgacagaaaaaaaattggacagctttttattcaacatttcagtatgcaaattaaaagtagcacatctaaaayattgcttttgctctttccaaaactgctatcagtctgatgtgggaggtcctctaactattctatcatgagactgacctgattgtgatctgaactagtcttatcttatgtctaatagaatgactagctatctttttcacagcactagctgccccctctttctttttaacatttttgatgtaatactgtgtaaacaatattttatttgtgcatgaattcaggttagacggcattaaatcagagaagagttcaaacattgtttttgttcaaaagatgtgtcagtgatgggatggcagatgactccggtatgcaaatattttggctctcatggaaacaagatgaattccagcataaactacttccacttgcagaatta

SEQ ID NO: 131510 - DNA, 524 bp, Homo sapiens
tgcagcttataaatgcagttagacacagaggatttccattgcatctccagtttgttggtggctggttcctcctttgctggtctcttttattccatctggaagattctgttcatgtacacctctgaactctaaactagttgttcctgactttgwctctgcaacattttttcaggcctgttgtattcctgaccttgcttcctctgtgcaatatatttactccaggtcatctctaccatgcctgtcaccattttgcttaatggttggggtttgatgtttttgaccttgggttgaacccaggaatgaataacttctctatactggctcagtggctgaattatcagtgtctttccctgacaatgtgcatgttttcaatgattagaaatgcagcctccaaataaggaaaaaggataatatttgcataggccgtgcttagttgcaggttttggagccggagatgttccagcatagatgcctgttcatagaagtgctccaaaattgtatttagtgtaatgacacgtcctctt

SEQ ID NO: 131511 - DNA, 598 bp, Homo sapiens
agaatggccaaacctaatccaaaatctttgaacaaacaacactataagatctgtggtgttctttcatgtacaactgaggtttttcagccaagactgactaattagtgctagttaggaaagactgtccacctgggtttaccctcctcttaacacccccacatctccmtgaatcttggctaaggggtactggagctgccagcccatcctctgtgcctctcagttttcccctactatctgtccacagcactgccacctctcacccaatggccatgccctccagctttcagtcaacctcaatggcatggccattctttcaaagttgctcccactcttcatttaatctggttagaaaaaatgacacactaaagcattttgataaacaaattagaacataatgatagttttccatattgttatatgatgtgacatataaaatgaagcaaagtaggagttgttttaaagggtggtaggaagaatcttcttacctgccagctgtgttcaccaagtatttaccttcacctagatattgtctgcaggaccatgttagtcctatacagatgcctttaaatagtactagtcattaatataatttgatatc

SEQ ID NO: 131512 - DNA, 477 bp, Homo sapiens
gaattctaccaatgcttgtaactgtaaatgcaatctttttattcttccatttaccagtaatgatyctggttagagaaatgggggcatcccaggcaagtagcagtgccatattgggacaaaagttcttatgattctttcacccccatttgctgaagaaaacgaaatggtcttagaaattgcctcatataatcttataacaatgcacatgaagaaattggagaagttaattggctttctgtttacgcaggttgcaaaaaccagaagccaggttttgactgagcggatcagagccagaacatttgtctgcttctcagtccgtttatcctttcatcatatcatgcattttaggacttaaatccagagtgtggctcctgtggtatctgagaatgcaaaaatggctgaggtgctcttggaagtttttagagtttacttccctgacaaagggaaaaaattgaagcttacttttatggcttattt

SEQ ID NO: 131513 - DNA, 477 bp, Homo sapiens
gaattctaccaatgcttgtaactgtaaatgcaatctttttattcttccatttaccagtaatgatcctggttagagaaatgggggcatcccaggcaagtagcagtgccatattgggacaaaagttcttatgattctttcacccccatttgctgaaraaaacgaaatggtcttagaaattgcctcatataatcttataacaatgcacatgaagaaattggagaagttaattggctttctgtttacgcaggttgcaaaaaccagaagccaggttttgactgagcggatcagagccagaacatttgtctgcttctcagtccgtttatcctttcatcatatcatgcattttaggacttaaatccagagtgtggctcctgtggtatctgagaatgcaaaaatggctgaggtgctcttggaagtttttagagtttacttccctgacaaagggaaaaaattgaagcttacttttatggcttattt

SEQ ID NO: 131514 - DNA, 626 bp, Homo sapiens
tttcccttccccttttaaaagactgtgattctgctttaaataataagcatagcccaatttacaaagtaaaaattttataagggagatgatatgaaacacattttatacagaagtgtcaggctctgttctaaacgcctccgtgttcacttatttacattaatacacaacatttttacgagaaaatgggagcacagagagggcaaataactttctcaagcttacacatttgttaagtgcatactggaatcaaattcccagcgatttggtttcagaatctgtactcttaactactatgctatgctgcctctcaaatgctctttgcagggtaatacagcaactagagtgaatgcgattactgaataaaactgaatctaaatttcctggtggtgctagcaaatgatgaaatgcactgtcacttaattttcgttgtgcttgaagaatgattttatgaaatgggcaatgaatcaacctccatattataacagaagattcaaagagttgtttttgaagacactttagcttcccaagttgggcagatggcctaaatcacctcttcatcaggagccttatgtcagtgtcaactttgayttatctgagctttatttaagaaggtagcattttctttc

SEQ ID NO: 131515 - DNA, 532 bp, Homo sapiens
acactttagcttcccaagttgggcagatggcctaaatcacctcttcatcaggagccttatgtcagtgtcaactttgatttatctgagctttatttaagaaggtagcattttctttccacttgagtattctcattgagccttcaaatttaaacagtaaaaccaatggatgtgtcttttaggataaatcacgttggccttctgtagccactcctctatccccataatttcttctatgtttgttgcagtcttgtgtagtgtagtggttaattttagatgtcaacatggctgggccatggtgtccagaaatgtggccaagcattattctggatgtttctgtgagaatgtttttggatgagattaatatttcaatcattagaatttgagtaaagcagattgcccccataatatgggtgagtctcatccaatctgttgaatgcatgaatagaacaaaagactgacctcctstcagtgagaggaaattctgccagcagatggctttagaccttgaactgcagcatcagctcttgttggg

SEQ ID NO: 131516 - DNA, 505 bp, Homo sapiens
cattacaacacctcgctgagatgtggttttaagcattgaacttgaaatgttagtttgtttttatgaactggacaaactctttaaagccatcaccattctgctcctcacaataaaattagccattttgcacttatattttctggtgccaagctacatgtattttactctggagaaacatcttagtttttgtgaaagatggtttggaagaattaaatatgtgcaaagtgaatgatggtggcaataaaaattatttttggaaagcctgcctttattaaaaactagtttttcagtggaaaaataagacacatgttttctagcagtatgtatgaagcttttaataatttttaagtgatttgcatattttatcatgtttacagcacatttaatcctcaaatatctagggataaacttgaaactttatatttgaatgattaaagaaatggagaaagggtygtgacttccttactatagctaatagttttaatagtatctatcatttaatgag

SEQ ID NO: 131517 - DNA, 623 bp, Homo sapiens
agacccaaggctcctgggattttcttttcactgggtaagatttctggaaaatcctaatttatctgatttaatgtctgtgagaaagtaatttccagcctacaactagttctcatacagatatttttgttgccttacaaaattctgtgtttcacagtctctaattactgttttactgacatgcaaataaagatctatagtgatcacatttgtcccaggcatgcttgctttggcagaccccacttatcatattaaacagattctaattctaatgcaaatatttgaatcatcacattaaatatatttttgataaaaaattttaagataattttactttaatggaattagttatttcttttgccctggagatttaaattttattatgtttgtatgtgaattgagtcacaggtgacataacatttttgcagctattactcraatatctcattaatttttaaattttgtagccactgatatataattattttcaggcccttggaaagctcaaagagtctcttgtctgtgtctgtaatacctaatgtaaaaaatgatcctagttgtgcaaagctagtctaaactattgatattctatgcaaagatgtaagacagccactgcaatggtagtt

SEQ ID NO: 131518 - DNA, 452 bp, Homo sapiens
aaatgatataaaaggtccctaaatatggccataatctttattgaataatttaagatattttgatatcccttctgttttggaatgaatattcttttccttgaatcattttataaggattcatatcatagttgctatatgagtggtccagatgctatgtgctgttacagttgaaaagaagcagagtatastttctgggtcggaaggctcagggaaggcttcatgaagaagacggcactgggacaggtccttggaaattattagtgtccagagaccattgacagcaataggaatgcctcttttaaaatattatgtatgtaatatactaaactggggttcagataaaaagaaataattaaatttctttttcacagtaatttgaacattccattgaaatcaacaaatccatacagctggattcttggctaattaaaaaaacatcatgcccttctgat

SEQ ID NO: 131519 - DNA, 571 bp, Homo sapiens
aacttgctcctaaatgacttttgggtaatgtattagcccattcttgcattgctataaagaaatatctaagactgggtaatttttaagaaraaaggttttattgggcttatggttctgcaggctgtacattgcttctggggaggcctcagggaacttttactcatggcagaagacaaagctggagcagccaggtcacacggaaagagcacaagcttggtgctgggagcagggggaggtgccacacgcttttaaatgacaagatcttgtgagaactaactcattattgcaagaatagtagtaccaaggggatggtactaaaccattcatgagaaattcactctcatgatttaatcacccccaccaggccccacattcaacactggggggatgacaattgaacatgagatttaagtggggacacaaatccaaaccatatcaggtaaacaacaaaattaaagcagaaatcaaaagattctttgaaatagatgaaaacagtgacacaacatagcaacatctctggggtgcagcaaaagcagtgttgagaggaaagtttttagcactaaatgcctac

SEQ ID NO: 131520 - DNA, 571 bp, Homo sapiens
aacttgctcctaaatgacttttgggtaatgtattagcccattcttgcattgctataaagaaatatctaagactgggtaatttttaagaaaaaaggttttattgggcttatggttctgcaggctgtacattgcttctggggaggcctcagggaacttttactcatggcagaagacaaagctggagcagscaggtcacacggaaagagcacaagcttggtgctgggagcagggggaggtgccacacgcttttaaatgacaagatcttgtgagaactaactcattattgcaagaatagtagtaccaaggggatggtactaaaccattcatgagaaattcactctcatgatttaatcacccccaccaggccccacattcaacactggggggatgacaattgaacatgagatttaagtggggacacaaatccaaaccatatcaggtaaacaacaaaattaaagcagaaatcaaaagattctttgaaatagatgaaaacagtgacacaacatagcaacatctctggggtgcagcaaaagcagtgttgagaggaaagtttttagcactaaatgcctac

SEQ ID NO: 131521 - DNA, 571 bp, Homo sapiens
aacttgctcctaaatgacttttgggtaatgtattagcccattcttgcattgctataaagaaatatctaagactgggtaatttttaagaaaaaaggttttattgggcttatggttctgcaggctgtacattgcttctggggaggcctcagggaacttttactcatggcagaagacaaagctggagcagccaggtcacacggaaagagcacaagcttggtgctgggagcagggggaggtgccacacrcttttaaatgacaagatcttgtgagaactaactcattattgcaagaatagtagtaccaaggggatggtactaaaccattcatgagaaattcactctcatgatttaatcacccccaccaggccccacattcaacactggggggatgacaattgaacatgagatttaagtggggacacaaatccaaaccatatcaggtaaacaacaaaattaaagcagaaatcaaaagattctttgaaatagatgaaaacagtgacacaacatagcaacatctctggggtgcagcaaaagcagtgttgagaggaaagtttttagcactaaatgcctac

SEQ ID NO: 131522 - DNA, 422 bp, Homo sapiens
cttttgtaaaccaggagctgagttggggttttttttttcttctttttaaattctcagatgcaaaagggtatgtttcaatgtgtcttacatttaccttgaaacaatctcagtatgtttttttccatttgactggcacttggagaagataaagcaaggtgaaaaaaatactaaggaggaacctgcagaggtttggaggaagggcgttcattgtcatcgaatttaagaaagagaaggatatgtaaattttactaattawtgcctcttacacatcctttcttgatagtgaccccaaggtccaaagacgttaaatcagttgcctaaagcccagacccagaaagtcaggactagaccttcctctgtggattcccactcgtcctctttacactgccctatgctgcctctagcgttagccggagaaactg

SEQ ID NO: 131523 - DNA, 575 bp, Homo sapiens
ccactcctagggttggagttcacaggcaggaaaatgtagcccactcaccccacatggccatggtgggaagggccggcctcccagcagccatggccctggcctgggtctccctcatatgggactcttacggatccttaacccgccatgctggcagtgttcaagtcctgcctctggaaggcattccctgtggccgtttcccttctcttaacacagggaagctaatccagagagagtccaagtggctgtgcagagccaggctgaggctctggttctatcccaggcaccaaagcccagggattccctcaggaatagrggagtgatcaggggacaggtcccagaactcctagaactccatctagggttccatggttccaggagcaccatgaggaagacccagttcagcattagaggctccaggctgccagcaaaaaaagactcttgtcatgctttgcatgtccatttagtctggctctaccaggctgtgggctttgtagacagaggctggatcctgtttaaggctgtgccccagcacagagcaagctcccagtatctgccctcctccctggagcctgcta

SEQ ID NO: 131524 - DNA, 582 bp, Homo sapiens
tattttaaaaatagaggaagaagccctttctaactctggtcccaaggaacacctgttgcagatgccacttagtctcaagcttagctgtcatgtcctactcataaactcagccatcttccccttctttctcatgccaaccagtatcatatgtcaggctgaatatatccgtgctgatgtcagagaatcacataacaccagaggaaaacaaggccagccagaatgttgctacattttcagagaagaaaaccaaagcaaaaaggccaaaatatagcttccaaattttgcatattgtcattgaaattcaaggtttcagataaagtttgaaactcttgaggccaagtggcgagactgcaattacgttactttttagcagctgcagtttttttctraatcaagtcatctcactttgttaaaaaaaaaaaaaaagtgagagggagggagagtctcatgaggcaaggaagtaaattgaacatttattttgtgcctataaatactaaaagaccaaaaaggtaagcatgctttttttcagctcagttttatcataaagtgtagcatctttcccatccagtgcctgagccatcc

SEQ ID NO: 131525 - DNA, 576 bp, Homo sapiens
acctctgtgaatagaattccattgaactattggttttgctacacatggtggagtcagggataaggaagtccccacaggggtagctgccactttttcatgtaaaaccaaaatgctgccatggccaggctgccggtactcttgatataccatttccatttgactcataatgcctgttgggcattcctagcttgttaatcatcaagttggagttgacctgaactaaaatgggaatggcaaggcagagattcacaatgcttgcacggctttcaacaagaccttagtagcaggttaatagcttcctttttcacctatgttaggcagtgatggtgtcttgagaggtcctgaaaatgacctctctgagaatctggcagcctttaagtctttaactgaagctgtgatttcttttctccctctgggtttttattgktcttgaccaccctaaagggagggtgcatgtagtgattcctgtatgggtcctgtctatcactgatggaacagggaagtatacgggcacattaccaccttaatttcattacatgttcagatgtggaagtcacaatagtacatagtggtagc

SEQ ID NO: 131526 - DNA, 517 bp, Homo sapiens
atattttacaacatcctgacttaacctgtaacatttttcatttgtcttgtctttgacctgcctttcccacttcaacatgagcccctagagaatggtatcaaggtaatggtttatctataatttgcttggttttgtatatggaaagtgaacactgattttcttggcagtagctgcataccacatgctgtagctatctaatttgaggactaggtttttttttttctttaatcttgataaacttggtttgggttaaaaatatcattgttacttaatttcataaataataataataaagcaatgccgttagttatttacttatgttttgggtgaactcccaaggtaaaactgcyaatgaattcagaatttttaattcagaacaattcaaactaatggaacaatactttcaaaacagaacccaactattaacctagatttttttcatttgctgcttaataatattttaaaaataatataaaaattatatctttatactaacaattagttttcttatttgagg

SEQ ID NO: 131527 - DNA, 601 bp, Homo sapiens
aattcaaagatttaactcctccttagaagcctagcagagggccagctatttgccttctgaagctggagaataatccaattggttccatccaactgtttgtcactgcagcctatgcctgcagtactcaaaatagctagttacacagttctgaagattgtacaaccaaaactttaaaatcttggagtctactgagctctcagtgtcaactgatcattcttctctattttcttaatgtgctcttgtttctcaagtctctagtgtcctttcacttcrtatcctaccaccttccttgtctcattagatgaccttactttctaatttacagagaaaatagacaccatcagccaaggtctccttctaactcctgtctctgcacgcacacacttgcatctgtatctatcctcttctcctacatatatctgtagaatgtgtatcttttctcctaaagaaatgtcctctttcttctgggttcttaattcccattgtttgtgcttttgcagaagcctcactctattaattgtgctccttcttccttatctttagttttgctctctttggttattctttccagtctatatgtaagccactcccatggacccca

SEQ ID NO: 131528 - DNA, 601 bp, Homo sapiens
aattcaaagatttaactcctccttagaagcctagcagagggccagctatttgccttctgaagctggagaataatccaattggttccatccaactgtttgtcactgcagcctatgcctgcagtactcaaaatagctagttacacagttctgaagattgtacaaccaaaactttaaaatcttggagtctactgagctctcagtgtcaactgatcattcttctctattttcttaatgtgctcttgtttctcaagtctctagtgtcctttcacttcgtatcctaccaccttccttgtctcattagatgaccttactttctaatttacagagaaaatagacaccatcagccaaggtctccttctaactcctgtctctgcacrcacacacttgcatctgtatctatcctcttctcctacatatatctgtagaatgtgtatcttttctcctaaagaaatgtcctctttcttctgggttcttaattcccattgtttgtgcttttgcagaagcctcactctattaattgtgctccttcttccttatctttagttttgctctctttggttattctttccagtctatatgtaagccactcccatggacccca

SEQ ID NO: 131529 - DNA, 601 bp, Homo sapiens
aattcaaagatttaactcctccttagaagcctagcagagggccagctatttgccttctgaagctggagaataatccaattggttccatccaactgtttgtcactgcagcctatgcctgcagtactcaaaatagctagttacacagttctgaagattgtacaaccaaaactttaaaatcttggagtctactgagctctcagtgtcaactgatcattcttctctattttcttaatgtgctcttgtttctcaagtctctagtgtcctttcacttcgtatcctaccaccttccttgtctcattagatgaccttactttctaatttacagagaaaatagacaccatcagccaaggtctccttctaactcctgtctctgcacgcacacacttgcatctgtatctatcctcttctcctacatatatctgtagaatgtgtatcttttctcctaaagaaatgtcctctttcttctgggttcttaattcccattgtttgtgcttttgcagargcctcactctattaattgtgctccttcttccttatctttagttttgctctctttggttattctttccagtctatatgtaagccactcccatggacccca

SEQ ID NO: 131530 - DNA, 380 bp, Homo sapiens
taatatttgcttacatatttaggtgctccaatgttgggtacatatatatttacaggtgttatctgcccttgcagaattgaccttctaattatataatgacctttatttttacagtttttgatttaacatctgttttatttaagtatagctactcctgcttccttttggtttctgtttgcttgaaatatcttttccagtttttcactcagtctatgtctgttcttataagtgaagtaagtctcttgaaggcagcatattgttaagtcttgtttttactttggtgttgttcattcaactactctatgtcttttaattggagaaytgagtccatttacattcaagataatttttgatagatagagactcactactgccatttc

SEQ ID NO: 131531 - DNA, 357 bp, Homo sapiens
atcacctatttgctgcagcttaagscacaacagtaactgagggagaaaaaagttgtatttagactaacgtgggtttgaatcgtagctccattaatgactactctgtgatcttgggagattcactccatttctatcagcctgggtttcttcatctgtagcatggtgacagtagtaacactgactctccagggtcctgctgaaatttaatcaagttgatgtgtagtatgtggcatgaagtaaatgctcaataaatgttagctgaagacaaaaccaaaccctccttccagtgtagttccttaaactattgtcaaccacaattttaaaaattcgtaaagtttagaaatgtatgttgtgttg

SEQ ID NO: 131532 - DNA, 357 bp, Homo sapiens
atcacctatttgctgcagcttaaggcacaacagtaactgagggagaaaaaagttgtatttagactaacgtgggtttgaatcgtagctccattaatgactactctgtgatcttgggagattcactccatttctatcagcctgggtttcttcatctgtagcatggtgacagtagtaacactgactctccagggtcctgctgaartttaatcaagttgatgtgtagtatgtggcatgaagtaaatgctcaataaatgttagctgaagacaaaaccaaaccctccttccagtgtagttccttaaactattgtcaaccacaattttaaaaattcgtaaagtttagaaatgtatgttgtgttg

SEQ ID NO: 131533 - DNA, 357 bp, Homo sapiens
atcacctatttgctgcagcttaaggcacaacagtaactgagggagaaaaaagttgtatttagactaacgtgggtttgaatcgtagctccattaatgactactctgtgatcttgggagattcactccatttctatcagcctgggtttcttcatctgtagcatggtgacagtagtaacactgactctccagggtcctgctgaaawttaatcaagttgatgtgtagtatgtggcatgaagtaaatgctcaataaatgttagctgaagacaaaaccaaaccctccttccagtgtagttccttaaactattgtcaaccacaattttaaaaattcgtaaagtttagaaatgtatgttgtgttg

SEQ ID NO: 131534 - DNA, 528 bp, Homo sapiens
tatagaaacataagcaattgttatcatatctttctaactctgccattgagcatgagataagtcacttgaacatttgagtcctttcaaaagcttttatatattgtacttatataaatgctggtgaaaacacagaagattgtggacagtcaagaagatgatccccttcttgtttatatcctgtgacacaaaatcatcaccccttgaccttatcagaaaacaaaaacaaaaacaaaaaccggattcatctttaagatgtcccctgaagtttaggcctcaggtgatgttatccagacaagatcgaacttagtcgtaaggaatgtataatatatttttccggagtcatgatggtgtcttttgtgcttcctgaaataatattaacagtacaattttattgaatagttactttgtattatatcacttcaagcactttgtgttatcttgtttaatctccacaacartcttataaggtagaaactattattcttctaattttctacttcaggagactgaagcgtgagaaatgaagta

SEQ ID NO: 131535 - DNA, 528 bp, Homo sapiens
tatagaaacataagcaattgttatcatatctttctaactctgccattgagcatgagataagtcacttgaacatttgagtcctttcaaaagcttttatatattgtacttatataaatgctggtgaaaacacagaagattgtggacagtcaagaagatgatccccttcttgtttatatcctgtgacacaaaatcatcaccccttgaccttatcagaaaacaaaaacaaaaacaaaaaccggattcatctttaagatgtcccctgaagtttaggcctcaggtgatgttatccagacaagatcgaacttagtcgtaaggaatgtataatatatttttccggagtcatgatggtgtcttttgtgcttcctgaaataatattaacagtacaattttattgaatagttactttgtattatatcacttcaagcactttgtgttatcttgtttaatctccacaacagtcttataaggtagaaactattattcttctaattttctacttcaggaractgaagcgtgagaaatgaagta

SEQ ID NO: 131536 - DNA, 545 bp, Homo sapiens
ggatgaggggaaggtgagaatgacctttctgcttctgctatttttctcaaatgctgaagtgccatatttgaggatagcatgtcctaaaccccatcaataagaagtgtgataagatgaattgtcaccaaggaatgctgcaggaagagaagcccaaaattrttattctttcaggagagtgtgaatgtgtctatgaggaggcaggtggacccaaggaggtgtcagatttggagtgaggaagaatcgaagtgtgtgtaacttgtcaactttggccttggtgtcatgtcagcatacttcagtaagaatagaaggcagctactaatccccaccagggactgtacatctcagttaaaaccagtgaggacagtggccaatgactgggaaagttatgtcttttctgatgagcttctcttggaaactcttcctataaactcctcttggataggaaagaaaaagaaggagagaaagtgctaaatttgtcagtatgcctgaaaaagaaaatacctggaaggactaaaactaaaaactaaaattatatcttgaattgg

SEQ ID NO: 131537 - DNA, 545 bp, Homo sapiens
ggatgaggggaaggtgagaatgacctttctgcttctgctatttttctcaaatgctgaagtgccatatttgaggatagcatgtcctaaaccccatcaataagaagtgtgataagatgaattgtcaccaaggaatgctgcaggaagagaagcccaaaattattattctttcaggagagtgtgaatgtgtctatgaggaggcaggtggacccaaggaggtgtcagatttggagtgaggaagaatcgaagtgtgtgtaacttgtcaactttggccttggtgtcatgtcagcatacttcagtaagaatagaaggcagctactaatccccaccagggaytgtacatctcagttaaaaccagtgaggacagtggccaatgactgggaaagttatgtcttttctgatgagcttctcttggaaactcttcctataaactcctcttggataggaaagaaaaagaaggagagaaagtgctaaatttgtcagtatgcctgaaaaagaaaatacctggaaggactaaaactaaaaactaaaattatatcttgaattgg

SEQ ID NO: 131538 - DNA, 656 bp, Homo sapiens
ggatgctattttaaatgatattctgtctgtgtggctatatatgtatctacatctgtatgtttgtagctgcatgtgtgtttccatgtatgtatgtgtataagcctatatgtatgtgtctctggtttgatgtgtacatgtctgtgtgtgtggtgcatatgtggatgtgtggatattttatattgtaggataaaatgtttgggcaatgggttagagctgtgtactgatgaccccaaatgtccttataagatatttttatttttttcatgtaaaatatttctataatatttgactctatgggtagaattaacatttgcacttgaagtaaaaataattattaatcccttcctgaggccttttggtgttctttgaagcttttgctaaaaataagaggaaggatcttaggtaacatgcttactttgggaacagtctcagtatgacctaatcactgatttgctcattgcagttcyccagaattgcatcaagaatgtagctctgtgtcctccgttctctggagctgaagcatggccacccctctaatctccctgtttttcatctttctctcgtcttcacctctttttaatagactagcagagaggtaggagagtaagctctagatttccccaccttccttcattttcaaggcttgcatagtggaa

SEQ ID NO: 131539 - DNA, 613 bp, Homo sapiens
aaggagaaatacaggtattaaaggactaagaattgggaggacttaggacatctaattagagagtgcttaaagagggtcagcatagccttgccggcaaagattatttatttactttaagagttaagagtggcagtttggggatagcaccaggagatatcagctgtgatggcttggagaaacagtgtaaacaaaagcagggcatgtatgagtagttgagaacagtgaataggagtatgactagacagaaaatagtagggatgacaagttttttgaggcacagtctaagttggtctggtgtctgggatgagactggggcctaataaaaaggagcatctatgcaggaccttaaatgggctgtaccctgtagcattctgaggacaggcctgagttctgagaagggaaagtggtaaaagtattgtccagtcctttttaagttggtggctgagcttggtgaggtgtgtttttaaaagacctttagtccattctacttttcctgaagactgaggaccataarggatataaaggtttcactgaacactaagagcctgaaaaactgcttggctgatttgactaataaaggctggtctgttatcagactgtacaaaggtgggaa

SEQ ID NO: 131540 - DNA, 573 bp, Homo sapiens
ctttttcatgtatggatagttgtacacatggatgtttttgtggggggatgatcctggagagttctactgtgccatcatgctgagtttagttctggggttgttttcttaatttcttttttgaaaagtttgtttcagagtatggagactagcaacattattgatttttatatgttgattttatagcctgcaaatttactgatttgtttattagtttttagggcttttttggtgggattactatggttttctataaataagatcatgtcatctgcaaacagacaatattacttctttctttccaaaggaacaccttttyttttcttgcctagttgagaaatctcacaatttctcacaaataaagtatacccccattaattcatcaggtcacagtcattctggagaaaggctgtttacttacttttctacaagaggaaatcgtgattatttatacctttgcatttgaccagttgctctcaaagccctcaagtctctggggagaggaagaaaccttgcttggactataatcacactgtctactttacaagtgtgaaaaaagtgctattaattttagca

SEQ ID NO: 131541 - DNA, 479 bp, Homo sapiens
ttatccccctgtctgtgaactgtgctttcagtaaaaagtaatgtttccatgttgggaattcccattatttcttttaaatatcctctaaagccctggtttaaataggaatcaaagttcttattccagtgagtggaacaatgcagtaatatagatgtagggatcaaagacatcactgaaccatcagcctcctgcctccagtgtagccagccatcctcagccatccccagaagctgcatcctcaggggcagcacccggggctgaacagtgagctggccaggctggagggaatctcctcaggggaaatgtgtgaatagaccctgatttggaggcaatatcctcccccrcaccctttattgaggtatgattaacacataaaaattgtatatattttttacaacatgatattttgatatatactgtgaaattattaccacaatcaagctaacatccatcacctcacgtggttacctctgtttccc

SEQ ID NO: 131542 - DNA, 608 bp, Homo sapiens
tggcagcacctagcctgggtctggctacattgtcatatctttggcagggttatgaaggattgtacttcagaacaccaacatcagattcaagacagtgtcactcgttaaactctgtcaagggctgggtatggtggctcatgcctgtaattccagagctttgggaggccgaggcaggaggatcacttgaagataggagtttcagaccaacactggcaacacagtgagactctttctctattacaaagaaaaaagaaaaaaaaatctgtgaagtattccactagggaacattatgttttaggtcacatttatctgcagacaatgaactagacagtgataaaaatggtagagtctagaaccatgttttcaatgaccatatcacctttgctttcatatttacttgagcttaaagaaggctgctttgggctttaatcacttttgggttgcattacattatcctagcatctctgggacaaaaacttgttatatataagatatataacagtgaatatgtataaagtgtagaaataaactcgcccctcttcatwactaagtgtactttagcattttggaaaaaataatgtacaacatgcaaataaaaaataattaaa

SEQ ID NO: 131543 - DNA, 576 bp, Homo sapiens
ctagcatctctgggacaaaaacttgttatatataagatatataacagtgaatatgtataaagtgtagaaataaactcgcccctcttcataactaagtgtactttagcattttggaaaaaataatgtacaacatgcaaataaaaaataattaaaacatgcctttggacaagcatgcctataaaaactaagcaaaaccacaatagttgaataggtatctggaacattgttctttggcagggaaatggcagaatcccaaaattccttcttttctcttaaaaaaaattaatctgctcctttggcagattgtgttttttaaagatgatcacagaaacatttcctatctcacaaaccttttctataaatatgactttgacatcctttctcacaaaagctgggatctatgttgcttccccttggcatcgggcaggctttgatgactgtttgaaacaayggactatggtggaaatgtcctctgtaaattctgaagctaaatcacaaaaggcaatttccattctgccttgcttgctggaatgcttaccctttaagctttaggctgctaattaagaagtcattctc

SEQ ID NO: 131544 - DNA, 490 bp, Homo sapiens
tgctgcaataaacatggagtgcagctatctctttggcatatcgatttcaattcctttgtatatatactctgcagtgggattgatgggtgatatggtagctcaattttcaatattttgagaaaccgcaatactgttttccctaatgcctgtactaattcatgttcccatcaacagtatatcagtattcccctttctccacatccatgccaacatttgttatttttttgtctttttgtttatagctgttctaatggtggtgaggagatatttcattatggttttcacttgcatttccctgatgattaattatgtcaaacattttttcatatacctgttggccatttgtatgtcttctttggggaaatgtctattcaggtcttttgccyattaacaaaaaatcaaattgttaattttttttctactgagttgagttctttttatactcaatattaaccccttgtcagacgcataatttgcaaatattttctcc

SEQ ID NO: 131545 - DNA, 541 bp, Homo sapiens
ttgacataaaagacagtggtggacattagagaaagcctttgtggaggctagcctctccagctgccaaggcaaggcaaagagaaacttctagtgaagacaatactgatttccttctcttcatgctatcctcagtcacactatagtggcctttggcctttgtgtggagaaaaggtaaggactgtgaagactttttccttgacatcccgggctgatctcaaacatcaagtcacttgcaaaggggatgggagctctgtgttcagatgagtcctgtgggacattcaggaagaacagaaacagttccaagatgctggatccaactgcacattagattaagctgcctggtgttaagacttttagtgaaggtcatgtggttaccagtctgcgtgccaaagagcagtgtgtgttaaggtctgagctcatgtccttactcaagattccttttagtcaaagaaactcagtggatayaaacttgagttatgatgatactaggccttctcataatacataatccagaaatatttccaagaatgccactaatcat

SEQ ID NO: 131546 - DNA, 470 bp, Homo sapiens
ggtgtcatgtcagacagacttgggttcaaacccagatgtgtcacaagaactgtgcttttaagcttggatctcaattttttaatctaaaaagtgaataaaattatagttgctctcatggtgttgcagtaagctcatggcattgttgtaagtaaagcatggctcctgcatatgagtggggtgcaataaatatgacatataatattttataacatcaagaggtagagtctattcctccacttcattgcatctgggctggctttgactatgaatgtagcagaagtgacgttgcgtgagttctgggatctacaaagactatgtagtttctgcctttgcttttttgaaacagtgtgctgagaccaccatgacaggaagccaatttagcctattgaaggatgagcggtcatatataggtgaaawgatttgcctgagtgaacagattgtgagcttccagacatagaagtgaggttgtc

SEQ ID NO: 131547 - DNA, 569 bp, Homo sapiens
tacatgaggttggaatttctttttttaagtaccataaakacactatattgggtggatttgaagtccagccccagcataaaacaaattttcagtaaatatgagctattcttactattaataagtgtcagataatatcttacttagtgttttaaagtttatcaagtaggctcaacaaatttatcttaattagccctcacaataaccccatggggaaatcattttctctgtcttaaaaaattttaacctaaagttagtgcttttttaaaaccatcaagaacagaagttagaagcagggctcgtatgctgctttctcgataccatttttagcttctatttctctccttccacataagtggcatgtaaatataacatcactgacatcactgatgacagaacattaaagtttggttctaaatagcgaattaatgatgaaatttgatttcaacttttcctctgagaccctccctccgtgccctccctaatgcccttgctttgagatgaagaagttattcctaatatcttacttatcttcttccccattgcaaaaatgatgtgtaacaggctatcac

SEQ ID NO: 131548 - DNA, 426 bp, Homo sapiens
atctgtaagattaccaaaagaggatgagacccagctgcttcagtgttcacttgagattaaatgaggaaacacgggctttgtcattttcaaaaatagccactatgaaccatgccaaatcctttgtaaaattctgtgtttagcacatgtctatttctctttgttaattatacacctactactatgaaatatatytagtgttgaaagtctccaattaggtaatactaaatctaaaagttagaaactcacaaaagaaatgtaagattttaaattctcatattaatttgaccaaatgctttcaactattattcatactgtgaaatgtgatatgttttaaagtctagtaatttttgttaatatcacatgacaatattagatgttaagtctcttattatatgttggaatatataatgttattttataccatgt

SEQ ID NO: 131549 - DNA, 587 bp, Homo sapiens
ttgttaataagcatgctttgaggaacaagtgaatatggcacaagatataatcagatatagccaaaacagagccaaaagcatcttgtattcctttgatagttacctcaatgactcactcaatgacctagaaaagatgaccgtttagaagagtcaaatcacagtgtcctgagagaggggagagggttctgaggaggtagagttgattcaaagtaaaagtaaaagataaaatgaaaaatagaatttttaagactgatggagtgaaaagatattttgaatttttccaaaataattacattaccaaactgagtattatttaaagtaaggtaatatcttgattaataaaagtcaatcaaaaccaaaatatctattgagtttttttaaaaatgcaaaacaaagctatgtacaaaaagatgtgagtagaagagtttayatttgaggaagacatgagaagtacaaaataaataacacttcaaagaacaatagaaaaaataaaaaattatgtataaataataaatgaatttaatacttaataattgtaggagagactgaggaaggaaacaaagctataaaatataagaaggaaaaac

SEQ ID NO: 131550 - DNA, 368 bp, Homo sapiens
tacccttgttcttgaaattccatcaatcaacattgtttttagaagtaaagctttgtcttttctaggaataacctttggaaatctatttatygcagtgagtggtagttcttttatattaattggttttttttttaacagaaaacgtaggaacctgaaggaaagacagtctgatgtgaggatggaagaacagatgggctcatttgtccatttttatttatttacttattcattcattcaacaacaaaaaatgaatcgaagaaacttttttccttttatttttagttggcccataattgcttttatttatgggattcagagtgatatttctgcatatgtatacaatgtgtaatgctaaaatcagtgttaat

SEQ ID NO: 131551 - DNA, 568 bp, Homo sapiens
ggtaggactgggtaacaaagcttggcacctgagttttaattttacctatgctattctgcttcaaaaatgaggcagatgattttattcaccaggggtttaggggacagagtaccagatatgataattatgagaaaggcagttgtaaatttgggggtgagagaaatacatcatataaaatatttagaaagtatttttttttgttaaatgctgtgtatcccctatccctgacacccccatactttatttttaagaaattataagtaaagatctatattgttctttaagawttctggagttgaacttttatatctttgaattcaacactgtgtcaaaaatggttcatgagggtgaacagttatatttggttataatagttataattctgaatacattttatcattagctgtgcatttgttatttcttcttgacttttacataagatctttcttcaaagttactaaagctctttaaacggtggaaattcagaataacgaagactgcggcatggtgaggtatcttcactatggtgtagtggttataagcacagactgtggtgttgagctgtttt

SEQ ID NO: 131552 - DNA, 434 bp, Homo sapiens
agtttggaatgatgaaagaagttctggagatggttaatggtgatggttgtagaacaatgtgaacgtccctaaaacgtacacttaaaatagttaaaatggcaaattttatgctatgtgtattacaacaaaattaatatgcatattttttaaataattttaaactttaggttaaaaagtaattttataaactttttaaagcataaggaaatttgtggtctctattgtattcaaagaaatgactgttcatcctcatgcataaaatttaggatgagacactgtcttacaatttcctgctttctgactgtcctgatygatgttttcagtcatgccactttttcacagtctgcgtggcacttctccaacaggaaatttacctcagatctgttcatgtcaccaatcctcctgtagctctagcttctctgctccaagttaaa

SEQ ID NO: 131553 - DNA, 434 bp, Homo sapiens
agtttggaatgatgaaagaagttctggagatggttaatggtgatggttgtagaacaatgtgaacgtccctaaaacgtacacttaaaatagttaaaatggcaaattttatgctatgtgtattacaacaaaattaatatgcatattttttaaataattttaaactttaggttaaaaagtaattttataaactttttaaagcataaggaaatttgtggtctctattgtattcaaagaaatgactgttcatcctcatgcataaaatttaggatgagacactgtcttacaatttcctgctttctgactgtcctgatcgatgttttcagtcatgccaytttttcacagtctgcgtggcacttctccaacaggaaatttacctcagatctgttcatgtcaccaatcctcctgtagctctagcttctctgctccaagttaaa

SEQ ID NO: 131554 - DNA, 595 bp, Homo sapiens
atttgcggtgatgttttcattacagtgtgtcacacaggaagccacaaaaggattagatatagaccaattcatccacatttcttccagccagtaatcacattgctgcccgccaatgttcttaacttccttagtgccaactcttccatttaccatatagaatttcccctaaatttgttaagaaatagacgcaccacataggcaaaaatgccattatctgcattttattaagctctgtgatttgatctttcagaagtatctgagcccacaacaagatgaatgtcgggtctgacaaaaacatgccagtgggattttgaaaaccacagagagattctataggaaatattaggaaagaagagggcaagaaaaaggtgacctgggggaaaaaagatagattctataaaattggatccatgctacgccttccttatggccttacagagtatatgttgaaaatccagaaatcatgtgcactttatccaaacctgaattwaaaaaaaaaaactatagctttattggactaataaaaaccaggtaatatgattgctgacacaatggaaaggtcacattggaaactttatattttacatttttcttc

SEQ ID NO: 131555 - DNA, 573 bp, Homo sapiens
actaactctttgcatccagccttccaatgtagatttggaatttacagatccttctgtttcttttcctcacctcatccaagagatttgtttctagtctgctacttttgatgcttcatgtcctcaaaatttctcctgtaatccaatttcaacacttaaaattcaacaataatcaaatgrtgtatttttcattactatattacttgggtaatgtagtttaaacatttttaagtcaatttgaggaaatgttaatgaataaaattactggctgatggagaatgaaaactatctctcaataattcacattcttatgaaaataattcccccaattttagctttttccttttaggttgcatttccctagaactttcattcactcaacaaagattgagccaatgggcgtgtgcttaacactctgataacgcagaaaaagatattaaaaaaaaaaaacccaccctcatgaaacttgcattctagttggaagacaaataataaacaaagtaattaagtaaaaagcaagtagtttaaacaatcaaaagcactaggcatcaaaattaagcaaaaaagtggggaaag

SEQ ID NO: 131556 - DNA, 573 bp, Homo sapiens
actaactctttgcatccagccttccaatgtagatttggaatttacagatccttctgtttcttttcctcacctcatccaagagatttgtttctagtctgctacttttgatgcttcatgtcctcaaaatttctcctgtaatccaatttcaacacttaaaattcaacaataatcaaatggtgtatttttcattactatattacttgggtaatgtagtttaaacatttttaagtcaatttgaggaaatgttaatgaataaaattactggctgatggagaatgaaaactatctctcaataattcacattcttatgaaaataattcccccaattttagctttttccttttaggttgyatttccctagaactttcattcactcaacaaagattgagccaatgggcgtgtgcttaacactctgataacgcagaaaaagatattaaaaaaaaaaaacccaccctcatgaaacttgcattctagttggaagacaaataataaacaaagtaattaagtaaaaagcaagtagtttaaacaatcaaaagcactaggcatcaaaattaagcaaaaaagtggggaaag

SEQ ID NO: 131557 - DNA, 573 bp, Homo sapiens
actaactctttgcatccagccttccaatgtagatttggaatttacagatccttctgtttcttttcctcacctcatccaagagatttgtttctagtctgctacttttgatgcttcatgtcctcaaaatttctcctgtaatccaatttcaacacttaaaattcaacaataatcaaatggtgtatttttcattactatattacttgggtaatgtagtttaaacatttttaagtcaatttgaggaaatgttaatgaataaaattactggctgatggagaatgaaaactatctctcaataattcacattcttatgaaaataattcccccaattttagctttttccttttaggttgcatttccctagaactttcattcactcaacaaagattgagccaatgggcgtgtgcttaacactctgataacgcagaaaargatattaaaaaaaaaaaacccaccctcatgaaacttgcattctagttggaagacaaataataaacaaagtaattaagtaaaaagcaagtagtttaaacaatcaaaagcactaggcatcaaaattaagcaaaaaagtggggaaag

SEQ ID NO: 131558 - DNA, 601 bp, Homo sapiens
atgtatggaaatgactggatgtccagacagaagtctgctgcaggggcagagtcctcatgaagaacctctggctagggtagagctggagggaaatatggggtcagagtccccacacagagtcccaactggggcactgcctagtggaactatgagaagaygaccaccgtcttccagactccagaatggtagatccaccaatggcttgcactgtgagcctggaaaagctgcaggcgctcaataccagcctaagaagcagtcagaaatggggctgtaacctgcaaagccgtaggggcggagctgcccaaggctgtgggattccacctcttataccagtgtgccctggatgtgagacatggagtcaaaagagatcattttggaactttaaggtttcatgactgccctattggatttcagacttgcatggggcctgtggcccctttgttttggccaatttctcccatttggagcaggtgtatttccccaatgcctgtaacgccattatatctaggaagtaactaacttgcttttgatttagcaggctcattggtagaagggacttgccttgtctcagataagaccttggccttggacttttggttta

SEQ ID NO: 131559 - DNA, 300 bp, Homo sapiens
gctttttatctgaatccatcttgggggaatatcagttaaattgaaagtagatttaggaatacatatccactgaatgaaattataatatgagcagagacrctgacttaaaagaaaatccctgggacttggttcttatcttagagactgggacatggattttccatgtgtcagaaatagatcttccccacaatcagatttaaagatgaaataattgcaatattcttacatatgatgaaagggtatgagtgtatgagtactgctatggtttgagtgccttctccaaaactcatgttggaattc

SEQ ID NO: 131560 - DNA, 538 bp, Homo sapiens
cttccccacaatcagatttaaagatgaaataattgcaatattcttacatatgatgaaagggtatgagtgtatgagtactgctatggtttgagtgccttctccaaaactcatgttggaattcagttgtctttgtgayactattaagaggtgggactaaatggggcctttgggcagcaattaggataacataaggtcattaggctgagaccccatgatgagactggtggctttataagaagaggaataaagtcatgagcagatgcacccatgcctgcctaccatgagaacacctcatgctatagtatggtgcagcacagaggcccttgccaggtgctggtgccatgcttttgaacttggtgacaacaagactatgagctaaataaacatctatttttaaaaataaactacccaatctgtgctattcagttatagcaacagaaaatggactgagacagaaaattggtactgagatgtgggattgtcactataaaaattcctgaatatttggaggtagtttggtattgggtaatgggtagaa

SEQ ID NO: 131561 - DNA, 538 bp, Homo sapiens
cttccccacaatcagatttaaagatgaaataattgcaatattcttacatatgatgaaagggtatgagtgtatgagtactgctatggtttgagtgccttctccaaaactcatgttggaattcagttgtctttgtgatactattaagaggtgggactaaatggggcctttgggcagcaattaggataacataaggtcattaggctgagaccccatgatgagactggtggctttataagaagaggaataaagtcatgagcagatgcacccatgcctgcctaccatgwgaacacctcatgctatagtatggtgcagcacagaggcccttgccaggtgctggtgccatgcttttgaacttggtgacaacaagactatgagctaaataaacatctatttttaaaaataaactacccaatctgtgctattcagttatagcaacagaaaatggactgagacagaaaattggtactgagatgtgggattgtcactataaaaattcctgaatatttggaggtagtttggtattgggtaatgggtagaa

SEQ ID NO: 131562 - DNA, 609 bp, Homo sapiens
atgttacctgtgtcatttctgatggtgtattgtgtttatttgaatcccctctcttttttttcttaatctagcttatagtctatcaatctcatttatcctttcaaacaaccagcttttggttttgttgagcctttgtatggattttctggtctcaaggtgttttcagattttcattatttcttttcttctgctagctttggagttgtttgttcttctttcctagttcctttaagtacaaagttagcttattaatttcaaatctttctgactttttgttgaaggcattgaaggstactttcctcttaacacagctttggctgtatatcagagattttggaaagttgtgtcccatttttactaatttcaaagaattttatttctgccttaatttcagtgtccacccaggagctacttgaagtaagctgtttaatttccatgtatttgtgtagattggagagatcttttggtttccatttctattcttattgcactgtgattagaggttatgcttggtataatttcaatttctttaaaatttattgaagcttgctttatgactgagcatgtgggagaacttagaatacactgcgtgtgcagatgagaataatt

SEQ ID NO: 131563 - DNA, 609 bp, Homo sapiens
atgttacctgtgtcatttctgatggtgtattgtgtttatttgaatcccctctcttttttttcttaatctagcttatagtctatcaatctcatttatcctttcaaacaaccagcttttggttttgttgagcctttgtatggattttctggtctcaaggtgttttcagattttcattatttcttttcttctgctagctttggagttgtttgttcttctttcctagttcctttaagtacaaagttagcttattaatttcaaatctttctgactttttgttgaaggcattgaagggtactttcctcttaacacagctttggctgtatatcagagattttggaaagttgtgtcccatttttactaatttcaaagaattttatttctgccttaatttcagtgtccacccaggagytacttgaagtaagctgtttaatttccatgtatttgtgtagattggagagatcttttggtttccatttctattcttattgcactgtgattagaggttatgcttggtataatttcaatttctttaaaatttattgaagcttgctttatgactgagcatgtgggagaacttagaatacactgcgtgtgcagatgagaataatt

SEQ ID NO: 131564 - DNA, 482 bp, Homo sapiens
tagattttgagggcaggtcttgtgatgctaaaaccaattcttagtgtctgggttctggattttttagaattagattttaaagcaaggactgattacggaaattctgaaaaatgtctgtgcatgcacacatacacacacacacacacaccaccaccaagggtgtggaagaagcaggacagaaaacagaaagaaggaagccaascaagagtgtgatttcaggagaagccccagacataggcagaccccacagggagcactggagcatgagtcgacctcagagtctgtcctgagcctagcggggagctgtgtggtgcagcctcacaccagccagtcactggctgtgagccatcctgcatttcccatgggcagggccactttagcatcttagggccgacccccaaagaaggaccagcaaagaacagagctgtgggactggcatgcagagctagtgacagggatctaaggggattttggcaggacag

SEQ ID NO: 131565 - DNA, 499 bp, Homo sapiens
cagggtgtctttcttgctgaaacacttaaaatatttgtatgtgctgttctccagtsgtgaccttttacctttagactactaggtgtttaatacagaggctcaccctctgcctgtgttacatttagccaacaccacactttcaggtaattctgctgttggataaaagcagttccgaggaccaggaccagtctcacctgttttgttttacgtggaccactatagaatgtagtctgaaaacctagacctctaagtcaacatgatagtggtcatataagaatgatgtgtgttacagcaaagatcgcaattacttttacaccaccaagtactctacaaaccatatatattttaaatatatgtatatatatatatatataactatataaaactctatataactctatgtatatagagagttatatagagagttttatatttagagagagttacatatatttatacacacacacacacacacacacacacacacacacacacacac

SEQ ID NO: 131566 - DNA, 480 bp, Homo sapiens
ttccaggattctatcaaggatccatgctgccatcagtgactttgctcctctgattccttccaccctgaaaatgcttttcctccatttctacacactgtaactctcaatcaagggtgagttctgaaatcagtccacacgcttgtttatttgttccttcaggcatttattcagygtcacttatttggagactcctcggtgccaggaattaacccagttctgagactacactgatgagcaggaacattacatgtgtgttcttggggtgctcccaaagagtgggggaggtagacactcattaaatgaacacatgcataggtttgacaccacaggctgacacaagtgctggagagaaagacaaaaacaccatgaatacatttctctatggccgggcagggtcagacaaggaagacttcagggtgtctgcctatgcagcaggtggctggtacccttctgagagagagaacaggggagaagcaccgg

SEQ ID NO: 131567 - DNA, 538 bp, Homo sapiens
ccagtgtcttgtttccattccaggattctatcaaggatccatgctgccatcagtgactttgctcctctgattccttccaccctgaaaatgcttttcctccatttctacacactgtaactctcaatcaagggtgagttctgaaatcagtccacacgcttgtttatttgttccttcaggcatttattcagcgtcacttatttggagactcctcggtgccaggaattaacccagttctgagactacactgatgagcaggaacattacatgtgtgttcttggggtgctcccaaagagtgggggaggtagacactcattaaatgaacacatgcataggtttgacaccacaggctgacacaagtgctggagagaaagacaaaaacaccatgaatacatttctctatggccgggcagggycagacaaggaagacttcagggtgtctgcctatgcagcaggtggctggtacccttctgagagagagaacaggggagaagcaccgggtttatagggtcaggctcttgaatttggtttgagataccca

SEQ ID NO: 131568 - DNA, 480 bp, Homo sapiens
ttccaggattctatcaaggatccatgctgccatcagtgactttgctcctctgattccttccaccctgaaaatgcttttcctccatttctacacactgtaactctcaatcaagggtgagttctgaaatcagtccacacgcttgtttatttgttccttcaggcatttattcagcgtcacttatttggagactcctcggtgccaggaattaacccagttctgagactacactgatgagcaggaacattacatgtgtgttcttggggtgctcccaaagagtgggggaggtagacactcattaaatgaacacatgcataggtttgacaccacaggctgacacaagtgctggagagaaagacaaaaacaccatgaatacatttctctatggccgggcagggtcagacaaggaagactycagggtgtctgcctatgcagcaggtggctggtacccttctgagagagagaacaggggagaagcaccgg

SEQ ID NO: 131569 - DNA, 538 bp, Homo sapiens
ccagtgtcttgtttccattccaggattctatcaaggatccatgctgccatcagtgactttgctcctctgattccttccaccctgaaaatgcttttcctccatttctacacactgtaactctcaatcaagggtgagttctgaaatcagtccacacgcttgtttatttgttccttcaggcatttattcagcgtcacttatttggagactcctcggtgccaggaattaacccagttctgagactacactgatgagcaggaacattacatgtgtgttcttggggtgctcccaaagagtgggggaggtagacactcattaaatgaacacatgcataggtttgacaccacaggctgacacaagtgctggagagaaagacaaaaacaccatgaatacatttctctatggccgggcagggtcagacaaggaagacttcagggtgtctgcctatgcagcaggtggctggtacccttctgagagagagaacaggggagaagcaccgggtttatagggkcaggctcttgaatttggtttgagataccca

SEQ ID NO: 131570 - DNA, 538 bp, Homo sapiens
ccagtgtcttgtttccattccaggattctatcaaggatccatgctgccatcagtgactttgctcctctgattccttccaccctgaaaatgcttttcctccatttctacacactgtaactctcaatcaagggtgagttctgaaatcagtccacacgcttgtttatttgttccttcaggcatttattcagcgtcacttatttggagactcctcggtgccaggaattaacccagttctgagactacactgatgagcaggaacattacatgtgtgttcttggggtgctcccaaagagtgggggaggtagacactcattaaatgaacacatgcataggtttgacaccacaggctgacacaagtgctggagagaaagacaaaaacaccatgaatacatttctctatggccgggcagggtcagacaaggaagacttcagggtgtctgcctatgcagcaggtggctggtacccttctgagagagagaacaggggagaagcaccgggtttatagggtcaggctcwtgaatttggtttgagataccca

SEQ ID NO: 131571 - DNA, 379 bp, Homo sapiens
acttgaggtagaaaaatctcaagataacaatgtgacatcacaactaagagaactagagaatcaagagtaaaaaatcttaaagctagcagaagacaagaaataaccaaaatgagagttgaactgaaggagattgaaacatgaaaatttattcaaaagatcaatgaattctscagctagctttttgggaaaaaaatgaaacagacaccacagctagactaataaagaagaaaaacattcagagaaatacaatctgaaacaagggagatattaccagtcaccccataggaatatagacagtcatcagagaatattataaacacctctatgcatataaactagaaagtctggaagaaatggataaatacctagacatgtacac

SEQ ID NO: 131572 - DNA, 379 bp, Homo sapiens
acttgaggtagaaaaatctcaagataacaatgtgacatcacaactaagagaactagagaatcaagagtaaaaaatcttaaagctagcagaagacaagaaataaccaaaatgagagttgaactgaaggagattgaaacatgaaaatttattcaaaagatcaatgaattctccagctagctttttgggaaaaaaatgaaacagacaccacagctagactaataaagaagaaaaacattcagagaaatacaatctgaaacaagggagatattaccagtcaccccataggaatatagacagtcatcagagaatattataaacacctctatgcatataaactagaaagtctggaagaaatgsataaatacctagacatgtacac

SEQ ID NO: 131573 - DNA, 477 bp, Homo sapiens
gtttggtgactgtgatgcttttctcagtgaagtttaraacatgttattgaacatttttctctttccactgagatttcatagacatacagaaatatccagcaacaaaaggcaaatgtagtcatgcttcccataagaaacattgtaaactgttttcattcagtgaataaaagagttcgacactaaaaggcatttgtaagtaaacatttagaagaaattattagaacatggtttttctccaatgagcaccaagaggctgatagagaaatccacctataaaaagtaaatgtaagcttgttttctgcaagattaatcattaactgttttctttcagtgaatagaagaatttgataagtgagatgcatttctaaccaaaagtttagaacacgttatttgaacattttgctatgcccattgtaaccacgtaggcctaaagacatttttagcaataaaagagaagtgtaattatggttttcttag

SEQ ID NO: 131574 - DNA, 477 bp, Homo sapiens
gtttggtgactgtgatgcttttctcagtgaagtttagaacatgttattgaacatttttctytttccactgagatttcatagacatacagaaatatccagcaacaaaaggcaaatgtagtcatgcttcccataagaaacattgtaaactgttttcattcagtgaataaaagagttcgacactaaaaggcatttgtaagtaaacatttagaagaaattattagaacatggtttttctccaatgagcaccaagaggctgatagagaaatccacctataaaaagtaaatgtaagcttgttttctgcaagattaatcattaactgttttctttcagtgaatagaagaatttgataagtgagatgcatttctaaccaaaagtttagaacacgttatttgaacattttgctatgcccattgtaaccacgtaggcctaaagacatttttagcaataaaagagaagtgtaattatggttttcttag

SEQ ID NO: 131575 - DNA, 533 bp, Homo sapiens
ggaaacatgacattctgataacaatagtggaaccaaacaaaaaataaatgcagcaaaaaaaggatcaccttaaggatttcttgtgtgaaccaggaatagaaaaagaaatgaatagagttgtttaggaaaaagaacatgcagcattgatactacttctctttcttgcaagtacaacttttagaacctatcccaaaaacttaaaaaaaaaaaatcccaccactagtttaactgttaattgttgcagtcacaaaaaggaaagtatatacrctaatcaaaatgaagtaaatataatcagttttaatccaacatggaaaccccatgatgagactgaagacatccctcaaatgcatgtgggttccctctctctccgccttcagctttctgcctgtcctgcccctccccattcactcctccactacacacacagacacacacaccctacccatacctaaaagtttgttctctctataaactcatctgtgaaagaaacaaggttgtattttatctctgggcaagatcaaaatgcaggcaga

SEQ ID NO: 131576 - DNA, 563 bp, Homo sapiens
ctaagactgggggcattttctaagacttccaatcagggaaaggagatatctgagcactgatgaatctttacttggagacaggtttcagaaggtcctgcttctcaccaccaccaccccctgcatcgtgtggctgcttagacaactgggctgatacgccttccaactgggctcctgcggctaagccccatgtgttcctgtagcctttgatcttcttgtagcgcaaatccaacacgcttacacggagagatgcatctactcccaaccaccccacacacctcaaagcttctctctgcctgggcttgccaactgacactgcaagtggagggggaaaacaggagaaatcattctgaaaatctgcaaaggcagagaagaaggatccagaaggaaatycctataaggaaaacagaattgactcccacatcagagagctgcccaagtgcaagctccaatgctacaatgtcctagctggtgagacctgctcaagtcattgatcttctttagaagatggagataatatcagcccttgcttctgagtagagtgtttccaagagaaaatgggccaa

SEQ ID NO: 131577 - DNA, 580 bp, Homo sapiens
tgcaggaataaaagcagcctccatctctcaagatccttctgctcagaacacagatgacgactcagctcctacttttcaggtaatgcccattaaatcctgcagccacccatcaacagccccctgagtttgagtgtctagcagagaggcaccaaccaggacaagaccagaaatgaggtaaatacgaatatctaatggtggcaaagccaagattccccctcwaagaactttgtgaaacagaaatttctactttctaactcacaaggatattcaaggccagaaggcagccaggggttgggggctggggagcagcagcagtgggggtacctatgaagctaacaccaaggaaggaagatatcctcacagcttgaatgagacaagtctagactaaggctagatccagccttaatactgtcccaaaaacacttcttggtatgtaagcctaaatatctcttgacacttaatatcacatgcaggtctttaagctgaggaataattcaaaacaacaatattatcttcacacacatttgtttactacggcaccatttatgctagcaaaagaaaaataaaagcagcagcagca

SEQ ID NO: 131578 - DNA, 405 bp, Homo sapiens
ggatcttttgtatttctgtggggtagcttgtaatgtcacctttgtcatgaaaacataaaaatgttttcttacgtaattctaaagcttgcttttttttttttttttttttttttttttttgcccctgttgttcaaactgtggtagcccggactgagtcagggacctagaatgtcataatttacctccttcatccttttgaaattttttaaaatggtgttttataggagtatctctgaccaattgaaaagatgaccaattattgatagattagcccagaccagtgtgtctgtgaatgttttatatttgtcatttcatggtgccacatattactccatgctattgattgctrttgaccttggatattgtgtaaattgttaatgaacttggtgactgactcttctggtc

SEQ ID NO: 131579 - DNA, 591 bp, Homo sapiens
actcctgctacagcagccgtagctgtgactgcaattaatcccataatcactgcaattaaagtaaaaatgaatcttttggatctatttaaaacaccttttaatacttcagtcaaaatatggacggatggtgaggcctcccayggtcggtccatggacacagggatccacacgccctctcttgctctcaccagcagaatacggtgttgccaattaaaagttgaatcaatgcaagtaagcaatctacaattttcacaggttatagtctgggagtctggtttaataactatatttcctacaactagcatataagggggctttacgcaactttgtaaaggaactgttagactggaatttaggtcgacagtataaaatggcttacaatctcttgtttctaaagtttgatttccagaccaaattctaatgtggtgtgaggccacagtaagcctccataattctggatgttcaggaccagaaacaggacttactatttttggtcttggggtagagattcctttttctccccattcccaagggtagaaagactgcaattttttatgcttatgtttgtctaaactttctgttaagtcgcta

SEQ ID NO: 131580 - DNA, 591 bp, Homo sapiens
actcctgctacagcagccgtagctgtgactgcaattaatcccataatcactgcaattaaagtaaaaatgaatcttttggatctatttaaaacaccttttaatacttcagtcaaaatatggacggatggtgaggcctcccacggtcggtccatggacacagggatccacacgccctctcttgctctcaccagcagaatacggtgttgccaattaaaagttgaatcaatgcaagtaagcaatctacaattttcacaggttatagtctgggagtctggtttaataactatatttcctacaactagcatataagggggctttacgcaactttgtaaaggaactgttagactggaatttaggtcgayagtataaaatggcttacaatctcttgtttctaaagtttgatttccagaccaaattctaatgtggtgtgaggccacagtaagcctccataattctggatgttcaggaccagaaacaggacttactatttttggtcttggggtagagattcctttttctccccattcccaagggtagaaagactgcaattttttatgcttatgtttgtctaaactttctgttaagtcgcta

SEQ ID NO: 131581 - DNA, 574 bp, Homo sapiens
atgcagaatctgatataatattgataggttggtcaaaatcttgtaacactgtaatgactgcaaccaactctgctctttgagccgattgatatggagttttgattactcgttctttcggccctgtgtaagctgcttttccattgctggaaccatcagtaaatactgttagagcattttctaaaggttcacgtctggtaattttaggtagaatccaagtagtcaattttaagaactggaagatctttgtttttgggtaatgattatcaataaktcccacaaaattagcaagaccaatctgccatgcaccagaattgataaaggcttgtctaacttgttccttggttaaagggacaactattttgtctgggtcatttccacataattttgttattcgtaatcttgtctgaccgattaatgtagctatttgatccaagtacaatgtaaaagtcttaactgtactgtgaggaaggaatgaccactccacaagatcagtattttgaataatgatgcctgttggagaatgtgcagtggcaaaaatcaaaagttggagtggggctaagggatctattctatt

SEQ ID NO: 131582 - DNA, 574 bp, Homo sapiens
atgcagaatctgatataatattgataggttggtcaaaatcttgtaacactgtaatgactgcaaccaactctgctctttgagccgattgatatggagttttgattactcgttctttcggccctgtgtaagctgcttttccattgctggaaccatcagtaaatactgttagagcattttctaaaggttcacgtctggtaattttaggtagaatccaagtagtcaattttaagaactggaagatctttgtttttgggtaatgattatcaataagtcccacaaaattagcaagaccaatctgccatgcaccagaattgataaaggcttgtctaacttgttccttggttaaagggacaactattttgtctgggtcatttccacataattttrttattcgtaatcttgtctgaccgattaatgtagctatttgatccaagtacaatgtaaaagtcttaactgtactgtgaggaaggaatgaccactccacaagatcagtattttgaataatgatgcctgttggagaatgtgcagtggcaaaaatcaaaagttggagtggggctaagggatctattctatt

SEQ ID NO: 131583 - DNA, 316 bp, Homo sapiens
cctggaaacccataaccacaatacagatgagccctgctgaggtgggggaagccttggattcctgaatcccaggctacagaaatcgggaagggtgtgtggacgtgaaatagctccgactgggaagaatccaggtaggagtggggtgcggrgaggtactttgagcaggcaaaacagaacaaaagggcacactgcacgcgggtctgacaccagaagaccccggtcgtcctatcattcccgaagggttaacatgctctcgaggaaaagcaagtgattcgcctaagtaagaatggggtggcgcctctcctatttttttaaa

SEQ ID NO: 131584 - DNA, 457 bp, Homo sapiens
gaattcaggtaaaatatttttgctaaaaatttgaaattactattattactcaccaataaatgaaaaacaggtgaagctacaataagaaaacctaatatacaaatatcagaacttacagaaaagataacgcaggagactgtgagttatgaattaacttttggaggactgactaaacaaaagaatgaaagaaaactgctttgttatttgtcatcaagcaaaatctaatgacaatagcactggctgtgttttttttattttctaaactctatcaacttgaagaaaaaaatagtyaaatccccccaaacttttaccctcactgaaataatatttagaaaaacatggagcaatagccaaataattgctctagagaacaggtttgagtacacattgatattaaaataaacagccacataaaaaattagatgtacaattgcatcaacattatacatttgtaatt

SEQ ID NO: 131585 - DNA, 556 bp, Homo sapiens
accatgggggagcgtcatggctccagcaygtaatacggtgacatagtgctgagtgtgctactaagtggagtaacactgtgcatgtgatagaaggatcttggaagggagtcagagtagtcgagaaggctttgattagtgtttccctgctgggtcttgtgggaattagaggaaggcaatgagctgactggatactggaaacctccctgaactgactctaattagcttgggttaccaaagtagtagaggatccacagaacttgaagctgctttgcctgtggagggcacgtagtcaaaagtgcaaatgtaatttcatgggaaataaggacccttacaatgaagagagtatcatatctactccctctaccaattttttggtttttggcaaggtgggatcatgttggtctcaatgagtggggacctgttcaaggtaggttgctaaacctgagtggttcaggagatacttaggacacctgaaaaagaaggggatggagacagacgggggtttgtggtcaggccgcactcattgctgaggatctggtatgccaatagtagaaag

SEQ ID NO: 131586 - DNA, 483 bp, Homo sapiens
aacagaaattcctgtcttgttttctttgacacataagatctttaaaaagcccttgtcattgaagaaatgggyttaaatctgcatttgagaatgaattcattcaggtgacagtagcgctgttgggccctttagtatcttttctctcccttgcctttaggctttgcaagctaaaccttcctctttctgtcaccacttcccagggagtgggcacctccagcatcatctcaaactactcctggcatattttgtctcctttaatatagagaaaagaagttgaaggccagagttcaagagctggtgagtgccttggagagactcaccaagagcagtgaaatccgacatcagcaatctgcagagttcgtgaatgatctaaagcgggccaacaggtaaaaatctccctatacccagcccccaccgccctccacctgtggtacttggactgacaccctgcatgtagacacagcaccagggatggacatttcc

SEQ ID NO: 131587 - DNA, 610 bp, Homo sapiens
ggctcagtatttacctgggttatcactgcttaccatgcctgattttatgattaattatctacttatcattactaatcaatcaacccactttccaatgggagaattagaatactgacaataccttccccttccccctctcatgttgaccatactcctgaatcttaggcttgttatccttttgctattaatagagtttttttatttctgatcaatggtctttttactgatagagtaaatatgcatatatacagagtatatatgccaatggtactatgaattttaaaattatttgcttagacagaatatgtggacatacaaatgatgaatgtgataattgtcatacatatatatttatcttagacacttagtcaaaacatgtggtttttggttatgagttagacactgtcactttasctggaagatacaaagtaattgggtcatagactctcaaattatggaacacttagatttttcaggggaatgacatggagggagccaaggagtcttatgattaggtaaaatattgtttgggtggctcacgaccccactgggcaacactcaaagatgtggtggcttatgcctgtaatcccaacactttgggaggctgagg

SEQ ID NO: 131588 - DNA, 439 bp, Homo sapiens
atctgtggtttattatgaaacaggcagtgccctggagtttgaattttttcccagttggtcttagtaccctgtctgcagattgaggggaaagggcaggaaggggagtaaatgtagttaagagcatagcctcagctgggtgtggtggctcacgcctgtaatcccagcacaytgggaggccaaggagggtggatcgcttgaggtcacaagttcaagaccagcttggtcaacatggtgaaacccccatctctactaaaaaatacaaaagttagccaggtgtggtggtaggtgcctataatcctagctactcgggaggttgaggcaggagagtcacttgaacccgggaggcagaggtttcagtgagccgagattgtgccactgcattccagcctgggtgacagagtgagactgtctcaaaaaaaaaaaaaaaaagcatagcctc

SEQ ID NO: 131589 - DNA, 439 bp, Homo sapiens
atctgtggtttattatgaaacaggcagtgccctggagtttgaattttttcccagttggtcttagtaccctgtctgcagattgaggggaaagggcaggaaggggagtaaatgtagttaagagcatagcctcagctgggtgtggtggctcacgcctgtaatcccagcacactgggaggccaaggagggtggatcgcttgaggtcacaagttcaagaccagcttggtcaacatggtgaaacccccatctctactaaaaaatacaaaagttagccaggtgtggtggtaggtgcctataatcctagctactcgggaggttgaggcaggagagtcacttgaaccygggaggcagaggtttcagtgagccgagattgtgccactgcattccagcctgggtgacagagtgagactgtctcaaaaaaaaaaaaaaaaagcatagcctc

SEQ ID NO: 131590 - DNA, 609 bp, Homo sapiens
tagcacatggtaagaatatgtttagctttgcaagaaaccgccaaattgtctttcaaagtagctgtgycattttgcattcccaccatcaatgaatgacagttcctgttgagccacctccttgtcagcatttgatgttgtcagctttggattttagccattctaataggtgagtagtggtacatcattattgtttcaatttgaaatggctactgacatatgatatggagcatctttccttatgcttatttgctatgtgtatattttctttggtgaggtgtctgctcagatcgtttgcccattctttaattgggttgttttctattgagttttaacagttctttgtgtattttgaatgtaagtcccttatcaggtatgtcccctgcaaatatgttctcctagtctgtagcttgtattgtcattctcttgacaattcttttgcagagcagaagcttctaattttaatgacacagaacttatcaattgcttctttcaaggattgtgcttttggtgttgtatctaataagccatcaccaaacttaaggtcatctagattttctcctacattatcttctagaagttttgtactcactattcatttaggtctacaat

SEQ ID NO: 131591 - DNA, 609 bp, Homo sapiens
tagcacatggtaagaatatgtttagctttgcaagaaaccgccaaattgtctttcaaagtagctgtgtcattttgcattcccaccatcaatgaatgacagttcctgttgagccacctccttgtcagcatttgatgttgtcagctttggattttagccattctaataggtgagtagtggtacatcattattgtttcaatttgaaatggctactgacatatgatatggagcatctttccttatgcttatttgctatgtgtatattttctttggtgaggtgtctgctcagatcgtttgcccattctttaattgggttgttttctattgagttttaacagttctttgtgtattttgaatgtaagtcccttatcaggtatgtcccctgcaaatatgttctcctagtctgtagcttrtattgtcattctcttgacaattcttttgcagagcagaagcttctaattttaatgacacagaacttatcaattgcttctttcaaggattgtgcttttggtgttgtatctaataagccatcaccaaacttaaggtcatctagattttctcctacattatcttctagaagttttgtactcactattcatttaggtctacaat

SEQ ID NO: 131592 - DNA, 609 bp, Homo sapiens
tagcacatggtaagaatatgtttagctttgcaagaaaccgccaaattgtctttcaaagtagctgtgtcattttgcattcccaccatcaatgaatgacagttcctgttgagccacctccttgtcagcatttgatgttgtcagctttggattttagccattctaataggtgagtagtggtacatcattattgtttcaatttgaaatggctactgacatatgatatggagcatctttccttatgcttatttgctatgtgtatattttctttggtgaggtgtctgctcagatcgtttgcccattctttaattgggttgttttctattgagttttaacagttctttgtgtattttgaatgtaagtcccttatcaggtatgtcccctgcaaatatgttctcctagtctgtagcttgtattgtcattctcttgacaattcttttgcagagcagaagcttytaattttaatgacacagaacttatcaattgcttctttcaaggattgtgcttttggtgttgtatctaataagccatcaccaaacttaaggtcatctagattttctcctacattatcttctagaagttttgtactcactattcatttaggtctacaat

SEQ ID NO: 131593 - DNA, 609 bp, Homo sapiens
tagcacatggtaagaatatgtttagctttgcaagaaaccgccaaattgtctttcaaagtagctgtgtcattttgcattcccaccatcaatgaatgacagttcctgttgagccacctccttgtcagcatttgatgttgtcagctttggattttagccattctaataggtgagtagtggtacatcattattgtttcaatttgaaatggctactgacatatgatatggagcatctttccttatgcttatttgctatgtgtatattttctttggtgaggtgtctgctcagatcgtttgcccattctttaattgggttgttttctattgagttttaacagttctttgtgtattttgaatgtaagtcccttatcaggtatgtcccctgcaaatatgttctcctagtctgtagcttgtattgtcattctcttgacaattcttttgcagagcagaagcttctaattttaatgacacagaacttatcaattgcttctttcaaggattgtgcttttggtgttgtatctaataagycatcaccaaacttaaggtcatctagattttctcctacattatcttctagaagttttgtactcactattcatttaggtctacaat

SEQ ID NO: 131594 - DNA, 434 bp, Homo sapiens
aaagatctacagaggacagaaaacagacagtgggcaggggacatgtgtgagtggccctgaactcccatctctcytgctctgtgtacttagttcccctttctggatttggttttcctgccagtggaaagggagtgtttgggaagagaagatcacatttgagggtgagttaagtctcctttaagggcgattcctgctttgtcaggggctactactattagcaggcagagggaacagtcgcagaagagattggggtaaactccagtgttaggcacagaggcagatcctggggtgggtgtgagtggagaagggatgagtagccctcctgtccttccttcagggaaattcttccttagtaaacaggacagttaccctttggtgagcatggtcatatatgggaagattaagtctaggtgtgtatgatctggttgaatctt

SEQ ID NO: 131595 - DNA, 434 bp, Homo sapiens
aaagatctacagaggacagaaaacagacagtgggcaggggacatgtgtgagtggccctgaactcccatctctcctgctctgtgtacttagttccmctttctggatttggttttcctgccagtggaaagggagtgtttgggaagagaagatcacatttgagggtgagttaagtctcctttaagggcgattcctgctttgtcaggggctactactattagcaggcagagggaacagtcgcagaagagattggggtaaactccagtgttaggcacagaggcagatcctggggtgggtgtgagtggagaagggatgagtagccctcctgtccttccttcagggaaattcttccttagtaaacaggacagttaccctttggtgagcatggtcatatatgggaagattaagtctaggtgtgtatgatctggttgaatctt

SEQ ID NO: 131596 - DNA, 434 bp, Homo sapiens
aaagatctacagaggacagaaaacagacagtgggcaggggacatgtgtgagtggccctgaactcccatctctcctgctctgtgtacttagttcccctttctggatttggttttcctgccagtggaaagggagtgtttgggaagagaagatcacatttgagggtgagttaagtctcctttaagggcgattcctgctttgtcaggggctactactattagyaggcagagggaacagtcgcagaagagattggggtaaactccagtgttaggcacagaggcagatcctggggtgggtgtgagtggagaagggatgagtagccctcctgtccttccttcagggaaattcttccttagtaaacaggacagttaccctttggtgagcatggtcatatatgggaagattaagtctaggtgtgtatgatctggttgaatctt

SEQ ID NO: 131597 - DNA, 478 bp, Homo sapiens
tgggagattataggttatataaccacccccaatataaagcaatctcttccccgatgacactcaaacccggaaaacttgaatcccagggtgttcagattttggtataagctgatctcccaggacctacttaggcaggatctggtgcccaggacagaacctgttgacctggcmccatggagctgggaggggctgtcaccatctttctggcactccgcttgtcttgcctgctcatcctcattgcctggaaacgaatggataaggcaggaaagctgcccccaggtcctacaccaattcttttcctggggcacctgctgcaagttcgaactgatgctacgtttcagtctttcatgaaggtgagtctgtctgtctcctttaatagggctaaaagcaactaatcctatagccagattcacatagaaacttatgacttctaaaagatagactctcagaaacacagactttgcaaatcttagaattc

SEQ ID NO: 131598 - DNA, 595 bp, Homo sapiens
ttctgatataatctatcagacaggcaaaattaaaactgactttctttcccttcatttacataaaaaagtctcaaaataatagaattcagcaggttctcatttgaggatgagatggaaatggaccacacaggacttacctggcaggagtaggggkcaaggtggtggcagtgcagctggggctttcagcctacagcaagtgcattaaacacaaagccatctttggctgtttttcaagacagaggtaggggtgctgcagaaagatacggtgaactccttatatggaaagaagccagactgaagcagcatgcagagagagctgaattaagtgtgcagattaaatgaacagcttgctttatgtacatcagttaagttcaaagctttcagacctactgctaatagcaggcttggtgaagaaataaacagtgaactggtgacatgggcctggcagaaggcaggcaagaactgcacctgccctctcgctctctgttcctccaacctgcatttctgtggtaaggttttctctgtattttgggctttatctgcagcacctattcttgaaaaaaagaaaagtcttgatgtctgtttagtttggaat

SEQ ID NO: 131599 - DNA, 345 bp, Homo sapiens
tatgcaatcatgtcatctgcaaacaggaaaggattgtgggaaaggattgtggtttagaaatgagaaaggagaactttacttttaaacaatcartagaatatgatttagcagcctactggaaattatgccatggttaatgaaaagataaaaacattccttattgtttgcatcagttatctcttacagcctaaccatggtaaggtttagtggcgtaaaatgacaatttccttagcctactattctgtgggtcagcaatttggactgggtttagctgggtggctcttctggtcctgattagattctctaatcatgatgcatctgtgatcagcagcagggtagcactac

SEQ ID NO: 131600 - DNA, 412 bp, Homo sapiens
ttgatgacctgcctgtatctagtgtggtggcaatgcttgagagcagsgacactgcaagataggtcttaaaggttagacaaggctagtttactgaatccattaaccctatttctaagagctgctaattgctggaactattggccctgtcttacctcccttttccttagcttcctctgaagctcacatgatattattatgtatgcacactgaggaagagatggacagaggggttagagaacgcatgcaaaacagaatgaacagttgtaaaagcaaaaagaaactagaatattaatcatttttagtgtgagcaggaaaagacttagcagaggtaaatattcagggaagagatacttaatccttctcactgctcattctctcccacatcccaggtccttatttgatggaatcaggt

SEQ ID NO: 131601 - DNA, 584 bp, Homo sapiens
catttttagaatgaggtccacagtgcacctacatcagaatttcccatagggctactaaaagtacagattcccacacccactcttgtcttactgaatctagtctttaggctgtgggggaatgtataatgaagtttcttctgcatttgttcataagtgggctgagttttctttctccaaatggagaagagattaacaaccrgagagtgttggagacgtatagatggggtgtcttctggataaatattggtttaattaacaggaaatgaaaagccaaggaaagaagcaagaaagggaagaagagatgtttctttcttagcattgacacagacgtaaggagaaaccagccaaaacacttttacaatctttaaatccactaattaaaagatctgtgtggaaggagaaaatgtgggtaattaccaggcataatagactctctgagagacactgactgggactgagacggaacagtcttggtacaaaatgtcttttcagggaatatacataataatgtcatattactgaaagcttctggtactgtgcctgtacctagaacccagacatgcaatgaatacaagtgggtgttt

SEQ ID NO: 131602 - DNA, 610 bp, Homo sapiens
tttagtaaatcaacttttattagaatacactcccctcactgttgtctttgactgccttaacaccaccacagcagagttaagtagttgcaacagaaaccatattgccggtaaagcctaaaatattttcgatctgtccatttatgaaaaaagtttatggaccccttatccaaaagatttgttaaataggttattcaaactgaaaaattttgaaggactgagataaaggataagataaaaccaaaactttttctgactcatagctgcatgaaactatctgaaaatacttctgaccctgatgagtgtttacggtggggggttattcctacggctacagtatccttcattctatcccaccagcaccttgagagcagacactgaaaagccagtgagatctggtcatgagctcaagcacagggctaaagaggacggtttttctgtggaaggagcgagaatctaggtagggctttgtgtgacattaggaaggaaatggagctcccaaaatggagttcccactggtggtggctaggactgackgaagaaataccgcactttaactgtaaatataatcacatattatcttatgtaaggaaaactttgacaatacataggc

SEQ ID NO: 131603 - DNA, 537 bp, Homo sapiens
ggagacacagccaaaccatatcagcaagcatggagattcagagagagtagcaagcagcragctaacagattattttgaggaaatggaagctatctcttttttgaaaacacattagactgtgctttgaattttccagtggaattttatttaaggagttaaattatcctctttggccaaattccccagttctgtaaaattaatacaaaattaagctcactgtaagcctatttagaatttatgtagaatctataaattttcaaaaagaatgtgagaaactcaacataaaaaaatgcatacactgtggttagtaaaatatgagcagaaagtaactcccaagaatcaggatgatggtttgtagctgtcattcctttgaaacagagaagaaaaagctttatgtgctaatagtttattgggacatacagggcctggaagcaagagtgaggagaaaagggagcatcagggaagagagagaacaaacatggagggtgttgggatttgcaaactgatctctacttggtagcaagtataactgaccat

SEQ ID NO: 131604 - DNA, 544 bp, Homo sapiens
acctttcagagctgagaattatcaagtgaattactttggccaaatttctgaggtttggctgcctgcatcacttcaactcactagaaaactgcttaccctctttacaaagtgttggcctgttgtagaaactgtgaagactccacagataactcagtttttrtctgaaattaacagcaccagcagaattttgctttccctgggtgccagaccacatgtactggcactgatctgtccacagggtgatgattttcacggcagaggtttgacagcccctgtctgagtcccccccgctggctatatgactatgtgggtatacacttgtgctttagattcagagatgctgttctcagtctcttgaagtctatttctcacttctttcctctaacttcgtggtacttagactcctcacctgtatgtttggaatcagcttctgccagatgtctcctggctggggtggctttggtatatcagattctacatgctagcctgtgttactctctaaaccctaacaggtatttcttgtgcctttgtgcccctgcaccat

SEQ ID NO: 131605 - DNA, 544 bp, Homo sapiens
acctttcagagctgagaattatcaagtgaattactttggccaaatttctgaggtttggctgcctgcatcacttcaactcactagaaaactgcttaccctctttacaaagtgttggcctgttgtagaaactgtgaagactccacagataactcagtttttgtctgaaattaacagcaccagcagaattttgctttccctgggtgccagaccacatgtactggcactgatctgtccacagggtgatgattttcayggcagaggtttgacagcccctgtctgagtcccccccgctggctatatgactatgtgggtatacacttgtgctttagattcagagatgctgttctcagtctcttgaagtctatttctcacttctttcctctaacttcgtggtacttagactcctcacctgtatgtttggaatcagcttctgccagatgtctcctggctggggtggctttggtatatcagattctacatgctagcctgtgttactctctaaaccctaacaggtatttcttgtgcctttgtgcccctgcaccat

SEQ ID NO: 131606 - DNA, 430 bp, Homo sapiens
tctcctctgtttttcttgaagacaaagtgggaagagatgtgctaaaatggcaaaggaaaagtttaagawcaaatgcataaggaagactgtcttgttttgtcaaacatgggaagttacatggggaggttgctgtccattcttaatgggaactttccaaaggaatgcattttaatctgggtgcaatggtgtaaagaaagaaagcagtgaattggtgacttataaaggctcctgcctccaaaaaacccctttttaaattaaagggtgtcatctggcacacagaatagttccctgagcttacaggaatgatttctacagatattttttagccagacggagaattgtcatcctgggaatcaaaatcagactaattttgtccagacctagaaacctcctgggacttggctagtgcaggtgcctgtcaggaccaggg

SEQ ID NO: 131607 - DNA, 467 bp, Homo sapiens
ctcctctgtttttcttgaagacaaagtgggaagagatgtgctaaaatggcaaaggaaaagtttaagaacaaatgcataaggaagactgtcttgttttgtcaaacatgggaagttacatggggaggttgctgtccattcttaatgggaactttccaaaggaatgcattttaatctgggtgcaatggtgtaaagaaagaaagcagtgaattggtgacttataaaggctcctgcctccaaaaaamccctttttaaattaaagggtgtcatctggcacacagaatagttccctgagcttacaggaatgatttctacagatattttttagccagacggagaattgtcatcctgggaatcaaaatcagactaattttgtccagacctagaaacctcctgggacttggctagtgcaggtgcctgtcaggaccagggtttgtacatcgtcagattctttcttcctcctctagccc

SEQ ID NO: 131608 - DNA, 467 bp, Homo sapiens
ctcctctgtttttcttgaagacaaagtgggaagagatgtgctaaaatggcaaaggaaaagtttaagaacaaatgcataaggaagactgtcttgttttgtcaaacatgggaagttacatggggaggttgctgtccattcttaatgggaactttccaaaggaatgcattttaatctgggtgcaatggtgtaaagaaagaaagcagtgaattggtgacttataaaggctcctgcctccaaaaaacccctttttaaattaaagggtgtcatctggcacacagaatagttccctgagcttacaggaatgatttctacagatattttttagccagacggagaattgtcatcctgggartcaaaatcagactaattttgtccagacctagaaacctcctgggacttggctagtgcaggtgcctgtcaggaccagggtttgtacatcgtcagattctttcttcctcctctagccc

SEQ ID NO: 131609 - DNA, 430 bp, Homo sapiens
tctcctctgtttttcttgaagacaaagtgggaagagatgtgctaaaatggcaaaggaaaagtttaagaacaaatgcataaggaagactgtcttgttttgtcaaacatgggaagttacatggggaggttgctgtccattcttaatgggaactttccaaaggaatgcattttaatctgggtgcaatggtgtaaagaaagaaagcagtgaattggtgacttataaaggctcctgcctccaaaaaacccctttttaaattaaagggtgtcatctggcacacagaatagttccctgagcttacaggaatgatttctacagatattttttagccagacggagaattgtcatcctgggaatcaaaatcagactaattttktccagacctagaaacctcctgggacttggctagtgcaggtgcctgtcaggaccaggg

SEQ ID NO: 131610 - DNA, 529 bp, Homo sapiens
ttatggattcaaatcctttaacatatatatgacttgcaaatattttctctcaatctgtggcttgtacttttgctatttcaatagtgtctttcaaagagcagaagttttcaattttgttgaattccaattttttttaattttatggactatgcttgtggtgatttgtctgatccaacatcacaaatattttctcctcttttgttttcttttagaagtcttatagttttcrgcttttacatttaggtctatgattcattagggctaacttttgtttatggtacaaagtatgaatccaagtttatttttttacatatgaatatccaaattttcaacatgtcaacaactttgaaaagactttttaaaactgattggctttgcgcttttgttgaaaatcatttgactatgtacatgtggatttatttctgaactctttattctattccactgatgtactgtattgtatatgttctgccagtactgcaatgtcttaattgtagttctataataactcctgaaatcaggtacttta

SEQ ID NO: 131611 - DNA, 623 bp, Homo sapiens
actgtattgtatatgttctgccagtactgcaatgtcttaattgtagttctataataactcctgaaatcaggtactttaagtcctccaactttgttgttcttatgcaacattattttggttattctatgtcctttgcattttcatatgaatttcagaatcagcttgtaaatttctgcagaacattttctgggattctgacagaaawtacatgaaatctatgaatcagattggggagaattacaatattggattcttctaacccataaacatggtatttctctctatgtcttctttaattcttttggcagagttttatagtttttaaggaaactatagaacttatgcagacttatcactaagtaataattttgacactgctgcattttgcatttaaatttctgattgctcattgctaaaaatagaatttattttgtatactgatcttgtcttcttcaacttttctaacttattagttctagtttcatagttgtagattccataggaatttaccatgtatgatcacgttatctgaataaagacagctatacctcttttattccaaaatgagtaacttttttttaaccttgtcttattgcactggctagaaccattgatacaatcct

SEQ ID NO: 131612 - DNA, 402 bp, Homo sapiens
cctgggtaaaggagaagagttgcagatggaagttagatagtgaatcagctgaccataaaatagggaaattatactggattatcaaagtagacccaatgtaatcacaggggtccctaaaggtagaagagagaagagttcagagagagatgtaactataggagaatgtccagagaagtgcaacctttctgtctttaaagatagtggaaggagactgatatggtttggatatttgtcccctcaaaatctcatgcttaaatgtaaccccagtgttggaagtagtagagcytggagggaggtgttgggatcattggggtggattcctcgtgaatggcttagcattatccccttggtgataagtgagttcatgtgagatctggttgtttaaaactgtgtggcacctcc

SEQ ID NO: 131613 - DNA, 465 bp, Homo sapiens
tgatcgagtgtctgaacgacatgggctaactctgtattccaagcctagcaccatcatttcctacaagagcaagatactttcttaattatgttttggtttctttccatctgtagaaggatggcagaaacaaccaacttagaggatggttragagttaatacatgtaaagcacatagattgttgtaagcatttaaaaaattttagccatcttcatttccatttgcccaatttttgcatttgcttctgtctgtagataaaggagtgttcctgaagtaagactgcaacaacatgatttggtgtgcagaaacattccagtttaaaatttgtatttatccagtgtggaaaattcatcagaaaaaaaagacattatatgattagggaaacattatctgtgttatttccagttttatcaccaaaaccttagccaactgattgaaacaaaagagaaaatttagaattgttttaa

SEQ ID NO: 131614 - DNA, 463 bp, Homo sapiens
tcagattcagtcctatgtaatctggtttccattgcattctcttggccaragcaagttgcaagacaagtccaaattcaagaaggtcaagaaatacactccatctccaggtaggagaagctgcaaagaactgtgacaatctatgacaaatagtatgttcaaagggaataatatgggaagatgtgccctccgccaacttctcagggaaaaatacagcttttgtaatatttagtaatatagactgtctaatatttctagagaaatctatgactttgagttgaaatatctgaggccaacactccaagcaattttaaacaagtggtgacagaaattaccagacacacatcaagactcaagtataaagctatacaatttaaggatgctcagcaaatgttactgaattgactgggtagtccctaaagagctgaagaataaaagatgttatgagaaatccaacaataccaaa

SEQ ID NO: 131615 - DNA, 461 bp, Homo sapiens
ttaacaatccactcacaaaattcctgaatatttaataatcagctctagcgagttggtagaatcagtacaagctacatccagcatactgtggttaaagaaaatagataataaagtttcaggaagcaagaggcctcagggtagaaataatgcttaaaaaggcctcagggtagaartaatgcttaaatgcaagtcaaaattaggtttaactcaacagaagacccagatgtaagatcattaacttcaaaagccatggaattaataatcataacaataggtggaaaagatatattaaattgtaaaacttggaagattgaaacctggagaagaggtgagggagctataaaaaatgaaatatatgtcaatttagctaacaagtctgtaaagagcagggttttcaaaaagaggtcatgtgatcacttattaaaagttgatataaaaaagaatatatacagacactgcag

SEQ ID NO: 131616 - DNA, 561 bp, Homo sapiens
gttccttacctccatcagagacctcctcagcctggacttcactgtccatatcactatcagcattttagttgtaaccattcaggaagtccctagaaagttccaacctctgaccattacccacttccaaagtagctttcacattttcagatacctttatagcagtgccctactcctcagtaccaattttctgtattagttcattctagcactgctaaaaagatagagctgagactaggtaatttataaagagaagaagtttaattggctcacagttctgcaggctgtctaggaagcatagtagcttctgtttctggggaggcctccaaaaacttacaatcrtggcagaaggcaaaagggaagcaggcatatcttacatggctggagcaggaggaaaagagaggggagaagtgctatgcacttttaaacaaccaaatcttagaataactcactatcatgagaacagcaccaaggggatgatgctaaaccattcatgagaactctacccatatgattcaatcacatcccaccaggacccacttccaaaattgaggattacatttc

SEQ ID NO: 131617 - DNA, 533 bp, Homo sapiens
atatggtgattttgagacactacctgaatatctatcgaagtcttaaactaatttgaaatattggctttttgtctcacatattgcaatgagcttatcaaacttgaggttaagggcatagtcctctgtgagactacccccacttcagataccagccacaagtttgggagtccccaaaccatgcttatttttgacaagctaactacaaatttgggagttctcactaccccctcaggttcagtaattggctaggataaatcacagaattygggaaaatgctaaacatgtaactacaattttgttatagcaaaaggatataaatcagcaccagccaaagggaccagctacatagagcaaggtctggaaggcttccaaatgcaaagcttctgtgtccttaggaagcatagctctcctgatgtatcaatgtttgaagctcatttaagcttcagtgtccagggtttttactggagtttcattatgtaggcaaaactgattaaatcattggccatgtggttaaactcaatcttcagtcttct

SEQ ID NO: 131618 - DNA, 365 bp, Homo sapiens
ccaaggtttcaacacgccacttcactccagcccgggtgacagagcaagactccatctcaaaaaataataataataaaataaaaataaataaagggatagttcgggcactcaggaaaaccctgggctcccagtccctagctatgggycatgtgcacactgatgggctgatgcctgtgccagatctgattatcatagagatgcatcctcagtggggaggacaaggaaggcgtcatccgctttacctgagctggtcaggtaaggcccagactaggttgtttttttattaatccagaaaacagcaacctatggtgggtataaagttctttggtgggggtgataaaaatgttacgaaattagatggtgtt

SEQ ID NO: 131619 - DNA, 608 bp, Homo sapiens
ggacagtgatttgccttcctcacatccccccaaagttcctgcactatatcatgcataagtatttaattgagtaatggtgaggaaagtaaacagtgttattgaacaaagattattaaaattctggaaacacctggttttgtttcagcactgggactgaaagtggaattccttggattttgctccattggtggataggatagcatgtggtggtggactggtagactctttctcttccaagcagattgggtaaatgccccagattcttacccactagtcagagattacagattactgattgatatggtttttctctgtgtccccacccaaatctcatctcaaattgtaatacccacatgtcatgggagggacctggtgaaggtgactggatcatgggggtgatttcccccatgctgttcttgtgatagtgagttctcatgagatctgatggttttaaacttgtgtgggcctctttcctctctctcctctcctgctgccrtgtaagacgtgccttgctttccctttgccttctgccatgatttgtaagtttcctgaggcgtccccagccatgcagaactgtgagtcaattgaacctcttttctttataaatt

SEQ ID NO: 131620 - DNA, 608 bp, Homo sapiens
ggacagtgatttgccttcctcacatccccccaaagttcctgcactatatcatgcataagtatttaattgagtaatggtgaggaaagtaaacagtgttattgaacaaagattattaaaattctggaaacacctggttttgtttcagcactgggactgaaagtggaattccttggattttgctccattggtggataggatagcatgtggtggtggactggtagactctttctcttccaagcagattgggtaaatgccccagattcttacccactagtcagagattacagattactgattgatatggtttttctctgtgtccccacccaaatctcatctcaaattgtaatacccacatgtcatgggagggacctggtgaaggtgactggatcatgggggtgatttcccccatgctgttcttgtgatagtgagttctcatgagatctgatggttttaaacttgtgtgggcctctttcctctctctcctctcctgctgccatgtaagaygtgccttgctttccctttgccttctgccatgatttgtaagtttcctgaggcgtccccagccatgcagaactgtgagtcaattgaacctcttttctttataaatt

SEQ ID NO: 131621 - DNA, 379 bp, Homo sapiens
acaaataaataaatgggacarcatcaaaccaaaaaacttctgcacagcaaagaaaacaatcaacaaaatgaaagagtaacctaaagactgcaaaaaaaatatctgcaaaccacatatccgataaggggttaatatccaaaatttataaagaacacttataactcaatagcagaaggacaaataactcgattaaaaaatgggcaaaggacctgaacagatatttctccaaagacataaaaactgcaacagtgatatgaaaacgtgctcaacatcactaatcatcagggaaacacaaattaaaaccactaggaaatgataacctgttaggatgactattatcaaagacaaaagagagaataaatgttggcaaaggtgtagg

SEQ ID NO: 131622 - DNA, 535 bp, Homo sapiens
acattgttggataatatgaaaaacaaatgacacacaaacctatttgatactgtttttaattttctcttcatttgattttcctgatgacatgattaatcttttttgcctctaccctgtatgtgaaatgtaggtctttgcagatgtctcagagagtgttaatagttgctgctggttttgttttctctccccggggattcccatccctgggtgcaagtgaaattaaacttgtgcctctttgccgctggccgtggtgctgaaaacatcccgggcagcgctagggttgcccttgttagcatgccatccctgctaagagtcttaggctgatcagcgagtggagagatcttttccaggcttcattttggttagaactgtgtgttgaagattttaaagcccatgtctgggaactggagactgtttggattgtttgaagttgaaatagtyatgaataattcctacttgagatgggcttatgagggcgtggactagcatgcaatggttggcctttactaaactgtggccattggttgggacttgg

SEQ ID NO: 131623 - DNA, 495 bp, Homo sapiens
tctcttccttcctcttgccccctgactagcctatggcctctttccagagaataagaaagggatcctcagagaataatcccagttcctcgctttttattatatagttgaggaaaccaagtctcagaggggtcagtgtcttgaccatacacctctcatgtcctctctcctttttgattaattgaataaatacatgtagttgcttcttacctcctttctttcttcacccctgccccatgcamctgctcttagttgccttcacatgtaaacagcattccaacaacaacaacaaaacacaaccagcattctaactcatgagaccagcaacagttcctataaataccagcagcattttattttaatgtctctctgcagtagtttctcccctccatggatcagtcatccttggtaccaaaaggattccccactgtgacacaaatgctttttgtcattctcagtgagttataccattgagagagcatcgatctttttattgtt

SEQ ID NO: 131624 - DNA, 610 bp, Homo sapiens
gaattcagagacggaatgtggctgcractttgggcattacattgcatagcagcatgtgctctgcaagcttccaaaaacgaatgaggcaaagcctaattctggacacagacctggtttcaaatcctagctctcgaaattcctagtagtgtgcatttggaaaggtgcttcccctctctcaacttcagcttcctcaataaaatgaagacaagactccttaccctacaggttgctataaggatgaattaagatcaagcagaggccaggtgtgatggctcatgaccataatcccagcactttgggaggctgaggtgggtgcatcacttgagcctaggagttcgagaccagcctgggcgacatggtgaaaccccatatctactaaaaatacaaaaattatcccggcatggtagcacacgcctgtagtcccagctactcagctactcaggaggctgaggtgggaggatcacctgaacctggaaggttgaggctgcagtgagctgtgatcatgtcactgcattctagcctaggtgatggggtgagaccctgtctcaaaaagaaaacagacaaacaaacaaacaaaaatcaagcagataagccctcagcataatgacta

SEQ ID NO: 131625 - DNA, 610 bp, Homo sapiens
gaattcagagacggaatgtggctgcgactttgggcattacattgcatagcagcatgtgctctgcaagcttccaaaaacgaatgaggcaaagcctaattctggacacagacctggtttcaaatcctagctctcgaaattcctagtagtgtgcatttggaaaggtgcttcccctctctcaacttcrgcttcctcaataaaatgaagacaagactccttaccctacaggttgctataaggatgaattaagatcaagcagaggccaggtgtgatggctcatgaccataatcccagcactttgggaggctgaggtgggtgcatcacttgagcctaggagttcgagaccagcctgggcgacatggtgaaaccccatatctactaaaaatacaaaaattatcccggcatggtagcacacgcctgtagtcccagctactcagctactcaggaggctgaggtgggaggatcacctgaacctggaaggttgaggctgcagtgagctgtgatcatgtcactgcattctagcctaggtgatggggtgagaccctgtctcaaaaagaaaacagacaaacaaacaaacaaaaatcaagcagataagccctcagcataatgacta

SEQ ID NO: 131626 - DNA, 610 bp, Homo sapiens
gaattcagagacggaatgtggctgcgactttgggcattacattgcatagcagcatgtgctctgcaagcttccaaaaacgaatgaggcaaagcctaattctggacacagacctggtttcaaatcctagctctcgaaattcctagtagtgtgcatttggaaaggtgcttcccctctctcaacttcagcttcctcaataaaatgaagacaagactccttaccctacaggttgctataaggatgaattaagatcaagcagaggccaggtgtgatggctcatgaccataatcccagcactttgggaggctgaggtgggtgcatcacttgagcctaggagttcgagaccagcctgggcgacatggtgaaaccccatatctactaaaaatacaaaaattatcccggcatggtagcacacgcctgtagtcccagctactcagctactcaggaggctgaggtgggaggatcacctgaacctggaaggttgaggctgcagtgagcygtgatcatgtcactgcattctagcctaggtgatggggtgagaccctgtctcaaaaagaaaacagacaaacaaacaaacaaaaatcaagcagataagccctcagcataatgacta

SEQ ID NO: 131627 - DNA, 582 bp, Homo sapiens
tgctctctgctgcctcccagaggtccccactggtaattgagacccagttgctcatggtggtaacttgcctgatgactcacttatcactgggtcttccctttcctacttttctgccagtgtgttttgggatctcctccagaagcattcaaatctctgcttctggatctgcttcttgggagttggggggcgggattcaaactaagacaatggagttggacagattctgttagctacttcaaaatatttaggcagaaggaaggaacttcagggcattcagggcagttttcctggatcctccactgaacttccttcctttcattttccttccttccttccttccttccatttcttcctcttgtttcttcctctcattctcctttctttctctctctttccttccttccttccagctcaagacatggggctgcttctgctggggcaatacttaatggtgttacatamaaaggttttttttccatattgggggaaatatttttaggaaggacttccttttttccttccttccttcctcccttccttccttccttcctttctccttccttccttcatcaaaaaagagta

SEQ ID NO: 131628 - DNA, 397 bp, Homo sapiens
catgctaacatccatgctgggttctacttatgtgagtttgaactatcatttcacctctttgagcctcastttcctcacctgcaaaatgaggatgaggacaggacacaccccatgggatcacgaaaggatggaacaatgccctccctctatatgtgacaggccaagcacagggtagtggaaaataaacactgacttcattggcaatcctctttactgagtgcagttgaaattgcctcttacaatgcaaatcaaaaccacagtgagataccatctcacgccagccagaatggcaattattaaaaaatcaggaaacaatagatgctggcgaggctgtggagaaatagtaacgcttttacaccgttgatgggagtgtaaattagctcaaccattgtggaag

SEQ ID NO: 131629 - DNA, 413 bp, Homo sapiens
ataataccatgctaacatccatgctgggttctacttatgtgagtttgaactatcatttcacctctttgagcctcagtttcctcacctgcaaaatgaggatgaggacaggacacaccccatgggatcacgaaaggatggaacaatgccctccctctatatgtgacaggccaagcacagggtagtggaaaataaacactgacttcattggcaatcctctttactgagtgcagttgaaattgcctcttacaatgcaaatcaaaaccacagtgagataccatctcacgccagccagaatggcaattattaaaaaatcaggaaacaatagatgctggcgaggctgtggagaaatagtaacgcttttacaccgttgaygggagtgtaaattagctcaaccattgtggaagactgtgacg

SEQ ID NO: 131630 - DNA, 446 bp, Homo sapiens
agactataaaacacatatgaataaattatacaaatcataaatggcaccatataaagtaaaagggatattaccatataaggactgcatagctgttcccatatggaatgcacagggaatattattgacaaatccagaacagccatatgtaacgctcagtggcacttccaaatataaaatacaaatacaatatgtaatacacttacagtatgttgcataccaaatgatcaagcaatttaccaaagattagcatttaagaaacaaatactactacaaataacatatgcacctattaatgatttatttttacattggtggtattcatcagatttatcttaygttaaaaagaagttttcagggaattttctggcccaaggctctttgtggtaaactaaaggaaaattatagaaccatcttgccaaaagaaactttagagatcatgcagtctt

SEQ ID NO: 131631 - DNA, 587 bp, Homo sapiens
ctgctttcctcaggatttaaaaacaaaagcttctcaactgtcttcttaacagttcctaactgggagagtggcagtcctaaaatgtatgaatgcaaagtccagctggcctttttatttttatgtgatgagctatatgaaattaaggcacaaataactttttcaagaaagtgattctgttaaagtagttaatggcttggccaggtgcgttggctcatgcctgtagtcctagcactttgagaggcygaggtgggtggatcacctgaggtcaggagttcaagaccagcctggccaacatggcaaaaccccgtctctactaaaaatacaaaaattagctgggcatggtggcgggcacctataatcccagctactggggaggctgaggcaggagaatctcttgaaaccagtagtggggggcggggaggcagaggttgcaatgagctgagatcgccccactgcactccagcttgagtaaaagggtgaaactctgtctctaaataaataaataaataaataaataaaatagttaaggcttgaaagtgaattgttggccccgtgaacatctagactacaggaaaataatgtgttcg

SEQ ID NO: 131632 - DNA, 510 bp, Homo sapiens
ctctttatcttacttcccctcccacttctttccttatattacttgaagtggattctattatcatttctaaattgacctattacatttatgttttgttctatagtacttctaattctcacagttgggtagtgtctttacaatgatttctccattcatctccagtttatactatagtagttgtcttaaaaatacacatgccatttaatttattcatttgattctttttctactttagggcattttattttattatatctttgaatatttattctgtgatatttcttatttaggaatatcaattatacacatgttggatctcctttggttccataatggtaattttccctctaatgctttaacartctgtgttattttacatttttctgttttcagaaatgactttttcttttgatgcctctaatgtaaccttcatgtacgtaatagttttattttttctttctattttttcactctgacacataacttttcattacctctattttcttatct

SEQ ID NO: 131633 - DNA, 595 bp, Homo sapiens
atgagggtgagaagctgcagacctctaatggcggctgaggctagaaagacacatagcatcagttcttctgcattctattggtcaaagtaagtcaggggaccaaaccagtttcaaggggtggcaaagtcacattcaaaatgcgtgtgcatccactggtaggaggattattatgcctttctttgggcacttaatctaccatcaggtttatctattgatttgttttttgaccttattattatttggtttcatagtaaagaatagagcaaagacaattttatactgctgcctttaacaggaaatcaagctattattaattttaataatgacaaataattttaaaaactcaatgttatgcctcatttttaatgacatagcacattttatttttgtactttttaaaggattataaaatagaacttaagaaatgcctctacatgtaggtaatagcttccagtaatagtgcaaggatgctgagacctgatatgggaaagtatttcccagttcatgcagtatggggtaagaaattttggaatggaggtaaggaaggctggcttctacttttgattcyaattctctaagtctagctttgagatct

SEQ ID NO: 131634 - DNA, 647 bp, Homo sapiens
actaagtttgtagtttctgggaattttgcttcttttctagtgtgttccagtaaggaaaaaaaatcagtttattctcaagctgtaatcagtggtctgaaagagttcttgttctcactgtgtcatcttgtayatgtcagttctccaggccaagcctttctcaattgcaaatgagggcatgaactattttatttctatggtcacttttaacactaaaccacacaaatcatgtgattctaagtttagtttcattgcccctataaaaaatttttgaaagagttcacttggctttccctttattttttaaccacaaccaccacaaaacaagtaaatataggaagttctgtcacagcatgcatttttatcatagaagtgtttttgttttcttgggaaacatgatttatttagggagaatgctatttgtcatgatgtggtgacccctgggaagatagctgttgcatgggcactcagacactttgaagttctaatgatttgtccatcataataatggtgataacatgacatgatttaggtactaaatatgtataagagggccagacaatgaaaatactggtcataataagaaagaaaccccattggtcttgagcgctatctacatgtaaaaaaaattcatttgctttattatattt

SEQ ID NO: 131635 - DNA, 535 bp, Homo sapiens
gactactccctctatctctctaaatgtagtcattgccttgagtttaagaaccatagattagttttgcctgtttccaaattttataaaaatggaaccatatagaaatcattcttttgtatcttgctattgtaactcaacatcatatatacrggattcatctatggtggtgcatgtagcaataatttgttcatttttattgctacctggtatcctattgtataaactgtaatttatttattcattttactctttatggacatttgatttgcttccaaatcttaaccattgtgaataatgttgccatgaaaattctttttttgtgtgtatatgacctgtggtgcacataggtacaaatttttcttatgtaaattacagagaacaaaattgctgggctatcaggtatatgtatggtcaaccttacatatgaccaatagttttccaactatttgtatcaatttatactttcaccagcagtatatgcgagcttctgttgattcacaggaatacctgatgttgatgtcagtcttaattccag

SEQ ID NO: 131636 - DNA, 623 bp, Homo sapiens
atcaccggcagaagagtgtggaattcctatgactgagattaaaccaatcctgattcatcttctatggtcagagaatggcctactctcaccctgaaatcaaggaatctattcctgctacaaagtctgtattctatagcctgggaaaaattagggggatcataactgctcccaatagttcaagaaagactgcttttgtatggccctcacttacgaatatagatgtaaaaatttttacccaaatgttagcaagctgaatccagaaagtaaaaataattatgatgtagttggatttatctcagaaaaatgtcagttaattcagaaactgaaggctactacaaggccatagaaatgtaacagaaytaaatgctctaaaacaagcccatgcttacatgggaacctgatatctgatagaagggggcctaatggaaaaggattgttttttaatcaattgatattggaaaaactggccattacacagaaaaaaaagttagttttcaaatttataatttaaattgactacaggcttatgtatgaaaggtaaaactatgaagtgaagaaaaataaatcagaaaacacctttgtaattttgaattgcggaagacttagtatataaaagcccaaag

SEQ ID NO: 131637 - DNA, 589 bp, Homo sapiens
ctgcttggacttaggcatcagtctgtcactctgttacctgcagtgatgttccgtggtgtacctgttccctgaacatcctgygctggtatccaccgaggtgtggtgcatgttggcaattggcttttgcctctaattgcaaaagctctgaactttgcagctacctcctcctgacctcatatatctacctgttcacacctcccataatatttctgccccctctagttgttgttgaaggtgggatactaagaattcttgattgttctttatatataattctggagtggaaccctacatagttgtcttgacactcatctgccctcagctatcacttactccatctctctcatgttgaatacagcatcacgttaaatgtgggaattttcttattttattttattttattttactttaagttctgggatacatgtacagaacgtgcaggtttgttacaaagatatgcgtgtgccatggtggtttgctgcatccatcaacccatcatctaggctttaagccctgcatgcattaggcatttgtcctaatggtctccctccccctgccctcacctccctgacaggccccggtgtgtgat

SEQ ID NO: 131638 - DNA, 610 bp, Homo sapiens
gatgtcaaggatgatgtttctggaattctcccgatttccttttaagtctcaagtagctgctgtaacttctggcaccattcaaaaatatttattcatttatccaataaatatttatgttccagccaatgttctgatgctctggatagagcaacaaacaaaaaaaaagcctatctccaagtaggaataaaaaggaagaggaaatctaggcctgatgttaatttaaccatgaaggcaaaagctttctcagagyatctttcaatcctttggcagagttcttattttttttctcattgagcagtaggaaaaaatgagtatttttcaacctctatcctacgagggaatttggaataactgtggagtcagccaatcaacattgcctgtcacaggaacatttagaacaaagttgtggtctactcagcctccttgcaacaataaattgtatcagtacttatggtagcattcagatgtctgttctttaattttctaaagtaatggactttatactcaatttctccctaatgccaatagtaagaaagttaccaaggatcctcagtcactggtatgtggtcttgtagaggaaaataaccctgaattgggagtcaagagacag

SEQ ID NO: 131639 - DNA, 610 bp, Homo sapiens
gatgtcaaggatgatgtttctggaattctcccgatttccttttaagtctcaagtagctgctgtaacttctggcaccattcaaaaatatttattcatttatccaataaatatttatgttccagccaatgttctgatgctctggatagagcaacaaacaaaaaaaaagcctatctccaagtaggaataaaaaggaagaggaaatctaggcctgatgttaatttaaccatgaaggcaaaagctttctcagagtatctttcaatcctttggcagagttcttattttttttctcattgagcagtaggaaaaaatgagtatttttcaacctctatcctaygagggaatttggaataactgtggagtcagccaatcaacattgcctgtcacaggaacatttagaacaaagttgtggtctactcagcctccttgcaacaataaattgtatcagtacttatggtagcattcagatgtctgttctttaattttctaaagtaatggactttatactcaatttctccctaatgccaatagtaagaaagttaccaaggatcctcagtcactggtatgtggtcttgtagaggaaaataaccctgaattgggagtcaagagacag

SEQ ID NO: 131640 - DNA, 612 bp, Homo sapiens
cttattttttagaccagttttaggttcataacacaatttaacagaaagtacagagagctcccatatacaatcctccccacacacagcctcctctaccatcaacatctcacatcagagtaattacattttttgtaaccaatgaaccaacattgacacacaaatatcactcatagttagtttcgattcactcatagtgttgtacattatacaggttttgacaaatgtatgatgacatgtactcacgattacagtatcatatagaataacttcactgccataaaaatcttctctgctctgatttattcctctcacctgctaggaaactggaaaccactgattctttcagtatctccataggtttgccatttccagaatgccataaagttggagccaaacagatataattattttcagattagcttctttcacttacttgtatgcgattaatgttttgatatgctttgactgtgwcctcacccaaatctcatcttgaacagtagttcccataatccccacgtgttgtgaggatttcacttagttatatgcaattaaggttctgatatggtttggctgtgtcttcacccaaatctcaacttgaactgtagtgcccat

SEQ ID NO: 131641 - DNA, 577 bp, Homo sapiens
ggctcccctgcttgtggaaaagggaatgaagtgtgggagggactttatattgtgatttgagtgccagtatagtcacagcagaatagaacatccagcaaatttctcaggtttttttattccaatgcctggctcccagccagcatctctggatctgtctggggcctgggggaacttgacaccctgaagaaaaggacacaaacatggctctcttcatgacctgctgattatagagctctagggccttgagtgaacattgatggtagccaggtagttsttacgttgggccttgggcaagacccagtgctgtgctgacttcagatttgacccagcatagtcccagtggcagtggccacaggggtgtttgcatcaccacacctcaagttctgggtggcttagcacagagagagagagagaaggactctgtttgtttaggagaaagtaagggaaaagaacaaaagtttctacctggtaagccagagaattcttctagatcttatccaagaccacctaggtggtacctctatgagtctgtaaaaaccacagtgatactgggcttgtggtgcagtccttttgaata

SEQ ID NO: 131642 - DNA, 467 bp, Homo sapiens
acttgaaatcgtacctatcatataacaagagcttcataaacacttgttgaaggaatttcatattactgtttttcctgcaggttcatttcccctgcaatacgatttccrtggtggatgctgtcatctctgatgtgccactgaggcctccttcaagatgctatgagttcagtcagcagccagcattccattgcagaccccttcaggaattatcttaactgaataaagccacctggttcaaggacacaacgccttcctaaggtggtccacatttaagtgatttattgacatgaggacttagcccatccctcttgtcctaacttggtagagttttgagaagtcattctacctccagaactccccacagggtcacctgaggttccagctgagaaagcattgcagctcaaactctctctctcctaaatcctgctttcttttccctcccaggtgttggtcttaagaacgcaccc

SEQ ID NO: 131643 - DNA, 550 bp, Homo sapiens
tggggaaaactaagaacctgaagggaatcagaacatgccacccaaaatatgccactttgagatatcaattattttaagctaaaggcaattgagacaaagcagatgccaggaagcgctctttgacctcccactttctacctaaaagaagggcataaatttcccagagaaaggtgcccttcttttttwtttttatttatgtatttttgagatggagtctcgctctgtcgtccaggcccaagtgcagtggcgcaatctcggctcactgcaagctccgcctcccgggttcacgtcattctcctgcctcagcctcctgagtagctgggactacaggcacctgccaccacgcccgactaattgtttgtatttttagtagagatgggttttcaccgtgttagccaggatggtcttgatctcctgacctcgtgatctgcctgccttggcctcccaaagtgctgggattacaggcgtgagccaccgcgcccagccgaaaggtgcccttctaataacaggaagtgaagaacattataatcactggagatgaggagtcgat

SEQ ID NO: 131644 - DNA, 550 bp, Homo sapiens
tggggaaaactaagaacctgaagggaatcagaacatgccacccaaaatatgccactttgagatatcaattattttaagctaaaggcaattgagacaaagcagatgccaggaagcgctctttgacctcccactttctacctaaaagaagggcataaatttcccagagaaaggtgcccttcttttttatttttwtttatgtatttttgagatggagtctcgctctgtcgtccaggcccaagtgcagtggcgcaatctcggctcactgcaagctccgcctcccgggttcacgtcattctcctgcctcagcctcctgagtagctgggactacaggcacctgccaccacgcccgactaattgtttgtatttttagtagagatgggttttcaccgtgttagccaggatggtcttgatctcctgacctcgtgatctgcctgccttggcctcccaaagtgctgggattacaggcgtgagccaccgcgcccagccgaaaggtgcccttctaataacaggaagtgaagaacattataatcactggagatgaggagtcgat

SEQ ID NO: 131645 - DNA, 608 bp, Homo sapiens
agagtgacaaaggtgatcatcaatgtgttcagacccacatgctctgtgcttagtaaccccagtgcaacttttttgctttcccaaaagttctggcaaaagtcccaagctagcactttaattggcctaaattgtgtatatgcttatctctgaaccaatcactgtggattagagatgtcatgctctgattgaccagacctaggccacatctctagccctagctctgagggtagagttggcagcactagagcccatggaagaagtaagagaggagtcgttgctaaaggaaaaatcaaagtgtcattaccgaaccaggacagatgctgggcagcacatgtgcaccccgtcttcttctcatgttccagctgcacatcttagtgccccttggtttagcacttttctcaktaaatcatttgctttcttgcctcacttcctgtggttggtagaatgctaagatggccccaagatctctacccctggtgtttgcacacctcccagttattctgtcaaacatgaatgtagatgcttctgtgaaagaattttgcacatgtaatttaagtcccaaattgtttgaccttaaaataaggagaatggcagggccaggcatggtg

SEQ ID NO: 131646 - DNA, 270 bp, Homo sapiens
atgatactgaggggatccttgccacctctggttcttctttgtaagccagtagagactcactatataaaaatgtcaaaagacctttgaaaatgaagacttacccacttaggattttaatttttttttttaatttagagataggatcttgctatgttgcccaggctatcctcaaactcctggactcaagtgatacttctccttaagcctcccaaatagctgggactacatgtgyatgccactacacccagctgagttttaaatttttaattt

SEQ ID NO: 131647 - DNA, 504 bp, Homo sapiens
agcaatatgaggatgagcaagagacatgttgtggaaaatgatagtttggagagttaggctcataatttaattttcaaactgcatgtacattgtctgccttctatagtatcccggatctgtgtcagtcaccaacagagatttcagctcctggaagcaggatctgagccttatttactcaagaagaatctattcttcttgaagaatagatttaagatctattgaagaatagactsaagattctgctttagtaaagtagagttttttctatgtgctaagtgctaggactagagaggaaagaatgtatttgctagcttctaggagctctgggtgatgagtaaatataccattatttctctgtggatctccctcgttgtcctataacagtcacaaccagcattagaacatttaagcccacagaatcatataatgagtcagtgtagacctgggaatctcacgtagttctctctgaccttctctttcaaagagtattgtgtctacttctga

SEQ ID NO: 131648 - DNA, 504 bp, Homo sapiens
agcaatatgaggatgagcaagagacatgttgtggaaaatgatagtttggagagttaggctcataatttaattttcaaactgcatgtacattgtctgccttctatagtatcccggatctgtgtcagtcaccaacagagatttcagctcctggaagcaggatctgagccttatttactcaagaagaatctattcttcttgaagaatagatttaagatctattgaagaatagactgaagattctgctttagtaaagtagagttttttctatgtgctaagtgctaggactagagaggaaagaatgtatttgctagcttctaggagctctgggtgatgagtaaatataccattatttctctgtggatctccctcgttgtcctataacagtcacaaccagcattagaacatttaagcccacagaatcatataatgagtcagtgtagamctgggaatctcacgtagttctctctgaccttctctttcaaagagtattgtgtctacttctga

SEQ ID NO: 131649 - DNA, 344 bp, Homo sapiens
catcttgcaaataagaaatgggtaatagttaaattttgatcaaattcacttttaggaaattctcttcatcaagataatttgatttcctcttactcttattggtcaataaggcttggcatgttgcttttgcaacacagawtgataacactctctaatgacaactgttcttaaatatgactgcaagtacttggattttatggaatctgtgtaccactgacctcagggcaaagctctttttgcaaactcattttcattcacttgataacttttattttatttttgcgacagagtctcactctgttgcccaggcgggaagcacagtggcagatctcggctcactgtaa

SEQ ID NO: 131650 - DNA, 380 bp, Homo sapiens
gtgcccctcccgcccaccaaaagatgtctacatccacatcctaatccctggaacctgtgaatatcacattatatagcaaaggatctttgcagatctatcaaattaaggatattgagagggggagggtatcctgtattatccaggtgtgctgaatgtaatcacaagggtccttataagaggaaggcagggaagtcagaagtaggggagtagatgtgatcggggaaggagagttatgtgcatgtgagggagagaaaagggaggaagagaagtacagatggagagagaaaggggggcagrgagagagagagagagagaaatggaaagattctatactgctggctttgaagatggaggaaggggccctgagccaaggaatacag

SEQ ID NO: 131651 - DNA, 517 bp, Homo sapiens
aattagcatgtttatattggacattggaatgctacatggaaataagagtccatattaaaatgatattcttttttgcttttccgttagagccaaaagaagtttgaagtttgcacagtacctggcaaaaaaaaaatggcacygaataaatatttatcaaaaagattactgaataggaatgcccacaaaatcatgtaataaaagcagaccaaagggatttttccaatgcagccaccagtgaacaggactgctagggccacagagtgcttgttccaagtgtcatgagagagtttcagactcctcactttctctcccttatggtccatcactgtctaatacattggctgccatgggataaaatatgccatctccatgagctagtttgttgtgttaccattagcatgccagcaaaatgttgcccttacttatttctgcttttttgttcgttttatgctatccctcttcccccaacaaatgcaaactatttaatatgaatgttattttttccaagcagggcata

SEQ ID NO: 131652 - DNA, 381 bp, Homo sapiens
taaccactagaatggatgtcatatgtggcataaggtatagacccartttttggtttttatcctgtgggtatccagttatcccagcgtcatttattgaaaagtccctgcaacttaatagctactgtcataaactaattatccatatgctataggctgaatgatgtcttccaaaaattcatgtgttgaggccttaagtcccagtatggtggtgtttcaagataggacatttagggggcaattagaattatatgaggttataaggatagggctttataagaagaggaagagagagattgctgtctctctgccatgtgaggatacaatgagaaggcactcatctgcaagccaggaaaaggcccttaccagaaaccaacttagtca

SEQ ID NO: 131653 - DNA, 571 bp, Homo sapiens
ttgggaacctaaaaatcatcatttaccaagtaatgctttgcagcttgccattgctcatctaaatactgtggtgaaacatactactgactaggagcccctaattggcttggctcataatgagacatactgctcccagtttaaaacccagtgccacactttgtagtttcctactactgggtgaaagaaagggaaggkgaaaactccgaggcttgaaagtgtcccttcagggcttcatgagaagtccttgaaataaactcatagaggatgggggaaaagcaatctgttatgatttaaaatattctaatcaatgacacctttacgactggagacacatgtggacaccctaaacaatctatggcctgttgaatttcatcaaccctaagtgattattagaatattttgagtttgcttaaaaatattccagcagaggggaaaaatatagaggtggggaatatgtgaaactagaatggtagaatgtggatctttattgaggatgggagagaaatagatgagtgttcattatactattctctccactttggtggaggcttgaaattttccatactgaaaa

SEQ ID NO: 131654 - DNA, 639 bp, Homo sapiens
atttaatatgactggacctgaggaatgtacccagtgtatacttaaaattctactggaataaaatacggaagtttaaaataaggttacagtttaagataggctagaattactcaggcctttcaactcagtgcctgacttgacaagaaattttagcaagaatgacaaaataaattgcacttattttcaccctagaaaaattatcctgctaattgaaataatgtagtgacttgttagtaatacagttaagatactagaaagggctttaattttacagaacctgtcttctctttgcctgagtaaatttgagtgtctcgttttcatttgcactatgtggaaaccttcattatttttcttcagaaaatcaagggggataacataatgtgagcctttttgtgatttggttttgtgccataatattttagatttaataagagttttgctgttaagcaaatggtctatttttcatcattactgcttagcttaagtcaaaatatattaatgaaaaccartattaaaaatatattacacattgctaaatgtttatatttcaaaaccatcataggtaattggttctagaagaaaatgaattgatttcatattttaaatatattatgtatgtttctataaatgactcaattt

SEQ ID NO: 131655 - DNA, 398 bp, Homo sapiens
cttcacttaaggataaagatcaaagtgcaaatattcttttcaagagtagctccttgacccaccttcacaactaggtataaattacagctaccaggatccttatgagaggagaactggggcctgaagagaagcactgaggcatgaatggggtggggggatggtttgaggagtcagtgaaagggaagactagggatggtarcagtagtcctcagcgtgggacagttttagggattggaatgggaggagaaccaacacttggagagagagaggtacatgctaggcctctccattgggtgaagtctttatcctgctgctttgtagcagcctcaactctgcagacacttttggacatttttaaaggaaatgttcattttaaccatttaggcaaggcatacttt

SEQ ID NO: 131656 - DNA, 398 bp, Homo sapiens
cttcacttaaggataaagatcaaagtgcaaatattcttttcaagagtagctccttgacccaccttcacaactaggtataaattacagctaccaggatccttatgagaggagaactggggcctgaagagaagcactgaggcatgaatggggtggggggatggtttgaggagtcagtgaaagggaagactagggatggtagcagtagtcctcagygtgggacagttttagggattggaatgggaggagaaccaacacttggagagagagaggtacatgctaggcctctccattgggtgaagtctttatcctgctgctttgtagcagcctcaactctgcagacacttttggacatttttaaaggaaatgttcattttaaccatttaggcaaggcatacttt

SEQ ID NO: 131657 - DNA, 398 bp, Homo sapiens
cttcacttaaggataaagatcaaagtgcaaatattcttttcaagagtagctccttgacccaccttcacaactaggtataaattacagctaccaggatccttatgagaggagaactggggcctgaagagaagcactgaggcatgaatggggtggggggatggtttgaggagtcagtgaaagggaagactagggatggtagcagtagtcctcagcgtgggacagttttagggattggaatgggaggagaaccaacasttggagagagagaggtacatgctaggcctctccattgggtgaagtctttatcctgctgctttgtagcagcctcaactctgcagacacttttggacatttttaaaggaaatgttcattttaaccatttaggcaaggcatacttt

SEQ ID NO: 131658 - DNA, 534 bp, Homo sapiens
ttttaaatattgtgcattaaaagacaatgtcaatagagtaaaagagcaagctacagagtaagagaaaatatttttaaattatatatctgatagggattaatatctagaatatatagagaactcttaaaacttaacaacagaaaaacaaacaacctggttcaaaaatgagcaaagaacttggatggacatttctccaaagaagatacaaatggccaaaaaggacatgaaaagatgttcaatattacttatcactagggaaatgaaaatcaaaactgtaatcagataccacctcataccaatcggaatagctatgatcataaaacagaaaactaggtcaggtgagatggctcatgcttgtaatcccagcattttgggaggccgaggtgggcggatcacctgaggtcaggagtttgagaccagcctggccaacatgggggaacctcatctctactaaaaatacaaaaattagctgggcatggtagtgcacaccygcaatcccagctactcaggaggttgaggcaggagaattgcttg

SEQ ID NO: 131659 - DNA, 480 bp, Homo sapiens
cctgaattctaaccttgctctgtcattaacttgtactgggctattaggcttctagcttctttgggcctcagtttccttatcactcaattagaggattaaaaacaaaaactgaactccatagaaccctaggattccctagatgtgccccagacccaaacatttagtgaggggtgaaggatagactaagtggtcttgtattagggcctcccaaccctccaactcctctagcaaccaaaccagccgggctttgaaattttactgtacatcttgggatttcaataatggttttgcctgcctaattacttcttttttttratccacaggatttaaagagatctttaaagaatccctttgatctctgctgtctctaatttcagaaactctggcacatgtcttttttgtgggatttttccactccaccattcacttaatctgtggtagccaattttattagtctggggaggaaagattcccttctgg

SEQ ID NO: 131660 - DNA, 562 bp, Homo sapiens
gttgcaagtagagcctttcagtgtcacgggcattcctgcagtcttcttttgaacatttatggaaatcctctaggggttttgccaacgggctttatctattcaagcctcatttttagccttgtttttgaagctaacatgtaaactagttgatataaatcagaaataccagggtcataagctcaaatacttaaattccatagcagggcaaggtaatttagacagtaaaggatagagacaaaaaggacccgagggaggagaagggaaakcttctgagggaggagaagcttcagcaaccattttaaattcagaaattgttttagacagtcttctgggttttttttcctgcaaagtaaataactttatcagaacctcttttggatgcattcaaataccattgcaaatgacattccccattactctgttttattctagtcagcttttttaaatttgaacttgcaagtaaattagttgaagtttttcaataggtatcccatttctagccattgaagttttggttcttcctagttatatgggaccatttttaaaaataatgaccaggtgt

SEQ ID NO: 131661 - DNA, 644 bp, Homo sapiens
ggccagctaatgttttccatttatagttttactggctgaaaaggaatattgtctgcactcatagccaccaaamaaacggcgatccataatatacaggatgaacatggtggcaaatgttaaatgggaaatcttgactgaggctctgagataggataactattaaaaggagttagtgaggcagatcaaaatgcaaactgttcaactgttagagaactggtttctcaaacagagttgcagtaggaggaacctatcaagggaactgccaaagaacccacagtagtccctgtgggggaaccagttttaaacatcttccatgcctgatcgtgcaaaactttttagaatgacaccagtgaagaaagaactttctgtactcctttcctttctgccctccaaccctaggggcctgaggtttgtgcttagcaggtttgagaggagacactgagagaaaggggcggggagagagagagagaaagagagaaagccaccactctcccctaaatcctggccttgctaggagatgaaaaaaaaaaaattaacaatcaaagaaagagttttgtatgttacattggagtgggcattctcattactggatggagactgttttgtgacataaagtgccctaggactatttcagaagagtgagc

SEQ ID NO: 131662 - DNA, 644 bp, Homo sapiens
ggccagctaatgttttccatttatagttttactggctgaaaaggaatattgtctgcactcatagccaccaaacaaacggcgatccataatatacaggatgaacatrgtggcaaatgttaaatgggaaatcttgactgaggctctgagataggataactattaaaaggagttagtgaggcagatcaaaatgcaaactgttcaactgttagagaactggtttctcaaacagagttgcagtaggaggaacctatcaagggaactgccaaagaacccacagtagtccctgtgggggaaccagttttaaacatcttccatgcctgatcgtgcaaaactttttagaatgacaccagtgaagaaagaactttctgtactcctttcctttctgccctccaaccctaggggcctgaggtttgtgcttagcaggtttgagaggagacactgagagaaaggggcggggagagagagagagaaagagagaaagccaccactctcccctaaatcctggccttgctaggagatgaaaaaaaaaaaattaacaatcaaagaaagagttttgtatgttacattggagtgggcattctcattactggatggagactgttttgtgacataaagtgccctaggactatttcagaagagtgagc

SEQ ID NO: 131663 - DNA, 644 bp, Homo sapiens
ggccagctaatgttttccatttatagttttactggctgaaaaggaatattgtctgcactcatagccaccaaacaaacggcgatccataatatacaggatgaacatggtggcaaatgttaaatgggaaatcttgactgaggctctgagataggataactattaaaaggagttagtgaggcagatcaaaatgcaaactgttcaactgttagagaactggtttctcaaacagagttgcagtaggaggaacctatcaagggaactgccaaagaacccacagtagtccctgtgggggaaccagttttaaacatcttccatgcctgatcgtgcaaaactttttagaatgacaccagtgaagaaagaactttctgtactcctttcctttctgccctccaaccctaggggcctgaggtttgtgcttagcaggtttgagaggagacactgagagaaaggggcggggagagagagagagaaagagagaaagccaccactctcccctaaatcctggccttgctaggagatgaaaaaaaaaaaattaacaatcaaagaaagagttttgtmtgttacattggagtgggcattctcattactggatggagactgttttgtgacataaagtgccctaggactatttcagaagagtgagc

SEQ ID NO: 131664 - DNA, 616 bp, Homo sapiens
gagcaaactaaatggctttattgaatactcaccccatgccttcctccactactgaaaccttgtcatgcatttccaaggtgagcaccttgcctgagccaccccttaaatccccatgatagggagagggggtggctcaaaatttcccatgagaatgagattagatgcaaataaccacccaaaccttcagtctacagtagattgttcwaaattttactttgaggaaaaggatttctttaaatgatggtcatgtaaaatgatcatctattgggaatgtactttagcatttgttaaggaaaagcaaatgacacttggttttttacaaaccctttataatctacctgatggctcaaaaactattaagaagattattatggatgattttatagccaaagacagtggcttacaatttctgccagtactggttctgccttcatagcctaatgattatttctacacatagctttacatttcaattgtttatcattcccaagccatcagacatggattaggaaaaaagtcaaagtaataggaaattatatcttagtattatttttaaacaattaatagttcccagctgagttaaatgaattttgttttacaccaaattacaataatg

SEQ ID NO: 131665 - DNA, 566 bp, Homo sapiens
aagcatttcttgcccatcgacctcacctatccagattatacagtttcatgtcattttttaactgaattataatttataaacaataaaccgcatttgtcttaagtgtaccactccgtgagttgtgacaattttataagcccatgtaatctttacttcaataaagagaatgattccattactccaaaatttccatatgctcttttgcactctattgccactctcactcagagacaaccactattctgatttctattactataggtttattttgttggtccttgaacttaacatatataaaatcatatttatgtcctctttctgtcggacttcttttagcttgacataatatttttgagaatcattggtttattgattttgtatttctttcctttttactgctgaataacattctatattatgaacaatactacaatttgtttayatatttgcctgttgatgaacagctacattgctgacaatttttggttagtatgagtaaagttgctattaatattcttgtataagtcttttgtaggcatgtagttttgtttctctcttgagtaact

SEQ ID NO: 131666 - DNA, 581 bp, Homo sapiens
agtctcattaataaaacctctgctctactccaatttacatgagcttcattatgaaaagtaattgggcacactgaatttactgtgggagtcagctaatgctgaatacaaaaccacagggaaatttaggaggaaggctagatgcaaggtcaagtatgttgtaagaaagctgagtagtcctcagaagaaaaagaaaattgggtatacagaaaggccctcaacctaaaattaagctwtaaattttgaataaataaatgccttactggacagaaaagtctagtcccccaaaccaaatgagcaaaagaagatgattttgtgacagtggcattgacttgacatcaatgccataataattaaaaacaggttaatggctaattttactatccctcctcttgtatctcccatgttccaattatgcagttaaggtagctgtcagagctaggactgctgacaagagttccagttgcatctctgttacacagttaactttaaaagcttttaatttcacatgcaatgccaaacaaacttttaagtgaatgagatcactgatgctctattccaatacaatattcctagttcaaaat

SEQ ID NO: 131667 - DNA, 531 bp, Homo sapiens
tcctcaccaagactttttttttttcattattttgataatagccatcttaacagggggtgagggtatttcactgtggttttaatgtgcatttctcttgtgattattgatcttttcatatgctagttggccatttgtatattttctttggagaattatctattcaagttatttatcaatttttaaatcaggttatttgttttttttttttgttgagttgtaraagttctttatatattctggttattaaccccttttcagaaaacaatttgtgaatattttctcctgttccctaactttccttttctatctgttgattattcttttgatgagaaattgttttaaattgtgacatagtcctatttgtctgttttgctttttggtctgtgctttgatgtcatatctaagaaatcattgccaaattcaatatcctgtagcatttcccctatgatatcttttaggcgttttacagtgttaagtcctgtgtttaggtctttaattcattttcagttaatttttatatatgctgtaagg

SEQ ID NO: 131668 - DNA, 409 bp, Homo sapiens
ggtccaacatggaaaaaccccctctctactaaaaatacaaaattagccaggcgtgttggcgcatgccggtaatcccagctacttgggaggctgaggcaggaraatcgcttgaatctgggaggtggagcttgtggtaagcctagatggcaacattgcattccagcctgggcaacaagagtaaaactccatctcaaaagaaaaaaaaaaaaaaaaaagaactttggtctccacagtcttaacccagaaaatgtataaaacctagttgtggctcaaccaccttggacacatgtcctcagtgtctcttgagggttgtgtcatgggccaccgtcactagtatttggctcaaaataaatctcttcaaatattttacagtttgactcttttcgtcaacactttcctaattgaattc

SEQ ID NO: 131669 - DNA, 409 bp, Homo sapiens
ggtccaacatggaaaaaccccctctctactaaaaatacaaaattagccaggcgtgttggcgcatgccggtaatcccagctacttgggaggctgaggcaggagaatcgcttgaatytgggaggtggagcttgtggtaagcctagatggcaacattgcattccagcctgggcaacaagagtaaaactccatctcaaaagaaaaaaaaaaaaaaaaaagaactttggtctccacagtcttaacccagaaaatgtataaaacctagttgtggctcaaccaccttggacacatgtcctcagtgtctcttgagggttgtgtcatgggccaccgtcactagtatttggctcaaaataaatctcttcaaatattttacagtttgactcttttcgtcaacactttcctaattgaattc

SEQ ID NO: 131670 - DNA, 409 bp, Homo sapiens
ggtccaacatggaaaaaccccctctctactaaaaatacaaaattagccaggcgtgttggcgcatgccggtaatcccagctacttgggaggctgaggcaggagaatcgcttgaatctgggaggtggagcttgtggtaagcctagatggcaacattgcattccagcctgggcaacaaragtaaaactccatctcaaaagaaaaaaaaaaaaaaaaaagaactttggtctccacagtcttaacccagaaaatgtataaaacctagttgtggctcaaccaccttggacacatgtcctcagtgtctcttgagggttgtgtcatgggccaccgtcactagtatttggctcaaaataaatctcttcaaatattttacagtttgactcttttcgtcaacactttcctaattgaattc

SEQ ID NO: 131671 - DNA, 596 bp, Homo sapiens
agtaacaattgctattaaattattaaattttacccagtgcataatgtcgatatatagcaattcatatatatataatatatatatatatatatatatcaccatgctcatctgactctactttgccacaattctccccacagtcctccccactccctagcatcacatgcagctcatttcatatatatatatatatatatatatatatatatatatatatakagagagagagagagagagagagagagcgcacaagcaattcatattcacaatgaatattggttgaacaaatggatgaaggagtaaactaaaaccagtaaatatcccatatatggtagatttttgtttctagtgagtgagttaataaataacctgatgtctcactgtagactgaggcaactattactaatttttccattgtctatctaactgatagacatgtattaggtcacaataaatgttatttgagagaataactcatgaaagaaatcactggatgaattaatgaaccaaccagtactagagtgttatccagaatggtagcaatttttatttcctttagagcctagtgtgtattaaagatttgttgagtcacttga

SEQ ID NO: 131672 - DNA, 596 bp, Homo sapiens
agtaacaattgctattaaattattaaattttacccagtgcataatgtcgatatatagcaattcatatatatataatatatatatatatatatatatcaccatgctcatctgactctactttgccacaattctccccacagtcctccccactccctagcatcacatgcagctcatttcatatatatatatatatatatatatatatatatatatatatatagagagagagagagagagagagagagcgcacaagcaattcatattcacaatgaatattggttgaacaaatggatgaaggagtaaactaaaaccagtaaatatcccatatatggtagatttttgtttctagtgagtgagttaataaataacctgatgtctcactgtagactgaggcaactattactaatttttccattgtctatctaactgatagacatgtattaggtcacaataaatgttatttgagagaataactcatgaaagaaatcactggatgaattaatgaaccaaccagtactagagtgttatccagaatggtagcaayttttatttcctttagagcctagtgtgtattaaagatttgttgagtcacttga

SEQ ID NO: 131673 - DNA, 422 bp, Homo sapiens
acctgagggtcatgttgggatttaaactctggtatctgaagaaggctggagcccttcctctctcccacctgttcccctcagtcctgcaatttatgccgtgcttccaggatctgggcaacctgctgctgtttccacttgctccagccaaaggtgtttctgcagcagggcctgctccacccttaaaagggttgagaaagagggacatggcaagaggaataggctggaacttgggcatcacatcctacagggggctgggcaggatcccgagtatcacctttgtgaggggtctggcccaggccaggatctcgagtgttctgacaccatcrgcaatgggaaggagggaatcactggcctggccacacccacaccacctcttcccctccctcctcctctccccctccatatcccctttcctgctttgc

SEQ ID NO: 131674 - DNA, 422 bp, Homo sapiens
tgttccccatgatttgatcttgttctgctgggagcagtttctgctccttctagttacggcaaacaagcttcacctgccctttgtccttctagcacaaactggaagcccaagaccctggggtgtttgtgaatgtgtccaaggwcttgggttcagatgagccaagtcagaagtcgacacactagcctaagatgttcacctgtggagagaagagagagatgggtgagtatcagccgtgcaacactacactctagtttcagtgttatcctggaagacctaagctttgggggggtttcctcctgtcttggaactgtcaggacacccactgctatctatgtctgccatgtttcctctgctcatgtgtttttgctctaactcaatgatggagaaaatactgacttgtataagccatgattgttgagcca

SEQ ID NO: 131675 - DNA, 589 bp, Homo sapiens
aaagctccaaaatggtatcttttgactccatgcctcacatccaggtcacactgatgcaagaggtgggttcccatggtcttgggcacctcctcccctgtgctttgcagggtacagcctccctcccagcttctttcacaggctgacattgagtgtctgtggcatttccaggcatatggtgcaagctctaggtggatctaccattctggggtctggaggactgtggccttcttctcacagttccactagatggtgccccagtagggactctgtgtgggggctgtgaccccacatttcccttctgtactgccctagcagaggttctccatgagagctctgccctgtagcaaatttctgcctggacatccagttatttccatacatctctgcaatctaagcggaggttcscaaacctcagttcttgacttttgtgtacctgcaggctcaataccacatggaagctgccaaggcttggggcttgcatcctctgaagccacaacctgagctgtaccttggccccttttagtcatggctagagctgctgggacacagggcaccaagtccctatgctacacacagcgggggtctacag

SEQ ID NO: 131676 - DNA, 330 bp, Homo sapiens
tatttttcttggggattacatttccttatggtggatagatattctctatccttgaagttcaacactataaccagaatttgttttattaatgagtaagttctattaattttccctaaaacacagcccttttattctacttagtctagctttccttttatacagaaaaattttcttctactgtgtatttgagcattattttttttttctgttctcctctttagaaaactataggccaggtatggtggctcatgcttataatarcagcactttaggaggctgaagtggtggatcccttgcacacaggagttcaagaccagcctgggcaaattg

SEQ ID NO: 131677 - DNA, 500 bp, Homo sapiens
agtctatgggaggatgtacataggttatatacaagtactttaccattttatgtaagggatttgagcatgttggattttagcatctgcagggggtcctagaaccaatcccctatggatactgagggatgactgagcatgatttcagaagttcctataatgtacatatattactttcagaataagaaaagtgtattaaagtttttatccagaaaaagaatattggctgaaatttagctagagcattttgcaactagagcccccacttgagagcagcattgattgttatgtacactatttattgasgtaccagatggtgtgactatgatatcattaaaaaaatgattaacctcaatgaacctgacatcagaggattgaataccagcattacaaatgtatttgtcacttactgaggtactaactgttgtgcattagtcacattacttttgatcaaaatgttgtcagaaattaaggctgtagacactgctgtggattaaatcctc

SEQ ID NO: 131678 - DNA, 579 bp, Homo sapiens
cccacctgggaatgacatgtcgccaagggaacttcccccacccagggaagtggtgagtgaatgtttaaccccaggaacccatgcctytccctcggatctttgcaaccctcaggtcaggaggcctcctcatgaacccactccaccggtctgacaaacaaaattacttagagtctcgtcagagcagctggtcaggtgtgcacagaaacccaggagccttagatactcaagctctctgggtttctcagcaaaagtagctgcaactctggcaaagtgggaggttagaccattatacatacccctaggaaagaggctgaatctagggggctgagcagtgataatctgtaggcctcacttccacagcacctcacagaataagacccactagcttggaatttcagccagccactggtagcaatgttgcaccccactggatggagctcctggagtgaggggcaggccaccatctttgctgtttgggcaacttagcctttccagtcttcgggtttggagaatctgagcttacttgggtggaggcagtccctgagcacagcacagctgctctgggaagatgtagccaga

SEQ ID NO: 131679 - DNA, 579 bp, Homo sapiens
cccacctgggaatgacatgtcgccaagggaacttcccccacccagggaagtggtgagtgaatgtttaaccccaggaacccatgcctttccctcggatctttgcaaccctcaggtcaggaggcctcctcatgaacccactccaccggtctgacaaacaaaattacttagagtctcgtcagagcagctggtcaggtgtgcacagaaacccaggagccttagatactcaagytctctgggtttctcagcaaaagtagctgcaactctggcaaagtgggaggttagaccattatacatacccctaggaaagaggctgaatctagggggctgagcagtgataatctgtaggcctcacttccacagcacctcacagaataagacccactagcttggaatttcagccagccactggtagcaatgttgcaccccactggatggagctcctggagtgaggggcaggccaccatctttgctgtttgggcaacttagcctttccagtcttcgggtttggagaatctgagcttacttgggtggaggcagtccctgagcacagcacagctgctctgggaagatgtagccaga

SEQ ID NO: 131680 - DNA, 579 bp, Homo sapiens
cccacctgggaatgacatgtcgccaagggaacttcccccacccagggaagtggtgagtgaatgtttaaccccaggaacccatgcctttccctcggatctttgcaaccctcaggtcaggaggcctcctcatgaacccactccaccggtctgacaaacaaaattacttagagtctcgtcagagcagctggtcaggtgtgcacagaaacccaggagccttagatactcaagctctctgggtttctcagcaaaagtagctgcaactctggcaaagtgggaggttagaccattatacatacccctaggaaagaggctgaatctagggggctgagcagtgataatctgtaggcctcacttccacarcacctcacagaataagacccactagcttggaatttcagccagccactggtagcaatgttgcaccccactggatggagctcctggagtgaggggcaggccaccatctttgctgtttgggcaacttagcctttccagtcttcgggtttggagaatctgagcttacttgggtggaggcagtccctgagcacagcacagctgctctgggaagatgtagccaga

SEQ ID NO: 131681 - DNA, 526 bp, Homo sapiens
caagcgtaaggaaacacaggggagccacacaactgagccattttacccactgcccaataagcctaagtgccacctactggatcacagcccaaagcttcaacaccaaaaatacctctctaacatacccgtctctgaaaccagagacaataagtcagcttcaaataaagttcctgcacaaagcctcagcccagtgaaaacatccagaarataagtttattgactgtactcaatctacactgcagttaaaggaatacccacatacagagatgagaaggaagcaatgaaagaactccagtaacccaaatggccagtgtcatatgtcctccaaatgactgcaccaattctccaacaagagttcttaactctcgctaggctgaactggctagaatgacagaaatacaattcagaatatggatgagaatgaagatcatcaagattcagcaggatagcaaaacccaagccaagtgaaaagaatcgcaatagagtgatacactgagtatgaaattgctggcataaaaaagaactt

SEQ ID NO: 131682 - DNA, 463 bp, Homo sapiens
aataaatatgtaaatacagaaataattaagataatctggaattattttttaaattctctatattgattaactcatgtcattcatgttcttttcttgatagccacacaatcatgttcttgtcttgagagccacacacatctttatcttcatctttgtggcatgtgctcgtttttttcatgtccaaaggaataaatgttaaggtgacctttcttcaactattctacattatatgtctgtaaggactttgggcaactacttacattctctttacactagtttgcttacttgtaatttggaattaatttcagtgtcttgctcacagrgtcgttctaaggattgattgagatattatatataaaatatttagtgtatcatcaggtatagagtaattgttttatcaatattttcatgataatgtttattaatattatctcacacttacctaatggtgctacaattcatc

SEQ ID NO: 131683 - DNA, 459 bp, Homo sapiens
aatatgatatatacgtaagtgtgtgtacgaaaagtatgatatgaataatagcaacatgcaagccaaaaatctaccccctcacccacgttctcacaaaaaaaaaaaaaaaaaaagagagagaaaggaaaacaaaaaagaatagtgattactccttkggtaaaacttcttaaacttaagaaatcctaggagatgttttctggtgtagtgtattataaaataaaatgcttttttcgggaatatgaggccatttctgccactaaccatttgtttcacttaaaaggtaacacatcttctctgatcctccattccctcatttataacaggggagcagacaaactaaagaacaaaatttagcctgaattttgggaagtaaacataccaaacagtaaagttttgtgggaaaaagaaatgacacccattgacaatgtggttacatggctggtttcctcatgtcaatgt

SEQ ID NO: 131684 - DNA, 458 bp, Homo sapiens
tgttattgcctcagttaaatgtggagtttcgtttccatgccattttaagtttgacttggtctcactatagcaataaaatacttatgataatgtaggaagtggactgaaatgacaaaagtatgtatgtgcacatataaacaataatacaactgatagagggtagagtttcataatgcgttataatttaatctcatcaatgactggctgttacmaagacttcatcatccagtgtatcaccaggaaaaaaatggccctgcattcaacttagttaagaagtgcacatctcagtaataaatatatttggatagttgaaaaacataaatgcaatcatggacaattctattttactttaaaaatgtagaactcctccatgcccttatgcaagaaagaagagggttatgaaggagaagcacttgaagaagatcaaggaagaagatcaaggaagaagactgagcaaa

SEQ ID NO: 131685 - DNA, 587 bp, Homo sapiens
aattttacttctaggtatatacccagaataattaaaactacatttccacataaaaacttacagatgaatgtttacagaagcattatgcataatagctaaaagcataagctctaatgtacataaactgaaataaaaattttatttatttttatttttttattttattttatttttattttatttatttataaataaataaatattttattgctgctgcaacaaattaccacaaacttcayggcttaaaacaacacaaatttattttcttacatttctggaggtcagaactctaaaatcattgtgttagaaggcctgcatccctgctgggagatctgagaaataatctgtctccttgcctttttccagtttcctgagtccgcctgtattaattggctttatttcctacctccatattcaaagccagtaacataggttcttctctttcttctgaacttctatctttctctacaaatccttgcaatccaaactggattttggctgtagacacctttctagttcctagaacgaagacatttgtgagataacctatgtttcctaacctgggatttctgagatatctttgcacc

SEQ ID NO: 131686 - DNA, 587 bp, Homo sapiens
aattttacttctaggtatatacccagaataattaaaactacatttccacataaaaacttacagatgaatgtttacagaagcattatgcataatagctaaaagcataagctctaatgtacataaactgaaataaaaattttatttatttttatttttttattttattttatttttattttatttatttataaataaataaatattttattgctgctgcaacaaattaccacaaacttcacggcttmaaacaacacaaatttattttcttacatttctggaggtcagaactctaaaatcattgtgttagaaggcctgcatccctgctgggagatctgagaaataatctgtctccttgcctttttccagtttcctgagtccgcctgtattaattggctttatttcctacctccatattcaaagccagtaacataggttcttctctttcttctgaacttctatctttctctacaaatccttgcaatccaaactggattttggctgtagacacctttctagttcctagaacgaagacatttgtgagataacctatgtttcctaacctgggatttctgagatatctttgcacc

SEQ ID NO: 131687 - DNA, 545 bp, Homo sapiens
ggtaagtaagcccagatgtggctggaaaatcttttgctagtgcctttgaaggcacaaaatgtcatggtattcaattgcacaaagggatctttgaagggatgagggatgtgactcatggatcccctcaatggccatttaagcagaaatgaggaatacatataatactatctaggaagtatactgggatgagggagggtaaggtggaatctctcatctaatgtaatgaatcccaggacaggcataagaagcccacaaggttcttcagaattttataccagcagaaaactgccaatttggacttaaagagccagggatrgaataaaattaaagaaggctgttagagtcccaaaattctacaggcaggaaacaggctgattaaactattcagcttaaatttgtgctaaacttcacaaaaaaagaaggataattctgacgaagaaggcttgagtccagagagtagagtccttagctcagaggatggagacaaaaactacaagaattattctcagaccttgaaatctaatactgttttcctagctagattt

SEQ ID NO: 131688 - DNA, 622 bp, Homo sapiens
tgaataatttcttataatgtgaccacttttgtcttttacaaaattacacaaaaatgttagcatttcattaatcattttttctaaaaatcacgaaaggggtaaattctaagtattgttatatatgacaaaataaaagttaataatatttatgttcaagctgtgatctgaacttgttttattcacagtttattatttacttaaccaagtgtwgtaactacttacaatacccatattaaatgtcagacattggactaaatattcatatattatctctagttttcactattataccatataagcattcatatttttacttatctaggagagtttgaaagagatttagtaactttacaaagtcacaaacatgattggcctatactcaaataaaaaatttcattttagtccagttttgaattatttccattttgacagttcacattaaaacttttcaaacttttaccagttttgggtgaactctcttttctaagttcctaaactttatctgtaaactccaaacagtaaaaaacacacagaagatatttaaaaatctgttgatcatgtagcatcacattaaagaaattaaagaacaatgatttgttataacatatatttgaataaaaat

SEQ ID NO: 131689 - DNA, 622 bp, Homo sapiens
tgaataatttcttataatgtgaccacttttgtcttttacaaaattacacaaaaatgttagcatttcattaatcattttttctaaaaatcacgaaaggggtaaattctaagtattgttatatatgacaaaataaaagttaataatatttatgttcaagctgtgatctgaacttgttttattcacagtttattatttacttaaccaagtgttgtaactacttacaatacccatattaaatgtcagacattggactaaatattcatatattatctmtagttttcactattataccatataagcattcatatttttacttatctaggagagtttgaaagagatttagtaactttacaaagtcacaaacatgattggcctatactcaaataaaaaatttcattttagtccagttttgaattatttccattttgacagttcacattaaaacttttcaaacttttaccagttttgggtgaactctcttttctaagttcctaaactttatctgtaaactccaaacagtaaaaaacacacagaagatatttaaaaatctgttgatcatgtagcatcacattaaagaaattaaagaacaatgatttgttataacatatatttgaataaaaat

SEQ ID NO: 131690 - DNA, 597 bp, Homo sapiens
agttaagtgactaggccaaaattagaaagtaagttagccaaactgggattcaaccccagtctcttgttttatgactttctgcattctacttctccacatcacatcatcatcaaagttattttccctcacttagggaatagagccttgtctatcatgggacagacatgggatctcctgacttatgaaggtttctgtacatgacagagcctagagaaatagtctatgctgaaagtttttattttcattcagtgraatggagggtatccttgcaatgggacagagctgaccaaaaggtcgattcaggcaggggaagcagtctgttttccaatctgtttttctaagctggtgggtgcagtacagactccaggaagtaagacgaagatgtattgggatagagagagtggtcaggatttagagtagagaagggcttcagcattgcctggctcagcattgccactcacatagtagtttatccatctggatctgtgcaatgtgtaacttatgagagcatatgtgatcatcctgaaacagaggttcttccagaactacttatggtctgcagaaaaatgctcctggttgaggcagcgacagagtctc

SEQ ID NO: 131691 - DNA, 436 bp, Homo sapiens
tttcattcagtgaaatggagggtatccttgcaatgggacagagctgaccaaaaggtcgattcaggcaggggaagcagtytgttttccaatctgtttttctaagctggtgggtgcagtacagactccaggaagtaagacgaagatgtattgggatagagagagtggtcaggatttagagtagagaagggcttcagcattgcctggctcagcattgccactcacatagtagtttatccatctggatctgtgcaatgtgtaacttatgagagcatatgtgatcatcctgaaacagaggttcttccagaactacttatggtctgcagaaaaatgctcctggttgaggcagcgacagagtctctgggattgtttcactgacttgtccagagtcgtgtaacaagggatttgaacaaaaaatactaatagcaaacatttgtat

SEQ ID NO: 131692 - DNA, 186 bp, Homo sapiens
gcctagtacagcacctggttcatagtcaatgctcaacaaaagtaattattattagtaatatatcacttttgattaaattycgaatagaaaaaagacatataagtataacagtaatttctttaaaagttgaactttctaatattgaattactttgaccacccagttcctaaaaatttttccctggcc

SEQ ID NO: 131693 - DNA, 186 bp, Homo sapiens
gcctagtacagcacctggttcatagtcaatgctcaacaaaagtaattattattagtaatatatcacttttgattaaattccgaatagaaaaaagacatataagtataacagtaatttctttaaaagttraactttctaatattgaattactttgaccacccagttcctaaaaatttttccctggcc

SEQ ID NO: 131694 - DNA, 508 bp, Homo sapiens
cctaacatagtagatgctcctctcataatttataattgtattgagattcagaagtaaacctggcccaaatgatgtagtctggcattcctttcctgactactctacatgtcatctgactttttatacataagacttggcttgaaagagagcaattcagttgtcataagttctgctatgacccatgttcacctagacattaacttctttacctggctgtgccctaagcataaacttgggatctggaaacattagaatacttttgctgatctgtttgtattgtgtaacctgattttgctttctgctctattagattactgtgaatattgaattattggctccaatatttggttcttttacctactctcacccctcagatccattcaaatcctatggaatctgcagctcctctygttagtgatggagtgtaatttcttatcttttgactttggggttggccctgtgacttgctgtgtccaatgaatgctaacagatgggatacaagtagaaa

SEQ ID NO: 131695 - DNA, 298 bp, Homo sapiens
ttttatgtaaggtacaagatactaaatattttaggctttgcaggccgtaaggtttctgtcacaaatactgaactctgccatcgtacttcaagagcagccagtaggcaaaaaaagtacagtggtgtacacaaaaagaagcagttggactcgggaagctgaggcaggagaatcacttgaaccggggaggcagaggttgcagttaagccgagatcatgctactgcactctagcctgagcgacagagtgagactctgtctcaraaaaaaagaggcagctgggcagatttggcctgcagggta

SEQ ID NO: 131696 - DNA, 385 bp, Homo sapiens
ttagatccagtacatattttaaaggtacagccaagaaaatacgctaatggatattggtygtggaggtggagaagagttgaggatgaagccactatttctgatttgagcaacttaaagatggtgttgcccttaactgattccatggacatacagatttaggatgagacttccaaaggaagatggtaaataggcaattggattatcaggtctggggagaactctgggctggagatatgaatttggaagcagtgaatatataaacattaaaaatcataagactagaaaaccgaaaggaaataaatgtagttaggaaagaagagaaaaagaaacactgagtcgtggggaaatgggaagaaagcaattaaaaaagatgaaaagagaatgg

SEQ ID NO: 131697 - DNA, 554 bp, Homo sapiens
atgtagtgactttctttgtatctttttatttttagttttttcacttacagtcaattttgtctgatataagtataactattccttcctgcttttggtttctgtttgcctgaaatatcattttccatcctttcatttttagtccatgtgtgcctttacaggtaaagtgcgagtgagcgtcttgtaggcagtatgtagttttttctctttgttgttgttgttgttttaattcgttaagccaggctataattgttgttgttgttatgggcagagtcttactctgccacccaggttggagtgcagtagtgcaatcataattcattgcaacttccaagtcctgggcttaagcattcctcctacctcaaaactctgagcagctaggactacaggtgtgtgcaaccatgcatggctaactttgtgtgtgtgtgtgtgtggaggcaaagtcttggtatgttgcacaggctggtggtcttgaactgctaggctcaagtgcctagtctatactttttcatyagtgaattaaaacaatttacattcaaagttgttattgataggta

SEQ ID NO: 131698 - DNA, 620 bp, Homo sapiens
agcaaagagctggaaataaagactgggattgagtataaataccatggttggagatacatatttagagttatctgactaattataattaataataattacagctaatatcgatatactgtatgccaggcattctgccaagtgctttacccaaataacctcattttctcatcaaagacatctatgtacgtcctaatttttatttttatattatatattaggaatctgagtttctgatatgttcgttttctcaaggtcacacaaataacggatagatctaaaatataatcctaggaagtctgatttcttttctgattcaaaagaaaatagatgttaagaaatcaaaattgatgtcaggatcctttgaggttgttgagagatgtggagtgaggaagaaaataagagggaaaataaatgaaacttaaatytgggaaggcatgtagaaaaggatttgagggataaaaatgagcaatcagagcagcacaaagagcataatccaaatcatgatggactgactttgaactctctcttttttttcttttttttttttttcctgaggaggttggttggatggaatgggagattattctttgtctaagtctttctaaaattcacatgggcga

SEQ ID NO: 131699 - DNA, 470 bp, Homo sapiens
ccattcttcacgctctcctacccatcatcaatcctgctctcaatggcctctgtgagcttgctcctccctctggtgacagcatctgctatgatggcaatgttattccctcgcctaggccctttctctcacagtctttaactggggtgaggctatcattttawataaaattttatggaagtagttaaatagtggatttcaggatacatttaaatgcatttaagtgtgcatttcataatagtcaaacaaacaggtttctatctatgccaagttcccgtatctgagcagttatcagccttgcttctcgactgcttctgcctgaataggagcagctcagccacatcacagaagtcttccaggctgtttctctacggctagaatgcactgattgctgacatcaaagaaaagtgctttgttttcttgttggtttgtctttggtttcctttttttaggaaacaatgtttagggaaaca

SEQ ID NO: 131700 - DNA, 614 bp, Homo sapiens
atgcttcaaatttaaatagagctaaaattatrtattagaattttagcattacactgtcttgcagatattgtcctataggaatataaaacgcattttttcccttcatttatgaaacaccaaaaattactttcatgtgtatttatgtctcctccgatcatgggttctattactaaaatgacatgaaaaagagatatgattcagatctatcagaaaagctgatggctcagccaaattaatctataatcagaccaagacagggtatgacaaattttagacttttgctttaaaaactttgttggaaacactgcatgttaacaggctaactttgaaaaatttgaaacatttacacaaaaaggtacgggggtgtatatgtgcactttctttaaataccagatagcagatgatgtttgagcccataggaaatccttgggttcttctgagtaataagtaccttatgatatgcctacttaaaatgaatctgctagtatatagtacaaagtgaaaaggattttgtctcaaaaatatctaatttttgcttagcaaattttagattgtaattataatcaggcactccccatcttgagattaaaaatacacaaacattgttttcaatg

SEQ ID NO: 131701 - DNA, 614 bp, Homo sapiens
atgcttcaaatttaaatagagctaaaattatgtattagaattttagcattacactgtcttgcagatattgtcctataggaatataaaackcattttttcccttcatttatgaaacaccaaaaattactttcatgtgtatttatgtctcctccgatcatgggttctattactaaaatgacatgaaaaagagatatgattcagatctatcagaaaagctgatggctcagccaaattaatctataatcagaccaagacagggtatgacaaattttagacttttgctttaaaaactttgttggaaacactgcatgttaacaggctaactttgaaaaatttgaaacatttacacaaaaaggtacgggggtgtatatgtgcactttctttaaataccagatagcagatgatgtttgagcccataggaaatccttgggttcttctgagtaataagtaccttatgatatgcctacttaaaatgaatctgctagtatatagtacaaagtgaaaaggattttgtctcaaaaatatctaatttttgcttagcaaattttagattgtaattataatcaggcactccccatcttgagattaaaaatacacaaacattgttttcaatg

SEQ ID NO: 131702 - DNA, 431 bp, Homo sapiens
  misc_feature (1)...(431): n = A,T,C or G
tacatacttgtgaaactgaatattatttgtatgcatttatgaaaatgattgccttaaagactatkagaaatttacttgattctttgatttctgttattatattaccttaaagtgtattgaagtatttactttaacaaaaatctgaaaatttatctttctcctgggtttgcaagtttttgaccctcccgttgacattattacagattaagaacccaggtaactcagtcacaatgatattgataagaaaactgggattcatgcctgtaatcccagcactttgggaggctgagctgggtggatcacttcagttcaggagttcaaaaccagcctgggcaacatggtgaaactccgcctctacgaaaaaataaaaaaatgagctgggtagcacatgcctgcggtctcagctactcaggaggggtaccgagctcnnn

SEQ ID NO: 131703 - DNA, 606 bp, Homo sapiens
acagatttgctaaacaaaatccatcagtatcactttttttttaaaccaactcacactaggataatctttaaagtaatggaggtagtaggtaacaaaaattataagttggccaggtcctaagaggaaaaaaaaattcagttactatccttgccaattaaacaaaatattttaaataattattttaatcaccacttttggcgaaaaaaaacattgctttatggatttaagatgcaggttagatactattcctctaactatcaattacctttatagcaacataattgcaggtcttacaagtaggtagcactaatagtgttatcaattatagggccataamcattgtttatggcagcatatagatattaatgtaatcagcaatcaatagttgttattcaaagtgtcatgtaaaatataactcacgtattagatataagtccatgtggaacgtatattaccaccaaggaagttatttaggccaagtctaatcaaatttaaatatgaaataaagaagagaaaaatagcggtattcagtagacattctggacatggcaaaagttattttatacaatgttattttaaaattttatgtttttttaaaaaagtttg

SEQ ID NO: 131704 - DNA, 606 bp, Homo sapiens
acagatttgctaaacaaaatccatcagtatcactttttttttaaaccaactcacactaggataatctttaaagtaatggaggtagtaggtaacaaaaattataagttggccaggtcctaagaggaaaaaaaaattcagttactatccttgccaattaaacaaaatattttaaataattattttaatcaccacttttggcgaaaaaaaacattgctttatggatttaagatgcaggttagatactattcctctaactatcaattacctttatagcaacataattgcaggtcttacaagtaggtagcactaatagtgttatcaattatagggccataaacattgtttatggcagcatatagatattaatgtaatcagcaatcaatagttgttattcaaagtgtcatgtaaaatataactcacgtattagatataagtccatgtggaacgtatattaccaccaaggaagttatttaggccaagtctaatcaaatttaaatatgaaataaagaagagaaaaatagckgtattcagtagacattctggacatggcaaaagttattttatacaatgttattttaaaattttatgtttttttaaaaaagtttg

SEQ ID NO: 131705 - DNA, 573 bp, Homo sapiens
acttcctttaatatttcttatagtgtaagcttgatggtaataaattcttcaagtttttatgtcataaaaaawtttttttctctttattttttcaaagatagtctttggtacatacagaattctaggttgacagttttcttctttcattagtttaaagatgttaatatattgtcttctcacttgcattctttcaggcaaaaagtctgccattacctttgtctttattcttcttgcatgtcctttttcctctggctgcttttaaggttttcaccttatcactggttttgagtaatttgattataatactccttggtatagtttcctacatgtttcttgtgcttagcgtttgttgagtttgttgggcctgtgtgtttttaatttttatcaaatttggaaaatattcagttattatttttctttctggcccctcttctctccttcagaaactgtaattacacatatattagtgaaattgacccataatttatagttattgttcatttttaaaaattctttaaaaatctctaagcttcattttggagttcctattattttgtcttcaaatttagtaat

SEQ ID NO: 131706 - DNA, 512 bp, Homo sapiens
actaatgatgcaataagatgaatatgccattcaaattcatggatggttttaaaaattagtgacagataggtatattattatttcttccattttacgataagtgaagtcagagaagtaacttggccatggtcatatgataaatagccaagctgggatttgaccccaaggagtttggctccaaagcctgggctcttaactccacccactgtttctctgggcagtacctggaaatagctggacttcaggcaggttggtcaggtatggcacaaatattggaaacctcagatctgaaattttaaaaccaacatggtgccatgtaatttcttacagtkaaataaagagacagtttgggacctgagaaacggagatcttttgaaaaccatgggattctatgacttttagaaactaaccaccatgttcaggttgagttagtttcccctttctctatgtttccatgactttgtgaacacaccctattttagcttgtattacagtgttgtaattggttttat

SEQ ID NO: 131707 - DNA, 595 bp, Homo sapiens
taatcagttttacagatcaaaagaataccttgtaaagctaaatagcatgtacatccatagttgaattgtatcagattctacagcacaagagacagaatgttactgggctacttgggtacttcatttgagctttaggcaaatcacttccactatggttcttcataagaaagagaaatcaagctgagacaaagaggaatgcatgtctcaagaacatgcctctggcctttaatccattaaattatcccatagtttttctttgctcttttaagtagatgcttctaggatgcatcaatatgatttgtgggtacttggagcaattcaggaaatgacaaaaagtgccctgattacctatagataatttayttgcttctgaagtgaaagagcttatactcatcaaaataagatttgtcagataaatttaaataaataatgagagaactgggttcatgaccttccctgtcccaagtcatctgtctaaacagcttctagaaggatccttccctttctcctgctctgatattcccactacttggacatctgagattttcaaagccaaagatagtcaactgtttattttatgtcttcattttattgt

SEQ ID NO: 131708 - DNA, 474 bp, Homo sapiens
tgttgaactttatagaaagccttttctgcatctattgagataatagtgtggtgtttgtcattgattctgtttatgtgatggattacgtttattgattcgtgtatgttgaaccagtgttgcatcccagggatgaagaattcctttgggaaatgctagagatacttggaattctggattactgatgcctataataaataaaaaatctaagttttatattgggcaattatgatatatacagtcgcttctttaaaattattaaatttctrtaatcagaaaaaaagcatggaaatgttgaagtatggataagattaaaaagtccaagttaatataagaggaggctttaaaataataaaaaatttattgatttgcttcaaagaatcactttgttcactgttttatgcacagaaactagaatggcgtatttggtgcttcataaataatttaataatgaatacatggatatttacatacaca

SEQ ID NO: 131709 - DNA, 498 bp, Homo sapiens
tccaaaaattggaagaaatgactgttactagatgtgcataagcataagtacataagaaacataaaaaagcaagaaaatatgacaccttgaaaggaacgtgataattctccagcaacagagccaaatggggaaaaaaatatgaaataccacaaaaagaattcaaaataatgatattaaagtagttcagkgagatacaaaataaaacatattaaaaatacaaagaaattagaaaagcaattcaaggaatgaatgagacattcaaaaaagattgctatctttaaaaagaaccaaatacaagtcctgaaactaaagaattcaaggaataaaataaaatacaatcaagagcttaaccatagattatatcaagcagaagaatttcaggacttgaagacattttgaaattgccaattcataccaagaaaagagaaaataataaaaaaataagtaagaaagcttatgtgacatatgagatgccataaaatgactaaatacatgaat

SEQ ID NO: 131710 - DNA, 484 bp, Homo sapiens
tccaggtgcacagtgcaagctgtcagtggatctaccattctggggtctggacaattgtggccctcttctcacagctccactagtcccaaatagggactctgtttgggggctctgactccacatttcccttctgcactgctstagcaaaggatcttcgtgagggccccatccctgcagcaaatttttgcctgtgtatccaggcatttccatacatcttctgaaatctaggtggaggtttccataccccgtttcttgacttctgtacacccacaggctcaacaccatgtggaagctgccaaggcttggggttttcaccctcttaagccacagcccaagctgcatgttggcccctttcagccaaggctggagcagctgggacacagggcacccaagtccctaggttgcatacagcatgcagaccatgagcctgtcccaagaaaccattttttcctcctgggcctctggtcctgtggctttacagggt

SEQ ID NO: 131711 - DNA, 579 bp, Homo sapiens
ctcaaaggccactgcatttcacaaatatacttctgtgagaacatcttcctagtaactttctctccaacctcagactggcatcacacttattcttatttgtagctaaatataatcatttcaaaacaattatgtaatcctcctaatttttttctttaaaatccttatttccctgaatatgcacacagtttactatgatacatatattccarttgcaatacctgatttccaaataaatatattttttctgtaaaaaaagaaaaaacatgaagtaaggtagattaaatgaaatcaaatggttgctttttaaggttattacaaatttaagatggctagatgcaaattagctgcttatacaaccattaattgctattattaactgttagatgcaattaattactttatacaataatcaagaaagttgatgctatgcatagctccaatatacagggggttgacaagtagaaaattttcctagaaataggaaggttatgtccaaggtttacacatttttagttttgaaaattattgctaaatttccctccaaacatattattcccatttacatatccaacattaaga

SEQ ID NO: 131712 - DNA, 544 bp, Homo sapiens
tttttggaatattcaatccatacagactgggtgatcttcaagttccctcctgagaagggtggttgtaaaaatatgcaacaatctgcatggcttcagtactaccaatcagaacttagaccagatgcaaacaaccagatcctatgaacagacgattgatggatgaatattagtattgctcccaggcattttggacctgggcgtttcctattgactccctacatacttcttgctcccagyccctctgttcactcaccaggctctacttcatccaacatacacaaactggggagagggaagttgtgggcaaaaaaagtagaattggcaattttaaaatagctgcttaaaagaaagacagactgttttcttgatttgtatcttttatttagaaaattttttaacagagtatgcacttaattgagaaaataagaaatggattatgatttaactaaaaatatctaaattggaatgaataatttgcctagtaaacagaaatatgtttattttcaatatactgaaataggtttcaatgaatcattgaatccta

SEQ ID NO: 131713 - DNA, 606 bp, Homo sapiens
aataattagtatatagatttaacggtaaatgtgaaaggaagagacaaagatataattaatgataatataagagatttaaaaaagaaaggccaagcgatgcaaaataacaataattaaatgtttctaaagtaaacaggttaacaaataaaccakacaattattcaagatttaatgccataaaaatattcatagaatgaagaactacaactacaagtgaaaatgatacactttttttagaaaaaaactgaaagaggacaacttatagaaattaattatacttagttacatgtttgatctttgaagataaagtaaactaaattcttcacccactctagggaaagaagccagtaatttataggtgctaaatgttaagctggtcttacacttctaaaaaacaatatctattgtttgaaaatagtagagtagtgtttgcaggtgttgagagaaagaaggtgtaattgtgcaatattatttacagccaaatttttattcaagtgtaaaagcaactggcaaatattgtcgaatgtgtatcaaaaatcattcatggaatatctgtgttacaagatcccttctttaaaaagtcacctaactctaatacagccaact

SEQ ID NO: 131714 - DNA, 590 bp, Homo sapiens
ctacaatttttaacaatgctaactatttaatgctctcaaacagctgattttgtagaagtcaaagacattggctagaatagttcttgcttgggggcactctcaaaagaaagtttgaataatagacttcatacctgactgtaacaatcaatctgtaccaattatttctgtttaagtaaagctgtctaaagcaaagtgggaggcttactacaagggagaaaaacaaaaagtgaaaaaaaggctatgatttttctctactcctttttttctacatggaccttctccctttttatctacatggacctttgactcagaaaactggcagagagtgaaatagattggttagagtattggataagccaaaagaaaggtgaaagakaactgataccctaaacccttcttccattctattccttataacaccatcataattctgtattgaatgtatagtttgcaagaaaagacacaagcaaggttagtttctgaaatgaccttgcttgagtcagatttataaatgtaaggcagagtggtttaagaccataggcttgggagaaaaatttgacacttaatacctataaaagtttgggcagaca

SEQ ID NO: 131715 - DNA, 590 bp, Homo sapiens
ctacaatttttaacaatgctaactatttaatgctctcaaacagctgattttgtagaagtcaaagacattggctagaatagttcttgcttgggggcactctcaaaagaaagtttgaataatagacttcatacctgactgtaacaatcaatctgtaccaattatttctgtttaagtaaagctgtctaaagcaaagtgggaggcttactacaagggagaaaaacaaaaagtgaaaaaaaggctatgatttttctctactcctttttttctacatggaccttctccctttttatctacatggacctttgactcagaaaactggcagagagtgaaatagattggttagagtattggataagccaaaagaaaggtgaaagagaactgataccctaaacccttcttccattctattccttataacaccatcataattctgtattgaatgtatagtttgcaagaaaagacacaagcaaggttagtttctgaaatgacsttgcttgagtcagatttataaatgtaaggcagagtggtttaagaccataggcttgggagaaaaatttgacacttaatacctataaaagtttgggcagaca

SEQ ID NO: 131716 - DNA, 589 bp, Homo sapiens
tttcagaattgatgattatctcaaactgtttrattgttaatattgcttttatgggttttcatcaagaccacaattgaactgggctgtgggaaacttggagcaatttcccaggagagcaggaaagacaaaggcttaaagaagaagggccatgcgacacgtgggtgggtgagggaagggaaacttgtcagtcagtaggagagaacaccaaaaatggatgatgagaaggagttcatgtcctttgcagggacatggatgaaactggaagccatcattctcagcaaactaacacaggaacagaaaaccaaacaccgcatgttctcactcataagtgggagttgaacaatgagaacacatggacacagggaggggagcatcacacactggggtctgtctgggggtggggggaaaggggagggagagcattaggacaaatacctaatgcatgcggggcttaaaacctagatgacaggttgataggtgcagcaaaccgccatggcacatgtacacctatgtaacaaacctgcatattctgcacatgtatcctggaacttaaagtaaaattttaaaaattaaaaaaaaaaggatgatg

SEQ ID NO: 131717 - DNA, 589 bp, Homo sapiens
tttcagaattgatgattatctcaaactgtttaattrttaatattgcttttatgggttttcatcaagaccacaattgaactgggctgtgggaaacttggagcaatttcccaggagagcaggaaagacaaaggcttaaagaagaagggccatgcgacacgtgggtgggtgagggaagggaaacttgtcagtcagtaggagagaacaccaaaaatggatgatgagaaggagttcatgtcctttgcagggacatggatgaaactggaagccatcattctcagcaaactaacacaggaacagaaaaccaaacaccgcatgttctcactcataagtgggagttgaacaatgagaacacatggacacagggaggggagcatcacacactggggtctgtctgggggtggggggaaaggggagggagagcattaggacaaatacctaatgcatgcggggcttaaaacctagatgacaggttgataggtgcagcaaaccgccatggcacatgtacacctatgtaacaaacctgcatattctgcacatgtatcctggaacttaaagtaaaattttaaaaattaaaaaaaaaaggatgatg

SEQ ID NO: 131718 - DNA, 589 bp, Homo sapiens
tttcagaattgatgattatctcaaactgtttaattgttaatattgcttttatgggttttcatcaagaccacaattgaactgggctgtgggaaacttggagcaatttcccaggagagcaggaaagacaaaggcttaaagaagaagggccatgmgacacgtgggtgggtgagggaagggaaacttgtcagtcagtaggagagaacaccaaaaatggatgatgagaaggagttcatgtcctttgcagggacatggatgaaactggaagccatcattctcagcaaactaacacaggaacagaaaaccaaacaccgcatgttctcactcataagtgggagttgaacaatgagaacacatggacacagggaggggagcatcacacactggggtctgtctgggggtggggggaaaggggagggagagcattaggacaaatacctaatgcatgcggggcttaaaacctagatgacaggttgataggtgcagcaaaccgccatggcacatgtacacctatgtaacaaacctgcatattctgcacatgtatcctggaacttaaagtaaaattttaaaaattaaaaaaaaaaggatgatg

SEQ ID NO: 131719 - DNA, 485 bp, Homo sapiens
ctccccgccccacctttccatgtactttgctgccacatcacattctctggcacggcttaatcaccatcctttctgggtcccacctttgcgctttctcccctgacaccmctgaggacccgccgtccactccagttggccgctcgggcgccggccaccgtcccacaaatccttacagagggtctagaacacctcccagggactctgccgagggacttgcacccaacgtgggttgggaatcaggcgggcacccactctgacaccccttcggtcaccccctgcggtgaccccaacatttgctaacttcgcgaccaggcctttggcggggtcacccaccaggcggtggaagccgctcaggcaggggcgactcacgatcgaggtgcagcagtcaggccgggaagatcctgcatgttgcgctagggactgcgcgcggcgccaagcgacaaccccccagcggccactgccccggcagcagcagctgcagcagc

SEQ ID NO: 131720 - DNA, 415 bp, Homo sapiens
gcaaagtctgctgtaaagatctattgactggcaacaatggtgggatcgatgctgtctgcggagagtagacgctgggagcccagtcctcgctgcagtcattaacaggcctgttgcgctgtcagaattactttcgaaatcaggttgatggagcagcaagaataagagtagatcagttgggttcactggtgttrgggtcaggctgatgatgataactgggaaggattgggttctgaacagttcatcagaacggtcccaaaggtagtttcactgatggaccatccaaatagtttgataaaggtcacagacagaaactgctgattttgcctttcctaaggagtccaaaatttggactgttctttgccactttcaggaggggcaaagaactactaccaccaccctctgtcacccaccctgg

SEQ ID NO: 131721 - DNA, 482 bp, Homo sapiens
ttctaacaattatgtattttttttcyggcactgttcaacccaggtttaaaagcttaattatattaacaaggcacaatataaccaagagttaatagtacttataaataaaatggtggattctctcctaattgagttattttcctgcttgaatacctgttttgctttccattggttcctgaataaaatattatgtccttcgctgggtactcgatgcacacatctccatctccccatacaaacactctcttaggaacgattattttccattttgcttaccagcctccaactgaatggagctactcacaacttcatgaagaacctgctgtcttctagcttgtatgtggtttctcatgtttttctctttctgtaatctccacatctcatatattttcatgatatcataattgactttacaagataaaaggaaatccccactcctctgaaagtttttcaaataattatttttactcaaggctaatatg

SEQ ID NO: 131722 - DNA, 480 bp, Homo sapiens
caccatactgtcttttgtcctctggtatgggttgtccaggragtaagtttacttttgttctgtaataaactacccgcaaacttagtggccccatcacattattatcacttacaattattactaggtgcttcttctggtatggaccacctagtctgatctgtttggctagctcaggcatctgtagtaaactaatgagtcacctaaccaattggatattataggatagccttgcctatgagtttggagattgaacaactgaggcaacaggcatcttatctacgtgttttttcgttcttcattttctagaaagttagcaggctgatttacatggtcacccaagctttccaaatgtagccagagagggcaagtttcaatgtatgaaaacttttctagatgagaatgcttcttttgggaagattctatgtatacccctctcattgctttccacaatattcccagctgaggagagacatgttgaac

SEQ ID NO: 131723 - DNA, 480 bp, Homo sapiens
caccatactgtcttttgtcctctggtatgggttgtccagggagtaagtttacttttgttctgtaataaactacccgcaaacttagtggccccatcacattattatcacttacaattattactaggtgcttcttctggtatggaccacctagtctgatctgtttggctagctcaggcatctgtagtaaactaatgagtcacctaaccaattggatattataggatagccttgcctatgagtttggagattgaacaactgaggcaacaggcatcttatctacgtgttttttcgttcttcatttkctagaaagttagcaggctgatttacatggtcacccaagctttccaaatgtagccagagagggcaagtttcaatgtatgaaaacttttctagatgagaatgcttcttttgggaagattctatgtatacccctctcattgctttccacaatattcccagctgaggagagacatgttgaac

SEQ ID NO: 131724 - DNA, 495 bp, Homo sapiens
ccaatatttttgcatgcattcaaatttatgctttgccaaatgtgttctaaatattttattacataaattgaacttcatgtgagaatgatgaagagagatatacttgctctattgtgtgaaccaaatttgtgaatactataccmataggttcatcagagggttttctgcaaccatactcaccctctgagaatattcataaatatagtttccttcatcttattttctgcaattgcttagtattccagtactattttagggttcaataaaaattgatggttccaattcctccacactttcatctagttttacgtgaatactcatagattatttctcctggatagtgaatgaaagatctataaagaatagagtgaagtctattatgcacttattgaatttacatgccctcttacaaaaataagattgtacccattaatattgcaacttcctggctatctcatcccatgtttttttttttttttcctttggtttttcttt

SEQ ID NO: 131725 - DNA, 571 bp, Homo sapiens
atcttttgctaagaaatagtaaaaatttataaaattggcaaaatttcctttcccgtcttactgttacctaataggataaaaaaaaaagagtttaagagaaagttgtaaatggctgcaagctacaaaarttaaataaatgaaacaaatttttgaaaacaaataggtgagacttgatcctaatgatttcaaattattaggaatactaacttatttttaaaagatgtagaattggtattttagcagatatcagaagaaaatttgcagtagacaatcagggagattttactcaaggctattgcagtagagtggaggccagaagtcagtctgagctcaccttcaattcaaagaaaagactggaggttttaaacagctgcatagagaagatcatgggctgttccttttgataactggctttgcctcctacccccttccaaacaaagtaagctttctcatatttttatgacacgaggttgtttcacaacttggagcaaggcattctgcataagttatcccttcccagatgctggaaggtgttcatgctatctccctatgattacattttgaagagatg

SEQ ID NO: 131726 - DNA, 609 bp, Homo sapiens
agatctcttagactgtcatctaaagaactgagaattgcggcacgttcaacacatgagtaagtggtatctgaaaatgcatcggcaaagaaatgcttgctaagtttggcacaattgattgcctgagaggttttctataatttttaattcttttcatatattgaacatacccaaccagtcttccaacaatagcaacaacagcaaaaggggrcagaataattgtttttaaaaaggggagaatggaggctttttaaaattagatttattagtttcatcacgacagtgggtatacaaaagaaaatagaaagtatttatttcctaatttagagaactctgggaactgaggtttaagggaatgctatggtatcagctctgagaaaatgttcttgccgttgcttgagctactgctttttcaagggaaaccacaaagacaggactaattcagaagtaactaaaatttatacattgatatcattgtgtgtgttaatcctcaataaccatgaagtaagtttccttattatcccagttctaccgatgaagaattaaagtctcagaaaaggtaaaagaaatgtttttaagtcacacaccattgaaacagtctttgtaaaaatt

SEQ ID NO: 131727 - DNA, 629 bp, Homo sapiens
aagaactgagaattgcggcacgttcaacacatgagtaagtggtatctgaaaatgcatcggcaaagaaatgcttgctaagtttggcacaattgattgcctgagaggttttctataatttttaattcttttcatatattgaacatacccaaccagtcttccaacaatagcaacaacagcaaaaggggacagaataattgtttttaaaaaggggagaatggaggctttttaaaattagatttattagtttcatcacgacagtgggtatacaaaagaaaatagaaagtatttatttcctaatttagagaactctgggaactgaggtttaagggaatgctatggtatcagctctgagaaaatgttcttgccgttgcttgagctactgctttttcaagggaaaccacaaagacaggactaattcagaagtaactaaaatttatacattgatatcattgtgtktgttaatcctcaataaccatgaagtaagtttccttattatcccagttctaccgatgaagaattaaagtctcagaaaaggtaaaagaaatgtttttaagtcacacaccattgaaacagtctttgtaaaaattctaacaatgagaaaattatgacagtgaaagagatctgaccca

SEQ ID NO: 131728 - DNA, 432 bp, Homo sapiens
aatactgtgacagagccccagaaatctaggctcatgatcttgtcaacataaaaaaaatatakagagagatgaatgttcccagaattctctaaaccagaaaatacatagtttcttctctctttcttattccctggtctaatgttcaattgtggtgaactgccatgataaaaccaagaattctaattttaaaaaagattccattctcttttttaaaaactaatttttctactctcttttgtttacttacatatcatatttaaaattgcttataggtaccatagataaaatctacagctttcatagtttggggagatcagatatggagaaaagacaaacatttccattttattcataacagtataatttaccaagtttctgtaagctataggtaccttaaaagaaaaaagtttccttaaatgtgaaatatacaat

SEQ ID NO: 131729 - DNA, 466 bp, Homo sapiens
taaatttatctagaagacttggtgctaaggctggacacatcttcacaccttaattcgtgctagggtgaaatatcagacatgcaaaacaaaaccaaaaagtaaagtacatattcaccccaggaaggayaacaaagcattctcaacaggaatgaattctcaacaaatatttaaaatgtgttctttacctatgtgttttaaaataagagttcaaaaaccttcataaaccagcagcgaaaagcctcatttgaataggatgctacataaacagaagaaagaagttcctcataagttctcacaaacagaagggcaaaagatccctcataagcaaatcccaaagaaaaccaaaaaactcaaccaaaacaaaacactggaagtttaatctatgcagtactctccatgggtaaatagtcaacctgtggaagcaggaatgtcaagggtcccgagtttgggtacggcatgccttatg

SEQ ID NO: 131730 - DNA, 392 bp, Homo sapiens
aaagagcaaaaatattgaaatatgcttagtatattgtatagaatatattttttcagtgtttatatttagagaagggcaagaaattgtaaggcacttacatytcataagtgaacctcaacaaacaaaagcaaaaatgtctatccctttcagccgataaatatgtcatttaattattttcataaaatatcatgtagcaaaccaataatatggtttgcataaagtggagatctaacacttcttgtagttgaccagtttaatcctataatacttagtgttaaactctgatatccagacaacagaacgagttactcactgtcaaaaattctccaccctgcacaagagaggaagtgttgttttcatgactgtttgtaattcaccaattaacttaccac

SEQ ID NO: 131731 - DNA, 392 bp, Homo sapiens
aaagagcaaaaatattgaaatatgcttagtatattgtatagaatatattttttcagtgtttatatttagagaagggcaagaaattgtaaggcacttacatttcataagtgaacctcaacaaacaaaagcaaaaatgtctatccctttcagccgataaatatgtcatttaattattttcataaaatatcatgtagcaaaccaataatatggtttgcataaagtggagatctaacacttcttgtagttgaccagtttaatcctataatacttagygttaaactctgatatccagacaacagaacgagttactcactgtcaaaaattctccaccctgcacaagagaggaagtgttgttttcatgactgtttgtaattcaccaattaacttaccac

SEQ ID NO: 131732 - DNA, 418 bp, Homo sapiens
tatccagacaacagaacgagttactcactgtcaaaaattctccaccctgcacaagagaggaagtgttgttttcatgactgtttgtaattcaccaattaacttaccacactttcttgtggaaatgtattaacttttctgcagtcataatgacagaaacattttggctatttcttttcctagctagtattcccaaagctaagccctgtgattctgtttgaaatcaagctaaaatataacagacttcagaatcttactacattcactctgcaaaattaaaaaaagaggaagtaaataataatttttaacaaatagactatgaactagatttttgtttctgaaggccacttctttcttgcctcttakaaaatattatatagaatattttaaaacaatagatgattaataatatcttggacct

SEQ ID NO: 131733 - DNA, 355 bp, Homo sapiens
agttttatagctctggaaccactactgccttcacactatgggcacacttcccccaggcagctcccagccaatgactgagcatggcagrggtattaagcaggctcattctggcaagatgtgcattttccaaaatctgactctggaaaaaagacttcttgtaccagctgaaattttcttgcaactgagggacttcagtctgaaagtcttcttacccagtcctttttctgccctctccctttctacatttgtcagacccgcatcgtggtcttaggggtcttgcctgactctcctgctcccagacccaatacatcttttgcacatttaattacatcttggaatatactttcaataactc

SEQ ID NO: 131734 - DNA, 479 bp, Homo sapiens
gggtgatgctgtaattcactttgctcactaaggtatgtaacagtttctttcagtttgggctcatataaccaaatgctacaaaccaggtggtgtaaacagacatttattacacgcagttctggtagctagcaagtataagatcaaagtgccagctgactgkattgctggtgaagtctctcttcctggcttgcagacagccaccttctttctgtatcctcccttggcagggagagagaaagagaaagagaggatgttttcttgtgtctctttttcttcatataagggcactaaacccagggctccactctgatgactttatccaaagataattatctgcaaaagctccaacttaaataccgtcacgttaggggttagggcctccatatatgaattttaggagtacacaattcggtccatagcatttgcccaccaccctctccaaactcatgtcctcacatgcaaaatacatgcatttcatc

SEQ ID NO: 131735 - DNA, 479 bp, Homo sapiens
gggtgatgctgtaattcactttgctcactaaggtatgtaacagtttctttcagtttgggctcatataaccaaatgctacaaaccaggtggtgtaaacagacatttattacacgcagttctggtagctagcaagtataagatcaaagtgccagctgactgtattgctggtgaagtctctcttcctggcttgcagacagccaccttctttctgtatcctcccttggcagggagagagaaagagaaagagaggatgttttcttgtgtctctttttcttcatataagggcactaaacccagggctccactctgatgactttatccaaagataattatctgcaaaagctccaacttaaataccgtcacgttaggggttagggcctccatatatgaattttaggagtacacaattcrgtccatagcatttgcccaccaccctctccaaactcatgtcctcacatgcaaaatacatgcatttcatc

SEQ ID NO: 131736 - DNA, 462 bp, Homo sapiens
aactatgaacttggagtgacaatagtttgtccatgtaaattcattgattgtgacaaatgtaccactctgataatgggggaggctatgcatgtattgctgcagggactccttgtaccttcttctcaattttgctgtgaacttaaaaccactgattctcgtatacactaatcagcctgggtttaaatcccctctatgtcacttactatattagtttttcattactwtgtaacaattcaccccaatatttagctgcttaaaacacaaaagcatttatcatttacttttttttcctgtaaatcagacatcttagggcagctgagctgagtggtttcggcttaagataatctcttaagactgcaacaaggtattgattggggcttgcttgtagctattctaagatttgaagaagaggtgactggggaatggtaggtcttgtttccaagctcactcacatggctctct

SEQ ID NO: 131737 - DNA, 503 bp, Homo sapiens
ttcctcctcctcctctctccctctcaatggtgatttaaagatagtctgttgctatttgaggactttcacagatccagtaacatggccactagaaattttagtttatgtcttgatcctgatcaaatgcctggctcttccatccatacccttaagtttatccagtgtcaatttgatagggacagaaggaagccaagtgcctaggtaggtaggggcaggtaccctttgaaaacccacctccaagccaaagacagtttaaagcctgaaagctaaactacaagcaccggattgagaacttgtcctcctatttggcttgctttcctctgatccccactcttcacctattttacatacacctaaccttttctaattggctttctacactgccctacccacctttaaatggtgctttcactttaagcttttttgcatactcamaaaacaatcatcatgcacactccatcctgtgcctgtaaaggccccagactcagttggtagagaggaat

SEQ ID NO: 131738 - DNA, 404 bp, Homo sapiens
cattagcgtggcaataaaagagaagcttatgaaataattgctggttccaaaatgcctttaatttagtattttatattgtgccatgttattaatttttttccctcggcagaagataataagagaaacatttgaattgtggggaggtttaaaataaaaaaatttttgagaaggaaagcaatgttgatacctgtagacagacgatctgtcttctccccaaaaccycattggtcctgagtccatagggtgactccatggggtgtcacaagagggaaagcgttgacgggtagggggccaggccatgtcctgggacttttggccaggcttggcatccagcggagattggagtggaacagcctttgatcctagaagcaggagaaatggtgccatgtttctttgccctaaac

SEQ ID NO: 131739 - DNA, 404 bp, Homo sapiens
cattagcgtggcaataaaagagaagcttatgaaataattgctggttccaaaatgcctttaatttagtattttatattgtgccatgttattaatttttttccctcggcagaagataataagagaaacatttgaattgtggggaggtttaaaataaaaaaatttttgagaaggaaagcaatgttgatacctgtagacagacgatctgtcttctccccaaaaccccattggtcctgagtccatagggtgactccatggggtgtcasaagagggaaagcgttgacgggtagggggccaggccatgtcctgggacttttggccaggcttggcatccagcggagattggagtggaacagcctttgatcctagaagcaggagaaatggtgccatgtttctttgccctaaac

SEQ ID NO: 131740 - DNA, 404 bp, Homo sapiens
cattagcgtggcaataaaagagaagcttatgaaataattgctggttccaaaatgcctttaatttagtattttatattgtgccatgttattaatttttttccctcggcagaagataataagagaaacatttgaattgtggggaggtttaaaataaaaaaatttttgagaaggaaagcaatgttgatacctgtagacagacgatctgtcttctccccaaaaccccattggtcctgagtccatagggtgactccatggggtgtcacaagagggaaagcgttgacgggtagggggccaggccatgtcctgggacttttggccrggcttggcatccagcggagattggagtggaacagcctttgatcctagaagcaggagaaatggtgccatgtttctttgccctaaac

SEQ ID NO: 131741 - DNA, 514 bp, Homo sapiens
gaccccagacctgcagtagcagcaacacctgggaacttwctagaaacgcaggtttgacctactgagccagaaacatggagtggaggaagcgcgcgcatgctctctctctctctctatatatatatatatatacacacacacatatatatatatacacacatatatatatgcacatatgagtagtccgatctcggctcactgcagcctccacctcccgggctcaagagatcctcccacctcagcctcctgagtagctgggactacaggcacgcacccccatgcctggcaaattgttgtatttttgtagagacggagtttcaccatgttggccaggctggtcctgaactcctgggctcaagcgatctgcccactttggcctcccaaagtgctgggattacaggcgcgagccaccgtgcccggccctaaagcactcagtatttcaacaagcccccaggcaatgctggtgcccacccatctatggaagccacctgtcaagttgaattctcccaactcc

SEQ ID NO: 131742 - DNA, 434 bp, Homo sapiens
atggagtggaggaagcgcgcgcatgctctctctctctctctmtatatatatatatatacacacacacatatatatatatacacacatatatatatgcacatatgagtagtccgatctcggctcactgcagcctccacctcccgggctcaagagatcctcccacctcagcctcctgagtagctgggactacaggcacgcacccccatgcctggcaaattgttgtatttttgtagagacggagtttcaccatgttggccaggctggtcctgaactcctgggctcaagcgatctgcccactttggcctcccaaagtgctgggattacaggcgcgagccaccgtgcccggccctaaagcactcagtatttcaacaagcccccaggcaatgctggtgcccacccatctatggaagccacctgtcaagttgaattctccc

SEQ ID NO: 131743 - DNA, 514 bp, Homo sapiens
gaccccagacctgcagtagcagcaacacctgggaactttctagaaacgcaggtttgacctactgagccagaaacatggagtggaggaagcgcgcgcatgctctctctctctctctatatatatatatatatacacacacacatatatatatatacacacatatatatawgcacatatgagtagtccgatctcggctcactgcagcctccacctcccgggctcaagagatcctcccacctcagcctcctgagtagctgggactacaggcacgcacccccatgcctggcaaattgttgtatttttgtagagacggagtttcaccatgttggccaggctggtcctgaactcctgggctcaagcgatctgcccactttggcctcccaaagtgctgggattacaggcgcgagccaccgtgcccggccctaaagcactcagtatttcaacaagcccccaggcaatgctggtgcccacccatctatggaagccacctgtcaagttgaattctcccaactcc

SEQ ID NO: 131744 - DNA, 514 bp, Homo sapiens
gaccccagacctgcagtagcagcaacacctgggaactttctagaaacgcaggtttgacctactgagccagaaacatggagtggaggaagcgcgcgcatgctctctctctctctctatatatatatatatatacacacacacatatatatatatacacacatatatatatgcacatatgagtagtccgatctcggctcactgcagcctccacctcccgggctcaagagatcctcccacctcagcctcctgagtagctgggactacaggcacgcacccccatgcctggcaaattgttgtatttttgtagagacggagtttcaccatgttggccaggctggtcctgaactcctgggctcaagcgatctgcccactttggcctcccaaagtgctgggattacaggcgcgagccaccgtgcccggccctaaagcactcagtatttcaacaagcccccaggcaatgctgrtgcccacccatctatggaagccacctgtcaagttgaattctcccaactcc

SEQ ID NO: 131745 - DNA, 359 bp, Homo sapiens
cccacccatttctttgataagtgataattctttttctcctttaaatttaaggttcctcagaaaattttgagtaaatgggaagccagtgttggacttgcagaacagtatgatgttcccaaggggtcaaagaaccgaaaatgtattcctggttcaatcaagttggacagtgaagaagatatgccatttgaagactgcacaaatgatcctgagtcagaacatgacctgttgcttaatggctgtttgaaatcactggcttttgattctgaacattctgcagatgagaaggaaaagccttgygctaaatctcgagccagaaagagctctgataatccaaaaaggactagtgtgaaaaagggcca

SEQ ID NO: 131746 - DNA, 230 bp, Homo sapiens
cttttaaaaacaatttgtcctggttcccttctctagagtcctgccttgctggagctcccaggacagatgaggctcctggccctgggagctgcctgcccagagggtamcttgccagacctcccggactgctggaggggttcagctccctgcctctggccctctgctggctccccttgtgaatgtggttgtggggggagacagggtgagccgccagctggagctggacccca

SEQ ID NO: 131747 - DNA, 534 bp, Homo sapiens
tacagtggcaagactctagttatgttaatacaatggctacatcccagtcctagaatccagcagcaccagacaaattgcccagccagaggagtcaggcacagagtaaccagatactacgtacttactggaactgggacgtaagggcacaataggagtggcagcaagaggaaccttatgcttattgtctactcatttgtccatccatccatccatccatccatccatccatccatctatccatccattcatccatccattcatccatccaatacacattgaccagtgcctatgaagtacaaggcctgtgctgcatggtgggaataaagagatgaagtaatatcattgggtctccccagttgatatgatctctctacctgcaaaagagttttagctctttcattccttcctrtttatcttctgcaagtggagaagtgataaacttagatcctaaagaaaaataaaactccccagtcagagatccacacaacaccaaatgagttcccatatactggcacacttaaaatcatggaaaat

SEQ ID NO: 131748 - DNA, 567 bp, Homo sapiens
ccactcaggatggtttcatccacatgagtctggtgagtttaaagagtagtaggttcagtatcacagggctgttgcgttaatctgcagccaaaatgagygacttcaattttctgtaccattttatgtctcaagtaaacaaatacataatttcttatagcaaacatatatagcaatcttaagtaaaccattgcttttgcaagtcttgtttcttattaactgatcatcaatcgaagtcaggtggaacatgaagcaaatcttttatgagaactgcttgatgattatagccctgaaaaccctttttcccttgaaataccataatataatgattctcaaacaggattctgtgcaccagaaccctctgaaagaattgttaaacatagattgccaggcgccaaccccagagttttgatttcagcttaactgttagaaatgcaaatttctaacaagttcccaggtgaagctgatgttgcccatcctgggaccaccctttgagaaacactgacacagtgcatggacatttttgcatcataaagtggttgcaggtgaaagctttggagttggaggctc

SEQ ID NO: 131749 - DNA, 567 bp, Homo sapiens
ccactcaggatggtttcatccacatgagtctggtgagtttaaagagtagtaggttcagtatcacagggctgttgcgttaatctgcagccaaaatgagtgacttcaattttctgtaccattttatgtctcaagtaaacaaatacataatttcttatagcaaacatatatagcaatcttaagtaaaccattgcttttgcaagtcttgtttcttattaactgatcatcaatcgaagtcaggtggaacatgaagcaaatcttttatgagaactgcttgatgattatagccctgaaaaccctttttcccttgaaataccataatrtaatgattctcaaacaggattctgtgcaccagaaccctctgaaagaattgttaaacatagattgccaggcgccaaccccagagttttgatttcagcttaactgttagaaatgcaaatttctaacaagttcccaggtgaagctgatgttgcccatcctgggaccaccctttgagaaacactgacacagtgcatggacatttttgcatcataaagtggttgcaggtgaaagctttggagttggaggctc

SEQ ID NO: 131750 - DNA, 567 bp, Homo sapiens
ccactcaggatggtttcatccacatgagtctggtgagtttaaagagtagtaggttcagtatcacagggctgttgcgttaatctgcagccaaaatgagtgacttcaattttctgtaccattttatgtctcaagtaaacaaatacataatttcttatagcaaacatatatagcaatcttaagtaaaccattgcttttgcaagtcttgtttcttattaactgatcatcaatcgaagtcaggtggaacatgaagcaaatcttttatgagaactgcttgatgattatagccctgaaaaccctttttcccttgaaataccataatataatgattctcaaacaggattctgtgcaccagaaccctctgaaagaattgttaaacatagattgccaggcgccaaccccagagttttgatttcagcttaactgttagaaatgcaaatttctaacaagttcccaggtgaagctgatgttgcccatcctgggaccaccctttgagaaacactgacacagtgcrtggacatttttgcatcataaagtggttgcaggtgaaagctttggagttggaggctc

SEQ ID NO: 131751 - DNA, 582 bp, Homo sapiens
atacgaggttatgggcaccttcagcttactaggtgatgcgtgtttttccaaatcgcacccctagccaggagtgtgtgaagtgagttctcattgctccatatccttaacaacacttgttattgccrttttttctaacttctgatgacctggtggttacaaaatgattgaattgtaaatttcagtgatttgtttctaggcatacctttagtaactttaaatatttttttcaaagtctttctctctagttttaaacagttctctttatttttaaattgtcctaggcttacttttatattgtttttttagattttgttttatctgaaattcttggttttagccatcctattgtgtctattaattctcatcctagaggatatccttttgtgttttataattttttattgcctgcttatttcggtggtattgtatctgatagaatcctctgtagccaaaggtgctatgtggtttgtgtttcattttgttgagacgagatttcactctgttacccaggctagagtacaggggtgtgatcatggctcactgcagccttcaactcctgggctcagcctcccagttaggtgg

SEQ ID NO: 131752 - DNA, 551 bp, Homo sapiens
cgtcagcaaactgtagggaaagaatgtactacagcatcctgttactgtgcctgttacttttgctcatgccttttaattgtctgtcagcagtaaagaaggaagaattayatatcatattattcagagttttgggatagtgactggactgtaatgatgattcgatgcaatcactgtgtcttaaaagcataaacaaggctgcagtgctctcccacacatccatttacacagctgtttctgtgcagatgtggctgattgttgtctcttctttctctctcctccagatacataagttagaccaaggccggtgaagacctctgccatattgctctccatccatttactcagcttcctttatccatgagcctggcatgagatagtaatatttaaagacttaaaccaggggaagataggaagccccttgtatgccttaaattacatattatgtgttttaacattatcatttacaggggagccctatattggggcattggctacttgaagaactattaataaaatggtttttccttatagattttacttatccagaattc

SEQ ID NO: 131753 - DNA, 616 bp, Homo sapiens
caatgctgttaagtccagatacaatatgaaccacatacgtaacttgaaatttactagtagccacattaaaaaacagtgaaaatacatagaaaaaaatacgttctatttaattgaacatacccaaatgttactgtttcaacaagtaatcatcgtaacatgaagatattttccattgttcttaatatttaatctttgaaattttgtgtatacatttcacttttggcaaagctcaattcagacactaaatttttaatagttaaagagaaatgtacaataatgtagttatgtttaattgaaaartattttatattgcttcagttttaaaacttaaaattgactcagttaaaatataaaaacttaattcctcagttttggtagccacttgtgaagtaaccagtagccatatgtgactaatggctaccatactgagcaggacaggtctagataataagaaaggatttctatattttcacccagtgacatgatcttaatataaagtgcaagtataattttatacaaattaaaagtaatttatatataaacacttccatttggaaaaagaaaactgtttttcaatatttgcaaagatgtgaaaaagaatcctaaacttgcaaaa

SEQ ID NO: 131754 - DNA, 633 bp, Homo sapiens
gagagtcatgcatacaactacaaagatgcaagacagagtatctggtatccaaaaaggaataagtaaaattttatgagagcatggttcacttcaaaattacccctatgactaggggaagggtttatggagaggatgacattaagcttagaacattagataatgcatagtattttgtctgagaaaggaagaaggaacagcatgaaaaatgctagaaaggtaagaaagcatcttcattcatttatttaatgaatatttattgattttctattatgagcttgctaggcattgttttaaatrttggagattcaggaattgaatacgagaagaatacaaattacaacctcaaaaagtttacattctaaggagaatagtcaataaaaaataagcaaagaaatatacaaataattttagattatgacataagcaggattataataacatattggaggatgggataaagagctcaaaagaaatggggagaaaattaaggcactgcttggaaatgacttaccacagaagttctctaagggaaattctagaaccaaaggatgaaaaggagccagctctgtgcagaggtgaaggaacatcataccaagatgagagaacagcaaggtcgcaggccctggagtgggg

SEQ ID NO: 131755 - DNA, 548 bp, Homo sapiens
ggattaagtttccaacacaggaactttagaaaatatattcaaaccataacacaaagtaaaggagttgacttctctgccagatatctgaygtgagctagctttctctttcgagcttcccgctcatccttccacagccctgtcaacatcccagctttccttcacctgtattgctggattagttccttacattggtgtagtatcttattcttataaaggaaagcaaggctgagaaaacttaatggaattgttaaagtcatgtatcaattaagtgatagtctaaactcagactcaaatctaaccatcgcttttttcactgtattacaatgctcctcttagacagcattagaaatttcaaaactgatagttcgacatttcaaaactaacattctaacagtctaggatggcaagagggtgatactaatttaaaaatcactaatgattccagtctaaaaaataattcagtaatgaataaaagtataggaaagacaaagaccaggtatgtaaggaaggaaaacaagcaatttttctttggcttcaccaaagaaggt

SEQ ID NO: 131756 - DNA, 548 bp, Homo sapiens
ggattaagtttccaacacaggaactttagaaaatatattcaaaccataacacaaagtaaaggagttgacttctctgccagatatctgatgtgagctagctttctctttcgagcttcccgctcatccttccacagccctgtcaacatcccagctttccttcacctgtattgctggattagttccttacattggtgtagtatcttattcttataaaggaaagcaaggctgagaaaacttaatggaattgttaaagtcatgtatcaattaagtgatagtctaaactcagactcaaatctaaccatcgcttttttcactgtattacaatgctcctcttagacagcattagaaatttcaaaactgatagttcracatttcaaaactaacattctaacagtctaggatggcaagagggtgatactaatttaaaaatcactaatgattccagtctaaaaaataattcagtaatgaataaaagtataggaaagacaaagaccaggtatgtaaggaaggaaaacaagcaatttttctttggcttcaccaaagaaggt

SEQ ID NO: 131757 - DNA, 599 bp, Homo sapiens
gcaatgaatacagaacactcctttaagattatttactatgaagaagaagagagaaatatgatgatgaagaagtagaatgtggatcatgggagggcaatgtaaaatgtgagaacccacagtgtattcatatgcaattggaataatttggttaaaaggaagaaactgtgctgtcagaggtaggggaaaccacagaagtgaatcattgaggaagttacagtctctggcaccgagagcacaggagactgacccttggtagaagcaatgaaaagatggaaaacataaatatagatccaaacaaaggtatgttctggatttgataatgtgtatatgagaaagtcccccctgcttctatttgttcaggcaagkttatcagatatggggacagggatggtaagacacctgagggagtaaagtatgaaagaattgtcctgacaaggagaaaccatgcttaccaggatgaaaattctaggcagtgtgaggtccatttgaagtctgacatcttgaaattaagctgcaatgggtcaccctaccatatgtgtgtttttcatttgggtacaaatgctcatctgtttaaattcaggttcagacacggtaaataa

SEQ ID NO: 131758 - DNA, 599 bp, Homo sapiens
gcaatgaatacagaacactcctttaagattatttactatgaagaagaagagagaaatatgatgatgaagaagtagaatgtggatcatgggagggcaatgtaaaatgtgagaacccacagtgtattcatatgcaattggaataatttggttaaaaggaagaaactgtgctgtcagaggtaggggaaaccacagaagtgaatcattgaggaagttacagtctctggcaccgagagcacaggagactgacccttggtagaagcaatgaaaagatggaaaacataaatatagatccaaacaaaggtatgttctggatttgataatgtgtatatgagaaagtcccccctgcttctatttgttcaggcaaggttatcagatayggggacagggatggtaagacacctgagggagtaaagtatgaaagaattgtcctgacaaggagaaaccatgcttaccaggatgaaaattctaggcagtgtgaggtccatttgaagtctgacatcttgaaattaagctgcaatgggtcaccctaccatatgtgtgtttttcatttgggtacaaatgctcatctgtttaaattcaggttcagacacggtaaataa

SEQ ID NO: 131759 - DNA, 529 bp, Homo sapiens
aacctgacctaaactactggacattggagaaaatggtttaagtatatacattcctcgatttcatcttgcctctcttctggtattcttcctgtcctcctacctttccaggcacaaatacacacatgccattgaatgagttaccatgagagcaggagaaaggagagagaacaaaccactcccagcatgtgaaattttcataccttctgaaaatgaagaaggaaagacatgtggcctcccaccctgagccattttcctacaggcagtttctttctagccctccaccctccaggcagatatattcaccttgttaataattccacctgcatcaaaaaacattaccttcatgaccggaaagtagcagcatcattactgaaaccacagcctgcagtcagatggattttcccaaaggcccccaaacctttccattttattaccatgtcactcctcattttaacaaatattaatcataaagatacatttttcttgggctatgtatttmagtggccttttccaagcacttggtaaaggt

SEQ ID NO: 131760 - DNA, 522 bp, Homo sapiens
cacacacccatgtatctgcgtgtgtacatgtgtattcctcggtttagagtctgacccactggtacagtggctgtgagaacttgtgaagccacatccaggcccaggaggaacaacttctatgattgattgctaatttctgctatggtcacagacatgggagtgatagaatatgtttctaaggctgggtacacctgtaaccccagcactttgaggggctgaggcaggcagattaagttgaggccaggagctcgagaccagcctggccaacatggcgaaaccccatctctactaaaaatacaaaaaaaattagctgggtgtggtggtgcacacctgtagtctcagctacttgggaggctgaggaatgagaatcacttgagcctgggaggtggaggttgcagtgagccaagattgcaccactgcactcccacctgggcaacacagcaagcctctgcctcaaaaaaaaaaaagagtatgtttgtagtattygttaactaatatagcaagattctgattcaaaatata

SEQ ID NO: 131761 - DNA, 592 bp, Homo sapiens
catatttattgaacatctaccattgtgatagatatattgccattgttccaacaacagaaaaaatgaataccagatacatcatgtctttgacaaatttacattctggcaaagcaagaacataaatcactgaaataaaaagcagagtgaagaaaaagcttaagagacataaactgacagagaagtyagatacaatatctatttgaataaatcaagcaaggcttcatggaggaagcaccacactgagatgaacattgaaggatgagtaggatagaaacagatggagattggagatgaagtgggccttctacgcatgaagatctgcagctgggaaaaactgtgggatgcatttgcataagaacagcaagtaattccatttgaatagagtatacattacttgtgatggtataatggaaaattattctaggaagtagttttgtccatattacatgtgtgaagagtattatgtaagtaataaaagactgagtaagtaaaagttatgggtttgagaccaattgttgccatttgacttgtctttattccaagatagtagaccatacttccatctatactatatgaaattagacattagaaa

SEQ ID NO: 131762 - DNA, 592 bp, Homo sapiens
catatttattgaacatctaccattgtgatagatatattgccattgttccaacaacagaaaaaatgaataccagatacatcatgtctttgacaaatttacattctggcaaagcaagaacataaatcactgaaataaaaagcagagtgaagaaaaagcttaagagacataaactgacagagaagtcagatacaatatctatttgaataaatcaagcaaggcttcatggaggaagcaccacactgagatgaacattgaaggatgagtaggatagaaacagatggagattggagatgaagtgggccttctaygcatgaagatctgcagctgggaaaaactgtgggatgcatttgcataagaacagcaagtaattccatttgaatagagtatacattacttgtgatggtataatggaaaattattctaggaagtagttttgtccatattacatgtgtgaagagtattatgtaagtaataaaagactgagtaagtaaaagttatgggtttgagaccaattgttgccatttgacttgtctttattccaagatagtagaccatacttccatctatactatatgaaattagacattagaaa

SEQ ID NO: 131763 - DNA, 608 bp, Homo sapiens
agatctaactctcagttttcacgtttattaaaaaaaaaaaaactagcaatgggtacatgagttgtaagagccattctacctctctaatatcatatgagaaggcatacattatgggatgttcctctctgaagttttgaggcatagaggagagtcagctctgaaagaattcaggttttgttaaagtggaagctttgatagtttgttcttgacatctgttcactagagagggctgytgggaggtgagagttgtgcatggatgactgacatgggaattggggacctatatcttcggtcagctccacaaagtggcattctgtcaggaagatgttccgctgggcaggtggcaactgtgggtcatgctgggagtgccactgtttgtggaaagaagagatcacattctggaatgctgcctggaagcggcgagacagtaggttatagataatggggttgacagctgagctcaggtagaagaagacacctggaatgcaggggatttaaaaagatgtgctgagaagaacttaagtgaccggcatgaaggaagaagcataaatatttacaaaggcctagaatccctgtgattgcctcttttataagtgataatacataca

SEQ ID NO: 131764 - DNA, 569 bp, Homo sapiens
ggtcacctagcgttgacatagaccattaaggaggtgtcttcattatatatctctcccctttgctccttgatcttaatctactctcataaatactctgtttcaggataaattggaacctaccccagcagcatttagttggtaccaaatgtacctcctttgctcttatgaacaaaacaaaacaaaaaacaaaatggggcacttacacagcatcttgttgactgattttctgcagggtctttgaatatttgcattcccttcatctgcctcaagagatttgtctttctttagctgaaagggaagtaagttgggagagatagtaagaaagagaaacatttttcctcctgttaaaatctgagaaacataactcaaacgytcattttgaagacagaagaactgagacctagagaaatgtaagactacgtcaaatgtttaacagtatgttgaaggtggaattggattcaggtcatctactcaactggataagtgattgtggccaagtaatagtgcaaccacttttcgtatacagttatgtggaaacttggctgtgtagcatgttaataggtgttcca

SEQ ID NO: 131765 - DNA, 302 bp, Homo sapiens
tgagggactggcagtgtggtagaccagcacagtgcctgcatggagaaggcaccgagtaaatacttgccatgtcaatgtcraatgttgttgggagagagaaaatgaaatagaagagagaaagaaaaaggaacagagaaataaataataagttaatagggaagaaggacagagtgaaagaatagtaacagatggatgtggtagatgataaaatgagagagacatagctaaaacttgagaagtcccttgcaaagggttttttccatgccctttgttagagctgtctgaagtttcaatgctgacat

SEQ ID NO: 131766 - DNA, 374 bp, Homo sapiens
tatttttaactgtagaggtgaatgatgaaatccttgtctggtatggctttaggccttgtttataattccatactttattaccataaagagttcattcagtcagtcttacgatctctattttaacattaatgttaatctacaaaacggaagggatataatgagatgtatttgacctcctgtcccatcatggctagaaactccaattttaagttttcttttctggggtcccctcggccaaragggtgtctgttcagtcaggtagggggcttaggattttatttttagtttacagtacttaaaatctccttggctggttttcaagtgcagccatgcttgagactcctgcttaaaggtacagcaaagaggaaggaggt

SEQ ID NO: 131767 - DNA, 222 bp, Homo sapiens
agaacagcatgggaaaccggccttatgatccaatcacctctcaccaggtccctcctttgacacatggggattacaatttgagatgagatttgggtgtggacacagagccaaaccctatcaatatatatccatattaatatatactcacatacatttccttggtctgtcagataaaarggctgagaagcagggagactccagtatcaagaaacataccttgta

SEQ ID NO: 131768 - DNA, 565 bp, Homo sapiens
ttgtcattggtattctagggatgcctgctattaagtttcatctatkgtgtgctatacatgtaaaaactgtctcttcgaactattgaaaatttaaggttcagtataatatcaattttaaatttttaatgatgttcatgaaattttagatagcagcaagtccttcatttcatcaataaacagtgttacagaaaacttcaagtttataaaaatacagtgaaatttatacaaagctctaaatctgcatttgcatttcctctgcccttttaactaaactaaaacttgtgaattttaaattattaagggggttgctgtgtgaagtcggtagatattagatcaggttggtgaaaagagttcagttctgtaatatctgaatttgtcttttaaaatgagtacatatacaggcaataaacatatatgctcagataaatatacttgtttagaaaaacttcaagacattcaaaaactaggaagaagtacgttcaatagtagttgtataaatttggtggttatgattttttattttttcttttgtgtagagataataactatagctttattatggctt

SEQ ID NO: 131769 - DNA, 605 bp, Homo sapiens
taggaatgctatgagatgtgatctagagcagagatcagagagtagaaactcacaacatgaagcattggaggtaagagttggaagaggagcattctaggcaaagcaaagagtrtgtgcaaacgtccagggagggaagagaggttggtacccatgaggaggaggtgtggaggccactgtgaggcaggagaatagggtctggaggcagggaacctaaggctgattcatgctgacttcctagaactaaatcaaaaggaaaaccccaactttccacgcctaagtatcaaaaggaccacaggttatgcccattgcaactcccctttttctgcatggcagatgaaaaactgaaactacctctgattggtcttctcccacagccaatcaggctggtcttgggccaagtctttatttagaggagtataactttgtgacttcacttcagcctctgagtggtcactttccacaaccagtcagaatgattgtaggccactacttaatttacatagggtgtacaccaagtaactagtgggaaacctctagagggtatttaagccccagaaaattctgtaactgggttcttaaacaactatgctcagtcgggctcccac

SEQ ID NO: 131770 - DNA, 558 bp, Homo sapiens
gtgggaccctgatgccctgttcacagctgcatccccagagcctatcacagtgcctggtatatagtaggtgcttaataaatatttgttataaaggtaasaaaaacaaaacaaaacaaaaaacttaggttggtaacacctccaaagcatactgctagctagacaagactgatcagtgtgctaccgcagcttagggaactctcccgttttccccatttaggaggacgaaagaggcattgtgttgctggcctttcagaagtctctcctagcagaatcagaagaccctggctgagcagctttgggagaagcaaagtctgaatgagctaaaaagccttttccgtttgccttgcaacaagcaaatgaagtaaccaaagaaaaaatgcgcttgaatgaaaagaacaagattctgtgcgtgccgaatcggatcaaaggcagtgcgcatcacccatcttcgtccaccgtaaactccctgcaacttaagggctggctttatcgtcagactccggaaatgctagaacctgatcataagagaccagtgcagaggcaaataaagaaaaggga

SEQ ID NO: 131771 - DNA, 524 bp, Homo sapiens
aacgattttagtaaccatctttctctttctcccttcctcaaatatttatgaaatatctatgttgtggtagacatagtatcttgttaataccttgataataagacagttcctgctcacatagagcttacgatcttatagaagaaacatccattacrttaaaaaatatgcaaattgttaccaattacaattgtgataactgaatcagaggagtacagagaattgtaggaatgaattgtatgataagaagtcccaacccaatcttgagagagggaggatcagatcaggtttccctgaagaagcatttaggatcgaatgaaaataactaataggagttggtcagatttcttcagggtggagggaaggcagggatgtggcagacagttctgggcagaaggaaccacagcaggaagcacttagaggaagattgcctgggcagtggggatttggtgattaagagggaaggtgtgtgtgtgttgggggagatgggtctgggattagtggcagggaccagattatgcagaacc

SEQ ID NO: 131772 - DNA, 589 bp, Homo sapiens
tttggactttagcaaggactgaagcaattttgagaacccagatgctcagccttgaagggaagaaccatcttcaggagacttcatgtccttrgtctgggaatagctttcctttgcttctatgtgtggaaccacattgtactcacaaagttgtcttgtaaagagatagggaagtaggttggagctatgttttccttattaggatatgacattttaaaaatgtcgacaaaaatagaaatacctagaggatgaaagtgtctttccccctggaaaaacatgccatttcattgcttttttattgagtactattggaaagtaaatgaaggcaagaaatgcaatctgatgtctcattatcagtgctcaggggagagatttctcctagacagcacatttccgagcctaggtagagatgaaaattagataaagctcagtgatccagatgttacaactgtaaattataaaaaaatacattttcaggagatttaaacttctttcctgaagttagggtgggaaaaaaatgaaaaactttggagagggttctataaggaggtgtacatttaaaaatgtgtattgtttgttaacataatcatgg

SEQ ID NO: 131773 - DNA, 575 bp, Homo sapiens
gctactatcattaagagcttcttctacatgtaagcttaatattttaattttttgctgaagcaggattgtaccggyggcaggggagaatactgtgatagggtaccaccaccagggagtccagattactggggaggggaatattatcctggatggtgaatggaattaatggccacctctaagtgcatctccccatccaatgtgggggcaggtattgccactcgtaggatctgcatacccacagggcccccaccagggtacagcaatggtttttttgtaattatagtgtattaaggtgttattaaagcaggaaagagattgtgtttcactggggacaatgttgttgatttcgagtatgtgttgacagttgtctggcaggagaaaccccagagtaacattagaggagccatttaaggcctccagacaaagtggggggctatatggaatctggccaccagcacagcagtttcccaatatatactgttccaggcatattgggcaggataccaaagcttttgacacaaggcaagggtggtgttcacctttcgtctgacatgggcaaagatagatttcttcct

SEQ ID NO: 131774 - DNA, 445 bp, Homo sapiens
agaattctatgatcaaatacacttagaaaaccttgcatatgatgtctctcccttagagattcacattgtacattttcatattgtctaacagaattattctaatttcatagttaaggaaattagttcatgaatggtaccaatcataatcccaaaagacataatctcaaacattgaaattcctaaagtttaaaatcccttgactggattaagggatacctagaacctggtgwagcagtgtatcttgtgagggtgtttccagaggagattagtgtgtgagtctgagtgcacaacgtgagaaagatctattctcaatgttttgagtgtttcgaaaatcatagaaaaagtaaaaacacaggtgaaaaatataacaaatgtcccctgtcaaatgattcaatcatgtatgacttctgccccttcacacatagtgccatgcttgccttcaaaa

SEQ ID NO: 131775 - DNA, 643 bp, Homo sapiens
tgtatgtatgtatgtattttaaatatctcaacaaaatccctaggaattccattgaataattttttactagcctagtttaagtaataaataacaaaactatatatttaagtaatgaaactattcaataatgaagttttcattttatccaaattgagagaaagagaccaacagatatttacattataacacttaatagatacaataatggcactgaccaaatgataaaagctgtaagaagycaatcaattatccactaagattctgttctttaacatttctccaggtggcacacccacagtaggaaggacctggagctgctaccacagttggtgggaggggtgggccaaaggggaaaatattgcccctctctaggcctctaacccctcaggagatcttcctcatcagattggatacgagtatgactaagatgaagataattgctttttaaaggaaaatgccagtgagtgctgtcagcaagatgagaaaataagacttcccagctctcaccctcttgcaaaaacattaatttgaacaactatccatgcatgaaaatacctccacaagagctaagggatccaggtgagagatgatagcacctgagtgcagcacagaaataagaagctgcattgaagagggtaggaaa

SEQ ID NO: 131776 - DNA, 569 bp, Homo sapiens
ttaacatttctccaggtggcacacccacagtaggaaggacctggagctgctaccacagttggtgggaggggtgggccaaaggggaaaatattgcccctctctaggcctctaacccctcaggagatcttcctcatcagattggatacgagtatgactaagatgaagataattgctttttaaaggaaaatgccagtgagtgctgtcagcaagatgagaaaataagacttcccagctctcaccctcttgcaaaaacattaatttgaacaactatccatgcmtgaaaatacctccacaagagctaagggatccaggtgagagatgatagcacctgagtgcagcacagaaataagaagctgcattgaagagggtaggaaagatagtttcacattatcctcgtcacccttcacctaagctcacacagtacagtgcaaagatactgtctacctgatccaattttggtcaaaaccaaacttttgtcagctttaggatgacttcagttttaggatgacacaaaatgtgagagacagagcaaaagatgaaaataatacaggatcctgggtgactttatt

SEQ ID NO: 131777 - DNA, 374 bp, Homo sapiens
gctctttgtgcaattgcatatgccgtagtgactcattgaagttttggatcaatcttatcaaaagacttaggttatcgtcatggtgtttcagatgactacagttataaagctggttgcataaaattaccatagtgttaygcatttatacattttgaatcttgacttatttctttatgaatatggttcatccacttataacattatacccatatgactgttgttagtatacctgtatgtttatgcttgtaaaaatacaaatgttactattgcctattttattatgtaaagtggcctgtgaaagtgccctctggtccatgtttttaatatgtttctaaaataaatctccttttataaatgtgaagaaatgtctttta

SEQ ID NO: 131778 - DNA, 374 bp, Homo sapiens
gctctttgtgcaattgcatatgccgtagtgactcattgaagttttggatcaatcttatcaaaagacttaggttatcgtcatggtgtttcagatgactacagttataaagctggttgcataaaattaccatagtgttatgcatttatacattttgaatcttgacttatttctttatgaatatggttcatccacttataacattatacccatatgactgttgttagtatacctgtatgtttatgcttrtaaaaatacaaatgttactattgcctattttattatgtaaagtggcctgtgaaagtgccctctggtccatgtttttaatatgtttctaaaataaatctccttttataaatgtgaagaaatgtctttta

SEQ ID NO: 131779 - DNA, 440 bp, Homo sapiens
caaacaaatggaaacacatcctatgctcatcaatggatagaatcaatattgtgaaaacgaccttactgccaaaagcaatctacaaattcaacayaattcccattaaaataccaccaaaattcttcacagaactagaaaaaaacaaacctaaaattcatatggaaccacaaaagagcccacatagccaaagcaagactaagcaaaaagaacaaatctggaggcatcagattacctgatttcaaactatactataaggccatagtcaccaaaacagtatggtactggtataaaaataggcacatagagcaatggaacagtatgcatagcccagaaataaacccaaatacttataactagtgatctttgacaaagcaaacaaaaacataaagtggggaaaagacacctttttcaacaaaagatgctgggattactggcaagcc

SEQ ID NO: 131780 - DNA, 440 bp, Homo sapiens
caaacaaatggaaacacatcctatgctcatcaatggatagaatcaatattgtgaaaacgaccttactgccaaaagcaatctacaaattcaacacaattcccattaaaataccaccaaaattcttcacagaactagaaaaaaacaaacctaaaattcatatggaaccamaaaagagcccacatagccaaagcaagactaagcaaaaagaacaaatctggaggcatcagattacctgatttcaaactatactataaggccatagtcaccaaaacagtatggtactggtataaaaataggcacatagagcaatggaacagtatgcatagcccagaaataaacccaaatacttataactagtgatctttgacaaagcaaacaaaaacataaagtggggaaaagacacctttttcaacaaaagatgctgggattactggcaagcc

SEQ ID NO: 131781 - DNA, 440 bp, Homo sapiens
caaacaaatggaaacacatcctatgctcatcaatggatagaatcaatattgtgaaaacgaccttactgccaaaagcaatctacaaattcaacacaattcccattaaaataccaccaaaattcttcacagaactagaaaaaaacaaacctaaaattcatatggaaccacaaaagagcccacatagccaaagcaagactaagcaaaaagaacaaatctggaggcatcagattacctgatttcaaactatactataaggccatagtcaccaaaacagtatggtactggtataaaaataggcacatasagcaatggaacagtatgcatagcccagaaataaacccaaatacttataactagtgatctttgacaaagcaaacaaaaacataaagtggggaaaagacacctttttcaacaaaagatgctgggattactggcaagcc

SEQ ID NO: 131782 - DNA, 388 bp, Homo sapiens
atcttgactcaatgtaatgtaatcaaccatataacaatccagatcaaaatatagaatattcttagaaacagttcaatgtttctaagaatgttgttggctttttcaattaccaagaagttttgactcmtaaattggaatcttattttagcactatgctgtacttacttgattttctagtcatttcaaaaggcacagggctgcttgcctcttgtcactttcatgatacttcattatgcatggaaatacctttaatcactttgagagtggcattgacctttgaagcactgaggtcaattcaaaatgtgctaaataccaataaagtgctttttaaaagttcactgagagttttaacttttcacactgcctcaggtacattatggggtctgtt

SEQ ID NO: 131783 - DNA, 509 bp, Homo sapiens
  misc_feature (1)...(509): n = A,T,C or G
acaaacctacacgttgtgcacacgtaccctagaacttaaaagtataataaaaataaataaaaagaaaatactatgtttgtcagagttgtttaaaagtaagaatatgatattctcagcaacaataaaaggaaagaatgaaaaaaaaagatatacttgggataagtnnnnnnnnnnnnnnnnnnnnnnnnnnnnnnnnnnnnnnnnnnnnnnnnnnnnnnnnnnnnnnnnnnnnnnnnnnnnnnnnnnnnnnnnnnnnnnnnnnnnagaaatcattaccttcaagtggaaattaacaacaattacaacatgaaaccaagcaaccaatgaacaaaaactgcttgctggtagttcacacatcaytaaatattgaacaaacttaaggagtatcacttagggcactagatgattagtttgacctgggacacccacatgttatggtttagccttgtacttgggattttggtgactcatagcttggtcctaaggtcattccttcactctttagcaca

SEQ ID NO: 131784 - DNA, 509 bp, Homo sapiens
  misc_feature (1)...(509): n = A,T,C or G
acaaacctacacgttgtgcacacgtaccctagaacttaaaagtataataaaaataaataaaaagaaaatactatgtttgtcagagttgtttaaaagtaagaatatgatattctcagcaacaataaaaggaaagaatgaaaaaaaaagatatacttgggataagtnnnnnnnnnnnnnnnnnnnnnnnnnnnnnnnnnnnnnnnnnnnnnnnnnnnnnnnnnnnnnnnnnnnnnnnnnnnnnnnnnnnnnnnnnnnnnnnnnnnnagaaatcattaccttcaagtggaaattaacaacaattacaacatgaaaccaagcaaccaatgaacaaaaactgcttgctggtagttcacacatcactaaatattgaacaaacttaaggagtatcacttagggcactagatgattagtttgacctgggacacccacatgtyatggtttagccttgtacttgggattttggtgactcatagcttggtcctaaggtcattccttcactctttagcaca

SEQ ID NO: 131785 - DNA, 555 bp, Homo sapiens
aggcagcaggaaaaagagcaaagggggaattgccaagcactttttaaaccatcagctctcatgagaactcactcactctcatgagaacggcatggggaaactgtccccatgaacmaatcactttccaccaggtcccttccttgacacctggggattacaatctgagatgagattgggtagggacacagagccaaaccatatcaaatacttttagacagaacattgttttttctttttaaaatgtaagctaatgcgtatctttggataggcagctccagtcgtgtcagcaatctgatctgtaacattgataccaccagacaaatgtttcaataggaaacctaatgaaagggatcaatgggtctaaaaataatggcactactgatttgacaatcaaaaaaatgccaaaatttattagtattgagcaaacagaacagtttatgactagataaatgtatttttagcaatattccattttgacaatattttggttccttttaattttctagaactctaggttgcaaggatttaagatgggatcatcatcatcccagaaca

SEQ ID NO: 131786 - DNA, 442 bp, Homo sapiens
gtatcttccccataacttttggaagattcttcttcaactttcctttttttttgttttctttgaggctggatatcgctcaattgttcaggctggagtgcagtggcttgattgcggctcactgtagcctcgacctcctgggctcaagcaatcctcccacctcagcttccactccagccrtgcgccaccactgcccagctaatttttgttttttggtttttttttggtagagatgagattttaccatgttgcccagggtagtcttgaactcctgggctcaagtggtctgcctgccttggcctcccaaagtactgggattataggtgggctcagccaccaactgagcccaactccttcaacttcttaactctatttcctctttgatatggcttttgcattcattagtctccccctttggagagttgctaaattgctgcagtgaaag

SEQ ID NO: 131787 - DNA, 442 bp, Homo sapiens
gtatcttccccataacttttggaagattcttcttcaactttcctttttttttgttttctttgaggctggatatcgctcaattgttcaggctggagtgcagtggcttgattgcggctcactgtagcctcgacctcctgggctcaagcaatcctcccacctcagcttccactccagccatgcgccaccactgcccagctaatttttgttttttggtttttttttggtagagatgagattttaccatgttgcccaggstagtcttgaactcctgggctcaagtggtctgcctgccttggcctcccaaagtactgggattataggtgggctcagccaccaactgagcccaactccttcaacttcttaactctatttcctctttgatatggcttttgcattcattagtctccccctttggagagttgctaaattgctgcagtgaaag

SEQ ID NO: 131788 - DNA, 621 bp, Homo sapiens
ggtggggggaggatattttcagctctggaatgtgaggatttgcctaatatttctaactatgtatttgccagaaaatgtggcatctagggagatcaggaaatgcagtgactgtgccagaatgtggtgccctccgcttcagtctggcatgtcagcaactggctgtggctgttggctaatactactcagtggtgctcgtgttaattccctttccagtagaaatttcttgtggttaatatcagcagctaccatgtagcaagcatcatgcgggcttttacatttactctttaaaacaaccatgtgaggtaggtgaggaaaccaaggctcagataaatcmattggcttgtatacacatggctattgtcatcggaaagattaaatattactcaaaaggatgaccacagtcactgcattaacattccaagacagcaatataaatcaatttcatgagaggaaatcctatttttggttgtgtaaaggaaccaactaccagtgaaggatggagtctgagaaactaaattgctgtgcataataaagtaaaagaaacatttaggttgtccgctggcgacttgagtagaggacaggatttctggaagactgaggaaggaatagaatggagagtct

SEQ ID NO: 131789 - DNA, 621 bp, Homo sapiens
ggtggggggaggatattttcagctctggaatgtgaggatttgcctaatatttctaactatgtatttgccagaaaatgtggcatctagggagatcaggaaatgcagtgactgtgccagaatgtggtgccctccgcttcagtctggcatgtcagcaactggctgtggctgttggctaatactactcagtggtgctcgtgttaattccctttccagtagaaatttcttgtggttaatatcagcagctaccatgtagcaagcatcatgcgggcttttacatttactctttaaaacaaccatgtgaggtaggtgaggaaaccaaggctcagataaatccattggcttgtatacacatggctattgtcatcggaaagattaaatattactcaaaaggatgaccacagtcactgcattaacattccaagacagcaatataaatcaatttcatgagaggaaatcctatttttggttgtgtaaaggaaccaactaccagtsaaggatggagtctgagaaactaaattgctgtgcataataaagtaaaagaaacatttaggttgtccgctggcgacttgagtagaggacaggatttctggaagactgaggaaggaatagaatggagagtct

SEQ ID NO: 131790 - DNA, 580 bp, Homo sapiens
cattacagcttccgcctgaggttattacatttgttttctgactttgtctaagtttctcaataaattctagttaaatcctcccttaatgcaacattaaattccttaataaatcctgattaaatgctagagctgcgctgggattcttgactttgttctaatcaaaagcttcagaaataaaaatatttctgtcacaagaagagaaagtaaaagcatggaatgcaaatttatttaagttcttcaattttgtgataaaaaataagcttcaatcttgaggaaatagaggtsaaagtatctgaatataacacactgacaatgcagtcagtttgatgaatacattcatggaattagtctaattcacttttaactagttatctaacttgacaacaccctaatcatactgtacaaccttaatgcccaaattaatgctagactgatataacagatattgagcttttgtatttaatgagattagatatgctatgaaggaaaagggctataacaggttatgcccaagacctcctgtcagtttccatattaatttagtctgtgcttcaggtttcagatatgtaacaccaattac

SEQ ID NO: 131791 - DNA, 535 bp, Homo sapiens
tacattcttcactcattaaaagttattatttattacagcatgtgtatccccaagacttcttggtttgtgtgtaatgttaacactttccaaaaaagctttatatccttattatgagtactgactgaatttgaattttatatcatgctattgtctaagcattaaataatctaaaatatataactacgttcttcttttacattattagaaaaccacagagattactctgtttttgtcactgattagtattttttcacaggaccactttgacttactagttttttggggtttttacctaatgagatggaaaaaaagattatagttacaataaatayatgcagccatttaatttatttgtatgggttttaagtaggcctagtatactttttgttcagggtatggataattatagtacttttccagaaaactaagcaatatcaacatgatatggtagagttgcaataaaattcacaatcttttaaaaagtcagaatattagggatgctggtttatcactccaaaggagatagatcccccga

SEQ ID NO: 131792 - DNA, 498 bp, Homo sapiens
agacaaaacagaacacattccccctttctaatacagatacccatccttgtgcctagtctgaggatgatgaaaggataaattttaaattggatgtgagatgctagtattgaattagattcaactagattttttaaaacttggaagtgagttgatttacctaaaagtaactggaaagctatgcaatctattgaaataatacaaaaaaaaaaaaaaaaacccaaaacacacacatgcacacgtgcrtgtggcaaagaaagtaaccaggaaaaagaagatacagtttactacttatatcctacagaatttaattcatttaatagaccaattttatggaccttaaattttctttaacaaatattctctctcacctgtttatatatgaaaaccattatttttaataaaataagtttgaatcttggagggcagagagaaagaatacaaattaaaatggtaggacattaattagcccaacattggaacagacttataagagtagcc

SEQ ID NO: 131793 - DNA, 498 bp, Homo sapiens
agacaaaacagaacacattccccctttctaatacagatacccatccttgtgcctagtctgaggatgatgaaaggataaattttaaattggatgtgagatgctagtattgaattagattcaactagattttttaaaacttggaagtgagttgatttacctaaaagtaactggaaagctatgcaatctattgaaataatacaaaaaaaaaaaaaaaaacccaaaacacacacatgcacacgtgcgygtggcaaagaaagtaaccaggaaaaagaagatacagtttactacttatatcctacagaatttaattcatttaatagaccaattttatggaccttaaattttctttaacaaatattctctctcacctgtttatatatgaaaaccattatttttaataaaataagtttgaatcttggagggcagagagaaagaatacaaattaaaatggtaggacattaattagcccaacattggaacagacttataagagtagcc

SEQ ID NO: 131794 - DNA, 584 bp, Homo sapiens
ttattacattaacagtatgtttgatattcaggagtccctggggagaatacacaagtatatttccatgctatcactgtacatgataatatagtagtcactgttgttcttaagcatgttggtgactgtagcagataatgccagtgctctgcccttcacttctaataccctgaatcttaactagccttcagagcactgccaatggccgctgaagctaccttggctacatccaaagagaagrggtttctgataatttggagtggatcctcattagtcatggcttttgtatttgagaattcatctacttactaaagcttatttgtaacctctaaatcaatgatgtgccttgtggaaaaaatgtaagtgctagataagcttaattcaggcatgagttacaatgttgtccattaattcaatgttaatgaataaaacatgtatgttaagtaaggtgtctttaaacagaaacccgtaaaacaaggttatatggtcattggttgacaaaaatgtgatgaaagccttgtagaaacctaaccttttatttcctctaggtacaatgatcaggattcatcattcagtgttcacgatga

SEQ ID NO: 131795 - DNA, 584 bp, Homo sapiens
ttattacattaacagtatgtttgatattcaggagtccctggggagaatacacaagtatatttccatgctatcactgtacatgataatatagtagtcactgttgttcttaagcatgttggtgactgtagcagataatgccagtgctctgcccttcacttctaataccctgaatcttaactagccttcagagcactgccaatggccgctgaagctaccttggctacatccaaagagaagaggtttctgataatttggagtggatcctcattagtcatggcttttgtatttgagaattcatctacttactaaagcttatttgtaacctctaaatcaatgatgtgccttgtggaaaaaatgtaagtgmtagataagcttaattcaggcatgagttacaatgttgtccattaattcaatgttaatgaataaaacatgtatgttaagtaaggtgtctttaaacagaaacccgtaaaacaaggttatatggtcattggttgacaaaaatgtgatgaaagccttgtagaaacctaaccttttatttcctctaggtacaatgatcaggattcatcattcagtgttcacgatga

SEQ ID NO: 131796 - DNA, 607 bp, Homo sapiens
gatttttcactgggtagagtgacccaaaccttcattcctgaagggtcagggccatttgcagtcatgcctggattaggctgttgtagtttcccattgaccttagtcacagggcatggtaatactaaaagatgccctaagggatctcctgtattacacacatactcttccttacctcctttgtggagtagtaggctgattgtcagttgcctcagccaacactgtaactccttttttttttttgagatggagtcttgctctgtctcctaggctggagtgcagtggtgcaatctcgactcactgcaacctctgcctcctgggttcaagcgattctcctgcctcagcctccaagtagctgggactataggcgcacattaccacacccggctaatttttgtattttcagtasagatgaggtttcaccatgttggccaagatggtcttgatctcctgaccttgtgatccaccacctcggcctctcaaagtgctgggaattcaggcatgagccaccgctcccggcctgtaactcctttcttcgcctgttgacttagagataggagaagcccgaaatggccaggtggcaatcttaacttccagttaaaaggaatta

SEQ ID NO: 131797 - DNA, 442 bp, Homo sapiens
ttcttcgcctgttgacttagagataggagaagcccgaaatggccaggtggcaatcttaacttccagttaaaaggaattattgtgtctcctggtggcagcattcctccctctggaactaagacctctaggccagcagaatgtaatgttgcaggaaaaggaagcaaagattttgctagtgggttastgggggtgatggtgaatggtgccacttccacttctaccccttgattcctggacctgtgaatcctggctatgggagaaacagtaccaaatattcgacactgattcagagcatacacagccttctggagaacttttccccaggcctgtaaagtattgccatatagttggtgttgtaattgtaacttcaaaaggccattccaatgttctatcaatccagctgcatcaggatgatgagaaatatggtaagaccagtgaattc

SEQ ID NO: 131798 - DNA, 584 bp, Homo sapiens
actgtggttcccactgtaagaccatgcatacagagaagagcaatcacagagctcttcaaggatgcaggtgctcccctcacaaacctattttgcaaaatattggtgaaggatatgtcttctggacatatccagaagtgataatatctggacatatcctcccaactgtgataagtggatctaaagtgactaatccactctagcatcccaaactccctaagccttcgaatcccttccttatattaaacaaaggaagatcaggcatttctagcttgctcacagtgggccatgttttgatccatgtttcagctaaccaagcaaataaactattagaacctttttttaactccctgagctgcaacattcaacrcagaatccttgcttagtgggcctaaatcaataaattcaacctgattgaactttatgtttcttctaccattaccccacacccttaatatccactcccaggcctgttctctagatttctgcttatataaattagaaaattcatttgggggtgtagcatacctcctcatggggcacactctgaacctcacctccagaagcctgctggaaatttagttata

SEQ ID NO: 131799 - DNA, 584 bp, Homo sapiens
actgtggttcccactgtaagaccatgcatacagagaagagcaatcacagagctcttcaaggatgcaggtgctcccctcacaaacctattttgcaaaatattggtgaaggatatgtcttctggacatatccagaagtgataatatctggacatatcctcccaactgtgataagtggatctaaagtgactaatccactctagcatcccaaactccctaagccttcgaatcccttccttatattaaacaaaggaagatcaggcatttctagcttgctcacagtgggccatgttttgatccatgtttcagctaaccaagcaaataaactattagaacctttttttaactccctgagctgcaacattcaacacagaatccttgcttagtgggcctaaatcaataaattcaacctgattgaactttatgtttcttctaccattaccccacacccttaatatccactcccaggcctgttctctagatttctgctyatataaattagaaaattcatttgggggtgtagcatacctcctcatggggcacactctgaacctcacctccagaagcctgctggaaatttagttata

SEQ ID NO: 131800 - DNA, 532 bp, Homo sapiens
gttagcatatatatatttacaatcattatgtcatgctgctggaatgacccctttgcattatataatgaccttctttatttattcttacgttttttgtcttgaaatctattttgtctgatataagcatagctacttcttctctttttttggtttccattggcaatgaatatctttttccattctttcattttcagtatacgtttatgtttgtaggtgwagtgtgtttcttataggcaacagatcaatgggtcctgttttttcatccgttcagacactctgcgtcttttgattggaacgtttagtccatttacattcaatattactattgataagtagggacttctgccattttgttatttgttttctggcccgccctctctgcctccctccatccctcccttccttcctttcttcctttcttccttccttccttccttttagtaaaggtgattttctctggtggtatgatttagtttttgctttttattttttgtgtatccattgtacatttttcaatttaaggttactataa

SEQ ID NO: 131801 - DNA, 532 bp, Homo sapiens
gttagcatatatatatttacaatcattatgtcatgctgctggaatgacccctttgcattatataatgaccttctttatttattcttacgttttttgtcttgaaatctattttgtctgatataagcatagctacttcttctctttttttggtttccattggcaatgaatatctttttccattctttcattttcagtatacgtttatgtttgtaggtgaagtgtgtttcttataggcaacagatcaatgggtcctgttttttcatccrttcagacactctgcgtcttttgattggaacgtttagtccatttacattcaatattactattgataagtagggacttctgccattttgttatttgttttctggcccgccctctctgcctccctccatccctcccttccttcctttcttcctttcttccttccttccttccttttagtaaaggtgattttctctggtggtatgatttagtttttgctttttattttttgtgtatccattgtacatttttcaatttaaggttactataa

SEQ ID NO: 131802 - DNA, 636 bp, Homo sapiens
ctgactcacactgtgatagaaactttggcctcagaaaatcctgcacagatggccaaagtatcacaggttgaggcagggtcactgagtctttgtatctctccatcaggtagttagatatagaaagctccctatgaaggaggsttaaacttggacagggaagaatctatggctgagggcaattgccggtgaggctgataaccgtgcactagtacatcaaatccgatgaaggatctgggcagagcactgcagtattcactacatgaagtatattttgcactgtggacacaaattagaaaaattgcaagtagtggtatattgtaattggcatgcactatatgagcagagtcaatgtgtctccttgtagaatattctctgatgatactcactattatcccctctctgctaagctttgttctgtgtctgaagggcataaagcatggaaactacatttttcagactccattaccagaaggatatggttggatttcagcaatgagtgggctttgcataaaatttggaagacgaaagagaagaaaaacctggctgctgcaggttggaacactggcaacaatagatacggagtttgcaagaagctgctaagcttcctcaggaaaattatttgtttcaatatttctg

SEQ ID NO: 131803 - DNA, 636 bp, Homo sapiens
ctgactcacactgtgatagaaactttggcctcagaaaatcctgcacagatggccaaagtatcacaggttgaggcagggtcactgagtctttgtatctctccatcaggtagttagatatagaaagctccctatgaaggagggttaaacttggacagggaagaatctatggctgagggcaattgccggtgaggctgataaccgtgcactagtacatcaaatccgatgaaggatctgggcagagcactgmagtattcactacatgaagtatattttgcactgtggacacaaattagaaaaattgcaagtagtggtatattgtaattggcatgcactatatgagcagagtcaatgtgtctccttgtagaatattctctgatgatactcactattatcccctctctgctaagctttgttctgtgtctgaagggcataaagcatggaaactacatttttcagactccattaccagaaggatatggttggatttcagcaatgagtgggctttgcataaaatttggaagacgaaagagaagaaaaacctggctgctgcaggttggaacactggcaacaatagatacggagtttgcaagaagctgctaagcttcctcaggaaaattatttgtttcaatatttctg

SEQ ID NO: 131804 - DNA, 585 bp, Homo sapiens
gttgtaaaaataaaaggaaattattaatataccgtctattgtgatcatttactaagttaagcatattattaagaagacaagcataagtttaacacaatttggcaawgaataaaattgaaggagagagagcatatgttggctttgctctgtgaaactcaaatgaaatggtcacctgttctagcagctcatgaaaaattctgcattgtttattatgtgtcaggatcaaccttaaattcagttataaaaagtttgatgattccaaaaaaaagggaagcactaagtaatataggtacagagagggaagagtgtcaaatagaattttcaatctgtgtataaggatacttaagcattttttaaggaaagcagaaagaagcatgagaaagtctacaatgacatctatgtcaatataacaagctggatatttagagaagaaactcttgattaaatactttttatgatatgaacacacacgtataatatgacatgactgtgttcatggaacataaagaaattcctctgaccaaagagaactggaaaaaaaaaggaaagaaattatagaaattggtggaaacaacaagaaatgat

SEQ ID NO: 131805 - DNA, 585 bp, Homo sapiens
gttgtaaaaataaaaggaaattattaatataccgtctattgtgatcatttactaagttaagcatattattaagaagacaagcataagtttaacacaatttggcaaagaataaaattgaaggagagagagcatatgttggctttgctctgtgaaactcaaatgaaatggtcacctgttctagcagctcatgaaaaattctgcattgtttattatgtgtcaggatcaaccttaaattcagttataaaaagtttgatgattmcaaaaaaaagggaagcactaagtaatataggtacagagagggaagagtgtcaaatagaattttcaatctgtgtataaggatacttaagcattttttaaggaaagcagaaagaagcatgagaaagtctacaatgacatctatgtcaatataacaagctggatatttagagaagaaactcttgattaaatactttttatgatatgaacacacacgtataatatgacatgactgtgttcatggaacataaagaaattcctctgaccaaagagaactggaaaaaaaaaggaaagaaattatagaaattggtggaaacaacaagaaatgat

SEQ ID NO: 131806 - DNA, 483 bp, Homo sapiens
aacacaatttggcaaagaataaaattgaaggagagagagcatatgttggctttgctctgtgaaactcaaatgaaatggtcacctgttctagcagctcatgaaaaattctgcattgtttattatgtgtcaggatcaaccttaaattcagttataaaaagtttgatgattccaaaaaaaagggaagcactaagtaatataggtacagagagggaagagtgtcaaatagaattttcaatctgtgtataaggatacttaagcattttttaaggaaagcagaaagaagcatgagaaagtctacaatgacatctatgtcaatataacaagctggatatttagagaagaaactcttgattaaatactttttatgatatgaacacacacrtataatatgacatgactgtgttcatggaacataaagaaattcctctgaccaaagagaactggaaaaaaaaaggaaagaaattatagaaattggtggaaaca

SEQ ID NO: 131807 - DNA, 623 bp, Homo sapiens
gcaatttctcctgtactggtgatgccctcaktttcccagggatgggtcttgagtggatatctatcagtggggtgagttcatgtatttctgaactgaggcacccaatttcttatctgctcaccctctttcactgctttgcaaatatcagtgagtccctcaccagcagcgtctgccctgagcattctgactgtgtcaactccatgggaagctacaattgcagctgtcgagttggattcatctctagaaactctatctctttattatttacctgcttaattaattaagggtcatctcactggaagaccatatgagaaagggattttctcatgtagggatgagaaaattggggctcagagaggtaaaaatatatagttgcctatatatttttctatccctttactttgggcctgtgggtgtctttacatgttaggtaggtctcttgtaggcagcacatggtttggtcttttttacaaaaatttttatctggtttaacaatctatatcttttaagtgtagcattaggccatttctgttcaaggttaatattgatatttgagggtttgttcctgtcacagtgttgctcgctacttgctttgtgatctcagttgtgtaattgctttatag

SEQ ID NO: 131808 - DNA, 623 bp, Homo sapiens
gcaatttctcctgtactggtgatgccctcagtttcccagggatgggtcttgagtggatatctatcagtggggtgagttcatgtatttctgaactgaggcacccaatttcttatctgctcaccctctttcactgctttgcaaatatcagtgagtccctcaccagcagcgtctgccctgagcattctgactgtgtcaactccatgggaagctacaattgcagctgtcragttggattcatctctagaaactctatctctttattatttacctgcttaattaattaagggtcatctcactggaagaccatatgagaaagggattttctcatgtagggatgagaaaattggggctcagagaggtaaaaatatatagttgcctatatatttttctatccctttactttgggcctgtgggtgtctttacatgttaggtaggtctcttgtaggcagcacatggtttggtcttttttacaaaaatttttatctggtttaacaatctatatcttttaagtgtagcattaggccatttctgttcaaggttaatattgatatttgagggtttgttcctgtcacagtgttgctcgctacttgctttgtgatctcagttgtgtaattgctttatag

SEQ ID NO: 131809 - DNA, 394 bp, Homo sapiens
agactttactcaatgagacctttcctggtcacatgatcaaaaatgttcacccagcctgggcaacgtggcaagacccaatctctacatatatatttaaaaattagccaggcacagccagacgcagtggctcatgctggtaatcccagtgctttgggaggctgaggagggtggatcacctgaggtcaggagttcgagaccagcctggccaacatggagaaaccccatctctattaaaaatattttaaaaattagccaggcatggtggcacacacctgtagtcccagctactgaggaggccgatgcaygagaattgcttgaaaccagcaggcggaagttgcaatgaactgagatcatgccactgcactccagcctgggcaacagagtgagacttgat

SEQ ID NO: 131810 - DNA, 425 bp, Homo sapiens
ggaaatggattgaaattgatgataggccgggcatggtggctcacgcctgtaatcccagcactttgggaggcagaggcaggaggaggatcacttgaggtcaggagttcaagatcaccctggccaacattgcaaaaccccatctctactaaaaatacaaaaattagccgggcgtggtggcacatgcctataatcccagctactcaggaggctgaggcaggagaaccgattgaacccaggaggtggaggttgcagtgagcccagatggagtcactgcactccagcttggatgacagagygagacagtctccaaaaaaaaaaaagaaaagaaaagttgatcataaaaaggaacacaattctcttggttttcctttagaaataactcaatgcctttcaattaatttatagaatccatctatttatgacaa

SEQ ID NO: 131811 - DNA, 425 bp, Homo sapiens
ggaaatggattgaaattgatgataggccgggcatggtggctcacgcctgtaatcccagcactttgggaggcagaggcaggaggaggatcacttgaggtcaggagttcaagatcaccctggccaacattgcaaaaccccatctctactaaaaatacaaaaattagccgggcgtggtggcacatgcctataatcccagctactcaggaggctgaggcaggagaaccgattgaacccaggaggtggaggttgcagtgagcccagatggagtcactgcactccagcttggatgacagagtgagacwgtctccaaaaaaaaaaaagaaaagaaaagttgatcataaaaaggaacacaattctcttggttttcctttagaaataactcaatgcctttcaattaatttatagaatccatctatttatgacaa

SEQ ID NO: 131812 - DNA, 425 bp, Homo sapiens
ggaaatggattgaaattgatgataggccgggcatggtggctcacgcctgtaatcccagcactttgggaggcagaggcaggaggaggatcacttgaggtcaggagttcaagatcaccctggccaacattgcaaaaccccatctctactaaaaatacaaaaattagccgggcgtggtggcacatgcctataatcccagctactcaggaggctgaggcaggagaaccgattgaacccaggaggtggaggttgcagtgagcccagatggagtcactgcactccagcttggatgacagagtgagacagtctccaaaaaaaaaaaagaaaagmaaagttgatcataaaaaggaacacaattctcttggttttcctttagaaataactcaatgcctttcaattaatttatagaatccatctatttatgacaa

SEQ ID NO: 131813 - DNA, 566 bp, Homo sapiens
tgtgcttgttctgttcactgttgcaactccagcccttagacagaaggcactcaaactttaccaaatgaattattttgaatggaaaacacagacttggagtttgtgtaaatgataattaaaagtattctccaaaacttgaaaacagtatataagttgtgtataaatcayagcagcaaatattccttccatttgctgcaggcccaaaaactgacactgaggacagtaggcagatttctactcaagcaaggaattctccacccctccctttttttgtatacttccagaaaattctccaggccatttccttctctaggaaaatacagtaacagtgcagatagtaaaagctggacaattgtttttttaagatcagaggtgctgaccacagattctgaaccttcattacggcctcctcctcctccctgtcaccttccaacttcttctgctccaatggttggctcataaatccatctctctaattccttgcttctcatcacttcatttactttgctatatgacccttccagtaggcaggagaaatagatattctaacagctataccaccactc

SEQ ID NO: 131814 - DNA, 566 bp, Homo sapiens
tgtgcttgttctgttcactgttgcaactccagcccttagacagaaggcactcaaactttaccaaatgaattattttgaatggaaaacacagacttggagtttgtgtaaatgataattaaaagtattctccaaaacttgaaaacagtatataagttgtgtataaatcacrgcagcaaatattccttccatttgctgcaggcccaaaaactgacactgaggacagtaggcagatttctactcaagcaaggaattctccacccctccctttttttgtatacttccagaaaattctccaggccatttccttctctaggaaaatacagtaacagtgcagatagtaaaagctggacaattgtttttttaagatcagaggtgctgaccacagattctgaaccttcattacggcctcctcctcctccctgtcaccttccaacttcttctgctccaatggttggctcataaatccatctctctaattccttgcttctcatcacttcatttactttgctatatgacccttccagtaggcaggagaaatagatattctaacagctataccaccactc

SEQ ID NO: 131815 - DNA, 619 bp, Homo sapiens
aagtgtgtgcatgtgtgtgattttaaaatatggcatatggattccaaaggtctgcttacctgttagtaacattattgcaaattcaaaagagctttcaggcataaaaactagttttcataaactttcatctcataaatcaataaaagtttttcttagctattctacccttaagttaatgtcacagaaatagttttcccatagtgacactaggcaataattttttttattggcaaattgttatttattktatgtccataacaacgtatggcattagaaactatcaggattcccttccactgggaggtcatgggtgacggtggataaactcatatccagaaccagtacaaggaaacttacccagtctctgcagtacagaatgtatgtgccctatcaaggactactcagtagagccaatcaaatccttctaaattatcaataggacagaaataattccctgagtatatacttgtgaagttatacttcagataagctcaacaatcaaaggataaaaaagtcctttaaaagttgtttttgaaatatcttgactttgacaacttaggtttgatgaattggagacacagaaaaagtctacaaacatcttttctttgagaacttagat

SEQ ID NO: 131816 - DNA, 544 bp, Homo sapiens
atctccaaaattcctcttgttaaggatttttagttttttccattgtggtcagagaagatatttgatataacttcaatttttttgaatgttttaagacttgttttgtggcctaacrtatggtctatccttgagaatgattcatgtgctgaggagagaagaatgtgtattctgcagccattgggttaaattttctgtaaatagatttaggtccatttggtctatagtgtaagttaagtctgatgtttctttgctgattttctgtctggacaatctgttcaatgctgaaagtggggtgttgaaatcttcagctattactgtattggggtctatctctttctttagctctaatatttactttgtttatctgggttctcctgtgttgaatgcatatatatttacaattgttatatcctcctgctgaattgacctctttatcatataattaccttcattgtctctttttatagtttttatcttgaaatccatttgatctgatatatgtatagctacttctgttcttttgtggcttccatttgcatggaat

SEQ ID NO: 131817 - DNA, 580 bp, Homo sapiens
ggatattcagaggagaactacccttaactggctttacctgtaaacgaaattgtgctctgcccagaatctggagggggtggagggagtggagggtctacattgagttgcggggagtggagagtggaggaatcagggcagtggtgttagctgccctgcctggctgagcagtcactggtaaggaggctgccagacccccccagggccaaaccacggccaaggccaagttacagtgtctaggatccttataccatagatctttaaaaggaggccacagtgcccarggactcagagtaggctcccctttccatttcctcatggctttctggtcagagaaagaggctgtgagctgacagtcgcttttgtcagggaagaggggaggaagacaccagcatgaaccagatgaaccgggcactcctccctgggaagcctgcccagctgtggcattgtcagcagcctgctggaggccccgcacacctaagaagtcaggggagtagatgctggttttggggagggaggtggtctctgctctgcaggaggaaagtctctccaaaatgagagtttggagcaggcaaagactgac

SEQ ID NO: 131818 - DNA, 580 bp, Homo sapiens
ggatattcagaggagaactacccttaactggctttacctgtaaacgaaattgtgctctgcccagaatctggagggggtggagggagtggagggtctacattgagttgcggggagtggagagtggaggaatcagggcagtggtgttagctgccctgcctggctgagcagtcactggtaaggaggctgccagacccccccagggccaaaccacggccaaggccaagttacagtgtctaggatccttataccatagatctttaaaaggaggccacagtgcccaaggactcagagtaggctcccctttccatttcctcatggctttctggtcagagaaagaggctgtgagctgacagtcgcttttgtcagggaagaggggaggaagacaccagcatgaaccagatgaaccgggcactcctccctgggaagcctgcccagctgtggcattgtcagcagcctgctggaggccccgcacacctaagaagtcaggggagtagaygctggttttggggagggaggtggtctctgctctgcaggaggaaagtctctccaaaatgagagtttggagcaggcaaagactgac

SEQ ID NO: 131819 - DNA, 308 bp, Homo sapiens
gaaccttaatttctttccttggtttacaaagtcctaaaaattcatgtrctactttccccatcattcacttaactctagcctcactggtctcctttctttgaactcacccagccttttcttgtcttaggcgtcagagtagcttttcttttgcttgcagtccacttctctttgttgaggttctgaatcagagcctagcttaaacatctcttcagaaaggccttccctcatcatctggttgttctctatcacaccagcttgttttcattttatgcacagaacatgcctccgatatcttcttgcttatttat

SEQ ID NO: 131820 - DNA, 377 bp, Homo sapiens
ctgtaattaaaccatttcactctcttgcttaaaatctgtggcttctcattagaatagaaccttaatttctttccttggtttacaaagtcctaaaaattcatgtactactttccccatcattcacttaactctagcctcactggtctcctttctttgaactcacccagccttttcttgtcttaggcgtcagagtagcttttcttttgcttgcartccacttctctttgttgaggttctgaatcagagcctagcttaaacatctcttcagaaaggccttccctcatcatctggttgttctctatcacaccagcttgttttcattttatgcacagaacatgcctccgatatcttcttgcttatttattatcaacctctgt

SEQ ID NO: 131821 - DNA, 465 bp, Homo sapiens
gaaaattggaatcacttccaaattgctctatttaattttaccataagcataatagtgggtgaagttcagctaaagataggggcatgaaaaaaatgtgatttggtattgctctttagggaggcaaattaattacaaattaagaccatctgggttaaagaatgaattgtcaccttttaagaaccaggaataaaggtaaatgttcactttaaaacaaagggagaaagaacatgagaaaaatcaagagtaaatccgtacaatattacatacacacaaattgggggaaataaacattggcatggaaatgccacaaaataaaatacctatggaatgtaaaagtcaactatggtcactraatattgaacccaaagttattggggaaggtagaatttccttgtatttctttcccagggcactggggagggaagttggggataatcggcttcaggaacttgaactcattggtcc

SEQ ID NO: 131822 - DNA, 533 bp, Homo sapiens
tgtaaaacccaaactgccatcattcactgaaatttatgtaaatgaatatgcattcctttatacgaaaaatcagcaacatctgcgctccatttaaacaatctgatytaatggagtcaccaacagataaagagcagggcagggggaaatgacctcacccaccctccccttagagtatctcgaaaaacaaataaaataaaatataggttacaggcaaaataaacagagttaaaaatattgtcccagaggactccagcttcccaggaagcagaggtgtttaaggggagagacaagagacagctacaataaactctggctcaataaaacttaattaaccccttggggcctttgcaaggaagcttgtcagcagagagacagcatgcgatcccagtgcctggcactaaggggttaaacttgccttgccagatgagacgaggaaatgctggacctaagggaacaagtgaccctgtgcacattcgcaaccacatacatgcacacacctgtgctcacacatacaccaaacctggccatgcatt

SEQ ID NO: 131823 - DNA, 533 bp, Homo sapiens
tgtaaaacccaaactgccatcattcactgaaatttatgtaaatgaatatgcattcctttatacgaaaaatcagcaacatctgcgctccatttaaacaatctgatctaatggagtcaccaacagataaagagcagggcagggggaaatgacctcacccaccctccccttagagtatctcgaaaaacaaataaaataaaatataggttacaggcaaaataaacagagttaaaaatattgtcccagaggactccagcttcccaggaagcagaggtgtttaaggggagagacaagagacagctrcaataaactctggctcaataaaacttaattaaccccttggggcctttgcaaggaagcttgtcagcagagagacagcatgcgatcccagtgcctggcactaaggggttaaacttgccttgccagatgagacgaggaaatgctggacctaagggaacaagtgaccctgtgcacattcgcaaccacatacatgcacacacctgtgctcacacatacaccaaacctggccatgcatt

SEQ ID NO: 131824 - DNA, 533 bp, Homo sapiens
tgtaaaacccaaactgccatcattcactgaaatttatgtaaatgaatatgcattcctttatacgaaaaatcagcaacatctgcgctccatttaaacaatctgatctaatggagtcaccaacagataaagagcagggcagggggaaatgacctcacccaccctccccttagagtatctcgaaaaacaaataaaataaaatataggttacaggcaaaataaacagagttaaaaatattgtcccagaggactccagcttcccaggaagcagaggtgtttaaggggagagacaagagacagctacaataaactctggctcaataaaacttaattaaccccttggggcctttgcaaggaagcttgtcagcagagagacagcatgcgatcccagtgcctggcactaaggggttaaacttgccttgccagatgagacgaggaaatgctggacctaagggaacaagtgaccctgtgcacattcgcaaccacatacaygcacacacctgtgctcacacatacaccaaacctggccatgcatt

SEQ ID NO: 131825 - DNA, 537 bp, Homo sapiens
cagggaaaacaatatgactgattcaagacaggcaaggccccaaattagggcttatcccaggaggccttttggctttacacataaaagaattcaagggcaatcaggtgttattagacagcaatcttttattaaaagggactgctccttgctgagcaggactaactattttgcagtgcacccagagttggcagtagcagcttatgggttgttggcaactgtatttatactcacttatacctattttcacttacatgcaaattaagaggtgagttaatgcaaattgaggagctggttattcagaactttctagaaaaagggrcagtaacttccaggttgttgccatggaaaagggcagtaacttctgggttgccatgacatttgtaaattgtcatggggctggtgggaatctcttatgctaatgagcagtaagggcaattagaggttgccttcaacaccagctgctacttcctgcagggtttttcacttcagttgtgcaccacctgctggttcctgtcaatttcttcattttgtcctgtt

SEQ ID NO: 131826 - DNA, 457 bp, Homo sapiens
tgatcttaacatctgttgcagtctgaatagggtgagaatttccccaaccatcaagtctgggttcctttttgcttcacagttcttctctcaatctaattcctctcattcttttccctctcacattttactataagcagcaagaaaaaaacaggctgtacatttaaccctttgcctgaaaatctcagtgaaatctcccaagttcattgcttaaaaattctttytacataactacaggacacaattcagctaatttttcttccaccatataaaaggattcccttttcttcagtttccaataatattttcctcatttctgcaccctcaccagcagagactttaacatccatatttctactcacaatctatttaaagtgatgtggtattctctaaggcaacatgtttctccaacatgctcctcacttcattctgagtccttactagcagatttgttaacacc

SEQ ID NO: 131827 - DNA, 490 bp, Homo sapiens
gttcattttatgaaatggaaatacaagctgaagatggtgggggattgaaagggtggacaaaagtgctcatttcggtggaagatgtaaatgacaatagacctgaagtgaccattacatctctgtttagcccagtgagagaagaygcacctcagggaacagtaattcttcttttcaatgctcatgaccgagactccgggaagaatggtcaagttgtctgttctatccaggagaatctatcttttacattagaaaattcagaagaagattattacagattgttgacggcccaaattcttgaccgagaaaaagcctcagaatataatatcacggtgactgcaacagacagaggaactccgcccctgtccacagaaattcacatcaccctgcaagtgactgacatcaatgataatccacctgctttctctcaagcctcctactcagtctacctcccggaaaacaacgccagaggtacttccatcttctccgtgat

SEQ ID NO: 131828 - DNA, 465 bp, Homo sapiens
taatgaaaatgtcgctgcgggaatgcgttttcctctcccggaagctattgatccggatgtgggcgtgaactccctgcagagctatcagctcagccccaataagcacttctccctaagagttcagagccgtgccaatggcgtcaagtacccggagctggtactggagcactccctagatcgcgaggaagaggccattcaccacctggtcctcacygcctccgacgggggtgaccctctccgatctggcactgtccttgtcagtgtgactgtcttcgatgcaaatgacaacgcgccggtcttcaccttgccagaataccgagtgagtgttcctgagaatttgcctgtgggcactcagctgctgacagtcacagccaccgacagggacgaaggtgccaatggagaagtgacatattcattccgaaaattacctgacacgcaattgttgaagttccaactaaacaaata

SEQ ID NO: 131829 - DNA, 603 bp, Homo sapiens
gataaatatgttaatttcatgtgcctttcccagtataatttccacagtcacwttggagtggtccttaaataccccacaatagggacttacactcccgcttacaacacaggaagcagctagatcagaattggtaagtgaggcacatgcatagccttcatctttgcctctgtggcctctgttcaagtgctcatcactgcagcagtggtctggctgatgagagaggctgtcttatgtcaatgggataagtcatcttgtttacttcattgtttagtgcctcttccatggtaggatgcccactgatgaccattgacttgtcacacaatgtcatcacacttttgtattcactcccctatgcccatcaacatgattctgacccagaactctttatacccaatcttctaagctttcaggactcttaccaggcaaccagatcatttgccactaaacataaatctacttatattccagccttaggctgcttttctaactacacaaagtggatgtccaagtgcaccactggaagctctgtccagctttaaggaggattttcccttatcaccaaatttccaggcaacccctaagtgaggcaatagtgcagctgac

SEQ ID NO: 131830 - DNA, 603 bp, Homo sapiens
gataaatatgttaatttcatgtgcctttcccagtataatttccacagtcacattggagtggtccttaaataccccacaatagggacttacactcccgcttacaacacaggaagcagctagatcagaattggtaagtgaggcacatgcatagccttcatctttgcctctgtggcctctgttcaagtgctcatcactgcagcagtggtctggctgatgagagaggctgtcttatgtcaatgggataagtcatcttgtttacttcattgtttagtgcctyttccatggtaggatgcccactgatgaccattgacttgtcacacaatgtcatcacacttttgtattcactcccctatgcccatcaacatgattctgacccagaactctttatacccaatcttctaagctttcaggactcttaccaggcaaccagatcatttgccactaaacataaatctacttatattccagccttaggctgcttttctaactacacaaagtggatgtccaagtgcaccactggaagctctgtccagctttaaggaggattttcccttatcaccaaatttccaggcaacccctaagtgaggcaatagtgcagctgac

SEQ ID NO: 131831 - DNA, 603 bp, Homo sapiens
gataaatatgttaatttcatgtgcctttcccagtataatttccacagtcacattggagtggtccttaaataccccacaatagggacttacactcccgcttacaacacaggaagcagctagatcagaattggtaagtgaggcacatgcatagccttcatctttgcctctgtggcctctgttcaagtgctcatcactgcagcagtggtctggctgatgagagaggctgtcttatgtcaatgggataagtcatcttgtttacttcattgtttagtgcctcttccatggtaggatgcccactgatgaccattgacttgtcacacaatgtcatcacacttttgtattcactcccctatgcccatcaacatgattctgacccagaactctttatacccaatcttctaagctttcaggactcttaccaggcaaccagatcatttgccactaaacataaatctacttatattccagccttaggctgcttttctaactacacaaagtggatrtccaagtgcaccactggaagctctgtccagctttaaggaggattttcccttatcaccaaatttccaggcaacccctaagtgaggcaatagtgcagctgac

SEQ ID NO: 131832 - DNA, 603 bp, Homo sapiens
gataaatatgttaatttcatgtgcctttcccagtataatttccacagtcacattggagtggtccttaaataccccacaatagggacttacactcccgcttacaacacaggaagcagctagatcagaattggtaagtgaggcacatgcatagccttcatctttgcctctgtggcctctgttcaagtgctcatcactgcagcagtggtctggctgatgagagaggctgtcttatgtcaatgggataagtcatcttgtttacttcattgtttagtgcctcttccatggtaggatgcccactgatgaccattgacttgtcacacaatgtcatcacacttttgtattcactcccctatgcccatcaacatgattctgacccagaactctttatacccaatcttctaagctttcaggactcttaccaggcaaccagatcatttgccactaaacataaatctacttatattccagccttaggctgcttttctaactacacaaagtggatgtccaagtgcaccactggaagctctgtccagctttaaggaggattttcycttatcaccaaatttccaggcaacccctaagtgaggcaatagtgcagctgac

SEQ ID NO: 131833 - DNA, 570 bp, Homo sapiens
agcagccaagccgcaggaattctgaaacgtatgtgactgaaatggcatctgcaaggagttgaaagtgtctatattaatagctttcatatgagcragtcaatgtaaactcacaccatcagccaatggagcagcagcagttcttggcgatttctatatctgtattcatgcagacaacagatgaccttttccaataccctagtctcttagttccataacctcctctcctctaattatcttgaccaccctctacggtatgaatgtatgtgtccctccaaaattcatatgttgaaacttagtccccaatgcagcagttattagatggtgggatttaggaagagattagggtgttagagttctgtgtttgtgagtgggtgaatgggattaatgcctcataaaagaggcttcacacaacatttgccctttttgttcttcggccttccaccatgtgaggatggcagtgtttatcccctccagagaacacagagacaagttgccatcttggaaggagagaaactgggtcctgaccagacactgaacctactagtgccttgatcttggacctctagcttc

SEQ ID NO: 131834 - DNA, 555 bp, Homo sapiens
ctgggaagggtagtgcagggctagatgggaggtggggattgctaatgggttaaaaaaaaaagaagaatgaataagacctactatttgatagcacaaaatgcttgaggagatggataccccactcttcatgatgtgattatttcacattgcatgcctatatcaaaacatctcawgtactccataaatatatacacctacctatgtatccacaaaattaaaaaaatagaaagaataaatattaattagtatttagtagcacaacagggtgactataaccaaaacaatttaattgtaattttctaaaccaactaaaagagaataattggattgattgtaatacaaaggataaatgcttgaaggaatagatacccctttgccatgatgtaattattacacattgcatgcctgtatcaaaatatttcatgtacctcatatatacatgtactatgtacccacaaaaattaaaagtaaaaaaaaataaaaaatccttgtatatgatatggtttggctgtgtcctcaccgaaatctcaatttgaattgtatctcccagaattc

SEQ ID NO: 131835 - DNA, 554 bp, Homo sapiens
ctgggaagggtagtgcagggctagatgggaggtggggattgctaatgggttaaaaaaaaaagaagaatgaataagacctactatttgatagcacaaaatgcttgaggagatggataccccactcttcatgatgtgattatttcacattgcatgcctatatcaaaacatctcatgtactscataaatatatacacctacctatgtatccacaaaattaaaaaaatagaaagaataaatattaattagtatttagtagcacaacagggtgactataaccaaaacaatttaattgtaattttctaaaccaactaaaagagaataattggattgattgtaatacaaaggataaatgcttgaaggaatagatacccctttgccatgatgtaattattacacattgcatgcctgtatcaaaatatttcatgtacctcatatatacatgtactatgtacccacaaaaattaaaagtaaaaaaaaataaaaaatccttgtatatgatatggtttggctgtgtcctcaccgaaatctcaatttgaattgtatctcccagaatt

SEQ ID NO: 131836 - DNA, 554 bp, Homo sapiens
ctgggaagggtagtgcagggctagatgggaggtggggattgctaatgggttaaaaaaaaaagaagaatgaataagacctactatttgatagcacaaaatgcttgaggagatggataccccactcttcatgatgtgattatttcacattgcatgcctatatcaaaacatctcatgtactccataaatatatacacctacctatgtatccacaaaattaaaaaaatagaaagaataaatattaattagtatttagtagcacaasagggtgactataaccaaaacaatttaattgtaattttctaaaccaactaaaagagaataattggattgattgtaatacaaaggataaatgcttgaaggaatagatacccctttgccatgatgtaattattacacattgcatgcctgtatcaaaatatttcatgtacctcatatatacatgtactatgtacccacaaaaattaaaagtaaaaaaaaataaaaaatccttgtatatgatatggtttggctgtgtcctcaccgaaatctcaatttgaattgtatctcccagaatt

SEQ ID NO: 131837 - DNA, 462 bp, Homo sapiens
agttagggggtttgttagggtgcgttcttaagaccaacacctgggagggaaaagaaagcaggatttaggagagagagagtttgagctgcaatgctttctcagctggaacctcaggtgaccctgtggggagttctggaggtagaatgacttctcaaaactctaccaagttaggacaagagggatgggctaagtcctcatgtcaataaatcacttaaatgtggaccaccttaggaaggcgttgtgtccttgaaccaggtggctttattcagttaagataattcctgaaggggtctgcaatggaatgctggctgctgactgaactcatagcatcttgaaggaggcctcagtggcacatcagagatgacagcatccaccatggaaatcgtattgcaggggaaatgaacstgcaggaaaaacagtaatatgaaattccttcaacaagtgtttatgaagctcttgtta

SEQ ID NO: 131838 - DNA, 553 bp, Homo sapiens
gggaggtaactatggggtgaggagtctgctgcatggcggcagtcacaatcctatatgaaattgcctatagacactgtcctctaggacttcattcagttctaaaatcaaagggtttttgagttcacactccattacttggaacttgctacgggcttctttgagtggtataaaatcacagggagaaacaaaaagcagtgatgggtccatataacacagtccattgaggagaacscataaagaaagttttggcataaataccttaaacaaaaataatccagttggaaagacttgttttaatcaaacatttccacccaatgagatcactggcatgaagtctgagaaatcagcattttatgaggagccacagcatactagtttaaatgctacatttcctctaggtacatatggatatacatcccttcatgtacattgtagcataaaaagaggcacctcactgtgcaggtcaagctgctgctgcagccactgatgtacccattagaggggccacccaatgggaagaggatgaactgggcatgaagagccctgagcacct

SEQ ID NO: 131839 - DNA, 553 bp, Homo sapiens
gggaggtaactatggggtgaggagtctgctgcatggcggcagtcacaatcctatatgaaattgcctatagacactgtcctctaggacttcattcagttctaaaatcaaagggtttttgagttcacactccattacttggaacttgctacgggcttctttgagtggtataaaatcacagggagaaacaaaaagcagtgatgggtccatataacacagtccattgaggagaacccataaagraagttttggcataaataccttaaacaaaaataatccagttggaaagacttgttttaatcaaacatttccacccaatgagatcactggcatgaagtctgagaaatcagcattttatgaggagccacagcatactagtttaaatgctacatttcctctaggtacatatggatatacatcccttcatgtacattgtagcataaaaagaggcacctcactgtgcaggtcaagctgctgctgcagccactgatgtacccattagaggggccacccaatgggaagaggatgaactgggcatgaagagccctgagcacct

SEQ ID NO: 131840 - DNA, 553 bp, Homo sapiens
gggaggtaactatggggtgaggagtctgctgcatggcggcagtcacaatcctatatgaaattgcctatagacactgtcctctaggacttcattcagttctaaaatcaaagggtttttgagttcacactccattacttggaacttgctacgggcttctttgagtggtataaaatcacagggagaaacaaaaagcagtgatgggtccatataacacagtccattgaggagaacccataaagaaagttttggcataaataccttaaacaaaaataatccagttggaaagacttgttttaatcaaacatttccacccaatgagatcactggcatgaagtctgakaaatcagcattttatgaggagccacagcatactagtttaaatgctacatttcctctaggtacatatggatatacatcccttcatgtacattgtagcataaaaagaggcacctcactgtgcaggtcaagctgctgctgcagccactgatgtacccattagaggggccacccaatgggaagaggatgaactgggcatgaagagccctgagcacct

SEQ ID NO: 131841 - DNA, 593 bp, Homo sapiens
gcaccccctgtaattggaatcccttgggaagtcactattccaccaggtgcagaggttgttatccaccattcacagctaccatcacttttctcatgtaggtttcacacttggttgcaccccagataggaagagaaaggtgatggtagctgtgaacactggcaaacaacctctgtacccagtggaatactgttgggcaaagagatattctttgtccagagtacgggcacaggtacctctgtaataccccatgatgcaaagagtttccagtaaaatgttaatgcatagaatgaggcacaagaaaaattccaattgtattggctcttcttgcttcccactttcacaggtgtactcccagaggtagacattaaagctcaaaaaagtatatttgattactaagaaatatattaatgtaaggagggttatattttaaaatatattagtattttctcctcttttgcaattctrtatacatgagcttgtctctgcttagcttgaagcatccatttgacttggggagtagggttagaattcttacattagaaatacaagagagaagaagattcaatattcagtttctaatacttatgaagaga

SEQ ID NO: 131842 - DNA, 472 bp, Homo sapiens
actagctcatgttgtattacccttttcacatactgctgaattcaatttgctagtattaaggattttcatgtctatgtttatgaggtattttgatagggagttcctttacttgaaatgtctttgtctgattttggtrtcaagctaatgctgacatcataataattggtaaatatattcttaccttatttttttgaaagattgtgtataagattgtattatttcttccttaaatatttcatagaaatccctagtaaaacaatcttagtgagttttcttgtcgggaaggttttcctttagagatacttatattttcaatgtcttctgtgaaggtttgggtaagattttttttaaaaaattctaataaattatttcaattaattagcattaattttattcttttttttcccttttgtatgtgttggatctgtagtaatgtacctatttcaacctaaatgtgggtattttgtgtttt

SEQ ID NO: 131843 - DNA, 472 bp, Homo sapiens
actagctcatgttgtattacccttttcacatactgctgaattcaatttgctagtattaaggattttcatgtctatgtttatgaggtattttgatagggagttcctttacttgaaatgtctttgtctgattttggtatcaagctaatgctgacatcataataattggtaaatatattcttaccttatttttttgaaagattgtgtataagattgtattatttcttccttaaatatttcatagaaatccctagtaaaacaatcttagtgagttttcttgtcgggaaggttttcctttagagatacttatattttcaatgtcttctgtgaaggtttgggtaagattttttttwaaaaattctaataaattatttcaattaattagcattaattttattcttttttttcccttttgtatgtgttggatctgtagtaatgtacctatttcaacctaaatgtgggtattttgtgtttt

SEQ ID NO: 131844 - DNA, 577 bp, Homo sapiens
ttatatgcactagattggcaaaattaagagatctgatgataacagtgtctccaatattatatatgaaactctctttatacttttagatagaatgctgatacacataagaattttggaaaacaaaattagcatctcacacaataaaatatatgcacatgataaggtccaacaatttctcttctgaagtagagaaaatgtgggctttgtaaactcattgataccttgtctttctttttatagactgattttcctagtctttgaaagagtttactaaagattgaaattattcgttcattggatatacagtattayttaatagtaaaccatcctggcctgatgtttttaagataatgttttaattattaatttctttaattaaatataggttataggtccaatcaagatttttattttttagtgaaccacttttggtaagatatgtttttctggggttgtgttcatttaagctttcaatttagtcctgttttgagagaccccagctaaattggggttccagtatcaagagctgatagtaaccttgcctttttgaaaatgaaggattgctggatgtgggtgt

SEQ ID NO: 131845 - DNA, 496 bp, Homo sapiens
actcatgaatcattctttttcactcactggttcatatactgagctcgtactatttgtccagcccttgtctaaagctggaaattcagaggtaaagacatggtccctaaattcttagagttagactttgctatgaccttatatctcttttcttctatatactttgatgatagggtaatgtctttggaagtttctccttctcttcaggaagtttcaagtatattaatatataaatttagtatttcttggaacattttgattctaataggatatctaagaaatttcagataacgttcaaccatcttaatttgattcaatcatattttgtcaaaagagtaatatgataatctgttaaaaagtggtaaatttttattttacctttactaaagtgtgagaaaatgttatgttttttcagttttatytcataatgcattaaaaatgcacatttgttttttcatatatttatatccagaaatggtagaaaatgcttatttatata

SEQ ID NO: 131846 - DNA, 584 bp, Homo sapiens
gtgaagtgtagtgacagagagagaccctgtttgaagaaaaaagaaagaaaaaaaatagttaatttggctttcatatacaaatataaaaaagcaagaatagttcaatctttataagacctaaggacagaaatgccattcagccaagcaatcccattgctgggtatataaccaaaggaataaatcgttctactataaatgcaactgtrtgttcattgcatacagatttttatctattcatttgctatctattatcatttgctattcataataataaagacatgcagtcaacctaaatgctcttcaataatagactggataaagtcaatgtgttacatatacactatggaatactatgcagccaaaaaaatgagatcatgtcatttgcagtgacatggagagagctggaggccattatcctttaggaaaataacacaagaacagaaaacgaagtatcttatattctcacctgtaagtgggagctaaatgatgagaccacatggacacatagaggggagcaacacactggagcctatcagagagtggagggtgggaggagagagaaaattaggaaaggtaactagtgg

SEQ ID NO: 131847 - DNA, 519 bp, Homo sapiens
gaggctccactgagatgatgtatgtgtgttgtaaaccacaatagatagtagataggaaagatataattataggagtcattttgaaaaaaaagaagtgatagattttggcaatagattccatgtgtggagtgaaagagatgagtcagagtttagtcattaacacattctgttctattttggccatatgtatttatgagactataaatgaagattagcattcactaagaggcttattggtaaaacagttttctatgttggccttttgtactataactctcaaacatttcatagctggaaaatcagtcattttaattgtgtttgattactgagttctatcagtttatcacaaactgatatacayagggtttgaataaggtatttgattttgtatgaagaccttggccttgctcttcagtgtcatccttggatactcttgtcaccttcagcagctatggtttactagtgattgccttgcgtaaggagtttatttatttatttatttatttaatttatttttga

SEQ ID NO: 131848 - DNA, 480 bp, Homo sapiens
gcctacttctttgttcttcctcaatattattttgggtgtttggtgtcttttgtggttccacgtaaatttttgatttttaaaatttctattaacaatgccatttgtgttttaatagagattgtctgatcagtttggaaaatatggacattttaataattgtaattatttcagtcgatgaacatgaaatatattttcatatrtctgtgcctttaatttccttcatcaatgttttataatttccactgtagaagtctttcaccactttggttaagtttattcctaggtcttgtattttttgtgctattatgaatggagttgctttcttaatttccttttggagagattgtttttgtgtataggaatgctactgagtgtgtatgttgattttatatcctgcaactttacttcattcattcattagttcttgttttttttttttttttggttgagtctttaagattttctacatatatgatgata

SEQ ID NO: 131849 - DNA, 585 bp, Homo sapiens
tacatttcaatgatttttaatgtagtcaaagtcataccatcactacaatataattttggaacattttcatcatccctcacccaaagaaaacccatatccattagctatcattttatattcatcccaccccagtccctagcaagcactaccttactttatgtctggagtaggatttgcctactctagacatttcatataaatgaaatactacatgtggccttttgtatttggcttctttctactcaccatgttttcaaggtgtattcatgttatattcgtacttcatccctttttctggctaaataatatttcattgtatggttataccacttttttttcgttaacttttgttttaggttcaggggtacatgttcaggtttgctatataggtaaattgcatgtcgcaagggtttggcatacaaattatttcatcacccgggtaataagcatagtacytaataggtagctttcagccctcatcctcctctcaccctccaccctcaagtcagccctggtgtctgtttttcccttctttgtgtccatatgtactcaatgtttagcttctacttataagagaatatgtgg

SEQ ID NO: 131850 - DNA, 585 bp, Homo sapiens
tacatttcaatgatttttaatgtagtcaaagtcataccatcactacaatataattttggaacattttcatcatccctcacccaaagaaaacccatatccattagctatcattttatattcatcccaccccagtccctagcaagcactaccttactttatgtctggagtaggatttgcctactctagacatttcatataaatgaaatactacatgtggccttttgtatttggcttctttctactcaccatgttttcaaggtgtattcatgttatattcgtacttcatccctttttctggctaaataatatttcattgtatggttataccacttttttttcgttaacttttgttttaggttcaggggtacatgttcaggtttgctatataggtaaattgcatgtcgcaagggtttggcatacaaattatttcatcacccgggtaataagcatagtacctaataggtagctttcagccctcatcctcctctcaccctccaccytcaagtcagccctggtgtctgtttttcccttctttgtgtccatatgtactcaatgtttagcttctacttataagagaatatgtgg

SEQ ID NO: 131851 - DNA, 524 bp, Homo sapiens
cttcacaaataatattatttcatgcctagaaaatctcagaggctcatcccaaaggtttcaagaactggaaaaacaaacacmaacaaaacttcagtaaagtttcagaatacaaaatcaatgtacaaaagttgtggctgggtgtggtggctcatacctgtaatcccagcactttgggaggctgaggcaggtggatctgaggtcaggagtttgccaccagcctggccaacatactgaaactctgtctttaccaaaaatacaaaaattagctaggcttggtggtgtgtgtctgagttaatttttgtataaggtgtaaggaaggggtccagtttcagttttctgcatatggctagcatggttttccctacaccatttattaaatagggaatcctttccccattgcttgtttttgtctggtttttaaaagatccaatggttgtagatgtgtggcattatttctgaggcctctgttctgttatatttgtctatatatctgttttcgtaccagtaccatgctgtttcagtta

SEQ ID NO: 131852 - DNA, 503 bp, Homo sapiens
tacaaaacagtttcgtagggttatacagagtttcagggcaacctttgaagcctcagggcagaaaagtatgtcttyaagtagaacccccaaggcataatccataaagagataaggactgagtttgactacatcaaaataattcaagtttcctattccacaaggaatactacacacaacattaataaatgactcgtagactgggagatcttcacataaataaccgacagaacattagtttctagaatatctaagaaactctcaaaaatcttcaaggaaaggacagaaacccagcagaaaatgaacagaaaaaggtatgaataggcaattcatgaaactctaatggtgaaaaactgtttgaagagatgcttagtctcactaataatcagataaataccaattaagactatcaggatatatcacttgatactattcatattggcaaaattcaagcattaaagatatcatcagctggcaagaatatagagctataggaaccctcatgc

SEQ ID NO: 131853 - DNA, 550 bp, Homo sapiens
gtctttcataattctttcatgattctgtctagatagaagggattgatttcagatgttggagcatcagggtagggttcactctgcataaaactctctgtgggtacaaggatakgtggagaattagagccttggggtggtattgacaaagaagtacagataaattcccagagaatggatcccaaagcagcatcttgtctgacacccatttctacttcttccctggtctgagaccatacagctcccatgggccagcagtcgctctcagaccttcccagtcccagcccaccccgtaagctgcaaatgggttgaggcctgcagaagttctttgcaaactggaaagcagtggctctcaaagtttgattctggacttggcagtgccagtagcacctgttagaaatgaaaattattggctcccaccccgtacctactgagtcagaaactcgggctgtggtcccagcactctgtttcaataagctctccaggggattctggtggctgctatagttttaggaccactgccacccagttacagcattattcctttcctgaa

SEQ ID NO: 131854 - DNA, 550 bp, Homo sapiens
gtctttcataattctttcatgattctgtctagatagaagggattgatttcagatgttggagcatcagggtagggttcactctgcataaaactctctgtgggtacaaggataggtggagaattagagccttggggtggtattgacaaagaagtacagataaattcccagagaatggatcccaaagcagcatcttgtctgacacccatttctacttcttccctggtctgagaccatacagctcccatgggccagcagtcgctctcagaccttcccagtcccagcccaccccgtaagctgcaaatgggttgaggcctgcagaagttctttgcaaacyggaaagcagtggctctcaaagtttgattctggacttggcagtgccagtagcacctgttagaaatgaaaattattggctcccaccccgtacctactgagtcagaaactcgggctgtggtcccagcactctgtttcaataagctctccaggggattctggtggctgctatagttttaggaccactgccacccagttacagcattattcctttcctgaa

SEQ ID NO: 131855 - DNA, 544 bp, Homo sapiens
caaataagtagttgagatgagaaataatgataggctgattgtaacagaaaatgaaaaaagagaaacttttaactttcttcatatcataaaagtaatataygttatttgttaagaagtgacatttgtaggaagaaatgcaaggaagaaaaaaattgaccataactcctcaacctagaaaaaatcatggccactttttcttctgtgtatattcctttcagttattttctatgtacatgatgacaaattctctatagttatgtattatttttactcaatatcattagatcattagcaggtccctataccattcaaaattattgtaaaaactatgtttgatggctgtacaatattctactgtatagctattgtgcaatttatttaattagtccctcactgatgtgtttaagattgattccaatacctagatagaaagggaacttgaagattaacctgttaagatctgttttcagaaagtcacaaaacatattagcatatcaaaagtcatgagaattctgtggtaaagaataaaggccttgttttaaca

SEQ ID NO: 131856 - DNA, 614 bp, Homo sapiens
tatatgtgtgtggtatatatatataaatagagagagagagagaaatagtttcaaaaggccatgtaacagaaaggggtttgttcctttctcccctgaactatcagagaaatgataagagaacagaycttgaacacaatgcctttaggttgtcaggccaaccatgcactctgccactggagttgtgaaagtcttgaagggaaagatcacagctattttacttaccaagagataaaactaccatgtgtagaagagctaggcctgagagctgtcatttcccctctgacttctgcttgctgcagtctgctgaaagatgttatggctgaccgaccctcaaaaatagacactgtgatggtgatatattgtggcccttgaagaatttaattgtcaaattgacatttatcaaaaggcttagtgcatttaaaagataaattgtgcaagtttggttcagatcaaagagcccctgcccttctccattcatagcacaggccggcttcagcaggcaagtcgtgtgtgaaaaatgatccccttccactcccagctcctttaagcactgcactggtgacagataatcagaaatttaagtgttagcctcctcttcagaaagttcttaaaat

SEQ ID NO: 131857 - DNA, 380 bp, Homo sapiens
  misc_feature (1)...(380): n = A,T,C or G
nnnggcttaactattcgctaggcatgttctasatgtagggttggagagtacaagacaacccctgttctggtggaacattctgcttgtgctggaggggtgatagacaataaaataagtacgcaaataaatgaataagataatttaaggtaagtgcagtgaaggccatgagacagggtaatgtggttggagtcaggctgcctgggacaattctataacttacaaagcatgagcaagtggtataacttttgaagatctcagtttcctcatctgtaaaatggaggaatcatgcctacatcaacagattatttgttttatataaaccctagggcattctaatagttggagatcaagcaaaggaaaaagagccagtagaaaagact

SEQ ID NO: 131858 - DNA, 502 bp, Homo sapiens
tcagttcagcagatatttgttgayggcctgttatgcataagacacacagttattttccccttcaatgtgccctgattgcttccatgaaagatggtagtgtgtgggaaggatcaggcaggctgatggggttcagaaaccaaagcaggtttgcggggagccttccccacttcttgagtttctgctggccagcagccttcctgtccaaaactcttttcaactgattctgggcatgtcctcttctctcaccttcttcctcctctatctgttgggaaaaagggttggcagcaaactgcagagagtaatgtccagctgcaagatcttaaactgagttcagagacatacaaggaatgagcaaataatgagtccactgggtcatctagggaaagaagactctttgagtctgagcccaactttagtctcttaagaaaactaaattgatgaatagaaaacacagaaaaaatctactttttttctaagatctgtgagtgggtcatacctgttg

SEQ ID NO: 131859 - DNA, 505 bp, Homo sapiens
ttattttccccttcaatgtgccctgattgcttccatgaaagatggtagtgtgtgggaaggatcaggcaggctgatggggttcagaaaccaaagcaggtttgcggggagccttccccacttcttgagtttctgctggccagcagccttcctgtccaaaactcttttcaactgattctgggcatgtcctcttctctcaccttcttcctcctctatctgttgggaaaaagggttggcagcaaactgcagagagtaatgtccagctgcaagatcttaaactgagttcagagacatacaaggaatgagcaaataatgagtccactgggtcatctagggaaagaagactctttgagtctgagcccaactttagtctcttaagaaaactaaattgatgaatagaaaacacaraaaaaatctactttttttctaagatctgtgagtgggtcatacctgttgacaaaagtcagttggaatggtagttgccaggagctaggaggaagggaaagtg

SEQ ID NO: 131860 - DNA, 624 bp, Homo sapiens
cttgcatttggattgatggatgattaaacatgtgtttgaaatcatagtctgagtttcttttcacaaagcttaagttccctggtccattacctgatgtagttcatgtttcgatgtcaacacaaaactcttgaccaagaagacaattttgcattttctatacaggtgaccaaataaaacatctccatattacgatacccgccacacactccacaattgctagccactgtgtgtatgtgtgtatatatatatatatatatatatatatatatatatatatayacacacacacacacacacacacacatatatcttaggtatattgtctttattctaggtgatgctgtcttttagtattatgcactcaatgtaaatgattttttttcaagtttgatctcattgtagttagagggttacctaaacttgccctaagcaactcttgttttacttacctttacagatttgcttttttttttccttttaatcttattggaaaccagaaatcatacagatttctgtatatcagaaagtatacattgtacttagaatggattcagaattcagggactgtttgttttgtaataattttaaaatatgagtgcctcttgggtcacatcatattgaaat

SEQ ID NO: 131861 - DNA, 594 bp, Homo sapiens
tttgaattttaggtcatcagattaaattttactactgaatcaagtgcagttatatatagttccttgcccaggggatatatccctttattccttgaagattttagctcctggcttgctgtctacaggttcctataaacatcaagcccaaatttcagttgattaatataatcatttttttttttttctcagagttaattcgaaggtgatggggaggacagaggctgtactccacgtggtcattcaggtattcaggctgatggaggctctgttaaattcacaccatggcttctaacattattctggaggtcagtgtcttactggaatatgtgaaaggagagagtataggatcaagacaaacgtttttctgaggcaggcagggagggtgggaaaggtagtctgatgagagtgccaggagtaaaggagtgagttagtgaatagcggttctttaggcaccggctatcagttttgttctttcccccatccactgatacctsctagaaaaagataacctgaagctcccctcattcagtgcacccacttcaaaggtcaggatctccagctactacatggcacattgctactcatgtaaacatg

SEQ ID NO: 131862 - DNA, 640 bp, Homo sapiens
atgagcttcacagaacctgagagttcccatagagtaaatgaacaggactcaggttaagaatcattgtccttggctgagaaaaaaacaaaacaaaataaacttcttatttccatttaggtacagttgtcttacacccaaactggcacttttctaggtgtagcctctgacctttgtgacgcttagaggtcaggaaattctttagggatcctcaaaaaagatagaattattttttattgaaaaacacacacaaaatcaaaacagaagaccaaagatgaagatcaacatggtgtcaaaccagatttctatcaactccttatttagaaaaaatgtaagcctaggaatattttgtttttgaaatagagccatccccttagcagtgaagaaacrttgaaaaaattggcctctgctatcaaggatggaatttggattgtaggtctgctctgatgtcatcattttagaggatgagtaaaaggaatcataaggatatatctttcaacctattataagacgtgattaggaggtttaaggtaagattctggaacctcttggggaattattgatttggaatttcccatatacagtaaacaaatatgcagtgtttccctcttgtctctattcatcattatcttcagctgggttt

SEQ ID NO: 131863 - DNA, 428 bp, Homo sapiens
ttgttgcatctatgttcatgagagatatcagtctgtaattttcttatcatttccttgtcttgttttggtatgagggtaatattgactaaggaaattcatctttaaatgtttggtagaagtcaccattgaacccatctgggcctggcactttctgtttggaaggttatcaattattgatttatttctttaatagatgtattgtatatttcttgtatgtgaattttggtagactgtgtcttttaggaatttggtccattttatctaggttatcaaatttgtgggcataaagttgttcataatacttttatyatctttttaatatccattggatctgtattgatgcttctttttttatttctgatgttaataattagagcctgctttagttctttgttagctaccctgactagaggtatatcaattttatt

SEQ ID NO: 131864 - DNA, 625 bp, Homo sapiens
atctttgcctattcttcatagtctggagaaaatgaatgatgataatgttactcatctacaaaagttcagttttctccataaacacagctgtgtcgtgaattaagcaaagtcaatatgtgaaaacttagattgactgaaaaataaactgaagatgattatttgtaccataaaagaattctgtaccataaaaaagagtcatcatggaattaytttgaattgtgaggtccattaatgatcctgcaatgcaattctgtttattaaagatgtgattagcaggcaactttctaaggcctcatcagctgcatagagaaaggtataatcacactgacagttctaccttctcttttgagaaggattttgtttatttttccaaagacaaatcagttttctgtgattattttatcattgagatatgaacttatatataaactaatttccccttaaattgactttagaataggaaaacaagttctattatttcaaggctagttaaaatacttttgcctaaatgaccactttattctagaaaaaaataatggagacattagtaaggatatggtttttaatcacatcatctgtttccaacatagccttgaatctaaaggattaatgtacactccacctt

SEQ ID NO: 131865 - DNA, 589 bp, Homo sapiens
catatgaaaagatacccaatgtcattaattggtcattagaaaaatgcatatttaaaccttagtgagatgacactatacatccactagaatggttaaaattatataaactgacaacacaaaaattttgctagtacatggagtgcctggaactcgtatatttttagtgggagtgcaaaactgtgcaacacctttggaaaacagtttggtagtttttgtaatctagtttttatatagttaaacacttaccaaaggactcagcaattccattcttaggtatttcaccaaaggaaatgaaatcacatgaccatacaaatatttgtacaacttggtccttagatatataggatgatgcattctaaattctgttcttaataccctttgttggtcaagaattttaattagatttactattcttttcctttcttaaaggacacacccagaggatcccatagtcatgggcktactttggtacctcccttactgtgcagtggacagatgctctcctggtctgatcctatgctgtgtggtatttcatgatggtgggtccagcattccataagccatcggatagtggtagtggtacaggcag

SEQ ID NO: 131866 - DNA, 575 bp, Homo sapiens
tctgaattggcatctcttcctccaaaggcactgttcatccttctgtatcatgtcctcggcctcaaaatgttgacctttgkgtactctatctatgagatccctacagtttggccaatgggaggcacaaacaggaaattagactgaggacaagaaaatgaggtcaaggcttttattccccttctcacccctctaccctcatatattggctgtattcctctactgaagcccaaagctcctgcaaggcatctctcttcacacatttctctgggctccagtaacaacttccactgtctatttcgaaagccttctccaggcttgtaacaatgttagtcagggttctctagagagacagaatcaatagcatagatagataatagatagatagatatgaggggatttattagcaaatttgactcagagattatggaggctgagatgtcccatagactatctcgaagctagagacccagaaaggccagtagcacagctcggtccaagtctgaaggcctcacaaccagggaaagagatggcataacactcagtctgaggccaaaggcctcaaagtccaagagacc

SEQ ID NO: 131867 - DNA, 575 bp, Homo sapiens
tctgaattggcatctcttcctccaaaggcactgttcatccttctgtatcatgtcctcggcctcaaaatgttgacctttggrtactctatctatgagatccctacagtttggccaatgggaggcacaaacaggaaattagactgaggacaagaaaatgaggtcaaggcttttattccccttctcacccctctaccctcatatattggctgtattcctctactgaagcccaaagctcctgcaaggcatctctcttcacacatttctctgggctccagtaacaacttccactgtctatttcgaaagccttctccaggcttgtaacaatgttagtcagggttctctagagagacagaatcaatagcatagatagataatagatagatagatatgaggggatttattagcaaatttgactcagagattatggaggctgagatgtcccatagactatctcgaagctagagacccagaaaggccagtagcacagctcggtccaagtctgaaggcctcacaaccagggaaagagatggcataacactcagtctgaggccaaaggcctcaaagtccaagagacc

SEQ ID NO: 131868 - DNA, 575 bp, Homo sapiens
tctgaattggcatctcttcctccaaaggcactgttcatccttctgtatcatgtcctcggcctcaaaatgttgacctttgggtactctatctatgagatccctacagtttggccaatgggaggcacaaacaggaaattagactgaggacaagaaaatgaggtcaaggcttttattccccttctcacccctctaccctcatatattggctgtattcctctactgaagcccaaagctcctgcaaggcatctctcttcacacatttctctgggctccagtaacaacttccactgtctatttcgaaagccttctccaggcttgtaacaatgttagtcagggttctctagagagacagaatcaatagcatagatagataatagatagatagatatgaggggatttattagcaaatttgactcagagattatggaggctgagatgtcccatagactatctcgaagctagagacccagaaaggccagtagcacagctcrgtccaagtctgaaggcctcacaaccagggaaagagatggcataacactcagtctgaggccaaaggcctcaaagtccaagagacc

SEQ ID NO: 131869 - DNA, 575 bp, Homo sapiens
tctgaattggcatctcttcctccaaaggcactgttcatccttctgtatcatgtcctcggcctcaaaatgttgacctttgggtactctatctatgagatccctacagtttggccaatgggaggcacaaacaggaaattagactgaggacaagaaaatgaggtcaaggcttttattccccttctcacccctctaccctcatatattggctgtattcctctactgaagcccaaagctcctgcaaggcatctctcttcacacatttctctgggctccagtaacaacttccactgtctatttcgaaagccttctccaggcttgtaacaatgttagtcagggttctctagagagacagaatcaatagcatagatagataatagatagatagatatgaggggatttattagcaaatttgactcagagattatggaggctgagatgtcccatagactatctcgaagctagagacccagaaaggccagtagcacagctcggtccaagtctgaaggcctcacaaccagggaaagagatggcrtaacactcagtctgaggccaaaggcctcaaagtccaagagacc

SEQ ID NO: 131870 - DNA, 597 bp, Homo sapiens
tgcacaaaagcatttcatcatcaaacggaagtgacatatacatgatcaggcccaagcaagccccacaaattatgtagctgattcttctgacagtcttagatcctattagtcacacggaagacaggagatatggccttgagtccacgaaaagtaaagagtttgaattgatagtctcgtgtatatcaacrtcattagaaatccacattctctgtgaaatggaggactatgaagaaaatatatggtagcaaagaacaatagtaagcaaaatcttctatctcagcctgggttctgtgtgggaaacaatgaaatttccctgaattttttttaaaaaggaaaggcatgccctcgtgtagttattgggtttgaaataatttctctttatttatagtcaaggaaatcctaaaccaagatacttattcaatgatgccagagtggtaaggtatcattttcaagtgataccttatttgcttatgatggtaggtgaggcattctgtaagtccatggatggtagttttggcagaagtattgtatgcaggaaatgcaaagggaaggcagatctatatccagagtaatgtctattccagtaagaacaaaaat

SEQ ID NO: 131871 - DNA, 597 bp, Homo sapiens
tgcacaaaagcatttcatcatcaaacggaagtgacatatacatgatcaggcccaagcaagccccacaaattatgtagctgattcttctgacagtcttagatcctattagtcacacggaagacaggagatatggccttgagtccacgaaaagtaaagagtttgaattgatagtctcgtgtatatcaacatcattagaaatccacattctctgtgaaatggaggactatgaagaaaatatatggtagcaaagaacaatagtaagcaaaatcttctatctcagcctgggttctgtgtgggaaacaatgaaatttccctgaattttttttaaaaaggaaaggcatgccctcgtgtagttattgggtttgaaataatttctctttatttatagtcaaggaaatcctaaaccaagatacttattcaatgatgccagagtggtaaggtatcattttcaagtgataccttatttgcttatgatggtaggtgaggcattctgtaagtccatggatggtagttttggcagaagyattgtatgcaggaaatgcaaagggaaggcagatctatatccagagtaatgtctattccagtaagaacaaaaat

SEQ ID NO: 131872 - DNA, 571 bp, Homo sapiens
agatctcagctgtcataaagttcatattctaggtatacatcatttttgttaagtcactagagattgcattacacgaactagataaatattccctttattcagtcaataagtgtgttatgacacttttttgcagtggtgtgatcatagctcaccacagccttgaacttctgggctcaagtgatcctctagcctcagcctcctgagttgttaggattacaggtgtgaacgaccgcacttggccctcttttttcttttgtaattagcttttctttctcgttaaygaggtgcttcgatttttggcatttgctcagttttcaaggtacttactgctttttgttcccagtgtttccacagatttgtcaaatgcctatcaagaagatttataaatgttcgaagacatcagattatcaattccatgcttccccctctctccacaccccccaagagacctctcttctgcttccctacatcttctttctcgaatctagccagctgatacctgccacatgtgtgggttagccctctattttctcttccactgtgttactgcattccttatacattcttcatg

SEQ ID NO: 131873 - DNA, 522 bp, Homo sapiens
gaattcctcaaatatttggaaaataaccatgtttctaaataatctataggtcaaataagaaatcacaagacaaattagaaacattttgaactgaataaaaataacaatatatcaaaatttatgggatgcagctaaagcaatgcttagaagtgtgtacctttaaatacctatatcagaaaagaagtcctcaaataggctaagcttccacttcttaataaactagaaacagacaacccaatttaaaaaggtacaaaaaaatctctttctaaaacaggatacccaaatgcctaataaacagatgaaatggtattcaactttgcaactttctttttttatttattataragacagggtcttgctatgttgcccaggctggtcttaaactcctggcctcaagtgatcctcccttccaaagtgctgggactacaggcatgagccaccatgcccagccagttttggaactttcaaccttataggaaaatgcaaacaaaaaacacatgatacaaactcaccagaaacaga

SEQ ID NO: 131874 - DNA, 636 bp, Homo sapiens
attcaagttcaaaagaactagaagtgggattttatggctttgatttgcatttccctaaatactaataatgttggagcatttttttcatatgcatgttagccatttgtatatcttatttgcagaattgtctatttaattgctttgcccattttctaattaggttatttgcttattatctcttgctcagttttaagagttctttatgttaggggttaaatagcaaatgttggtgacaacatggagaaattggaaccctcatatattattgataggaatctataatggggctgcctctatgaaaagcattttggcagttcctcaaaaagttaaacacagttatataatgtagcaattccactcttaggtatatactcaaaatgattaaaaacatgttcacataaaaattgcacatcattcataatagcccccaaagtagaatcactctaaatgcccctgaatgcattcatacataaataaaatgttgtagttcatacaatgaaatattattcaaaaatacaaaagaagtactgattcatgctatgatgtggatgaactttgagaaagttatgctaagtgaaagaagtcaggcacaaaacgccacacattrtatgattgcattcatatgaaatgcccaga

SEQ ID NO: 131875 - DNA, 490 bp, Homo sapiens
accaagcattgaggatccacagcacataaagtacttcacagccagtacatatgttaactctaatctataatccacacaaacacccaggtttttttyatattttaatcaacatttttaaaagaggaataattgaggctctaagaggctaaacaactggcctggcccacggccacaaaggtgctaaggatcaagcatgatttttgctctagtttgtccaactctaaagcctaagctctttcttactaaatcatgaacatgaacaacagtagggtagaattcttcaaagcagatatttgggaagtaactacttatcttttggcatcgcttcctttgaaatggcttaaagaggcacttaacacatgaaaaggacaataatggataaaaaccagtacacttagtcaggcactcgacattgacccaaagtctctgcctctgttttctctgtcttaacttgcctgaccccacggagaaggaagggtggaaggttata

SEQ ID NO: 131876 - DNA, 543 bp, Homo sapiens
aaattaatggatttattaaaaggatttgatgttatacaattataggaacttgttagtgtctgtaaaactctcatctttgaatttgatgctgaagctgmaattgacagggcatgcagttaggaagaaaaggtgacgtaatatagggaagagccaggacaagctgtgacctgcaaacaagagctggatcataagatagactgaaacacttcagtgattactacctctgtgcttaatgatatgcatttcctgcaaggagagctattgatattgcccctcatcacagaacttgacacactcctggctcaggaattagtggaactgaaggaggatcagggaaaggtacagcagttacatatttggttgctgtacttacttttccccacaaaattagctagcagataagcaataacgtgtgtgagctataaaatggctgtgttttcacttccacctttctaatctggtacaagaatgtttctattgattattcgtaaccagaaacatacaggaaatggaattatgaaaaatgtgggtcagcctagcaaa

SEQ ID NO: 131877 - DNA, 559 bp, Homo sapiens
gtgttctcattgttcatctcctgcttataagtgagaacattcagtgtttgcttttctgttcctgtgtcagtttgctgaggatgatggcttccaggtccatccatgtccctgtaaaagacatgatctcattcctttttatggctgcatagtattccatggtgtatatgtaccacattttcttgatccagtctatcattgatgggcatttgggttgattccatgtctttgctattgtgaatagtgctgaaatgagcatatgagtgcatgtatctttcacgaaagaagacatttatgcagccaacaaacatgaaaaaaagcttaacatcactgatcattagagaaatgcaaatcaaaaccccagtgtgataccatctcacaccagtcaggatggtgatattaamatgttcaagaaaacaacagatgctggcaaggctgtggagaaataggaacacctttacactgccttctatttttctatacagaagcttgtcacttcttaaaactaacattgacagtagtatgtcagacttatcacagttggtagcatttttttaataat

SEQ ID NO: 131878 - DNA, 575 bp, Homo sapiens
gttggttaaaaaaaaaattatcagctcaaacttttctggtgatcacaggaggatgaggtggtaaagagttaacagtatttttaaaacaaggttaatatagtttaagcatgaaaacaaagctgctgacaatttttgatactgtttgctccctataaagatatttaatgtgggttgcatatagtgactattctgtgattatggtcctcagaattcctgcttcccaaagttcagggtggcactcttagaaagcttttrtagaacaaagtggagaagccagcataccacgcctgacattcacattcttcaggacaattacatttaataatacaatcaacaatccattcacactgcatgtacatgtgtttttttgttattttggtggggggggtttcaaatgtttatcagaaaaatttttaggaaatttaaagtagctctgattgttgcagtttcctcaggtgaaaaaagtaatgatagtcactatggtaaccaagatggagataacgacaagtaaaatcagacccatacgacagaattttgaatgcttctcttgtttctcttcctttttcaataaagtg

SEQ ID NO: 131879 - DNA, 629 bp, Homo sapiens
tgacaccagtgggggcaaacaaagaaagaaaaacttaagttgggtttaagctgggtgaatgagttcattgcatacttttcctgtgttgaaatgtttttgttttgttttgttactgagacacaggaaaataaccaaaatgtaaatctgcaatcttaaatcactgagagggctgagataaaataatctttgatgagaagttccttgcacagtgcctaacacagaacacttaataaatatttttgaataaatgtagactagggaatcagctcttaagtgttcatgaacataaatgtttacaaactgacagaaaatgtgatcttgcaaattaattttcaataaaccttttaccctcctggaaaacctttgttctgtaccacatggyttttttcttctctacactgtacagttgccagtaactgttgaaactgtaaaactcaaaacaaataaacacaaatactgactaggagggagaaagaaaagccaggagccaaaatgctctgaaatctagagattctgcgcctagtgaagagtacctgtcacttcaatattgctttcttttaggattatttgactgatctcccttatcagttgaagaggttgactcttagtcgtgagtaccttcagatgtc

SEQ ID NO: 131880 - DNA, 586 bp, Homo sapiens
aatttgagcagcctttggattgagagctctgccaagtattttaagttaaagaaccctgatcaaataaaagtgagactttgatatctgaaataatgaaatctcggattttgaaggcttggagaaacctggactaattaatccatttgaaataattttcattgctcctctcttggctgaatagaatatgcttcccttgaaagagagctgaaacttccagtagtgycttattgcttctaagtacacagggtttttaaaaaatcaattttgcttaggcagtaaaataaaaaaaagagtaaaaatattatagaaattcatgaatttaaagtgctgggggaatgcatatagaaatggatattgtaagtccttaactaaggatgataaaacataattttggattaaactgaatttttatatggatgaacccattatagtttctgtatccaacgttgtagctctatttagatatacatattttctaggttctttactagaacctcaactgaactgggactttgaatagcaagacagaccagaaaaatgttggcataatttagaaggccaacttgaaagagtataagaggtaaaa

SEQ ID NO: 131881 - DNA, 580 bp, Homo sapiens
aacacttccaaattattatgtgggggccagcattaccctgataccaaaatgagatgaggacacaataaaaaaatagaraactccaggcctcataaacataaatgcaaaagccctcagtaaaatactagcaaaccaaatacaacacattaaaaagatcattctccattattgggtcggattcatctcagggatataagaggatggttccacatatgcaaatcaaacaatgtgatacttcatatcaacaaaataaaaggacaaaaaccatataatcatttcaatagatgttgaaatagcatttgataaaattcaacatctcctcatgataaaaactctcaaccaattgggtatgaaagggatatgtgtcagcacaataagcacccatataagacaagtccacagctaatatcatactaaatggggaaatactgaagttctttccaataaaatctgtgattctcaaaatcacaggcaacaaaagcaaaagtagacaaatctgattacatcaagctaaagagcttctgcatagtaaaggaagcaatcaacaaagtgaagacacaaagtgaagaaacaagtcaga

SEQ ID NO: 131882 - DNA, 604 bp, Homo sapiens
gtaccagaaaacatccaagaagggagctggaactaatgatgagcaagttgacctgctgtgtctaccagtctcatcattgggacttttataatttatcccttagattgttttaatagcctcttagttgttcttcctgctaagctctctttccacatatccatctcccagcagaacacatccttgccactaatgacggcctttccyacttcgttctgtgcatcccaggtatgcactctttacacagttactagtaattgaccaagcttaatttgtatttttctacttcctttacctcattcatattattccctttgcctaaatgtttctttcttttcttaagtcctatctatcctttaaaattcagtcaagtgtcatttattacagaaagcctttccaaacttccatctgctctggatgtgcatgacagtataatgccaatatgttccctattcatcaaggctttagtcgtcaggttctttcaactagagtctcagatcctcaaagacagctatcacatcttcttaactgttgcttgcctgaagtataatattataagtggagctcagtatccaggcacattgtgaagaaaatcaacaattagtgt

SEQ ID NO: 131883 - DNA, 604 bp, Homo sapiens
gtaccagaaaacatccaagaagggagctggaactaatgatgagcaagttgacctgctgtgtctaccagtctcatcattgggacttttataatttatcccttagattgttttaatagcctcttagttgttcttcctgctaagctctctttccacatatccatctcccagcagaacacatccttgccactaatgacggcctttcccacttcgttctgtgcatcccaggtatgcactctttacacagttactagtaattgaccaagcttaatttgtatttttctacttcctttacctcattcatattattccctttgcctaaatgtttctttcttttcttaagtcctatctatmctttaaaattcagtcaagtgtcatttattacagaaagcctttccaaacttccatctgctctggatgtgcatgacagtataatgccaatatgttccctattcatcaaggctttagtcgtcaggttctttcaactagagtctcagatcctcaaagacagctatcacatcttcttaactgttgcttgcctgaagtataatattataagtggagctcagtatccaggcacattgtgaagaaaatcaacaattagtgt

SEQ ID NO: 131884 - DNA, 604 bp, Homo sapiens
gtaccagaaaacatccaagaagggagctggaactaatgatgagcaagttgacctgctgtgtctaccagtctcatcattgggacttttataatttatcccttagattgttttaatagcctcttagttgttcttcctgctaagctctctttccacatatccatctcccagcagaacacatccttgccactaatgacggcctttcccacttcgttctgtgcatcccaggtatgcactctttacacagttactagtaattgaccaagcttaatttgtatttttctacttcctttacctcattcatattattccctttgcctaaatgtttctttcttttcttaagtcctatctatcctttaaaattcagtcaagtgtcatttattacagaaagcctttccaaacttccatctgctctggatgtgcatgacagtataatgccaatatgttccctattcatcaaggctttagtcgtcaggttctttcaamtagagtctcagatcctcaaagacagctatcacatcttcttaactgttgcttgcctgaagtataatattataagtggagctcagtatccaggcacattgtgaagaaaatcaacaattagtgt

SEQ ID NO: 131885 - DNA, 507 bp, Homo sapiens
caaggcaacaaagtggctttgtagtgtaactgattatttaaatattacatgactggctaaaagtggatgaaattgcctagcttccacagtrgtagtaatctacttctaactccattgattttatgtcattgtgttttgttaataaatgttattgaataaaataccagatccatagtaaataatctctggtgtttgtattttttacaaaggaccatgaacataatgagtggtcagtaaatatttgaaaacaaaaataaataatgtagtattctgagacattcaagcaaactgtaattttaagactatgttagacaggacttctacttgcagaaagctaagacttgtcacaactgtaagctggcaaagtggataatagttaatgagattagagtctttactcttaggtagcttcaccacttagaaattttcaccacctagatgacagtaacttttaataataaattatttggagttttactttgatagtaatttagacctgaacctgca

SEQ ID NO: 131886 - DNA, 604 bp, Homo sapiens
caaaattttataaaaggtgctattcagccattatctgctaagattatatattgtgagttatcatgtgtctactgttattttatgtcattttcaataatactgaaaaatgatgtgttactttgctttgctcatatcccttggagttgattatgtaagattgactaaaagtgtcaggaatagtctgtgactaattatgggcctctttgaaatatcgagaaccttctttatcacatcagagtgagctcatctttctaagccttctgttattcttttggtttctcaaatattgtgatctttttcaagatttacagaaattttaggaatagatactagaacagtattttgttctatgtaatattaatcccttaaaagttttagttaaactgtattgcattgtcctgaaaatacttttctaagcatgtctttatttatatgattatatccattgtatagagtggtattgagattaaggcttttaaaggagaaagaccatgtcaaagagtccttctataatagctggaaattataaataaagcttrcactgaactggaaatattcaaatcctgtagaagtttaagagaaaaagtcaggtttaaaggacata

SEQ ID NO: 131887 - DNA, 416 bp, Homo sapiens
gtgagtgtgtgataaaataggaggcctctttgacaacattttaagaaattaaactacaatagtaaaagtgacagggacaccttcctggagaacagtcctcatttttggtgcctctcacatggtatggaaaataatgatgaaaagtctcacctgggcacctagaggaatgtggccatcaaacwttccacttccaatttctgttcataaggactcctgtctcttctcagcctggatcaataagaattgagttccccatgagcagacagaatgtgaacatctgaacttgaaagcgttgcctattctttatatatacatggtggtcccttgcattgtaacatttccaaatatgtgtggggaaagtggagatctaagtccctcacacaaaacctgttaggaagacccaagggcaggttaga

SEQ ID NO: 131888 - DNA, 381 bp, Homo sapiens
gttattttgctattgttgctgcgactccattattgataattatgatcacatatgagactggattccatctgggtaccacgtgaaarcaggcctgcccaaaggaggctcaggtacaagcctttctcccttatttttatggtggttccacattttttgtaggcaaaccatagctaactcagatgtgaagcctaactagtatgtgaactttactatgatagcaatacagttagtactcctgaatttcctgctatattaatttcacaaccagagaaatgaaataaaattggaacaacaggttttctcacctagtgacaagcagttcagttctgtataggtctaacctgaaccttctgtctctttcctcccagcattacagaattc

SEQ ID NO: 131889 - DNA, 381 bp, Homo sapiens
gttattttgctattgttgctgcgactccattattgataattatgatcacatatgagactggattccatctgggtaccacgtgaaagcaggcctgcccaaaggaggctcaggtacaagcctttctcccttatttttatggtggttccacattttttgtaggcaaaccrtagctaactcagatgtgaagcctaactagtatgtgaactttactatgatagcaatacagttagtactcctgaatttcctgctatattaatttcacaaccagagaaatgaaataaaattggaacaacaggttttctcacctagtgacaagcagttcagttctgtataggtctaacctgaaccttctgtctctttcctcccagcattacagaattc

SEQ ID NO: 131890 - DNA, 582 bp, Homo sapiens
tattttggttttaaaattacatatggtattatagtcacaacaaaacttaaaaaacctgattttcctttttggggggaaggcaggtctggtgccattcacaaataacttatctattgctctattgctgatgtagtctttcaatgttggtttccaagtaacttcgttcataatcggcctagcaaaacatatattcatccaggaaaacttatggttgctaccaaaattattattatcttaaactgatttaactctccttccttatattttatgttataatgtctagtttaattttatgttgtttattgtgctatttttctgaaacataattaatgcttgttatttgcacctgatactgtttcactgcttttgtttccactgtcctctctctttaatattctctgtsatcattgtagacttgcattttcatctcctataaattcattctttttgaatctcttattttttctagctaattttacaatattcacactgcttaaacacttttcaaactttaataaattttgaaaaacgtataaataagttcttgatatatagcttattacctagtacttatccatgtca

SEQ ID NO: 131891 - DNA, 574 bp, Homo sapiens
cctcaagaattccttttgttcaattctgggaggagctcctcctctgtaatcaaccagattagcatggacctctatgtttctaccaactctccttgtcccaacagaacttctgttctgttgaagaatgactgtcactggtgttactatttttagataatcaatttttacagctgaagttcatcatatacatatattatctattaaytgtgtcttacagagattgtctttctccatcgtctacttcacaaatatcacctgttactaataggaagaattgtccttctttcatttgttgcccatgaacttgcctatgctttttgactatccaaatctaccaccaagggtttttatgaggatgaaatgtatgtatgcatatataatacaatgtaatgtttggcacaaatggatgattgtttttgttgcctctccatgccctgcaaaggaatccatagcctttgaaatcacatgtgttattactactaggatccaaggtctcctgcaaatttcaagacaaaacaacccctagattaagagatgcccaccaaaatctctaagtctttctgcaggaactaga

SEQ ID NO: 131892 - DNA, 574 bp, Homo sapiens
cctcaagaattccttttgttcaattctgggaggagctcctcctctgtaatcaaccagattagcatggacctctatgtttctaccaactctccttgtcccaacagaacttctgttctgttgaagaatgactgtcactggtgttactatttttagataatcaatttttacagctgaagttcatcatatacatatattatctattaattgtgtcttacagagattgtctttctccatcgtctactkcacaaatatcacctgttactaataggaagaattgtccttctttcatttgttgcccatgaacttgcctatgctttttgactatccaaatctaccaccaagggtttttatgaggatgaaatgtatgtatgcatatataatacaatgtaatgtttggcacaaatggatgattgtttttgttgcctctccatgccctgcaaaggaatccatagcctttgaaatcacatgtgttattactactaggatccaaggtctcctgcaaatttcaagacaaaacaacccctagattaagagatgcccaccaaaatctctaagtctttctgcaggaactaga

SEQ ID NO: 131893 - DNA, 484 bp, Homo sapiens
tggaagttgtgctatagctctggagatacagggaatggccaggcttgatgacaaggagaatgggtggaatacatgtggattatgctcaggaggcattgactctttatggacagttctgggattctactgcacattttaccatcagttttcarctctcttctgaatgaaagagcaaatgaaacagaaatatgctgatatgtgcatttggagtcaagagacaagaacccacatttgtcacaggggatgtgacaaaaatcagtaatagaggaaaaacaattgagttttcaaatgcgttagcagtgagggtagatgaaaaaatatctaaaaaatacttagcatggccttttaaatataaatcatcaacaagcagcatacctgatagaggatcacatattgaagtcaaataataaaaaagaacatttagcctcttactaaagaaataagtcaaccttgctttaagagtccttcaaatgttcaagtcatg

SEQ ID NO: 131894 - DNA, 508 bp, Homo sapiens
atccgcaggtagaacttcagagtctctctgttctcttcaaatatctgcttcttccctctcgtgcccactttgcccttgggctgcagaggaatgatgagatgccgtcaggaggccacggtcctcctcattctccccaccagcctggtgagctatagagctccatccgcaactcagccaggtccccgtagtgcagaaacctagcaaaatccctgggatgtccacccatcctccagtccattctgcctagggctgacgccatctctccagcacccgcagctaggatcaatcgcctcytgctcgccctggaacaattcaatcctaagctaataccgcctctggatcccgtggtagtctggctttaggctaacgactcttccaagggtactcctgagcggagttgaatggtgcctctctcaggcctccgctggcgtagtcccgatctgggttaacccccacctcaggtcacttagatctctggcctgccctggtactgatgcccaccccgctc

SEQ ID NO: 131895 - DNA, 381 bp, Homo sapiens
tccaatttgtctgaggccctctctaatttctctcattatctcccccaactaccccccttcccaccgctcccacacacacacggcacacatgtatgcctaggattctgtccttggtccattttattcatttaatctatgctttctccttaggtgatttcatctatcctaagcttcarctgctacttttatgccacaatacccaaagctctccctgtgcttcaattttctatttttttttttttactctgatccatggttccaaccaaatatgagacatgtccctctccctcaatgtcttgcaagaatctcaaacttcatttattgaaagataaattctttatcttcttccctactccaactttttcttcttcttgaattctc

SEQ ID NO: 131896 - DNA, 599 bp, Homo sapiens
aaaaaactaaaaatagagctaccataacatctagcaatataactgctgtgtatataccccaaagaagggaaattagtatatcaaaaagatatctgcactctcatgtttgttataacactgtccacaaagccaagatttggaagcaacctaagcgtccatcaacagatgagtggatagagaaaatgtttttacacacaatggagtactattcagccataaaaaggaataagattctctaatttgcaacaatatggatagtcattatgttaagagaaaaaaaaaacaggcacagaaagacaaacatcacaggttttcacttatttgtgggatctaagattcaaaacagtygaactcatggagatagtacaaggattgttagtacaggctgggaaaggtggtaagtggtgggacagaagtgaggatggttaataagtgcaaaatatttatatataaagaatgagtaagacctagtatttgatagtacaatgggcttactatagtcaataataatttaattataaatttaaaaataactaaaggagtataattggattgtttataactcaaagtataaatgctgaggagatagattccccatt

SEQ ID NO: 131897 - DNA, 468 bp, Homo sapiens
aaaatttaggttttttgagagtagaggagtaatgtgactgtattgatgttttataggaatccacctggctctgtatggggaagagtaaaggcttccacctactaaaggcaagcagctgaggcaaaaaatagtaataatttcatctcgagtgatagtgtaatggagatgagaagggtttagagtgaagatgtttatagattacattagagatgagtattaaatgacatgaaaatattcatgttcaatttaaaacatgtacagtatgawcttaccttttaaaaattctactaaagatacacaatagaagaatgtgctaaaatgatagtattatgtctgagcacgggcttgcatagtttcactttttatttaattgctctaaaaacttagcttttttttgtaagaagaaaaattattttagaaaaaaattagagcaaatttggttatgggcagacacagcaataaagatct

SEQ ID NO: 131898 - DNA, 614 bp, Homo sapiens
agcaatgactgcaggaaagtagcagatgaaatttataaggtagccaggggctatatcatgccttagagactaatctgtagactttggcttctagtcagatgggaaataactggttgattttaagcagaagacggacatgacataatttgtattttgaaagaatactggctgttgtgcaaaggagaacaagatcagttgagaaaccagttcaaaagttactggaatgattccagtaacaaagagatgatggtggcttggactagaaggtggcaacagaagtaaagtggttcaattgtgcttttatcctaaaatcaaagtcyatgggaattactggtgaattgcatttggggtatgcaagagaagggtcaaggataaccccaaggttgctgtccagaggaactgggggaatagcactgccttttattgagatgaaaaattgccagagtagcaatttggtgaagatcaagagttcagaaatgttaagtaaattaactccaaatggagttcacaatagaaattacagaaaaaggtacacaatggacctacagatggtttccaacttacgatgtctcaacctaagatttttcgaatttatgacaggtttattgggatgt

SEQ ID NO: 131899 - DNA, 616 bp, Homo sapiens
tctatattcttcttccttcagcttcaccggttggccctgtttcctctaccttgattctctagtcttctgctattccctttttatctttmgcactgccttttatcatctggttctgtcctatttctccaccacgatgtgtgtggcctggtgatttatttagcctgtatagtgttggatctataatagctgagcccccttggacatttcttccttcctctagcctctcgaccttggtgacttctgtttcagttgcttcatgccatggagttgaacttcctacatggcagcttagggttccaaagctagtatcttgagagagagagagatccaggtggaagcattggtgccttttctgattcagtcttagaagtcacatagtgtcatttctgccacattctattggttgaaactgtcacagggcctgctcaagtttaaggagaagagcacatagacatcacctcttgatgagaaagctgtcaaagagaatttgtaaatatattttaccactgcaatttggtcttaatgacaggaaataattacaaaaagtaattatagcatgtggaaaaacaggatgattttcaaatgatgcagtttctatatttttaatatttcagaa

SEQ ID NO: 131900 - DNA, 520 bp, Homo sapiens
taataatcctggtatggatacagttcttaatcacctatctgaaagccttggaggtaracttttggaattcagattttttctgatttttaaaatgataacacagaatatccccaatgaagtctatctagcacggcattctataatcaaatacataaacatatttgcaaacaaatatatgtagatttatactaaatttgacaaatatgtataattttaatattacagtttatatagaaataaactgacaagtgaaataattggataattaaagaccaaaaatattcagatccttcttagttctaagaaaaatattcaatatacttttaaacacatacagatttgaactaagttaaagaccttgtattagtccattctcactgctatacacatactacctgagactgggtaatttataaaggaaagaggtttaattgactcacagttccacatagctggggaggcctcaggaaacatgcagttgtggcagaaagcaaaggggaagcaaggaccttcacatggt

SEQ ID NO: 131901 - DNA, 662 bp, Homo sapiens
ctcaacattctctgatgtatttgagtttaagagaccttgcctctattccacagttcactctaaatactattccctggattttgctatcatctagaactgccccacatttgaaatcttgttttggaaatttttttttctaaaggaaagtaattactgctcattatagagattttggaaaaattacccataaactcgtaatctaaaattatatcagagtcattcagtgctgtctctatctctttttattttaaattttttaaaaatttaattggcaagtaataattatatgtgtttatgaggtacaatgggatgtttcaatatatgtttaccttgcagagtgattaaatcaagataattaacacatccattaccttacatacttaygattgtgtttgtgtgtgtgtatgtgcatgtgtgtatgttaaaatccatctccttaaatcagggaatccagtggtggggatgggtttaacttcttgttggcttctcctatcctcttctagggacttatgtttgactttgtctggctttactacgtcaattccaacttcctaaccatttttcgtcttcccaaatttttgacattactttttctgctgtttcttgttctctctgtgcttatagggttataccttttattacttttagtggttttcagaggg

SEQ ID NO: 131902 - DNA, 620 bp, Homo sapiens
atacctcagactatattcaagaagaaactctaaatgaatcaagaaactacatgtgaaaaaaaacaagaaaggaaaaggaaaaaacaaacagcataagtactcaaaagaaaatgcaggtgaatttctttaaccctcatgtgagaaatgtattctaactgtgattggaaatctagagaccataaaatataaaattaataaatgtggctatataaaattttaaaaatctaaatgtcaaaaagcccataaacatattcaaaatacaactgacactagaagaagctatttgcaacatagtaaagagctattattcctaatcatgtaaaaaacttcaaaaatggatggaagaaagttaaaaaaagaatttcataggaaaatgtacaaaagatagagcacagaaaatttatttactatatataaaaatggcctataagtatagaataaasttgtcaacctcactcataattagatatgtaaattaaaactacactgataccatttctcaaatatgagattaaataaaatgtaaaagtgtgacaacatcttttggctaggtaatggagaaatagacagtctcatgcgttactggtagaaatacaactaacaaaactcttttgggggag

SEQ ID NO: 131903 - DNA, 491 bp, Homo sapiens
attgcaaggtggctcactgagatccaagacagggttgaaagtcaacagaaaataacttctaaagcaatccaggaaatgaaggaagagataacatcttaaaaagaaatcagtcacagcttctggaattgaaaacctaactgaaggaatttcaaaatacagttgaaagctttatcaacagattggcccaagcagaagaaagaatttcagaaataaagaaaaaataattttttaaaaaatgagcaacgtcttcaagaaatatgagattttgtaaagtgaccaaacctacaagttagtggcatttctaaaatagaaggagaaaaagcraagaatctaaaacatatatttgaggaaataattcaagaaaacatccctaatcttgttagagacagacatccggatacaagaaatccaaagaacacctgaaagatactacacaaaacaatacttatcaaggtgtatcatcaccacactgtccaaagtcaatgactaaa

SEQ ID NO: 131904 - DNA, 503 bp, Homo sapiens
gaaaccaaaaaagagcaggggtcactattcttacatcagataaaccagactttaaatcaacaagagtaaaaaaaaaaaaaaaaaaattaagaagggcgttacctawtgacagtgttcaattcaacaagaagacttaactaccctaaacatatatgcacccaacattggtgcactggtacccagagtcataaaacaagtacatctagacctatgaaaagacttagacagccacacaataatagtgggaaactttaacacttcatggaaagcattagaaagatcattaaggcagaaaactaacagaaattctggacttaaacttgacccttaactaactagacttaataggcatctacagaatcctccacccatcaaccacagagtatatattcttctcatctgcagattgaatatactccaagattgactacatatttagccataaaaaaagtctcaataaattcaaaaaaatcaaaatcataccaaacatactctcagactgt

SEQ ID NO: 131905 - DNA, 597 bp, Homo sapiens
tgatgaattcattatttaacttcaataaaatgtcaawagtaatttcattaaatagtatacagcttacatgcttattttaaaatcagaagttctatacatctatcaccctggcctatctcttcactttacacccacatgaacctatccaacccccctcacattctatacacacacacacacacacacacacacacacacacacacacacacacacacacacacagcatttcagtaccttctgtcactggaacctcatttctgatattcattccccttgcaggcctgctctgcaaaaagccccaatcctctgcaaaaagccccaatacagaaggactaccactggcttggatatgtagatatatttacttctattcttcaaaagataaaaggatgcctggagagaggattactacttctacttttataacttcaggagggaaaaatacagttcctggcttatcaaattgtagctgtgactgtattttcccatcaaaccactgctacagatggttatttctatggtattatttatattacgctaagttacattatgaattaaatcaacttttgaaaggaggaacagaaacctaaagaata

SEQ ID NO: 131906 - DNA, 597 bp, Homo sapiens
tgatgaattcattatttaacttcaataaaatgtcaatagtaatttcattaaatagtatacagcttacatgcttattttaaaatcagaagttctatacatctatcaccctggcctatctcttcactttacacccacatgaacctatccaacccccctcacattctayacacacacacacacacacacacacacacacacacacacacacacacacacacacacagcatttcagtaccttctgtcactggaacctcatttctgatattcattccccttgcaggcctgctctgcaaaaagccccaatcctctgcaaaaagccccaatacagaaggactaccactggcttggatatgtagatatatttacttctattcttcaaaagataaaaggatgcctggagagaggattactacttctacttttataacttcaggagggaaaaatacagttcctggcttatcaaattgtagctgtgactgtattttcccatcaaaccactgctacagatggttatttctatggtattatttatattacgctaagttacattatgaattaaatcaacttttgaaaggaggaacagaaacctaaagaata

SEQ ID NO: 131907 - DNA, 526 bp, Homo sapiens
ttttaatgtaaacatattttagcatctatttgatttttactttattttcttgatactttcagatatatatttgctttacattattctcagggtttcttatttcccgaaaacactttgaatcatttccactgattctttttcctcccttgttagtttacatgtatcatttgtatgatagtgtctggaagtaaaagggcacttgagaaacaaagttgaataaaatttcatcatacttaattctgaaaattgttttctgaaattattagctcactgctgaaatatcttcagatcaaacgttcagaacatcagctcccarggagcttcatatttagtttatggtggggtatgattgtgtatttcacaaaattcatgaaggaaatttgtacaaatttattatggattttaggccagcggaactgtttaaacttcctactctatttgttccattgagtagccttagagttgaaacagcagtttccatttttctcatgggtagatcaacccatatgcacatttatcattgatt

SEQ ID NO: 131908 - DNA, 526 bp, Homo sapiens
ttttaatgtaaacatattttagcatctatttgatttttactttattttcttgatactttcagatatatatttgctttacattattctcagggtttcttatttcccgaaaacactttgaatcatttccactgattctttttcctcccttgttagtttacatgtatcatttgtatgatagtgtctggaagtaaaagggcacttgagaaacaaagttgaataaaatttcatcatacttaattctgaaaattgttttctgaaattattagctcactgctgaaatatcttcagatcaaacgttcagaacatcagctcccaaggagcttcatatttagtttatggtggggtatgattgtgtatttcacaaaattcatgaaggaaatttgtacaaatttattatggattttaggccagcggaactgtttaaacttcctactctatttgttccrttgagtagccttagagttgaaacagcagtttccatttttctcatgggtagatcaacccatatgcacatttatcattgatt

SEQ ID NO: 131909 - DNA, 648 bp, Homo sapiens
gcttcattaacgttttctgcacagtattttgacatgtacagtgcacatgcattacatgaatcaaaataaatcagtaaacgagtatacaggcaatacaactggatggcttatttttaaattttccattttcctgtaaaacacattgaagtcactaatattgttaactaaatatagagaaactggaagactttctctcttctgcttgtacatayaagattacaactaagaacttccttaataaatgcattacttatattgtctatgctgatctcatgcattagtaccaaacttggactttctgcacctaatctaaaaacaatgcaaagtgaaacgaaagtgaaaatgaaagtgcaaagattaatattctgtcaatttcttaaaagaaaagaaagatgtgtttgttcaccacccattcctttttatttttaatttgtaatcctatctatgagtacctagataatgttgcacatacccattagcaaaattcccatggaaatagaattcagtaaggtcttcagaaaggtctgacttgatgaaagctgacactaaaaataccctctgttttcccattagttaggaattaggaacacatatacatttttcaagacagaaatgcattaacctcttcacaaattacccaagcagaaa

SEQ ID NO: 131910 - DNA, 442 bp, Homo sapiens
taatattcttattaaggtttatagtcctatctttggtcagttggcacctcattaaatcggtgactgccatgattgcagttgtctttgatagattcctagacttctgaaatgacaaattattacaggttcattttgtatatttcctaccacagacctggaatcagctacttcttccaggggccctagttttttttttcttttttcaggaatgagatcacagcctggttgttaggggtttttaatgctcttggtttgatgattgtttctgggcgcctgcwgttcagtggacagtgctaggaaacattttttcatggttattttaaataaaagcctgtataatgatacttccaattcatgtttaggactttgggagttttcacttaatcttattgatcttaaatctttatgtttttctccaacactggaaaccttggttgccatc

SEQ ID NO: 131911 - DNA, 485 bp, Homo sapiens
atggccgaataggaacagctctggtctgcagctcccagcgtgattgacacagaagacaggtgatttctgcatttccaactgaggtacctggttcatttcattgggactggttgaacagtgggtgcagcccatggaggatgaactgaagcagggcagggcgtcgcctcacccgggaagtgcaaggggtcaggggatttccctttcctagccaagggaagctgtgacagactgtacctggaaaaatgggacactcctgcccaaatactgtgcttttcccaaggtcttagcaactggcagacaaggagattctctcctgtgcctggcttggcaggtcccatgcccatggggccttgctcactgstagcgaagcagtctaagatctaactgcgaggtggcagtctggctgggggaggggcgtctgccattgctgaggctcgagtaggtaaacaaagcagccaggaagctcgaactgggcggagcccacc

SEQ ID NO: 131912 - DNA, 585 bp, Homo sapiens
agagtaacaagtgggctgagggtccaattgtgattggaaagtgataaatgtgtcaagacaccaactcacatggttgtgtgatttcctccagtgacccagggtaggagtacagtgaccaaatggttggatttagggccttgcagtagaggtgaatggaatgataagacaacgaaggaactgagatagacggaagcaaaggrccatagtagtatctaaattgaagaggaaagggagtaaaagcataacttctgttgggcctagtatgtacactgtatccatctactttctttttctttatttggggtatatgagaacctggcacagtgttaataagacccaagtgttcagaagagaatgcaagccaggctaatgaaggtggcaggaatagcaccatctctcctggaccattcaccacacacaaatgtgactgcggtgacatggagatctaaaatgatctaatgcagccagttggtaagggctcaaggctagatttcatctttcagggtaatgagatgtagcatcagtaattgagagtgcaggcttgaaggcagggggctacaatccaagaacaccaggggattcctg

SEQ ID NO: 131913 - DNA, 613 bp, Homo sapiens
aacagcaatataatctatcttaaatcaatgtatatttactgaagacctgaaatctacactgtattacattggatgctaatttactgacacagtaggacaccagcatttatgaacacacagtctacttagtataaattgatcattacataaaatctcattcattactcaccacaaccttatgaggttgaaattattacccctattttccccgagaggttatgtagcttgtccaagcccttattttgaggtggctgacttccacagtacaaccctatttcattgaaatcatcacagttaatacctatattagttaaaggggcatcgagtgagtaaaaatatgcagtttagtgccaaaaaaaaaactagcagaaaatctaggctaaagaaaaaaggtaaaaatggctgttttaaaagttaccaagtgtaaactacattaatcaaatatgtttcttgagtgccacacatttagtacagctgtcatcgcacacgaagacattttctttgtcgttagtgtgattatgayattcatgggaatacataaacccttcgactgtctgcatgcgtttaaagactgtatcaagtcataacaagaagcagtcacaagtagcctccc

SEQ ID NO: 131914 - DNA, 423 bp, Homo sapiens
attttattcataatttttctgcttaaaaagtctaagccctctatttcttgatctgagaaattatgcatcattcctgactgaattttgaattatttgtgaattcttatagcataacttgaatggcaaatgacaaraaagcaactcttgagaaaaaggaaaaatgcatacctaataggcaaacccaatgtttctatcatgatgacaaaaggggctgtcattgactcatgtacagaatataagtagcaaaattctgggcttttcttacttcttaaatcttgaaatgtacactgaatgttgacttggaaactgttccagactgtttgattgatatgtatcacctgttgatccacgttcttccctctattcttccttcttgtatctgcattgtataccatgcttactgaagaaaaaactttttgaaaa

SEQ ID NO: 131915 - DNA, 538 bp, Homo sapiens
tttaacaggcttaattgattagggcctctatattcgtgcaagccctcactgtatgaatttacagtccctgtgaatcacatctcatggaggtatgcagtgyaaaattggcacagctgcacatctctgctcatcattgaaagcacacagtgttttcctttgactttatttcatgaatgtttctgacgaatatatagcatgtcctgtaccaaatgacaagaacaaaacatgttcaccaatgagagaatactagaatttggacttggaactaaaagccattggcaggtgcacttctatgcctgggatctccctgtacttcactgaatattctggaatgcctaaaagcaaccctaattattaattcatcaatttaatcatttaaaaatatatgtgtacctaagatataccagatctcagtctaggaatataaagaataaaacagtccttacctgaaggtttttagattagagaaaaacagtgacacggaggaagtaattaaaatatgttattataactgccaccaaatggatatgcacaaggt

SEQ ID NO: 131916 - DNA, 538 bp, Homo sapiens
tttaacaggcttaattgattagggcctctatattcgtgcaagccctcactgtatgaatttacagtccctgtgaatcacatctcatggaggtatgcagtgtaaaattggcacagctgcacatctctgctcatcattgaaagcacacagtgttttcctttgactttatttcatgaatgtttctgacgaatatatagcatgtcctgtaccaaatgacaagaacaaaacatgttcaccaatgagagaatactagaatttggacttggaactaaaagccattggcaggtgcacttctatgcctgggatctccctgtacttcactgaatattctggaatgcctaaaagcaaccctaattattaattcatcaatttaatcatttaaaaatatatgtgtacctaagatataccagatctcagtctaggaatataaagaataaaacagtccttacctgaaggtttttagattagagaaaaacagtgacacggaggaagtaattaaaatatgttattakaactgccaccaaatggatatgcacaaggt

SEQ ID NO: 131917 - DNA, 603 bp, Homo sapiens
cagtaattattaataattgtctcacttacatggcaaaaagtcgtattgtctcatcaatatccattcttctcttctttaaaaatgaaatcccagcattttagctgggcagttggctgacctatctaaagactgtatttcttagtctccctgcaattaggcatgggaattataactaagtcccagtcaggtatatatgagcagaaggaaatttgtaatttatttttattttttgaaattttcataaaatctagctcccagaagaatgaatttgtgatttctaaactctgtcttcaaaggaaagtggaatgacttctattctatctttaaagctrtctgaaatatagatggatgataactggagcagcaatcttagaattacaagattaaaattgcatgttgagaatgactgagccacaggataggagagcctgggtccctgataccacagagacaccctagcagcaccagactgcttaaacttggaatactatgggagagaataaatgaatttgcaacttgcttatgtcactattatttttagatctttgctagagcaatcatctttgttaagtgttaaaaaaaatttttaacaataatttactt

SEQ ID NO: 131918 - DNA, 603 bp, Homo sapiens
cagtaattattaataattgtctcacttacatggcaaaaagtcgtattgtctcatcaatatccattcttctcttctttaaaaatgaaatcccagcattttagctgggcagttggctgacctatctaaagactgtatttcttagtctccctgcaattaggcatgggaattataactaagtcccagtcaggtatatatgagcagaaggaaatttgtaatttatttttattttttgaaattttcataaaatctagctcccagaagaatgaatttgtgatttctaaactctgtcttcaaaggaaagtggaatgacttctattctatctttaaagctgtctgaaatatagatggatgataactggagcagcaatcttagaattacaagattaaaattgcrtgttgagaatgactgagccacaggataggagagcctgggtccctgataccacagagacaccctagcagcaccagactgcttaaacttggaatactatgggagagaataaatgaatttgcaacttgcttatgtcactattatttttagatctttgctagagcaatcatctttgttaagtgttaaaaaaaatttttaacaataatttactt

SEQ ID NO: 131919 - DNA, 498 bp, Homo sapiens
cctgtttatttctttactatttgcacaaccttggaaaatgtaattacctaacctttcaactttaagttttcttattacygtctctgctgttttcttgtattggtattgtcattaacatccacactaccctcacagtcatatacttcacctgttgttgtatttatgtatttagtcatttatttcaggagcattgtaacaaaatactattttaccaagtgaataaattgataaaaaacaaatgtctgtgatatgccaacaatatatcttctacgaaggccagcatagatctttcaagaaagcaacgagaaggttagagcacacaccttgtgtagagcagacaaatatattggtctttccagctcatgctgtagcaaaagatggagaaaaatacccaggctgggttttgtggctcatgcctgtaattacagcactttgggaggctgaggagtgaggactgcttgaggccaggagtttgagaccagcctggtcatagtgaga

SEQ ID NO: 131920 - DNA, 559 bp, Homo sapiens
tcctgattttaaaatacattacagcctggcctgatggctcacacttgtaatcccaggattttgggaggctgaagctggtggctcacttaagttcaggagtttgagaccagcctgggcaacatggtgaaaccctgtctgtaaaaatagaaaaaaaaattagctgggcatgatggcgtgagtctgaagttccagctattcgggagattgaggcaggagaatcacttgaccccaggaggtagaggttgcctcctmagccgagatcacaccactgcgctccagcctgggtgacagagtgagactctgtctccaaagaacaaaactaactaactaactaaataaatacatacatacatttatttatatttatttataagtctatgtgtcaaactgacacacaaaatagtgttcaaaacagtatgatactggcataaaaacagacacatagaccaatagaataaaataaaatgcccagaaataaagccacatttatatagtcaactgatcttcaacaaggatccaagaatacaaaaagaagaaaggatagtctcctcaaaaaatg

SEQ ID NO: 131921 - DNA, 559 bp, Homo sapiens
tcctgattttaaaatacattacagcctggcctgatggctcacacttgtaatcccaggattttgggaggctgaagctggtggctcacttaagttcaggagtttgagaccagcctgggcaacatggtgaaaccctgtctgtaaaaatagaaaaaaaaattagctgggcatgatggcgtgagtctgaagttccagctattcgggagattgaggcaggagaatcacttgaccccaggaggtagaggttgcctcctaagccgagakcacaccactgcgctccagcctgggtgacagagtgagactctgtctccaaagaacaaaactaactaactaactaaataaatacatacatacatttatttatatttatttataagtctatgtgtcaaactgacacacaaaatagtgttcaaaacagtatgatactggcataaaaacagacacatagaccaatagaataaaataaaatgcccagaaataaagccacatttatatagtcaactgatcttcaacaaggatccaagaatacaaaaagaagaaaggatagtctcctcaaaaaatg

SEQ ID NO: 131922 - DNA, 559 bp, Homo sapiens
tcctgattttaaaatacattacagcctggcctgatggctcacacttgtaatcccaggattttgggaggctgaagctggtggctcacttaagttcaggagtttgagaccagcctgggcaacatggtgaaaccctgtctgtaaaaatagaaaaaaaaattagctgggcatgatggcgtgagtctgaagttccagctattcgggagattgaggcaggagaatcacttgaccccaggaggtagaggttgcctcctaagccgagatcacaccactgcgctccagcctgggtgacagagtgagactctgtctccaaagaacaaaactaactaactaactaaataaatamatacatacatttatttatatttatttataagtctatgtgtcaaactgacacacaaaatagtgttcaaaacagtatgatactggcataaaaacagacacatagaccaatagaataaaataaaatgcccagaaataaagccacatttatatagtcaactgatcttcaacaaggatccaagaatacaaaaagaagaaaggatagtctcctcaaaaaatg

SEQ ID NO: 131923 - DNA, 559 bp, Homo sapiens
tcctgattttaaaatacattacagcctggcctgatggctcacacttgtaatcccaggattttgggaggctgaagctggtggctcacttaagttcaggagtttgagaccagcctgggcaacatggtgaaaccctgtctgtaaaaatagaaaaaaaaattagctgggcatgatggcgtgagtctgaagttccagctattcgggagattgaggcaggagaatcacttgaccccaggaggtagaggttgcctcctaagccgagatcacaccactgcgctccagcctgggtgacagagtgagactctgtctccaaagaacaaaactaactaactaactaaataaatacatacatamatttatttatatttatttataagtctatgtgtcaaactgacacacaaaatagtgttcaaaacagtatgatactggcataaaaacagacacatagaccaatagaataaaataaaatgcccagaaataaagccacatttatatagtcaactgatcttcaacaaggatccaagaatacaaaaagaagaaaggatagtctcctcaaaaaatg

SEQ ID NO: 131924 - DNA, 623 bp, Homo sapiens
ctagctccaaaccactttctccccaatactgtaatacagaattggaaatgtagtaaagtttgcatcatactaatttgtacttttttatgattacctaaaaactaataaaccaaccagttcacttcatgttgtcgccaaactgagcacagctgctttyaaggtatggtcactatgcctatagtaaatttatttttctgggtttttctttttttttttttttttgagacagagtcttgctttttgctttcaaggcatggtcactatgcctacagtaaatttatttttctgggttttttttctttttttttttttgagacagagtcttgctttgctacccaggctggagtgcagtggcacgatctcggctcactgcaacctccgcctcctgggttcaagcagttctcctgtctcagtctccccagtagctgggactacagccgcccgccaccatgcatggctaatttttgtatttttaggagagatggggtttcaccatattagtcaggctggtctggaactcctgacctcaggtgatccacccacctcggcctcccaaagtgctgggattaccagcatgagccactgcgcccagcctatttttctggtcttaatgaactataagc

SEQ ID NO: 131925 - DNA, 592 bp, Homo sapiens
ttcctagggaaaaacaaaacaaaacaaaaaaggggggaagaggtagacagagggaagaggaaagagttgaatttggtacagacctgaatcttttatctacatatgatacaattaagaatgtgaagttaaaacagtaataagtacttaaatgtactcagaaacatttctccctttyttgggcaaataatcttttttaaaaaaaataagaaaagctaccagcttaccctttacttttagagaccaaaccaagagactgactgagtcgatgaataaaggctctttcagtactggtcaaagaagaaggaaattccatttctacatggaaaaaaaacaaagtagtaaaatttgtagataggcaattttctctcaagtaaaacacacagatacaaaatatgaaaaacatacatagacaatcaaatttattatactttatttgaggttaactttatatttcatattctatttatgtaaattaataaaattaagatattttattaattcaataactactgaatgtctatcagaattctgatattaataaaaagacagctatgtattaaacctaaatgtgataaaggcctctgatattcac

SEQ ID NO: 131926 - DNA, 592 bp, Homo sapiens
ttcctagggaaaaacaaaacaaaacaaaaaaggggggaagaggtagacagagggaagaggaaagagttgaatttggtacagacctgaatcttttatctacatatgatacaattaagaatgtgaagttaaaacagtaataagtacttaaatgtactcagaaacatttctcccttttttgggcaaataatcttttttaaaaaaaataagaaaagctaccagcttaccctttacttttagagaccaaaccaagagactgactgagtcgatgaataaaggctctttcagtactggtcaaagaagaaggaaattccatttctacayggaaaaaaaacaaagtagtaaaatttgtagataggcaattttctctcaagtaaaacacacagatacaaaatatgaaaaacatacatagacaatcaaatttattatactttatttgaggttaactttatatttcatattctatttatgtaaattaataaaattaagatattttattaattcaataactactgaatgtctatcagaattctgatattaataaaaagacagctatgtattaaacctaaatgtgataaaggcctctgatattcac

SEQ ID NO: 131927 - DNA, 366 bp, Homo sapiens
aggatccttctagaagctgtttagacagatacttgggacagggaaggtcatgaacccagttctctcattatttatttaaatttatctgacaaatcttattttgatgagtataagctctttcacttcagaagcaartaaattatctataggtatcagggcactttttgtcatttcctgaattgctccaagtacccacaaatcatattgatgcatcctagaaacatctacttaaaagagcaaataaaaactatggataatttaatggattaaaggccagaggcatgttcttgagacatgcattcctctttgtctcagcttgatttctctttcttatgaagaaccatagtggaagtgatttgcctaaag

SEQ ID NO: 131928 - DNA, 564 bp, Homo sapiens
catagtccaaactgttgacccacagaacacataaacaaataaaatgaatattgctgtaagccactaagttttaggttgggtttcttacacagcagtagataactgatacaaagagttagcttattctgactaatatatttgtacaatgataaggctgatcttgggcataagtgactaggctgaaagaactagcttcacccgttccagtttgtacccagttgcctaagaactggggtcatcaacatcttgatawgcctgtaaacaacttgtggcatacgagcatgccacagcacagtggtctggagactgctctcttctcatctataaaattgacctggtagagtaataaagtcttaaaatataaccaacatgattttattattgatgctagggatatttcctcccaccctttgccccctcatcacccctactttgccagccctccatccctttctctcttgttcagccaggtcatttaggggttattatttggggaaatattgtcttaagttggtttcggttctctggaactggaaaaagtcacatagtaatacaccagtaagt

SEQ ID NO: 131929 - DNA, 311 bp, Homo sapiens
acaaggtgacactagaaagctatcttttgcttatggttctaggtcttgaccgtcattgattttcataaacggcttctatgaagtattgtattaacagtagtaatcccttccagggacattttcattttaataagggagatggcagcaatgaggttaataggaggcaatgttcatattttaaaatmataaaaataagactctctggaacaggctatcaactagtttttattcttgctcttcttacccactctcatgtgataggatatcccaatcactacaaaaaatatcaaacactaatttattcaacatcc

SEQ ID NO: 131930 - DNA, 564 bp, Homo sapiens
gacactatttcacatcattgctccagttctgccccatatcattagatatcaagatcagcttctggcagcacaccctcagtctagaccagttagcaaagaggtggtcaagcaagccacttcctcaccagcaactctttaatttatgagacttaggcaaccacttttgcacatttcatgctgtgttgggtctcaaaaattggtttgtggcttccttttcaaataagtcacatatactgaattgccaactgttaccaccctaccttttgtattaattcacaaatgtaggcaacctctaggtaggttcaatcttattgtctccataacgatcaacacacaactgataaaacaagcaccagtctcttacctttgcagactcttgagaaggtccctgacattagagagatttatggggtcaatggacaaatgctagatttaataaatacttaagatacaaagccgctgtatctmtctcttggatcccttctgattgcccagtgtggagatcatggttcttgcaacttcaggacttggctgctgagaggagccaagaatgtggaaacagtg

SEQ ID NO: 131931 - DNA, 564 bp, Homo sapiens
gacactatttcacatcattgctccagttctgccccatatcattagatatcaagatcagcttctggcagcacaccctcagtctagaccagttagcaaagaggtggtcaagcaagccacttcctcaccagcaactctttaatttatgagacttaggcaaccacttttgcacatttcatgctgtgttgggtctcaaaaattggtttgtggcttccttttcaaataagtcacatatactgaattgccaactgttaccaccctaccttttgtattaattcacaaatgtaggcaacctctaggtaggttcaatcttattgtctccataacgatcaacacacaactgataaaacaagcaccagtctcttacctttgcagactcttgagaaggtccctgacattagagagatttatggggtcaatggacaaatgctagatttaataaatacttaagatacaaagccgctgtatctatctcttggatcccttctgattgcccagtgtggagatcatggttcttrcaacttcaggacttggctgctgagaggagccaagaatgtggaaacagtg

SEQ ID NO: 131932 - DNA, 366 bp, Homo sapiens
gacaaaataaaaaagaataagaaatgatggagaacatttacaggatatagaaaatggcctcaaaagggaaaatctaaaagttattggccttaaagagaaggtatagaaagagagaragagatattggggtaacgagtttattcacaaggataataacagtgaatttcccaaacctagagaaagatattaacattcaaatacaagaatgttgtagaacatctagccgatttaacccaaagaagactacctgaaggcatttaataattaaactcccaaaggttaaggataaagaaaggatcctaaaagcagcaagagaaaagaaacaaataacatacaatggagtccaatatgtctggcaacagactt

SEQ ID NO: 131933 - DNA, 599 bp, Homo sapiens
ccattactttatgtaccaattaaactatggcaaaataattcttaccacttagaattttaaaattcttcctgaaaggactcccttaaaattgttgagttatagatttttatcatattgcactcttgtacatatataaaaaggraaataggctaatcaaattgtttaaaataattctaaaacttcttcatattcaaattgtttaaaataattctaaaacttcttcatatttaaaatccaagtcttggccagctgcaatggctcacgcctgtaatccctgcactttgggaggctgaggcaggtggatctcttgaacctaggagttcaagacgagcctgagcaacatggagaaaccctgtctctacaaaaaaattacaaaaattacccaggcatggcagcttgcacctgtagtactggctactcaggaggctgaggagggaggatcagttgagcctgggaggtcaaggctgcagtgagttgtgaatacccactgcactcagcctgggcaacagagcaagacactgtctgaaaataaaataaaataaataaaaataatgaaatccaaatcttccaaatcaccttttgatttagagtactgatgt

SEQ ID NO: 131934 - DNA, 569 bp, Homo sapiens
atatttataacttttaaaattcttatctgccaattccatcatctctgtcatttctgggtttattgattgatttttctcatggttatggaactgttttctgcttctttgcaagcctagttacatttaattggatgccagatatatwaacttgttcggtactggtttctgtattgttttcctatactttgttgtggcttgcagttgagtttggctcttttggaagcttgcctttaagctttctttgtttggcatgactagaggagtctttagactagggctaatttaaattagcctactcttcacatctctggagctccttttatctaaagcattccttcctcttccctctgcaccacaaatttaatctgccttggcttccctgaattttgttctctctctcctcaactcggtgagaccactgggtgcagtttggattttccctcctgttctgcagcatatagactgcctccaggcagcaagttggtgtaaatgtaggctcaccttgcttgttgccctttactcatggattgtattcttatgctgttatatgatgtctgaaaatcattatt

SEQ ID NO: 131935 - DNA, 579 bp, Homo sapiens
ctcaatgcggcttttcacatacatttctttaagttatatttaactagctttattgagatataattgacgtactacataattaacccatttaaagcatacaattcaatggtcttatatattcagagtcgtgtaacaatcattgcaaccaattttagaatagtttcatcacctcaaaaagaaaccctgtacccattagcagtcatcytcatttcccctaaccactccggccctaggcaaccactagtttgctgcctctctagacttgcctgctatggatattgtacattctgtggccttttattgcttgtgttttgatattgtcgctaaaaagtctttgtctaaccaaaggtcagaaataatttaaatgttttcttctaagagttttatagttttagctcttatatttaagtctatgatccacttgagttaatttttgtgtatggtgtgaagaaaggatccagcttcattcttttgaatgtggatattcagttgtcaacagccatttgttgaaagcactcgtctgttttcccattttcttgacacccttgtcaaaaatcaatagaccataaatgtaagaat

SEQ ID NO: 131936 - DNA, 518 bp, Homo sapiens
attatggtaatttctattctgcttctttcgcctgctagactgtaagcatcatgaatgcaacaatgtctttgtatctctcacactacctgacatcatgcgttgattagatgctaaakcaacattgaatgaatgaaccaatagtttaatactaccttaagacaaaatacggtgcttcacactcccaaatagcattttgatttttctcattcctaaaatagaggaaaactcctgtaccatgttaatctgtctctaaccatatgcttacatgcttccagaattagcatctgtgaaataatatggatgaggaaatcacaaaaaatattgcattttgatcttgtaaattagttaaagctccttatttgttaatataaattatagcttctctaaaaggaataatttgctattcacaatcaatagttactttacagattacttcctaaatcttccatacttacagaatttgataactgtcagagcagaacaaatttaagaatattaattattattgttaaacattc

SEQ ID NO: 131937 - DNA, 518 bp, Homo sapiens
attatggtaatttctattctgcttctttcgcctgctagactgtaagcatcatgaatgcaacaatgtctttgtatctctcacactacctgacatcatgcgttgattagatgctaaagcaacattgaatgaatgaaccaatagwttaatactaccttaagacaaaatacggtgcttcacactcccaaatagcattttgatttttctcattcctaaaatagaggaaaactcctgtaccatgttaatctgtctctaaccatatgcttacatgcttccagaattagcatctgtgaaataatatggatgaggaaatcacaaaaaatattgcattttgatcttgtaaattagttaaagctccttatttgttaatataaattatagcttctctaaaaggaataatttgctattcacaatcaatagttactttacagattacttcctaaatcttccatacttacagaatttgataactgtcagagcagaacaaatttaagaatattaattattattgttaaacattc

SEQ ID NO: 131938 - DNA, 518 bp, Homo sapiens
attatggtaatttctattctgcttctttcgcctgctagactgtaagcatcatgaatgcaacaatgtctttgtatctctcacactacctgacatcatgcgttgattagatgctaaagcaacattgaatgaatgaaccaatagtttaatactaccttaagacaaaatacggtgcttcacactcccaaatagcattttgatttttctcattcctaaaatagaggaaaactcctgtaccatgttaatctgtctctaaccatatgcttacatgcttccagaattagcatctgtgaaataatatggatgaggaaatcacaaaaaatattgcattttgatcttgtaaattagttaaagctccttatttgttaatataaattatagcttctctaaaaggaataatttgctattcacaatcaatagttactttacagaytacttcctaaatcttccatacttacagaatttgataactgtcagagcagaacaaatttaagaatattaattattattgttaaacattc

SEQ ID NO: 131939 - DNA, 557 bp, Homo sapiens
aatgtgtcccataaaatctcagcatttggatcattattgtatgcagtatttcctggagagaatggcttaagatgaagactaamattcattttcaagatcctttgttggaagcttaaccaattggattaacttaaaagagtgtgctgggcatggtgactcacacctgtaatcccagcactttgggaggctcaggagggtggatcacttgaggtcaggagtttgagaccagcctggccaacatggtgaaacgctgtctctactaaaaatacaaaaattagccaggtgtggtggcgcatgtctgtaatcccagctactcgggaggctgaggtgggagaatcgcttgaacccgggaggcagaaactgctgtgagtcgagattgtgacactgcactgcactgcactgcactgcagcctgagtgacagagtgagactgtgtctcaaaaaaaaaaaaaaaaaaaaaaaaaaaagactgctggccaaaatgacatttaacaaaattcaaaatgcagaacagaggcacattgtttatttagtaaaatcctacaaggaatgaaaact

SEQ ID NO: 131940 - DNA, 557 bp, Homo sapiens
aatgtgtcccataaaatctcagcatttggatcattattgtatgcagtatttcctggagagaatggcttaagatgaagactaacattcattttcaagatcctttgttggaagcttaaccaattggattaacttaaaagagtgtgctgggcatggtgactcacacctgtaatcccagcactttgggaggctcaggagggtggatcacttgaggtcaggagtttgagaccagcctggccaacatggtgaaacgcwgtctctactaaaaatacaaaaattagccaggtgtggtggcgcatgtctgtaatcccagctactcgggaggctgaggtgggagaatcgcttgaacccgggaggcagaaactgctgtgagtcgagattgtgacactgcactgcactgcactgcactgcagcctgagtgacagagtgagactgtgtctcaaaaaaaaaaaaaaaaaaaaaaaaaaaagactgctggccaaaatgacatttaacaaaattcaaaatgcagaacagaggcacattgtttatttagtaaaatcctacaaggaatgaaaact

SEQ ID NO: 131941 - DNA, 557 bp, Homo sapiens
aatgtgtcccataaaatctcagcatttggatcattattgtatgcagtatttcctggagagaatggcttaagatgaagactaacattcattttcaagatcctttgttggaagcttaaccaattggattaacttaaaagagtgtgctgggcatggtgactcacacctgtaatcccagcactttgggaggctcaggagggtggatcacttgaggtcaggagtttgagaccagcctggccaacatggtgaaacgctgtctctactaaaaatacaaaaattagccaggtgtggtggygcatgtctgtaatcccagctactcgggaggctgaggtgggagaatcgcttgaacccgggaggcagaaactgctgtgagtcgagattgtgacactgcactgcactgcactgcactgcagcctgagtgacagagtgagactgtgtctcaaaaaaaaaaaaaaaaaaaaaaaaaaaagactgctggccaaaatgacatttaacaaaattcaaaatgcagaacagaggcacattgtttatttagtaaaatcctacaaggaatgaaaact

SEQ ID NO: 131942 - DNA, 557 bp, Homo sapiens
aatgtgtcccataaaatctcagcatttggatcattattgtatgcagtatttcctggagagaatggcttaagatgaagactaacattcattttcaagatcctttgttggaagcttaaccaattggattaacttaaaagagtgtgctgggcatggtgactcacacctgtaatcccagcactttgggaggctcaggagggtggatcacttgaggtcaggagtttgagaccagcctggccaacatggtgaaacgctgtctctactaaaaatacaaaaattagccaggtgtggtggcgcatgtctgtaatcccagctactcgggaggctgaggtgggagaatcgcttgaacccgggargcagaaactgctgtgagtcgagattgtgacactgcactgcactgcactgcactgcagcctgagtgacagagtgagactgtgtctcaaaaaaaaaaaaaaaaaaaaaaaaaaaagactgctggccaaaatgacatttaacaaaattcaaaatgcagaacagaggcacattgtttatttagtaaaatcctacaaggaatgaaaact

SEQ ID NO: 131943 - DNA, 578 bp, Homo sapiens
aagcttcagtaagctgtgactgtgccactgccctccagcctgggtgacagagcaagatgtctcaaaacaataacaatgatacaaaaactgtacattccattaaaaaataggcaaaggacttgaatagatatttcttcaaagaagatacacaaatggctaataagcayataaaaaaattcccaacatcactaatgaaaggtaaacttcattatattgtatgtggaaatgcagttcttccattatcgtttggtaaagagagttccctttctgtactgtgtactcttggcatccatatcaaagaccatttcagcagatatgtgtggatatttcttgactttctaatgttttctactggtctatatgtctgaatttatgccagtaccacactcttttgattactgttgatttgtaatatgttttgaaatcagaaattataatgcttcctactttgctcttcactttcaatattgcttgatgattcagagtcccttgagatgccatataaattttattatggttttttctatttctgcaaaaatgtcattgagattttgataaagattacattaaatctataa

SEQ ID NO: 131944 - DNA, 619 bp, Homo sapiens
ttttgtgtatgcctttgggtctcctaaggaacaaaaactaaaagaaaactggaaactagaggccctggtttaggaaatgattctatagaagctgtttggagtattattgttctcataaccaaagggcttaggatttaaaggtcctgagattacagaagagaatatagaaactaaaagtataaaactcctagaagaaaatacagaaaatatcttcataaccttgagrtatgcaaagatttcttataaagaacacagaacactccataaaaataattgataaattggacttcaccaaaataaaatcaaaccaacacacaagtttttagatgaaggcaggaaacttgagtgattattaaatcagtaaaaggctattaaatgagtaaacatataacaactggtacaagcagatgagaagaaaacttaaggttggactatgattgaaaaaaaaagtcgttgctatgaatttatagacctgggattcaggtttaaactacttgctcaatgtggacacttctgaattttaaaaaataacattaaaagggcagtgataatcattataggatttgacagtagcaagtgcaaacctcctttgaatataaattatcacagataaaggact

SEQ ID NO: 131945 - DNA, 619 bp, Homo sapiens
ttttgtgtatgcctttgggtctcctaaggaacaaaaactaaaagaaaactggaaactagaggccctggtttaggaaatgattctatagaagctgtttggagtattattgttctcataaccaaagggcttaggatttaaaggtcctgagattacagaagagaatatagaaactaaaagtataaaactcctagaagaaaatacagaaaatatcttcataaccttgagatatgcaaagatttcttataaagaacacagaacacwccataaaaataattgataaattggacttcaccaaaataaaatcaaaccaacacacaagtttttagatgaaggcaggaaacttgagtgattattaaatcagtaaaaggctattaaatgagtaaacatataacaactggtacaagcagatgagaagaaaacttaaggttggactatgattgaaaaaaaaagtcgttgctatgaatttatagacctgggattcaggtttaaactacttgctcaatgtggacacttctgaattttaaaaaataacattaaaagggcagtgataatcattataggatttgacagtagcaagtgcaaacctcctttgaatataaattatcacagataaaggact

SEQ ID NO: 131946 - DNA, 619 bp, Homo sapiens
ttttgtgtatgcctttgggtctcctaaggaacaaaaactaaaagaaaactggaaactagaggccctggtttaggaaatgattctatagaagctgtttggagtattattgttctcataaccaaagggcttaggatttaaaggtcctgagattacagaagagaatatagaaactaaaagtataaaactcctagaagaaaatacagaaaatatcttcataaccttgagatatgcaaagatttcttataaagaacacagaacactccataaaaataattgataaattggacttcaccaaaataaaatcaaaccaacacacaagtttttagatgaaggcaggamacttgagtgattattaaatcagtaaaaggctattaaatgagtaaacatataacaactggtacaagcagatgagaagaaaacttaaggttggactatgattgaaaaaaaaagtcgttgctatgaatttatagacctgggattcaggtttaaactacttgctcaatgtggacacttctgaattttaaaaaataacattaaaagggcagtgataatcattataggatttgacagtagcaagtgcaaacctcctttgaatataaattatcacagataaaggact

SEQ ID NO: 131947 - DNA, 481 bp, Homo sapiens
aatagtggttcacttgcgggaggaaatgggaagcagcataagggagcttctggggtgacagcaacttttttatttttcagtctgggaggrggttatgtggtcattttacaaacattcctcaaactatacatgtacgatttatgtgctttttgtatttattatatatcaataaaaatctaaaagctgtaagaattttaaaagtcttttggagaaagctaaaggaaaaagcttaattaagaatcaaactttctaaattgcataagatatgatgaggtttccatttaatggatgcgttggttcagtggcctccctgttccattatcatatggcctttctgaccctaccttggtgacccttgcagaggtgacttaatcttcttaagcagtttctttaaatacagattttacttctatatttaaatcaactgtgctgaacaaaagagatggattaattgatgctttaaaatcctatgaaaatgcta

SEQ ID NO: 131948 - DNA, 481 bp, Homo sapiens
aatagtggttcacttgcgggaggaaatgggaagcagcataagggagcttctggggtgacagcaacttttttatttttcagtctgggagggggttatgtggtcattttacaaacattcctcaaactatacatgtacgatttatgtgctttttgtatttattatatrtcaataaaaatctaaaagctgtaagaattttaaaagtcttttggagaaagctaaaggaaaaagcttaattaagaatcaaactttctaaattgcataagatatgatgaggtttccatttaatggatgcgttggttcagtggcctccctgttccattatcatatggcctttctgaccctaccttggtgacccttgcagaggtgacttaatcttcttaagcagtttctttaaatacagattttacttctatatttaaatcaactgtgctgaacaaaagagatggattaattgatgctttaaaatcctatgaaaatgcta

SEQ ID NO: 131949 - DNA, 604 bp, Homo sapiens
atcaaacctccaacctgtttgtaatttaatcttcataaggtcagagagcgtatttctttttctgcttgttttctgcctagaatgtgtggatattccagaaatatttgctgataaaaatgaattgcttccataattagggaagaaattctttacctggcgaatcttcaagttatgcaccatcatcatcgtcctgtctgtgtcccacccttccttgtaatatcttgggttattcatctttcccattcatgaactttaagcttttgtcagcaccaactcacctctgtcccctctcaagatctgagagaaatgtaaagtggactttcttttayagaaattcaatgacctataaataatggaatttcttcctaaaccatgtgtcacagaagaagtatggagtacataacaaagggtcatctatggtagaaaaggtcacttccagctgagattatcgtaaaaggatggagaaaagaactttcactggttctcaaatagtatattgaaattaagtatttgaagaggcagagaaaagaacttcctagcagatggaaaaaatatgaatagtcatcaaattaggaaaatgtttgccataaattaagaatgtcag

SEQ ID NO: 131950 - DNA, 590 bp, Homo sapiens
  misc_feature (1)...(590): n = A,T,C or G
nnnnnnnncgcactgttctgtaaacataagaaagacaatataaatgcctgattcttcccgactatttaccagttttcaaaatattgatttagtagcatcctccaatggtgataggtcaaagtttgttgtttgtttttggtatcatcatagatttggacagttttgatatcttatatttggccagtgagagcctcttcaaattggcttgtttctttttgtttgtttgtttyttgttttattttgttttttgtattaactgtaacaaaacaagctaagcacaatgctttcttttttctctttcaacttttgttttaggttcaaggggtgcatgtgcaggtttggtatatggataaattgtgtgtcacagggatttggtgtacagattatttcatcatctatatcatagtgcctgataggtagttttttttaatcctcaccctcctaccaccctccacctcaattagaccccagtgtctgttgttcccttgtgtccatgtgtactcaatgttagctcccaattataagtggaaacatgcaacatttggttttctgttcctgtgttaatttgcttaagataatggcctccaact

SEQ ID NO: 131951 - DNA, 590 bp, Homo sapiens
  misc_feature (1)...(590): n = A,T,C or G
nnnnnnnncgcactgttctgtaaacataagaaagacaatataaatgcctgattcttcccgactatttaccagttttcaaaatattgatttagtagcatcctccaatggtgataggtcaaagtttgttgtttgtttttggtatcatcatagatttggacagttttgatatcttatatttggccagtgagagcctcttcaaattggcttgtttctttttgtttgtttgtttcttgttttrttttgttttttgtattaactgtaacaaaacaagctaagcacaatgctttcttttttctctttcaacttttgttttaggttcaaggggtgcatgtgcaggtttggtatatggataaattgtgtgtcacagggatttggtgtacagattatttcatcatctatatcatagtgcctgataggtagttttttttaatcctcaccctcctaccaccctccacctcaattagaccccagtgtctgttgttcccttgtgtccatgtgtactcaatgttagctcccaattataagtggaaacatgcaacatttggttttctgttcctgtgttaatttgcttaagataatggcctccaact

SEQ ID NO: 131952 - DNA, 590 bp, Homo sapiens
  misc_feature (1)...(590): n = A,T,C or G
nnnnnnnncgcactgttctgtaaacataagaaagacaatataaatgcctgattcttcccgactatttaccagttttcaaaatattgatttagtagcatcctccaatggtgataggtcaaagtttgttgtttgtttttggtatcatcatagatttggacagttttgatatcttatatttggccagtgagagcctcttcaaattggcttgtttctttttgtttgtttgtttcttgttttattttgttttttgtattaactgtaacaaaacaagctaagcacaatgctttcttttttctctttcaacttttgttttaggttcaaggggtgcatgtgcaggtttggtatatggataaattgtgtgtcacagggatttggtgtacagattatttcatcatctatatcatagtrcctgataggtagttttttttaatcctcaccctcctaccaccctccacctcaattagaccccagtgtctgttgttcccttgtgtccatgtgtactcaatgttagctcccaattataagtggaaacatgcaacatttggttttctgttcctgtgttaatttgcttaagataatggcctccaact

SEQ ID NO: 131953 - DNA, 560 bp, Homo sapiens
gtatatattaatgcccctggggattttgttaaaatgcagattctgaatctctaggtctgggrcaggggatgagagtctgcatttctaaatagcttctggatggtgctaaaactgtgagtctctagatcatattttgggtaacaagacttagaggactcctaaggacaactcatggaaatcaacacacatttatttggtactacctattatatgtacaggcacgcttctaggggctgttgatattaagacaaagaaggcacagtttctgcccacactggaaatactcacattccaatagggaagaaagacaaatacatcatttcaaaatagtgtgatgacacaattgaagtttgtaccaaaaaaaaatatgccacagaacagagaagaagttatttatttagggtggggtgtgggatacagatgtcagaaaatcacagattacgtgaaaagtgctgagaactatcaaatgatgtatgtataaagaagatctcttaatctcagagggcacttgagaatttctttgtccaaggaaggctcagctgtgaggagaggagataaat

SEQ ID NO: 131954 - DNA, 520 bp, Homo sapiens
atttataattttctaattgtgtctcagttatttgagatgcattttctctcatattagattgggagcatcttgagggcagaaacagtggttgagtcacaaaagagactcagggctatgctcaaggtggtcctaatgtytggtggctaagtgaaattgatcttgttaccccagaatgtgtatttacaaaggcagcttttagccaatctttgaattatttaagggaaataattgcctaattttcttattttatagtaagttatagtttttccagttaaattcttttctgaatgtaacctaaattcctcacaaagtgccttttgctcattttctcttgtttgtccataatgaagatcatagatcacataatacagttggaaaaactttaaagattatctaggtcagtgatatgaaactttttattttgagaagttgattcctttatttaaacaaaactttgaacagagcataaaatcataaaacagcaaagacaacaaaaaaatctgcttctctaattgaagtc

SEQ ID NO: 131955 - DNA, 634 bp, Homo sapiens
tctgacttgtcaaatttttgttgttgttgcagttgctttggaggtcttcaacatgaaatgtttgcaaaagctaatgtctagaatggtgttactaagtcttcttctagggttttttagcattaggttttatatttaaatctttaatcccttgaatagatttttgtatatggtgagagaaagaggttcagtttcaatcttctgcatgtggctagccagtaatcacagtactaattattaaacagggtgtcctttctccattgcttgtttttgtggattttgttgaagatcatatgattgtaggtgtgcagctttatttctggtttatctaacctgtttcattggtctatgtcaaaaycaataaacttttagctagactaagattaccgaaagatgaccaaaataaaattagaaataaaagatgagatattacatcagataccacagaaatgcgaaaaaccataagagactactatgaacaattatgcaccaaaaagtttgattaccttagacaaatggatgaattcctgaacactttcaatacaccaagactgaatcatgaagaaatgcaaaatctaagcaaaccaataacaaatagggagattgaatcagttattaaaaacctctcaagaaagaa

SEQ ID NO: 131956 - DNA, 522 bp, Homo sapiens
tcttaagtattctgaacacacacatacacacacactctcacacacgataagtatatgaagtgatagacataataattagcttgactcggtaataatttcacaatccatacatatatwaaaacctcgagttggccaggcacggtggctcacccctgtaatcccagcactttgggaggctgaggtgggtggatcactaggtcaagagatcgagaccatcctggccaatatggtgaagccctgtctctactaaaaatacaaaaattagctgggtgtggtggcatgcacctgtagtcccagctacttgggaggctgaggcagaagaatcgcttgaacccaggaggtggaggttgcagtgagccgagatcacaccgctatactccagcctggtgacagagggagactccatctcaaaaaacaaacaaacgaacaagcaagcaaaaaaccttatgttgtatataccttgaacaggactaattattctccactaaggaggcaaagtcttccttagtattcaacccagtg

SEQ ID NO: 131957 - DNA, 652 bp, Homo sapiens
caattgcaaaaatatggaaccagcccaaatgcccatcaatcaatgaatagataaagaaaacgtggtgttgtgtatacaccatggaatactattcagccataaaatggaacaaaataatggcattcacagcaacctggatggaattggagaccattattctaagtgaagtaacttgggaatggaaaaccaaacatcatttgttctcactcataagtgggagctaatctatgaggttgcaaaggcataagaatgatacaatggactttgaggactcagggaaagagtggaaggggatgagggataaaagactacacattggatacagyatacactgcttaggtgatgggtgcaccacaatctcagaaatcatcactagagaatgtattcatgcaaataattaattaattaattaactaaagaattgttttaaaaggaaagaaagttggccaggctccatttcagttccctgttcctgtgccagtgcctgaaagttcctcagtaaagtaacctagggcaatcatatggtttatttgtttatttattttctcaccacctgatgttcaagtcttaaaaccattctttcgtatgtattttgtttatttgtttccttgtattcttgtatttggtagtttcatgcaggtgactgcatata

SEQ ID NO: 131958 - DNA, 614 bp, Homo sapiens
tctcattatcccagttcagaactactagaaaagagattctgattgatttgatttgcctgggataaggtgttgacttctggtccatgcacctgtaaccaaggtgaagtcagtcccatgtagtacctggtgctgtttaggtaactcctctcccttcagcagggctgcgggtgagaagggcatacaattttaaagaattgagcatgatctgggcagttccccaaatgggctactgaatcctgttacatggcattctctcaaatcatcagtggatgcttctgtgtctaataacatgatcatgattaccattgccagtcgaaccataayaaagtgtggtgttatattataggcaacatatcaagagatggcagattcaagtactgactcaaatacagaagataatgttcatggagtaaagtagcactacagtaatacagtagagaatggtgtagactgtggcaaagcaaacaaaaatgattatacaaaggggacagcccctgcacaccattagctgataactgtcatgcaggaatgtgagctccgtatttgcctgatcttctgattttacaagaagtttagagcagaggtgtcaagaaatgtagattgcgatgcagaat

SEQ ID NO: 131959 - DNA, 666 bp, Homo sapiens
atctcttgacatctaagtctaggcattatctatacagatttaagtattatgtaattttttaaagtaaggatttgatagatgaacactgattgttttagtttaggatgtcacagaagcttgccctgagacaaggaattaagcacatgtggtttatttagaacataattccgggaaacaactgaggcaaagaagcgaaaacagaccaaggatgcactattagacaagttatcactgtgcatctctggagcttaattgcctgaagaattctaaaagccagtgttatgaaccgacttgtatcccaccaaaattcagatgtggaagcctaaattccaatgtgactatatttgaagacagggcctttacagaggtaattaacattaaatgagatcataagggtgggctgcaatccaatctgactcatgtctttacagaaagaggaaatttggacacacatgagaaataccagggatatgcctacacagataaaagtccatgtaaggacacagcaagaaggmggacacctgcaagccaaggagagaggagtgtggtctctggagaaatttaacctgccaacaccttgatcttggacttctagtctccagaactgtgagaaaataatttctgttgtttaagccacccagtgtgcagtattttgttatggcagcc

SEQ ID NO: 131960 - DNA, 666 bp, Homo sapiens
atctcttgacatctaagtctaggcattatctatacagatttaagtattatgtaattttttaaagtaaggatttgatagatgaacactgattgttttagtttaggatgtcacagaagcttgccctgagacaaggaattaagcacatgtggtttatttagaacataattccgggaaacaactgaggcaaagaagcgaaaacagaccaaggatgcactattagacaagttatcactgtgcatctctggagcttaattgcctgaagaattctaaaagccagtgttatgaaccgacttgtatcccaccaaaattcagatgtggaagcctaaattccaatgtgactatatttgaagacagggcctttacagaggtaattaacattaaatgagatcataagggtgggctgcaatccaatctgactcatgtctttacagaaagaggaaatttggacacacatgagaaataccagggatatgcctacacagataaaagtccatgtaaggacacagcaagaaggcggacacctgcaagccaaggagagaggagtgtggtctctggagaaatttaacctgccaacmccttgatcttggacttctagtctccagaactgtgagaaaataatttctgttgtttaagccacccagtgtgcagtattttgttatggcagcc

SEQ ID NO: 131961 - DNA, 522 bp, Homo sapiens
taataccttcacaatatcaattaaatttcaatatgagttttgtagataatattcaaactatagcatattaataaaataataataaataacacaaatatcatcactactcttaaaactaatccttttaaatgctgattgtgtaccatgctgtgttttgagtgttttacatgttttatttcattccatcatcaccatatcactatgaagtagatactattattattcatttctatatatgaagaaactagaaaacagagagattaaataaattgcctaaaaatattaaggtataattactggaaactactgtaagcattgrggaagtcttttgaagaagataaggtatgagatctaagggaaggattaagccttccacgtatagagaatggagtgaggagtactccatgtgggaaatacagcctgagaaaaagtattgctacagatagggcaggccacatataatgatagcagattgatgaactgaaataaagatatggtagaagataaacaacgttggggttt

SEQ ID NO: 131962 - DNA, 612 bp, Homo sapiens
agaactcttgtccctgatcatcctttccaccagttagtaagccacaataccttattttttttcatatctacttatggacatgtatttggtcacatatataatgtgatttaaaggacttaaatatacttctcatgctggtatgacctggtgcttagattttcaccaatagaggtttatttttctgagtaaggatacagtctactttgacagagaaaatgtccttgagatagtttattattcaggtattgttagtggaaggagtgtattagtccattttcatgctgctgataaagacatacccmaaactgggcaatttacaaaagaaagaggacttacagttccacatggctggggagggctcacaatcatggaggaaggcaaggaggattaagtcacatcttacgtggatggtagcaggcaaagagagagcttgtacagagaaactcccatttttaaaaccatcaaatctcatgagacccattcactatcacaagaatagcacaggaaagacacatccccatgattcaatcatctcccactgggtccctcccacaacacatgggaattatgggagatacaagatgagatttgggtggggacacagagccaagc

SEQ ID NO: 131963 - DNA, 612 bp, Homo sapiens
agaactcttgtccctgatcatcctttccaccagttagtaagccacaataccttattttttttcatatctacttatggacatgtatttggtcacatatataatgtgatttaaaggacttaaatatacttctcatgctggtatgacctggtgcttagattttcaccaatagaggtttatttttctgagtaaggatacagtctactttgacagagaaaatgtccttgagatagtttattattcaggtattgttagtggaaggagtgtattagtccattttcatgctgctgataaagacatacccaaaactgggcaatttacaaaagaaagaggacttacagttccacatggctggggagggctcacaatcatggaggaaggcaaggaggattaagtcacatcttacgtggatggtagcaggcaaagagagagcttgtacagagaaactcccatttttaaaaccatcaaatctcatgagacccattcactatcacaagaatagcacaggaaagacacatccccatgattcaatcatctcccactrggtccctcccacaacacatgggaattatgggagatacaagatgagatttgggtggggacacagagccaagc

SEQ ID NO: 131964 - DNA, 509 bp, Homo sapiens
gtgtgtggctcctacatgatggtggaatcaagcctcgaagctggtttcctggtactgagacacctagatgagctctttctattaaactacactgacatctagggggaaaataaaagtgtatatcaccttcgtattcctccagtctcaatgtrtagaaggtcagattgtcaaaacccaaatgagagaatatataaagatacatgagtttattaattttcacacaaattttagagaattagtacattggcatcagcaggctgtatttatggtagttaaggatacaggctcaaaagccagactgcctgggctccagtcagctctgccattgaccagctgcatgaccttggcaggtggattatctgtctgccttagtttcttcattataatttgaggatgataatagtacatagttcagggtggttgtgagaatcatgacttgatacatctaaggtgttcagaagagtgtttagcccatagcacatgctaaacaaatgtttgtttgtttgttt

SEQ ID NO: 131965 - DNA, 556 bp, Homo sapiens
atcaccttcgtattcctccagtctcaatgtatagaaggtcagattgtcaaaacccaaatgagagaatatataaagatacatgagtttattaattttcacacaaattttagagaattagtacattggcatcagcaggctgtatttatggtagttaaggatacaggctcaaaagccagactgcctgggctccagtcagctctgscattgaccagctgcatgaccttggcaggtggattatctgtctgccttagtttcttcattataatttgaggatgataatagtacatagttcagggtggttgtgagaatcatgacttgatacatctaaggtgttcagaagagtgtttagcccatagcacatgctaaacaaatgtttgtttgtttgttttttatctcttgtgatggctaacattaagtgtcaacttgattggattgaaggatgcaaagtgttgttcctgggtgtatctctgagggtgttgccaaagagattaacatttgaatcagtaaactaagagaggcagacccaacctcactgtgggtgggcaccatctaatca

SEQ ID NO: 131966 - DNA, 574 bp, Homo sapiens
taacatttgaatcagtaaactaagagaggcagacccaacctcactgtgggtgggcaycatctaatcaactgtcagagtggctagaataaagcatgaagaaggtgggagaagccgacttgctgagtcttccagtcaccatctttctgctgtgctggatgcttcatgcccttgaacatcagactccaagttcttcagcttttggactcttggacttacaccagtggtttgccaggggctctcaggccttcaaccacagactgaaggctgcactgtcagcttccctacttttgaggttttgggactcagactggtttccttgctcctcagcttgcagatggcctattgtaggacttcaccttgtgtcatgtgagtcaattctcctaataaactccccttcatatatacatgtctcctattagttctgtccctctagagaacactgactaatacatccctctactcaaaaactacagtgcaaaacaagaaagctgtactgtccacctccactattcacctgtgcccacaggtaattcagtcaactcttttatgcatgtccttctaatactctttcctt

SEQ ID NO: 131967 - DNA, 692 bp, Homo sapiens
ttttcctatttccaccttaaatccatttatcatttctgaagccgtagttctaattgtaaaactaataatttgccctatgtgctcaactcttattttttataagatatcttacttttacttatatttaagccctggtataaagtttagtgtgcttttcccacctaatacctatttaaaatatgtaactattaaagtttggaaaatgttcatgagtcctgttaactcatgtacaataccagtagtatagatttcacctttggggaacattgtcttcattcattcatttatttatttattcagcatgtgcctgttataggtataactaaagtatttcacattccaatggcatggctctttacatatcccaaaggaataaaaagatttaacataatttgaagggaatgcaccaatcaagcaaaagaagagaatgaactttgagagtcatttgaagcacgtctgctatcatrtagatatgattattccatctcttggaaaaacggttatggaaaaagaaaagtttccaggaaaccagttaccaatgactcatgaattccttttcaggttgtcagctttctcatttaatgatgccctacctagtggtcgattttataattcagtcagactctctgtgaacaggcaatctcagaaagtacaaacccctagcccgatcatgcatttgcaaagaagaaggt

SEQ ID NO: 131968 - DNA, 692 bp, Homo sapiens
ttttcctatttccaccttaaatccatttatcatttctgaagccgtagttctaattgtaaaactaataatttgccctatgtgctcaactcttattttttataagatatcttacttttacttatatttaagccctggtataaagtttagtgtgcttttcccacctaatacctatttaaaatatgtaactattaaagtttggaaaatgttcatgagtcctgttaactcatgtacaataccagtagtatagatttcacctttggggaacattgtcttcattcattcatttatttatttattcagcatgtgcctgttataggtataactaaagtatttcacattccaatggcatggctctttacatatcccaaaggaataaaaagatttaacataatttgaagggaatgcaccaatcaagcaaaagaagagaatgaactttgagagtcatttgaagcacgtctgctatcatatagatatgattattccatctcttggaaaaacggttatggaaaaagaaaagtttccaggaaaccagttaccaatgactcatgaattccttttcaggttgtcagctttctcatttaatgatgccctacctagtggtygattttataattcagtcagactctctgtgaacaggcaatctcagaaagtacaaacccctagcccgatcatgcatttgcaaagaagaaggt

SEQ ID NO: 131969 - DNA, 666 bp, Homo sapiens
ttatactcaaagatttccatcataatattcgttcaatagcaaccattggtaacatcttaattgcccaacataggagtttgcttaaattgcagtcactaaattagaataaaaatagacattctaaataatgtttgcaaagtttacaatatggagatacactcttcattatgttcagtgaaaacttagtacataaaattatttgtaaaatttgactcagtatattcctgaataaaaaatggttttttwaaaagacaggatattaaaaaaaataatatgaatattgcttttatttgatgaaagaaagaatgagtgatttttcttctccttttaaatttcccaagttttaaatgcaatgcatatatgtgactttctgaccccaatgctgaggaagggcacagctttagttattaatttttagaggacatgttttttaaatcaattttttacatctcttttaccaatatctaaagctaacatagccatgccacatttttcctctcttagcttctgggtgctatctttttactaagtagcccctgagtagagtgataatgtaattcattgtctaaatctaggtagttctgagagggaagcaggtgatcttagtaatcatgcagacagcaggcacaaactaggactgtcttagaaaagcaaggacttgtagcc

SEQ ID NO: 131970 - DNA, 572 bp, Homo sapiens
ccttcctccctctgcatctccaagagctctgcattttattaattctttccactgctacataaaaaaatcaaaattggagctgagctataaatcactggcatcttctaacttgagaaaaattgagtctactttgtacttcacccttgcaacatttcatctctcggtttggcttcccttaatataaacactgcgcccagcaaatsaatgtgctaaaaccaaatgacacactttgctgctgaaagagcagaactgttttcgagcaatgggtggtcttctgaggcaccgaataggccgaaaggcggaaaaaaatgtgtaagcgtacaccattccttacaagtgggcagagcttccaaaactcgcagaaatctctgcatgttgaagcacatcaaagggatttttcccttttcagataatatttcctttgctgacatgtatttagtattgtggttggatgactcataaagatagcttcatggcgtcccaacgcagttgaagtggaacacatgccaataaacattattgtcagcctcaaaataaaaacaaaacgttcagctaagggtcaatcaatcaag

SEQ ID NO: 131971 - DNA, 531 bp, Homo sapiens
caaaaccaatctcaaatcaaaaaataaatctttgcacatacagtacattcctctgattttgcaagcttccactggaaagtttcttttctgcagccatattcctgtttgagggagttcctgttttcataggagaaaawctcagtgttggccatgagtatgcagtgagaggcaaatgtagacatagaagccactgtgctctgcctcaaacagaatggctccatgccccatgcccccaaaactagatctttatctatgcacagaaaggtgtcagcatcagccagcctccccatctactaacatgtacttgtctgtaggttggaaccttgatgtaaccatctagagtgtttgatccaaaaggattctagaaatctcacgagatcctctgtttcttcttttactacaacctgctacagactctgaagctgttgttgtggtgtgtgtgttgagggatgtctagagtaaacaacatatcaaggccaaacatttattcactcattgttcagatgtgtaaggaacacctaccatgagcca

SEQ ID NO: 131972 - DNA, 531 bp, Homo sapiens
caaaaccaatctcaaatcaaaaaataaatctttgcacatacagtacattcctctgattttgcaagcttccactggaaagtttcttttctgcagccatattcctgtttgagggagttcctgttttcataggagaaaaactcagtgttggccatgagtatgcagtgagaggcaaatgtagacatagaagccactgtgctctgcctcaaacagaatgrctccatgccccatgcccccaaaactagatctttatctatgcacagaaaggtgtcagcatcagccagcctccccatctactaacatgtacttgtctgtaggttggaaccttgatgtaaccatctagagtgtttgatccaaaaggattctagaaatctcacgagatcctctgtttcttcttttactacaacctgctacagactctgaagctgttgttgtggtgtgtgtgttgagggatgtctagagtaaacaacatatcaaggccaaacatttattcactcattgttcagatgtgtaaggaacacctaccatgagcca

SEQ ID NO: 131973 - DNA, 573 bp, Homo sapiens
gcatagacttttgatggtatctcacatgaaaaagctcatgaatacagacacaaagtctcttggatggaggttgaaatatcyggggtttcatggccaaatattcagtccattgaataaaaaatcatttggacctcagattcaagggcctgtttcaaatttggacttgtttgaaactctaacctgttttaccttctgactttctctcctgtgtccccctttcttgcctttcttgtaactggttctagcaagattttcctatcaaaataaaagcttttgagttttctgagcaagggaaatgcattctaactatccagccttttcactgtaagtggctgaatgggcatatattgctaaagactaaaggccagctgatctttggaatcaatcactaaagaatatacgtatacaggttgagcatcccaaatatgaaaatccaaaatgctccaaaatccaaaatgttatgaacagcaacatgatgctcaaaggaaatgctcaatgatgcatttcagatttcagattttcagatttggcatgctaatccagtgagtataatgcaaacatcccaaatccaaa

SEQ ID NO: 131974 - DNA, 573 bp, Homo sapiens
gcatagacttttgatggtatctcacatgaaaaagctcatgaatacagacacaaagtctcttggatggaggttgaaatatccggggtttcatggccaaatattcagtccattgaataaaaaatcatttggacctcagattcaagggcctgtttcaaatttggacttgtttgaaactctaacctgttttaccttctgactttctctcctgtgtccccctttcttgcctttcttgtamctggttctagcaagattttcctatcaaaataaaagcttttgagttttctgagcaagggaaatgcattctaactatccagccttttcactgtaagtggctgaatgggcatatattgctaaagactaaaggccagctgatctttggaatcaatcactaaagaatatacgtatacaggttgagcatcccaaatatgaaaatccaaaatgctccaaaatccaaaatgttatgaacagcaacatgatgctcaaaggaaatgctcaatgatgcatttcagatttcagattttcagatttggcatgctaatccagtgagtataatgcaaacatcccaaatccaaa

SEQ ID NO: 131975 - DNA, 370 bp, Homo sapiens
ttctccctcagcccccagagcctagtcatcatcaaatccagttgaatttgtcttctacgtacttttcaagtgcatttatgtcattctctccactgttaamcattttagcccaaataagatgttttttctcacctaaagtatagcaagagtctcttaactgatttcaaaaaacatcagagaaaaaaataaatgaaaagaaaacctagccctttttttttttttttgtagttcagtttttgcatgcattgttaaaacagagaagctatgttacctaatgttaaaaactatctgttatcctcttgggaaaatatttgtaatacatatcactatactatcagcctctgatttcttttgtgattgttgttgctgc

SEQ ID NO: 131976 - DNA, 477 bp, Homo sapiens
atatattattttaaaaatcatcactttataattcaggttaagttgccagttccatatattggtttccaaatccrcttttccacaaacttttctctctctaacgaaagaaaatgtatgctctattaaaagaaaacaaatcttacaaaatacctaaaataacctacagattattaaataataacaattaactgcctatttttcctaattgatctgtgccatgttaaccaacaaaaattctacacattagagaaatcccttattttatgaagcttttttgtttgtttgtttttgagacagaatcttgctctgtcacccagactcgagtgcagtggtgtggtctcggcccactgcaacctccacctctggggttcaagcagttctcctgtctcagcctcctgagtagctgggactacaggtgcgtgccgccacacctggctaatttttgtattttagtagagatgggggtttcactatgtg

SEQ ID NO: 131977 - DNA, 554 bp, Homo sapiens
cctcctggctgttttatgcatgtcatggcacacaacatggcagttagggagggcttcctggaggaaggaggtcctaggtcagcctaggagagaagagggattaaagaggatgtggccttttccrggtggggcagtaagccacactctgggtgatggtggactttgaccccatagggtccctgggacctaggtgaactaggccctgggggagagtttggccatccattgaaccttgcctagaatggcaccttttcatgtctcagttcctgcagtcctccaacccctgccacctaggacaattcctccaagtattccctccccaggacactggctctccctgtctgccctctctcctagaatagactacctcccagtatatgacccactgccttgcatggggcttcaagactttcctggctcagtgccccgaggaaagctcaccctcttattccatattcacccctctccagcccaggacaacaggggtagtaggggaaggagcaacgggatgtggtgggcagggtaaatttgaagaggacctgtaccagatcctg

SEQ ID NO: 131978 - DNA, 475 bp, Homo sapiens
accaaggcccgcgtttctccgccctggttcccggccgtccctcccgttccccctgcactctgggcccctcgtctcccgaggaaggtcacgagaaccggcccaacgtttgcgcactttgaagtttttttttttcttaaaaaaatcctgaaattctaaacggatcctcctcagtcgtgtaaaaaaaaaaagatttttacatctcgtctagagcatttttctaacataatccctccctagtttcaccgcgactctgcaagccctgggggaaggaggttgtgccattggagggttgggaaaactgaggctccacgacagcgaaggaggggrcttgggtgagtcctgttgttgggaaatctcagagcgattcaggagccgcagcgtttgcccccaaccctccactatgcagggtcgctttccttccttccttctctcattcctaagaacccacttcacacctgtcagggtgcaggtgcaa

SEQ ID NO: 131979 - DNA, 521 bp, Homo sapiens
ccgggggttcctacgcctggggtcggaatccgaccccccagtgaggcaccaaggcccgcgtttctccgccctggttcccggccgtccctcccgttccccctgcactctgggcccctcgtctcccgaggaaggtcacgagaaccggcccaacgtttgcgcactttgaagtttttttttttcttaaaaaaatcctgaaattctaaacggatcctcctcagtcgtgtaaaaaaaaaaagatttttacatctcgtctagagcatttttctaacataatccctccctagtttcaccgcgactctgcaagccctgggggaaggaggttgtgccattggagggttgggaaaactgaggctccacgacagcgaaggagggggcttgggtgagtcctgttgttgggaaatctcaragcgattcaggagccgcagcgtttgcccccaaccctccactatgcagggtcgctttccttccttccttctctcattcctaagaacccacttcacacctgtcagggtgcaggtgca

SEQ ID NO: 131980 - DNA, 569 bp, Homo sapiens
agcaggaagagaggcactgaggctgggcacatggggaaaaccgtggagagccggcckttggggactagaagagtgggaacaatggttgacaaatggtgagtgtggtgtagaacagcagtaacacaataccaggatccacagagtggccagggccagagtggggagaaggaacaggactctgcagatggggagggtaaggggctgggtggcgtgaagggtggttgcagaatttggggagggcagctagcctgtgacccaggttccaagggcactgaggtctgggccaggccgcttggaggcaccagagcctcagaggaggggtggggtagaggaacggatccagcatggtgtcccccttggccaccagagggagttttctaaatttgagcatggctcatcgctgcttgaaattctacgtcacagtgtggcctgcattgaggagggcccacacctgtcgctacctcagactcacctgccacctgcctcaagtgcatgagagagaacaggaaaccagaaattgtcaggatcgaggattatgggaaaagagtaaaagcctagctgtcagatct

SEQ ID NO: 131981 - DNA, 534 bp, Homo sapiens
gaagcaggaagagaggcactgaggctgggcacatggggaaaaccgtggagagccggcctttggggactagaagagtgggaacaatggttgacaaatggtgagtgtggkgtagaacagcagtaacacaataccaggatccacagagtggccagggccagagtggggagaaggaacaggactctgcagatggggagggtaaggggctgggtggcgtgaagggtggttgcagaatttggggagggcagctagcctgtgacccaggttccaagggcactgaggtctgggccaggccgcttggaggcaccagagcctcagaggaggggtggggtagaggaacggatccagcatggtgtcccccttggccaccagagggagttttctaaatttgagcatggctcatcgctgcttgaaattctacgtcacagtgtggcctgcattgaggagggcccacacctgtcgctacctcagactcacctgccacctgcctcaagtgcatgagagagaacaggaaaccagaaattgtcaggatcgagg

SEQ ID NO: 131982 - DNA, 557 bp, Homo sapiens
agcaggaagagaggcactgaggctgggcacatggggaaaaccgtggagagccggcctttggggactagaagagtgggaacaatggttgacaaatggtgagtgtggtgtagaacagcagwaacacaataccaggatccacagagtggccagggccagagtggggagaaggaacaggactctgcagatggggagggtaaggggctgggtggcgtgaagggtggttgcagaatttggggagggcagctagcctgtgacccaggttccaagggcactgaggtctgggccaggccgcttggaggcaccagagcctcagaggaggggtggggtagaggaacggatccagcatggtgtcccccttggccaccagagggagttttctaaatttgagcatggctcatcgctgcttgaaattctacgtcacagtgtggcctgcattgaggagggcccacacctgtcgctacctcagactcacctgccacctgcctcaagtgcatgagagagaacaggaaaccagaaattgtcaggatcgaggattatgggaaaagagtaaaagccta

SEQ ID NO: 131983 - DNA, 570 bp, Homo sapiens
agcaggaagagaggcactgaggctgggcacatggggaaaaccgtggagagccggcctttggggactagaagagtgggaacaatggttgacaaatggtgagtgtggtgtagaacagcagtaacacaataccaggatccacagagtggccagggccagagtggggagaaggaacaggactctgcagatggggagggtaaggggctgggtggcgtgaagggtggttgcagaattyggggagggcagctagcctgtgacccaggttccaagggcactgaggtctgggccaggccgcttggaggcaccagagcctcagaggaggggtggggtagaggaacggatccagcatggtgtcccccttggccaccagagggagttttctaaatttgagcatggctcatcgctgcttgaaattctacgtcacagtgtggcctgcattgaggagggcccacacctgtcgctacctcagactcacctgccacctgcctcaagtgcatgagagagaacaggaaaccagaaattgtcaggatcgaggattatgggaaaagagtaaaagcctagctgtcagatctg

SEQ ID NO: 131984 - DNA, 277 bp, Homo sapiens
tcatagtcagttgctcagatgtgtgggtggacccctggcttgcaacaggtgcctgaatcragggcagtcttatggaaagctgtgcccctgccctatgagacctgacctaactccaggtagttcccatcggagctgcttggccgcagaacctggggaaaccctgccccagggatgtccaccaggagtacctcccctgagctccaggctaggatctggtgctgctcacagcagtgtgggtccctgggccccaccaaagagctgtgtgggacagctgcgg

SEQ ID NO: 131985 - DNA, 508 bp, Homo sapiens
gaatatctccaagcaatcaggtgtctgttttatattttctggataacacataaaattattgaaataagggaggtacaagagttgaacttcacttttactgtggcttttgtcctgagaacccacgaaaacagggatcagcaaattacattccccactaaaatatttgtcaatccctgctctaaaatgtggtgtaggaaaataggttgttaagcagagaacagtggtctctgcaggcagggaacatagatttagtattgagaactggccagacagttgggatttgggaaacctggtcctagagagaaggaagcaagaaagagtctccaaaaatctttgtaaacaaccttgttaatgtctttaccaactcctacacatctacaggggaaaacttcaggaggtctggaaggcagaaccactgggaagctggagatccaggcaaacatttcagagctyatacagtattggggagatagagcttaagttgttgttttttctatttatatgcctc

SEQ ID NO: 131986 - DNA, 574 bp, Homo sapiens
gcttgtgactttaaaaatgaaccatcagttttagtcttgttttttcagagctgcagttaaacatgccatatgttgactaatctgcaaataatacatctgtgatcttttgtggaatttccctcctccagacttctattccaagctccacatgagttaagaagtgtcttgtgagttatagttactgtgctttccttctatgggctgaagattttgaaggcctctctgtagccacatgtgattcacattttgcataaaggaattaggttcagcaacaggcaaaaaaatagcctttgttaagtatctacaatctattaaattgctttcttaggaataataagtaaatgtratacataattttaccttcaagaaatgtgtaatataagggaagagaccgtgtacactcagacaccacacacaaacacaagttgtaataaataatagttgcatgggagataagtcagggttagaagagtgaagagaagcaaaaagtcaagagtggtggctcatacctatagtctgtgctttgggaggccaaggcaagcaagatcgcttgaggccaagagttagagtccag

SEQ ID NO: 131987 - DNA, 538 bp, Homo sapiens
agaaaataaaaacagataaatctgactccgctattatagactagaaacaggtcccaaaagattagaaagttttgtgagaccctggggaaaacaaacaaagaaacaaacaaaaaatacacacacacacacacacacacwcacacacacacacacacatatagactgtccaggaccatgatcagcaatgattgattgcctcaaagagtgagtgggagctatggcacaatcacagacatatcactgagtgctacctttgtggaggtcatagtccatctcaggctgacattaacaggttcagcagaaaggatgtgccatctgccaagaacatcactcaaccctgttcaaattattacttgcaaataaaatccctctttttgcccataatacaggacattaaaacattaaacaggtgcaattttgtctgctcctcttggaaacatttgaccacttctggagacaattttgattgtcagaccttggagggagggatggtgttgatatctagtgtgtaaatgccagcattgcagctaaatatcct

SEQ ID NO: 131988 - DNA, 606 bp, Homo sapiens
ttgtgatattagtctgcacttacctagaataagataaatttgtattttgtcatgaagcaatagtgcttttaaggcaaaaaaattaaaaactacaaaacaatatgtataatataatcaaaactttatataaaaaattaaaaaagctttccacttcctaataccatcacattggggattcaaactttaacatatgaattctgagaggtcacatgcatttggtctatcacattttaccactggcccttacaagacctctccttctcacatgcaaaataccctcatttcatctcaacaatcccaaaagtcttaactcattttggcatcaactctaaagtctaaagtctcttctaaatactactaaataagatataggtgagactccaagtataattcatataattcttccagagacaaagatcctcttcatctatgaacctgtgaaaccagattagttacctgtttccaaaaccccaagggcatgcacagcaatttgcctcaaatggcctgctaaaaaacagcctccctattgccawtgacacttcaagcattactggatttgctagatcataaggtcgaagcagtaacacatctttcacagcagcctga

SEQ ID NO: 131989 - DNA, 569 bp, Homo sapiens
gctttcaacttttccccatttggtaggatgttggctgtgggtttgacttttagtttctattttattattattattattttgagacggattcccactctgttgcccaggctggagtacagtgcgcgatctcgactcactgcaacctccgcctctcaggttcaagcaattctctgcctcagcctcccgagtagctgggattacaggcacccactaccatgcctggctaatttttgtatttttagtagagacggggtttcaccatcttggccaggctggtcttgaactcctgaccttgtgatccatccgccttggcctaccaaaatgctgggattacaagtacaygagccccaccgcacctggccgtgacttttattacattgaagtatgtcctttctatgcctgtttagttgagggtttttatcacaaaaggatgctggattttatcaaatgctttttctgcatctattgagatgatcgtatgacttttgtttttaattctgtttatgtgtctatctgtgctctttcagactcttgatgtaggcatttaatgctatgaactttcctcttag

SEQ ID NO: 131990 - DNA, 549 bp, Homo sapiens
accacatcacagtgtgatgcgcagatggtggaaggtctcagaccttgcacctttatttttccccttggccttaattcaggtgcagaaactctacattttcagtgacaagtgagatgctctctttggatcatggaagtgacaagaagtcagagtgtgccgcctacctagcatgatgctcatggactgatataacatctgcctaccagctgactctatattcctartatcttctggagatccaggctcatcaggattaattgagtttttctaactgggaatagggtggttcagtctggattagagttcagggcatccatgaatttggggttatagtcactattcagcttgatgactttcatagtatttgattggtgtaaaaattccaggattacataaaacatgtcttatgtccagtggaagtaggtagaataataggccaggcctgcccaatctcttaactctatttaagatttgaggatataaggtgcctgagagtaggacaggggtcactaagaaaaaaagtctgtgattattttagctcagggaggc

SEQ ID NO: 131991 - DNA, 577 bp, Homo sapiens
cacatcacagtgtgatgcgcagatggtggaaggtctcagaccttgcacctttatttttccccttggccttaattcaggtgcagaaactctacattttcagtgacaagtgagatgctctctttggatcatggaagtgacaagaagtcagagtgtgccgcctacctagcatgatgctcatggactgatataacatctgcctaccagctgactctatattcctaatatcttctggagatccaggctcatcaggattaattgagtttttctaactgggaatagggtggttcagtctggattagagttcagggcatccatgaatttggggttatagtcactattcagcttgatgactttcatagtatttgattggtgtaaaaattccaggattacataaaacatgtcttatgtccagtggaagtaggtagaataataggccaggcctgcccaatctcttaactstatttaagatttgaggatataaggtgcctgagagtaggacaggggtcactaagaaaaaaagtctgtgattattttagctcagggaggctggtgatcacctcggcttactataaagctt

SEQ ID NO: 131992 - DNA, 570 bp, Homo sapiens
gcttttaacttctccatgaactccagattgctttgtctacatttgcttggatacactaaaggactattaaatattacatatacaaaaccaaactcctggtttcaattcacaaagcttcttttctcctagcatttaacatttcaataattattaaattatttcagttgttcagataaaaaaaatcagaactactctaaagtagatttttttttttcctctcatacattcaatgtatcaacacatcctcatgggtctctgtgatggttaatttcatgtgttctcttggctaggttatggtggccagttgtttgaccaaagaacaaaatagatgttgaaggtatttttttttaaagataattaacattracatcagtagacagtgaacaaagcagattaccctctctaatgtgcatgggtcttcccactagctgactgggggccttccaatcagttgaaggccttaagactgaagactgaagtttcctgaaaaagaagaaattcttctcaagaattcttgactgcaacatgggaaacttatatgagtctctagtctgctgctctgtggaattt

SEQ ID NO: 131993 - DNA, 424 bp, Homo sapiens
aaacatcttaaaacccctgtgggataggtactataaaagccattttgctaaagggaaaagccatgcatagagaggtgattaattgtttagggtggcacatttattgaggggcagagccaagtcttgagctggagactgcgtgacccctccctgggcttcatctttgcactgtgcctcctcctagagctcagcatgccatsaggctaccagatggaggcctggatggatgcggggtgctgaagtgaaaggggttacatgagattggagcataagcctaggaggaactgcatggaacaaacacccacgtgaagtttacatcaaagtcaggttatatgggaatgtcatagaagagctcatttgcagccacagcattttcaggttaaagacaggccttttaaaggtagaagtccacagctgtcttgtg

SEQ ID NO: 131994 - DNA, 424 bp, Homo sapiens
aaacatcttaaaacccctgtgggataggtactataaaagccattttgctaaagggaaaagccatgcatagagaggtgattaattgtttagggtggcacatttattgaggggcagagccaagtcttgagctggagactgcgtgacccctccctgggcttcatctttgcactgtgcctcctcctagagctcagcatgccatcaggctaccagatggaggcctggatggatgcggggtgctgaagtgaaaggggttrcatgagattggagcataagcctaggaggaactgcatggaacaaacacccacgtgaagtttacatcaaagtcaggttatatgggaatgtcatagaagagctcatttgcagccacagcattttcaggttaaagacaggccttttaaaggtagaagtccacagctgtcttgtg

SEQ ID NO: 131995 - DNA, 420 bp, Homo sapiens
cccttcacctccctcccacacactcctaccacaaagtacaattttataagtgctgagcccaaataacacaaaaaagaaataggattatggaacccagacatcagatctaataaattactgatgacaaacaagatttttagcttcctaaagcagtacagccttgtagttagaacgcaaggctttgaagtctattctggttcaaattctggctccttgacttaaaaccagtgtgatcttggccaatccacctgccctatgttgcaacttyctcattagtaaaatgatacaataaaaccaacttaaatgttgttatgagaaccaaacaaaatgacatccataaatcactttgcacagtttctcttacaatgtagatatttaacacatggtagatcccatcgacccacaaaatagtgagaattt

SEQ ID NO: 131996 - DNA, 512 bp, Homo sapiens
tgctgcaataaacatggagtgcagctatctctttggcatatcgatttcaattcctttgtatatatactctgcagtgggattgatgggtgatatggtagctcaattttcaatattttgagaaaccgcaatactgttttccctaatgcctgtactaattcatgttcccatcaacagtatatcagtattcccctttctccacatccatgccaacatttgttatttttttgtctttttgttyatagctgttctaatggtggtgaggagatatttcattatggttttcacttgcatttccgtgatgattaattatgtcaaacattttttcatatacctgttggccatttgtatgtcttctttggggaaatgtctattcaggtcttttgcccattaacaaaaaatcaaattgttaattttttttctactgagttgagttctttttatactcaatattaaccccttgtcagacgcataatttgcaaatattttctcccagtctccattttgtaggttgt

SEQ ID NO: 131997 - DNA, 593 bp, Homo sapiens
ctttttcatgtatggatagttgtacacattgatgtttttgtggggggatgatcctggagagttctactgtgccatcatgctgagtttagttctggggttgttttcttaatttcttttttgaaaagtttgtttcagagtatggagactagcaacattattgatttttatatgttgattttatagcctgcaaatttactgatttgtttattagtttttagggcttttttggtgggattactatggttttctataaataagatcatgtcatctgcaaacagacaatattacttctttctttccaaaggaacaccttttttwttcttgcctagttgagaaatctcacaatttctcacaaataaagtatacccccattaattcatcaggtcacagtcattctggagaaaggctgtttacttacttttctacaagaggaaatcgtgattatttatacctttgcatttgaccagttgctctcaaagccctcaagtctctggggagaggaagaaaccttgcttggactataatcacactgtctactttacaagtgtgaaaaaagtgctattaattttagcagcacttcaagaaacaaaaac

SEQ ID NO: 131998 - DNA, 613 bp, Homo sapiens
tatcaggagtgatagccattcataagcccactcttaagcgtgttctgttggcatccacttaccctagaattgtctactctttatcagcatcctgggacaactgtatacctatgaaatggatacttacaagggtggtagcatataacaaaaagtcctttactcatatacataggtggaaaaaaaggaaattatctaggggttttyctgtgtatttagcagccaaaaaaaagtttccatttgcagtacacaaagtaatggctcccaaagatgtgggagaataagtcccttttgccatgtaaggtaacatattcttaggttctgggccctaagaataggtataggcaatcaaatttaggatactcagatagaaacattactttggattatcctggagagttcaatataatcacaagtgtttttataaaagggaggcaggagagtcagagtcagagaggaagatgtgacaatagaagcagaagtgacaatagaagaagaatttggggtgacccagagccatgaaccaagaaatgttggcagcctctaacagctggcaaggaaaaggaaactgattttcccctgcgacctccagaaggaagtagcttgttaataatat

SEQ ID NO: 131999 - DNA, 613 bp, Homo sapiens
tatcaggagtgatagccattcataagcccactcttaagcgtgttctgttggcatccacttaccctagaattgtctactctttatcagcatcctgggacaactgtatacctatgaaatggatacttacaagggtggtagcatataacaaaaagtcctttactcatatacataggtggaaaaaaaggaaattatctaggggtttttctgtgtatttagcagccaaaaaaaagtttccatttgcagtacacaaagtaatggctcccaaagatgtgggagaakaagtcccttttgccatgtaaggtaacatattcttaggttctgggccctaagaataggtataggcaatcaaatttaggatactcagatagaaacattactttggattatcctggagagttcaatataatcacaagtgtttttataaaagggaggcaggagagtcagagtcagagaggaagatgtgacaatagaagcagaagtgacaatagaagaagaatttggggtgacccagagccatgaaccaagaaatgttggcagcctctaacagctggcaaggaaaaggaaactgattttcccctgcgacctccagaaggaagtagcttgttaataatat

SEQ ID NO: 132000 - DNA, 613 bp, Homo sapiens
tatcaggagtgatagccattcataagcccactcttaagcgtgttctgttggcatccacttaccctagaattgtctactctttatcagcatcctgggacaactgtatacctatgaaatggatacttacaagggtggtagcatataacaaaaagtcctttactcatatacataggtggaaaaaaaggaaattatctaggggtttttctgtgtatttagcagccaaaaaaaagtttccatttgcagtacacaaagtaatggctcccaaagatgtgggagaataagtcccttttgccatgyaaggtaacatattcttaggttctgggccctaagaataggtataggcaatcaaatttaggatactcagatagaaacattactttggattatcctggagagttcaatataatcacaagtgtttttataaaagggaggcaggagagtcagagtcagagaggaagatgtgacaatagaagcagaagtgacaatagaagaagaatttggggtgacccagagccatgaaccaagaaatgttggcagcctctaacagctggcaaggaaaaggaaactgattttcccctgcgacctccagaaggaagtagcttgttaataatat

SEQ ID NO: 132001 - DNA, 486 bp, Homo sapiens
aatgctatagcataccaagatttatacaaagactaggaaaaaggttctgcatgtgttatgtagtaattagtccagcaatagtgagaatctgaaattaccacaagtgctccttatgtcagaagccccagactgtaaggcagcaggggatggggtgggcatgtcggcaaaatgacggtatacctactatgtacccattaaaattaaaagtttgaaaaaaaaagtacagtacaaaaagcaggagcctgtagctgattctgcaaaaatttcactttgggcccttgaataatgattttacctcttttgattttctttttcccacttgtaaaacaataggattaagacagagtgagatttttaaaacactttttttatttttatagctttagaggtgcagtggcttttggttatgtggatgaattatataamagcaaatcttgagattttagcgcactcctcacctgagtagtatatattgtacctaatatg

SEQ ID NO: 132002 - DNA, 526 bp, Homo sapiens
agcaccagcatattttatctttgcttgtttttctgtgcccaccaataatggcaatatacatactatctattttttatcaggtactatcttaagtgcttaacacayatttatttatttaatctttaaaacaaccttgtgatttaagtatcattaatatccccactgcagagatagagaaactgggagaaagtgagtaggttcagttttgaactcagtgagattgaaacacctgtgagatatttatgtgtggatattcaggagcctattgtacacaatcttggaactcagaagagaaacaacattagaattagatactagaatcttcagttgatggaataaaaccaggtggactggaggagatttcttggaagtgtgcacagagtaagaaagggaccagagccctaaagagcagcaaacacatcatgatctgtcactgaaggcttcaaatgagtatatttgctggatcctttgcagttgaactgtttactgagagtgtctgtccctctataaagaaaaaggagcccag

SEQ ID NO: 132003 - DNA, 526 bp, Homo sapiens
agcaccagcatattttatctttgcttgtttttctgtgcccaccaataatggcaatatacatactatctattttttatcaggtactatcttaagtgcttaacacacatttatttatttaatctttaaaacaaccttgtgatttaagtatcattaatatccccactgcagagatagagaaactgggagaaagtgagtaggttcagttttgaactcagtgagattgaaacacctgtgagatatttatgtgtggatattcaggagcctattgtacacaatcytggaactcagaagagaaacaacattagaattagatactagaatcttcagttgatggaataaaaccaggtggactggaggagatttcttggaagtgtgcacagagtaagaaagggaccagagccctaaagagcagcaaacacatcatgatctgtcactgaaggcttcaaatgagtatatttgctggatcctttgcagttgaactgtttactgagagtgtctgtccctctataaagaaaaaggagcccag

SEQ ID NO: 132004 - DNA, 570 bp, Homo sapiens
ttatcaaatgcttttccagcatcagatgaaatgactttatggtttttgtccttcattctgttgataggatatatcacattgattgatttgcatatatttaaccatccttgcatctctaataaatcccacttggtcatactaaatgatgtctctartgtgttgaatacagttcactagtattttgctgaagatttttacatcaatattcatcagagttattgaccagtagtttttttttatgcatctttgtctgattttgaaataagggtaatactaacctatagaatgagttgggaagtattccctcatcctctgtttttcagaatggattgagtgggatcggtattagttgttccttaaatgtttggtagaattcagcagagaagccatcagatcccaggcttttctttactgggggactttttattgtggctttgttctcattactttttattggtctgttcgggttttgcatttcttcatggttcattcctggtaggttttatgtgtctaggaaattgttcatttcttctagattttccaacttattggcatatagtttcttatagt

SEQ ID NO: 132005 - DNA, 580 bp, Homo sapiens
aattaaggaagtcaaattgtccctctttgcagatgagttgatcttatatttagaaaaactggccaggtgcggtgkctcatgcctgtaatcccagcactttgggaggctgaggtgggcagatcatgaggtcaggagatcgagaccatcctggctaacatggtgaatacccatttctaataaaaatacaaaaaattagccgggcgtggtggtgggcacctgtagtcccagctactcgggagactgaggcaggagaatcacgtaaacccgggaggcagagcttgcagtgagccagaattgcgccactgtactccagcctgggtgacagagtgagactctgtctgaaggaaaggaaaggagaggagaggggaggggagggagaacgtaagcactcctccaaaaaaacataaatcttagatctgacttaaaaatttagtcaagttgcagaatacaaaatcaacatacaaaaatcagtgatgtttctaaacaccagtaatgaactagctgaaataaatcaagaaggaaatactatttacaataggtacaaaaaatatgaaatacctaggaataaatttaaccaggg

SEQ ID NO: 132006 - DNA, 580 bp, Homo sapiens
aattaaggaagtcaaattgtccctctttgcagatgagttgatcttatatttagaaaaactggccaggtgcggtggctcatgcctgtaatcccagcactttgggaggctgaggtgggcagatcatgaggtcaggagatcgagaccatcctggctaacatggtgaatacccatttctaataaaaatacaaaaaattagccgggcgtggtggtgggcacctgtagtcccagctactcgggagactgaggcaggagaatcacgtaaacccgggaggcagagcttgcagtgagccagaattgcgccactgtactccagcctgggtgacagagtgagactctgtctgaaggaaaggaaaggagaggagaggggaggggagggagaacstaagcactcctccaaaaaaacataaatcttagatctgacttaaaaatttagtcaagttgcagaatacaaaatcaacatacaaaaatcagtgatgtttctaaacaccagtaatgaactagctgaaataaatcaagaaggaaatactatttacaataggtacaaaaaatatgaaatacctaggaataaatttaaccaggg

SEQ ID NO: 132007 - DNA, 634 bp, Homo sapiens
ttatctgaaatttctatgactgttatatcagtttatcatcatcaccatccaactactatcttcaggaagtgaactctgaaaatctcacatctcagaaaagctggtaattttcaagaartttcagaagaaaaaaacatgacactattgaagttgaactaatctatttaaataaaaatcatactttctgattctaaaatctttttgatagggccatcaccaaacctataacacagtataatttgcataaatgtaatgtgatgtttatcacactgataaacgcaaggaaaataaaatgataattattacttaggattttatttgcagtggtttcagaaagcagtttacaaataatttttatgttatttacatgtgtaagcttaaaactagaaaactaattattcagggacactaatatctttacttgttttcatatatttttgttgaattcttatattttctagtcaaatattaaggcaatttttaaaaggatttcttttttaaatttaattttgataggcttttcaggcatttggttagtagcaaataaataaggcattttttttaaagataagatttagcaacctctgggggccaacactatgtgtaattttgaatccaaagattatggcacaga

SEQ ID NO: 132008 - DNA, 634 bp, Homo sapiens
ttatctgaaatttctatgactgttatatcagtttatcatcatcaccatccaactactatcttcaggaagtgaactctgaaaatctcacatctcagaaaagctggtaattttcaagaaatttcagaagaaaaaaacatgacactattgaagttgaactaatctatttaaataaaaatcatactttctgattctaaaatctttttgatagggccatcaccaaacctataacacagtataatttgcataaatgtaatgtgatgtttatcacactgataaacgcaaggaaaataaaatgataattattacttaggattttatttgcagtggtttcagaaagcagtttacaaataatttttatgttatttacatgtgtaagcttaaaactagaaaactaattattcagggacactaatatctttacttgttttcatatatttttgttgaattcttatattttctagtcaaatattaaggcaatttttaaaaggatttcttttttaaatttaattttgataggcttttcaggcatttggttagtagcaaataaataagscattttttttaaagataagatttagcaacctctgggggccaacactatgtgtaattttgaatccaaagattatggcacaga

SEQ ID NO: 132009 - DNA, 488 bp, Homo sapiens
tttgactttctacacctaagtcatctaatactcacaaattttttctttagattctaaaatttcatttctgtaattatctttcctattcttttgtgtctttgttggtttattctttcttaaaattaatattttcattgtaacttcagatggagcatagaaaaaatacatgctccaattactttattataaatcatagaattacttaaagagttctagttttgtatatttaayaagcaatttattgtataccttatgcataatacttttgagttaagacattgagagcacagaatcggggtcatttaatttcccacattccttatttacaagaaattaaatttctcacaagagagtaggggaaaaagcagcatgattttaggaatcaaaaggtcataatataatgtgggactgtgtcattagctctgtgcatcttgagacagtcctttgcctcccctggacatgtttacttctcattaaattaaataaat

SEQ ID NO: 132010 - DNA, 562 bp, Homo sapiens
atagttaatatatgcttgcttctgggggtaataagaagagaaagccctttgaatgaattaaagggaaaggcatacatttacaaaagtaagagaagtcaattggaaatgttaatattatttttatattcatggtagaagtagaagtgattcaaaaaattataaatcatattggaggaaagcactagaatttacttgtaatttctttgcccgaaactgctatgttttatttcttagaagttagaactcaggccactaaatttgttttcctgctaaaactagkaatgaaattggattatatcctggttttgacttttaccccattgaataatattttaccacaaaatcaatttgtggcttggtaaaagcattttaattgggcagttttttggttcatattaaattcccatcccaagatctgcctgatttttacaagaaacattttcctatgggactgtgtttgaatagacatttaaaacacatgtctaccactttagaagaaaaagtaacctctgatatttggacaacatatgcttggtacagaggttgaagaatagcaatctct

SEQ ID NO: 132011 - DNA, 510 bp, Homo sapiens
ccctttttgcatcaaagtgatgaaaaaggaacactgaaaaacagttgaagacacagagggcgttgatgctaatggaacattccagaaggcagagtggggccagataaaagaaagtagagtgcagtatgagaatgctgaatgatgcatggtaaagtgakataaagactgtagaaagatagtttagaattgtcttctggagagtttgcaatagtcctcccaagtcgagggtcatttcagatgtttcaatgattggcaagaaaagatgtagacgaagagaggaaggccaaccgtttacctcaaatgtgtatggcactttccccacatccatttagagcaggttatcccttcaaagatcctttcggtggatgctggtcacagagctaccacattcttaggaatattattgatgaaaagaaaaaagaaagatgtaatattttcctgaggtaaaataatgtttcataaggtaaaatagaagtcagtatttattttggggatggcaaactttacctg

SEQ ID NO: 132012 - DNA, 599 bp, Homo sapiens
tataagttacatgcttatttcattctataaacattgcctacttgtttttcaatatatctacatatgccaattcttaattttagttcatgaagattccttctttcacccttatccttataatcatttggtatagtttgaccctctaatttttatcaatttgatatatgaaagttattaatttcttgctttagttttacttttttctgataactaacaaaactgaggatttcttgataaatgtgcctatcatttagtggccatggtgtgtaaagggagcatccaaaaaccaggtcttgagggtaaagaagatggaaggatgttatgtcatgacctggtttccatggtaattactaagtttgaaaaaaacacatactgaccctaagagatgagatgtaatctgtgatggatgggaggcagaacggagctgctccagaattcaaatcctctgtatcaagatccaggtctttccaggagacacagacttgggcctgggacagaagcccagagagagagaccttcagaatggacaagamcagaactcctgacgagggccagggttgtaaaaccaaggttcatctcttcttcctaaccaaggggga

SEQ ID NO: 132013 - DNA, 599 bp, Homo sapiens
tataagttacatgcttatttcattctataaacattgcctacttgtttttcaatatatctacatatgccaattcttaattttagttcatgaagattccttctttcacccttatccttataatcatttggtatagtttgaccctctaatttttatcaatttgatatatgaaagttattaatttcttgctttagttttacttttttctgataactaacaaaactgaggatttcttgataaatgtgcctatcatttagtggccatggtgtgtaaagggagcatccaaaaaccaggtcttgagggtaaagaagatggaaggatgttatgtcatgacctggtttccatggtaattactaagtttgaaaaaaacacatactgaccctaagagatgagatgtaatctgtgatggatgggaggcagaacggagctgctccagaattcaaatcctctgtatcaagatccaggtctttccaggagacacagacttgggcctgggacagaagcccagagagagagaccttcagaatggacaagaccagaactcctgacgasggccagggttgtaaaaccaaggttcatctcttcttcctaaccaaggggga

SEQ ID NO: 132014 - DNA, 396 bp, Homo sapiens
aaagtttgtggcttctcctatccgtaaggacggaagccatgagtgttcactgaacaaatcacatggtagactcctattgaatgtttaaggatggatacaatcatagaaacatgaaactggaccacatatcttatttaatttctcaggaaagctgaatttacaaaaagatgctccgcaacatagatacaaggtgctgtgcccaactcaggaccacaaagctgaggaagcttcttcttcttcytcagactacttctcttgtatctcatctgaagacaagctcactggtactggtaagaagagactattgaacgatgcagaagtgatgctggatccaggcataatccagagatgacttgtgtggttctgctcatcagttgacataaggctgcccagagt

SEQ ID NO: 132015 - DNA, 327 bp, Homo sapiens
gaacaggcgtttctccaggggagagcaggtggtctgtttggccacttcgggtggaacaagcccgtgacacagctgaggggagaggttgagtgcacagtgggtgtaagagtctgagtgcaaaggaaccatgcaggatggagggagaagtggcatcagtcaaccatgcagtattgtagtttaagagactgggggaggggggagtgggacgtgcatktcctgggaggtgcctgtggctggtgcctctggacacggtggtagggctgggcatcccttcttctgctgggggatctgggggaacctggtttgtttcgctgctgggtggaacct

SEQ ID NO: 132016 - DNA, 327 bp, Homo sapiens
gaacaggcgtttctccaggggagagcaggtggtctgtttggccacttcgggtggaacaagcccgtgacacagctgaggggagaggttgagtgcacagtgggtgtaagagtctgagtgcaaaggaaccatgcaggatggagggagaagtggcatcagtcaaccatgcagtattgtagtttaagagactgggggaggggggagtgggacgtgcatgtcctgggaggtgcctgtggctggtgcctctggacacggtggtagggctgggcatcccttcttctgctgggggatctgggggracctggtttgtttcgctgctgggtggaacct

SEQ ID NO: 132017 - DNA, 505 bp, Homo sapiens
accaatccctatgtctgaccctaccttagattaccagctgatccttagccccgaaccccggttctttaacactgtgtgctggccctgagctcccacctcagtcttccccttaatggtgactcctcctccatcttttagtctttctttccctccaactttgaacctcacatcctgaaaccccctagtctgtcccctaccctggaactctgattcctatctttggtttgtacatataaatcccttgctttttggggctccaacacccggctcccaagtttaaggtgtgacccgacccttggctaaattttcctgacttccatttttaagccctggccgcggcgaggctgcccaaacagcgctcccatccatgcctcgtccccggtccccgacttccacacctggtctccgtgttcccagttcctcrgctgcccaagtagacgcctttgcctccatttgaacccacaaccagtccctgctccatgtgagcccacaccccgatacctgc

SEQ ID NO: 132018 - DNA, 574 bp, Homo sapiens
ccaggaggttgaggccgcagtgagccatgtttgtgtcactgtactccagcctggggaacagagcaagatgctctctcaaaaacaaaaagcaagctgggtgtggtggctcctgcctgtaatcacagcactttggaaggctgaggtgggagaactgcttaagcccaggagttcaagaccagtctggacaacatagggggactccatctctcaaaaacaaccaaccaaaacaaagccaaaaaagaacataggccaacatcactaacaaacatagatgtaaaagtcctcaataaaatattaacaaaccatgtttagmaacacatcaaaagagatcattcactatgattaagtgagattcatcccagggatgccagtatggctcaacatatgcaaatcaataaatgtgatccatcacattaaagagaaccaagaacaaaaaccatataatcactccagcaagtgcagaaaaggcatttaataaaagaatgggttgagggagtggagcccatagtcagagcagcagtggtctgggattttggaagtagaaagaagggcagcaccactggccaggaccacc

SEQ ID NO: 132019 - DNA, 574 bp, Homo sapiens
ccaggaggttgaggccgcagtgagccatgtttgtgtcactgtactccagcctggggaacagagcaagatgctctctcaaaaacaaaaagcaagctgggtgtggtggctcctgcctgtaatcacagcactttggaaggctgaggtgggagaactgcttaagcccaggagttcaagaccagtctggacaacatagggggactccatctctcaaaaacaaccaaccaaaacaaagccaaaaaagaacataggccaacatcactaacaaacatagatgtaaaagtcctcaataaaatattaacaaaccatgtttagaaacacatcaaaagagatcattcactatgattaagtgagattcatcccagggatgccagtatggctcaacatatgcaaatcaataaatgtgatccatcacattaaagagaaccaagaacaaaaaccatataatcactccagcargtgcagaaaaggcatttaataaaagaatgggttgagggagtggagcccatagtcagagcagcagtggtctgggattttggaagtagaaagaagggcagcaccactggccaggaccacc

SEQ ID NO: 132020 - DNA, 397 bp, Homo sapiens
tgtcacccttgttcaagctgccattgcaatagtctcctactggttcctcctgcctccatctttgtactgcagtagtcgttattccacacacagacacacacacacacacacacacacacacaaaaaaaaacccatagtgatattttcaaaatatcaccagctgtaaatttatttataaacttgaatatatcaaattatttaaaatggcaaaactaaactatggtacktataggtacatccttgcaagctaaaaccatggaaaacgctaaaaagtaatgactatacagtttaagataatggttacttttgggcaatgggatggacatattgggggaggctttacggtggttaacaaagttccacttctaaatctgggtggtggtttcaaggatatttc

SEQ ID NO: 132021 - DNA, 521 bp, Homo sapiens
tctactcctggttaaaatgctgtgaacatcattgaaatgacagyaaagatttcaggagagtacataaacctaattgacaaaacaggggtagggttagagcggattgattccaattttggaagatgttctactgttgataaaatgctatcaaaaagcaacacacgctacagaggaatctttcataaaaggaagagtcaatcaatgggacaaacttcattgttgtcttcttttcagaaattgtcacagtcactctagccttcagcaaccatcaccctgatcagtcagcagccatccatatcaaggcaagagcccccaccagcaaaaaggttacgacttgctgaaggttcagatgattggtggcatgttttagcaataaagtattttgaaattacactatgcacattgttttttagacataatgctattacacacttaatatagtacagtttattgtaaacataattttttatgcactgggaaaccaaaaattttgtatgacttgctttgttgtgatagtcact

SEQ ID NO: 132022 - DNA, 521 bp, Homo sapiens
tctactcctggttaaaatgctgtgaacatcattgaaatgacagcaaagatttcaggagagtacataaacctaattgayaaaacaggggtagggttagagcggattgattccaattttggaagatgttctactgttgataaaatgctatcaaaaagcaacacacgctacagaggaatctttcataaaaggaagagtcaatcaatgggacaaacttcattgttgtcttcttttcagaaattgtcacagtcactctagccttcagcaaccatcaccctgatcagtcagcagccatccatatcaaggcaagagcccccaccagcaaaaaggttacgacttgctgaaggttcagatgattggtggcatgttttagcaataaagtattttgaaattacactatgcacattgttttttagacataatgctattacacacttaatatagtacagtttattgtaaacataattttttatgcactgggaaaccaaaaattttgtatgacttgctttgttgtgatagtcact

SEQ ID NO: 132023 - DNA, 521 bp, Homo sapiens
tctactcctggttaaaatgctgtgaacatcattgaaatgacagcaaagatttcaggagagtacataaacctaattgacaaaacaggggtagggttagagcggattgattccaattttggaagatgttctactgttgataaaatgctatcaaaaagcaacacacgctacagaggaatctttcataaaaggaagagtcaatcaatgggacaaacttcattgttgtcttcttttcagaaattgtcacagtcactctagccttcagcaaccatcaccctgatcagtcagcagccatccatatcaaggcaagagcccccaccagcaaaaaggttaygacttgctgaaggttcagatgattggtggcatgttttagcaataaagtattttgaaattacactatgcacattgttttttagacataatgctattacacacttaatatagtacagtttattgtaaacataattttttatgcactgggaaaccaaaaattttgtatgacttgctttgttgtgatagtcact

SEQ ID NO: 132024 - DNA, 613 bp, Homo sapiens
ctgttactgcatttcacaaattctgttaaggtgtatctaatacttatttagttaagaatatttttagtttctctttagactatttcttagatccatgtgattttagaagtgtgctgtttaatctccaaatactttgagattttccagccttttttgttattcatttctagtttaattccattgtgatctgagaacatactttatatgattcttattcttttatgtttgttgaggtatattttataaaccagagtttgttccttggtgtgtattccatgtgagcttaggaaaaatttgtattttgatgttgctggttgaagtattcrgtaaatgttaattagattcagttgattaatgatgctcttcagggtaactatattcttacttgttttctgcctgttggatctgttcattaatgatagaggtgtgttgaaatcttcaattataagagtggatttgcctttttctgcttgcagtttaatcattttttgcctcacatattttgataatctgttattaggcacatatacaataaaactattctggcttattggagtactgattacttttcattatttaatgacccattttatcctttataatttcctttctt

SEQ ID NO: 132025 - DNA, 565 bp, Homo sapiens
gggaacattttaagttttgacagatattaacaaatatctcaccaaaacatctttacaaaattacacttttatcaacaatttatgagactatcttttccttcttttttgccaatatattgtaaatttttggatcttttgttaatgtcttagacaaaaaagggtatcttattttgatttgtattttcctaatcaccagtgaggttgaaaatatwttcatatcttttttattcttgtaaatcacctcttataacctttgctcttttttccaaatgagttatcatttcaaaatagatgtatatgtattttttaaaacttaacctttgcctcatgtagacaatgcaaagatgtcctacttatctatcattacttttttaatttctctgatgttaattttttcaccctgtaggagatttaaatttctctgtagtcaaatgtatcagtatttttaactattggagttagatataaaatttcatcctatatacacacataaacacatacacattttaggtcaagattacaaacattaagattattaaattgctgccttatattttcttctata

SEQ ID NO: 132026 - DNA, 608 bp, Homo sapiens
ccaagctgtcaggggttccctgagtagttgtttaaaggtcttttcattctccaagagagtctcctatatcacttgttccccttttgctgcagttgttgagcttttgctttcctctgcattagagagtgagsttgccaatgattcttgtcccccttctatgtcatcagtcttcctctccaaaacattctcagggattccaagttttcatgtttcaatctggctcaggtatgatagctctgaattttggtcatttccatttattttctcctaggtgggcaaatctacatgctaacatttcaatttttgtctcctggtcttcaattttgtccactaagttggatgcaaggagagaagtggaaatgcacatgcctttctagcggcaattcttcctttagctgtttaatttttgtttctgctactaggtaggcctctgttaccaaatgaatggactacagaagtggccaacccactgcagtggctaccagccacccttccttactgcagtgtgatatgtagctttgaagtaataactgctcttcgccaaccagcattttcagggtactaatgtggaggtccccaagtgtctaacagacatgccacaccacccc

SEQ ID NO: 132027 - DNA, 608 bp, Homo sapiens
ccaagctgtcaggggttccctgagtagttgtttaaaggtcttttcattctccaagagagtctcctatatcacttgttccccttttgctgcagttgttgagcttttgctttcctctgcattagagagtgagcttgccaatgattcttgtcccccttctatgtcatcagtcttcctctccaaaacattctcagggattccaagttttcatgtttcaatctggctcaggtatgatagctctgaattttggtcatttccatttattttctcctaggtgggcaaatctacatgctaacatttcaatttttgtctcctggtcttcaattttgtccactaagttggatgcaaggagagaagtggaaatgcacatgcctttctagcggcaattcttcctttagctgtttaatttttgtttctgctactaggtaggcctctgttaccaaatgaatggmctacagaagtggccaacccactgcagtggctaccagccacccttccttactgcagtgtgatatgtagctttgaagtaataactgctcttcgccaaccagcattttcagggtactaatgtggaggtccccaagtgtctaacagacatgccacaccacccc

SEQ ID NO: 132028 - DNA, 578 bp, Homo sapiens
gaattctattccttatatctaaatattattattctaagcatagatttgtaggtttgtcttcataggatgtgtttctaaatttggaaaactattccttctgtggaaaatctatagagagctatccactcagtgctgtctatatctagttcaattactaatgcattttcttcctatattgttttatggggttataggtgattcctactttccttagagattgatttactgattacattttgtttctcaatatcttataattgagattggcttcagagggaagggtgactgaattacagataactttaccagttatcttagactggaagccctgaatattcttttcctaactgggaactactacactgagagtaaaaatggaggattcatgtttccctgacagtgggcatattattcacatatagatagatagatagatagatagatagatagatagrtagatagatagatagacagatcatatagtaaattttaaaaagggatgtggcatgtttgagtttgaagacaaatcttggtctaatttggcaacaaaatagcaaatagttcaacaaggagaataa

SEQ ID NO: 132029 - DNA, 520 bp, Homo sapiens
tctgtgtcaccattttcagcctcagtgggtggctaacacagggaagtaacatgagtaagaaaggatatgaaagggatccttggtcatttgtgtttctcagaatgccactgaacagaaagcatggcccctgggggctgtcagtgtccccatttacccagtagatgtaacacactctgtattcgctgtgattctcactgcactccatgtgtcctgggtacagttgacttctctgtccagggcatcctaaatgttatatgtgagtggggaggcaaggaatggcagtggacccatagattacacstgtttcctctgatcccatgcatgctccactgtctcattggactttacctatagaacacaagttcaaagaaaaaattattcaggatttcaggacggctacagcagagcattaaaccacatgcatggccctctgagtgtgggtccctgtgcaacgcgcacaaatcatgagctcttggagccagccctggagaaaagtgaagccatccttcaaagagcaaag

SEQ ID NO: 132030 - DNA, 621 bp, Homo sapiens
ctggttcaatgtaggaatctctctctgcaattatctgattattatccattgtttatccagggaatgtatgcagaattgatctcattggtcagcaaacaacatgtattacactcacaactttatatgtagattggtcatggaaggcacaaattaccaaaataaaactaatgaatattcatcaaagattgccttagaatcctagaacgctaaagctagaaagatagcttaaccttcatccaataaatatttgctgagtgccaaatatatgttcagaaccatgctagtcactgttgatatatgaatatatcattgaagtaagattcctgttctcacgggatttatcttatagtgggggcatttcctaatgtatatctaatatgaccatctcaatcacagctgargaaactgaagcccagagatgttaaatgacttgcaggcatacctaggtcacacagcagttaatggcagatgttggagtaaaattcaagcctcttgactcctattgggttggtcttttgtctatatcctgaaattcctgatttacatttttgtataccgtcagaaagtattccttgctgtccaccaggatgactgagatagaaaatctgatccctgagtttc

SEQ ID NO: 132031 - DNA, 483 bp, Homo sapiens
atctttgtctgataaatatttgtgagctatacttggcaatctatgttgaacaaatgaatgaataaatcctggagccattttgtatttagctttataagatactagatcctgaaaagatcctgaagcaaagttactcgaaccctttaatgtaaaacaggagtatattagtccrttttcacacaaggcacttcttacatggcggcaggagacagagagagagcgaaggggaaactgccacttttaaaccatcagatcttgtgagaattccctcactatcacaagaacagcataggggaaaccacttccaggatcgcatcacctcccatcaggtccctccctcgacatgtgggggttacaattagagatgagatttgggtggggatagagccaaaccatatcaaggaggaaagtgaagttgagtacttgccttgagatctaattgactgaattaactgatgtgtagacagggcgaagttgggggta

SEQ ID NO: 132032 - DNA, 499 bp, Homo sapiens
tctttgtctgataaatatttgtgagctatacttggcaatctatgttgaacaaatgaatgaataaatcctggagccattttgtatttagctttataagatactagatcctgaaaagatcctgaagcaaagttactcgaaccctttaatgtaaaacaggagtatattagtccattttcacacaaggcacttcttacatggcggcaggagacagagagagagcgaaggggaaactgccacttttaaaccatcagatcttgtgagaattccctcactatcacaagaacagcatargggaaaccacttccaggatcgcatcacctcccatcaggtccctccctcgacatgtgggggttacaattagagatgagatttgggtggggatagagccaaaccatatcaaggaggaaagtgaagttgagtacttgccttgagatctaattgactgaattaactgatgtgtagacagggcgaagttgggggtaaaatctatccatggcta

SEQ ID NO: 132033 - DNA, 483 bp, Homo sapiens
atctttgtctgataaatatttgtgagctatacttggcaatctatgttgaacaaatgaatgaataaatcctggagccattttgtatttagctttataagatactagatcctgaaaagatcctgaagcaaagttactcgaaccctttaatgtaaaacaggagtatattagtccattttcacacaaggcacttcttacatggcggcaggagacagagagagagcgaaggggaaactgccacttttaaaccatcagatcttgtgagaattccctcactatcacaagaacagcataggggaaaccacttccaggatcgcatcacctcccatcaggtccctccctcgacatgtgggggttacaattagagatgagatttgggtggggatagagccaaaccatatyaaggaggaaagtgaagttgagtacttgccttgagatctaattgactgaattaactgatgtgtagacagggcgaagttgggggta

SEQ ID NO: 132034 - DNA, 422 bp, Homo sapiens
acactgactttatcacagaataaaatagggttgagcttgcttttattctgtcatagaattctagaattcaaattttcaaataaattttggtgtgtctgctttcaaaatatttctcagccacattcatattgtccagtctctactaccaccatccttatttaaaccattatcawctcttgcttcactgcttgaaaatctcatagttagctttcacgttttttattcaccttccaaaactgttatcttggagtaactgcagtgatcttttgaaatgggattatagcacatccctccttaaaatgcttcagtgacttcccattgccctttgagcaaaatctaaattttctctgtcatacatagtcaatctcctcctgttcagctctgctgcagccacacgagccttctttccattcttcaagctc

SEQ ID NO: 132035 - DNA, 422 bp, Homo sapiens
acactgactttatcacagaataaaatagggttgagcttgcttttattctgtcatagaattctagaattcaaattttcaaataaattttggtgtgtctgctttcaaaatatttctcagccacattcatattgtccagtctctactaccaccatccttatttaaaccattatcatctcttgcttcactgcttgaaaatctcatagttagctttcacgttttttattcaccttccaaaactgttatcttggagtaactgcagtgatcttttgaaatgggattatagcrcatccctccttaaaatgcttcagtgacttcccattgccctttgagcaaaatctaaattttctctgtcatacatagtcaatctcctcctgttcagctctgctgcagccacacgagccttctttccattcttcaagctc

SEQ ID NO: 132036 - DNA, 581 bp, Homo sapiens
gtagatcaacctaaagtaccacctgtgacagttttaatatcttatagattcttgccctgcaattctatcttctcatctccctttcctacagggtgtgtatgctcagaatctttttgggttcttggaacaacagttaaactactccttccttatcaggttacatgcgtgactggttacacacacagacacacacatacaattcacctcctttgcttcacacttcatttctagtgtctttcagrtttaactactagcataaaactgtctttacattccttattttaatgattgttacaactctgattgcccattaactttaagttactgttataaataagactagagtcactattaattaactgggatgtagtcaggaacacaagtataatgtaatttctctcactgtctcataggtccatagagagacccaagtgatgatagcaaccaaccattcaaggtaacatatttctacaactccttggtggacaataaaggcttaacccaaagatgcctccctagggaagatatcacgcttgatggtggccacccattctcatgtccttaacaataaaaatagctcc

SEQ ID NO: 132037 - DNA, 585 bp, Homo sapiens
cactgtttctgaactttgtacactgacggctgctctaagatagcataagcagaagacaggaatggtaatatggtttggatttgtgtccctgcccaaatttcatgttgaattggaggaggagcctggtgggaggtgattggatcatgggggcattttcgcccttggtgttcttatggtagtgagtgagttctcttgatatctgatggtttaaaagtgtgtggcacttgccccttcaccctctctctcctgctctgcmatgtgaagaaggtgcttgctccccctttgccttctgccatgacagtaagtttcctgatgtccccccagtcatgtttcctgttaagcctgtgaaactgtgagtcaattaaacgtcttttattcataaattacccagtctcaggtagttccttatagcagtgtgagaacggaataatatagaaaattggtatcaggagtgggatattgctataaagatacctacaaatgtggaagtgactttggaactggataatgggcagagattggaacaatttggaaggctcagaagaaaataggaagatgtgggaaagtttggaacttcctagggac

SEQ ID NO: 132038 - DNA, 535 bp, Homo sapiens
accagcaaacactaggatcatctggagggctgggttaaaacacagactgctgaacccacccacactttctaacttagtgcatcttgggtgaagaccaaaattttacatttttagcaagttcccaggtaatgctgatgtcgatgctggtcttgggaccatactttgaggaccactgacytagaaccttacaagggatgcccttaatcttaacctccattttgcctttgcaaattattttcttctgcttctcactttgaaatgtcttccttggaagtgggttgattttgacattgatgtactgaacacctaccatatggcaaacaatgcacctggaagatttttcatgttggcgaattcaatcttcataattatcattatcatgtgatgtaatatcatgatgcccccttttcagaagaggctggagctcagcatggttaagagacgtaatattttgtaactattaagtggtgaagctgggatttaaacccacatatttttattgcaagtccagtatttctcctactaaattttaaac

SEQ ID NO: 132039 - DNA, 644 bp, Homo sapiens
ttaaaaatttctctatccaagctgcaactcagaccaattaaatcagcacctctgagggtggattcccagaatcagcattttttaaggctcctcaggtaacttaaatatgcaggtaaggctgggaaccactgcttaaagttcacccactggtcttagttagcctcacaacctgtgataaccttatcattgaaccttccctgacatcctttattaaatagccagtctgcaatccsccacaggccatccagtcctccttaccctcctagatatttttttttgccatggactgtactatcagctgacaccttacatactgtctcatgcatctgtttattgtctgtttttctctctgttttgcttattgctgtttccctaggacatacaacaatgcctaacacagagtaggtgctcagaaattgttaaatgaatgaatatgtgaatctactcttatttcaaatgacagcgctcagatagctgcaagtagcttttgcatttcatctctgggccttcttttctctaggtgaaatctctatactttcaaccaggcttcaaagacattgaataataaatataaccattatgagcacaatatatctctctttcactgaatcagcaagtaattgagcacttactatgtaatgcat

SEQ ID NO: 132040 - DNA, 342 bp, Homo sapiens
ttcctctgtttttaaaagctgattggctaactcatttcaaaggcatctccttgaccttatattcttaatctggaatttattatatttactgttaccaaaatgacactatctacatcaacttgtaccttcttccattttctctcttcaaggtactttatgccccrggctgccttctggatcagaaagatactcaaagctataaagttcacacaaagccaggctttgttatcaccggagtgtgcagaagggcactagccctgagtatgtgccacctcgtacgcctctcacatgcttctccgttttccctacttcactttcctgggttcattccaagacggagaa

SEQ ID NO: 132041 - DNA, 600 bp, Homo sapiens
caggtaggaaccagaccatgcagtccacagaactctgtaatcatggagtatccagactagtgatgaatgcaaagtgtttttcacttggcagagaaataacttggtggtgaatgtaggagtggtggtgccaggtgacagagtttttcagatggtcccattaacccttccagactgaggcattagcctcctaacaggccttcctacaactgctcttgcctccttaaccaaatttcccccagctactcagagagaaaggcacatatgtcatgaggctcctttagattcagcagcttctccctgctcttagggaaaagtttacaaatattcatgtggtttccaaagcccgccaggctctggcctgcacctgccccacatccttgattcgtacctctctcctccctgacaactcctygctgccttattggtattgctttctgcctgcatgtcagactcttgctggttcctcggcttcaggccccacacacactcttttcctggccgatgcctaccttgccacgctaccactaggcctccacttaaatgcccctcatacttgccctaaccctaaggactaagttgggtcctagtttattctcatag

SEQ ID NO: 132042 - DNA, 641 bp, Homo sapiens
ttgaactgatgatatagagagaaaagacccatgggaacctttgaggggcatgtgttttgcatgtgtcacaggtggatcattgggggtaagggggtggagagtagcagtcagaattctgccccaatgactctcaaccttgtacaattgtcttgcttttgagtgtggcaggaacctgtaaatatgaaatatcagcccaatgagtatgttatgttatatgtcaaaaggggaataatccaactagactcacaaaatttaattgcatgagccttttaaaaacaaagagttttccctggcctgtggcagcagagggataaataaagttagagggattcaaactcaagagagattctcttactggactcaaagtcttctgttactgtcatgttgcaagagggcctgtgagaaggaatggcctccaggcatagagagtaatccccagctgaaggcaaggaaacagggacctcagtcctacaatcacaagaaactgaattatgccaacagcttgaatgagctttgaagctgattgattactccctagttgagccracagtggagaatataacccactaacacttgattttagcctctgagactctgagcagggagcccagttctgctatgccagatgttgacagaactgt

SEQ ID NO: 132043 - DNA, 609 bp, Homo sapiens
ggaaaactgatcctgtttttctcttgcttaaagatccctttgataataccctaatgccttcaagaaaaactctatcttattagaataacattctaggccctttatgatccaatctctccttttatccataaaatttgctcctaccatgttactcttgagagttctaatatccacctatttacggttttcccaaatgtcatgttgttgcctccatgctccatcttagaatgtacccttgcccaaccatctacatgaatagctcctctttatgattcaagacactactcaaggattgcatttccttttatctccaagttgaattaagtactcatcctctgyatatccataatatctggttcacatctcttataatatgtattgcccagcactcttaatttgtcttacttgctgacctggaaggtagcttgcacctcattttcccagacttctccatcatggtaaaaggcattatcatttgtcctgttattacccaaaacctggggtatccttgataccttcctcttactctcctattcctgcacttccaagtgatcaccaagtcctgtgtatctaactctaacagataatctcaaattgtttcaagtttcc

SEQ ID NO: 132044 - DNA, 618 bp, Homo sapiens
aaaatcccttgggggaaggctagcagtatgatcatggaaagggcctttctcaagaatatccaacatctttttattcaaaacattctaggtgtggaaaccgactcaggtctggaactggatggaagactgggattttctaatgcggaggttgagagcagatttctgttagccttcaccttacttggagttctgtgattgtataaatcaaggactttagtargttgcttatcagttttattcctgtagagtccacaaattagtcacaaccagaaatctctgcatattacccctttctttaggtctaattaacaaacccactctgctgcctttggaaatagcagaatcacattctttagggcactgttctgggggatcctctttattcccctgagttcagggagcccatttttattcagcttttccctcaagcccttccagctaaggacagacaataaaccatgtgttaatgattcaagtgcgctcctcaccaatctgattatcatggcaagagtgaaaggagagccttctgggctgcaggatggtgaaagtggatgggagggatgcttatcatattccattcaacatggatgtcctctgaagtcttcaaatttcttcctc

SEQ ID NO: 132045 - DNA, 618 bp, Homo sapiens
aaaatcccttgggggaaggctagcagtatgatcatggaaagggcctttctcaagaatatccaacatctttttattcaaaacattctaggtgtggaaaccgactcaggtctggaactggatggaagactgggattttctaatgcggaggttgagagcagatttctgttagccttcaccttacttggagttctgtgattgtataaatcaaggactttagtaggttgcttatcagttttattcctgtagagtcsacaaattagtcacaaccagaaatctctgcatattacccctttctttaggtctaattaacaaacccactctgctgcctttggaaatagcagaatcacattctttagggcactgttctgggggatcctctttattcccctgagttcagggagcccatttttattcagcttttccctcaagcccttccagctaaggacagacaataaaccatgtgttaatgattcaagtgcgctcctcaccaatctgattatcatggcaagagtgaaaggagagccttctgggctgcaggatggtgaaagtggatgggagggatgcttatcatattccattcaacatggatgtcctctgaagtcttcaaatttcttcctc

SEQ ID NO: 132046 - DNA, 399 bp, Homo sapiens
atcttcccatctcttcaaaagataaatagacatagataggtataggcatargcatacagtagaactaaaatgagaacattttgactcatgtaactgaaaagtagaggcactgcatgggaagaaggattgtgctggactcagagtccacaaaacttggtctttctccattcccagtctcctttgttctgagttggcttcgcactcaggaagcctcctcccacagatggttccctattaactccaagtatgcataattttacagccagcagttcccaggtgatatggtttggacgtggttctctccaaatctcatgctgaaatgtgatccccactgctgaagggggagcctagtgggaggtgtttgggtcatgggggcggatccctcatgaatggcttagt

SEQ ID NO: 132047 - DNA, 399 bp, Homo sapiens
atcttcccatctcttcaaaagataaatagacatagataggtataggcataagcatacagtagaactaaaatgagaacattttgactcatgtaactgaaaagtagaggcactgcatgggaagaaggaytgtgctggactcagagtccacaaaacttggtctttctccattcccagtctcctttgttctgagttggcttcgcactcaggaagcctcctcccacagatggttccctattaactccaagtatgcataattttacagccagcagttcccaggtgatatggtttggacgtggttctctccaaatctcatgctgaaatgtgatccccactgctgaagggggagcctagtgggaggtgtttgggtcatgggggcggatccctcatgaatggcttagt

SEQ ID NO: 132048 - DNA, 399 bp, Homo sapiens
atcttcccatctcttcaaaagataaatagacatagataggtataggcataagcatacagtagaactaaaatgagaacattttgactcatgtaactgaaaagtagaggcactgcatgggaagaaggattgtgctggactcagagtccacaaaacttggtctttctccattcccagtctcctttgttctgagttggcttygcactcaggaagcctcctcccacagatggttccctattaactccaagtatgcataattttacagccagcagttcccaggtgatatggtttggacgtggttctctccaaatctcatgctgaaatgtgatccccactgctgaagggggagcctagtgggaggtgtttgggtcatgggggcggatccctcatgaatggcttagt

SEQ ID NO: 132049 - DNA, 534 bp, Homo sapiens
ataagcatacagtagaactaaaatgagaacattttgactcatgtaactgaaaagtagaggcactgcatgggaagaaggattgtgctggactcagagtccacaaaacttggtctttctccattcccagtctcctttgttctgagttggcttcgcactcaggaagcctcctcccacagatggttccctattaactccaagtatgcataattttacagccagcagttcccaggtgatatggtttggacgtggttctctccaaatctcatgctgaaatgtgatccccactgctgaagggggagcctagtgggaggtgtttgggtcatgggggcggatccctcatgaatggcttagtgctgtccttgccgcattgagtgagttcttagtctgtgatttcatgtgagagctggttgtttagagtagcatgccactcctcctctctctcttgctttgtctctcaccrtgtgacattctggctccccttcgctccaccatgattgtaatattctttaggccctcaccagaagcaccagtgtt

SEQ ID NO: 132050 - DNA, 480 bp, Homo sapiens
cttggaaatattgttgtaaaggttaagtaacgtaagaaaaatgcctggaaccatgtcttccaccaaagtaggtaggggctcaacaaatattgaattgatycatatgacattgccatttatataggtcaaaaatggccaaatattgacaatttcatatggttcaacctgccatcagcctattactcaagcacctaagaaatcagtgtccaattggttggagtattgggtacaaacaaggtagaaccttagaggtagaaccccagtgttgacttttatttacattatcaaagaatcaaggaaggccagcaccctactatgcactttaaattctggaagattttcttcactcttagctagttaaacaaagccgatttaagagacaggataaaattgtggtttagagcctagactctggggagagattgtctgggattaaattccagctctgctactgacgagcattgtgaaactgagcaagtt

SEQ ID NO: 132051 - DNA, 609 bp, Homo sapiens
catgctctgtgtcactgggccaagtttcaaggatggagcccactgtacctctttcccacccccaagagggaaaggtgaggcagggggcttcagggcaaacattccagccagtgctccccaaaccatcaacgaggcaccaccaccaagtctcggggcctaatgaggaacgattgctaaacaatctgattactcaattttttaactttgctacacacacaaacacacacrtgttcacacaatataagcagcagagaagtatcagttctgggtttctgcagttgctacatttttatattttccggttgaaaattgcttcattctctgcaaatatccttcccacttcatctctagccttcctgctttactgagagccctgaaactccccatgcctggagtttctttctattttactttcttttattttattactttctattttacttattttattactttctattttactttctttctattctactttctttctattgagttttttagttccttatatattttggatactaacctcttatgagacgtatgatttgcaaacattttctttaggttgtctcttcactctgttgattgtttcctgtgctatgcaga

SEQ ID NO: 132052 - DNA, 577 bp, Homo sapiens
acattggggatttgatttcaataaatggattttggggggacatatgtaatccacaatagaaagctaaaataaaaaagaaatagaaagctaaaaatactcgagatttgccagccatgttctgaataagcyaatcccctccagaatattatttattcagtttttcacttcttaaagtagaaagcaaagctttaaagaggttgggccatgccccgtattaatcttttttgttttaactaacacataataattatatgtatttatgaggtataaagtgatgtctcaaaatatatatacattacataatgatcaaatcatcatgtagcacatccatcacctcaaacatttatcatttctatgtgatgggaacattcaaaatcctctaagtattttaagatataccttagtgtttactataatcaccctactgtgcaataggatacctaacttattctttctaattttaactttgcacctactgggcaacctctctccaatccttcccttctcagcctctgttaacccctattctattcactatttctatgagatcaactttttaagatccaaaatatgagta

SEQ ID NO: 132053 - DNA, 572 bp, Homo sapiens
ctcctgcttcctgttgggcagcacttgccttgtaactggtatttccattctgaagagtgattctagtgtctggagactctgagcctagtcaaggggatcctttgttgcttttcagaccccactacagccccctgcactcctcatgggcagaaccagtctaatcctttggggttgagtttctggaactgatgccataaatagcatttatgtttggatggcacagtgtttctcaggcacttgcactgtcttccctgtaaggagcgggtaggtaggtagggtggagtgctgtgtggccttgttctgaaagctaaggaaatcaagactgcagaaagggaactgacttctacaaggtcaccctgctggtaaatgacagctctggacccagagcccagtragtctgccgcctgggattccaggatgccttccaccatgccctgccatctctaaactcctcgagaaggaggcagtgtcctgttgaggagcagctgtcaggttaaggggcttctccgaatcagtctcctcattatttggccctggatatttctgtggctctgggtttccctgctgtaaaa

SEQ ID NO: 132054 - DNA, 582 bp, Homo sapiens
gtgggaatgttaccagggcccagaaaatattgtgggcatgataagacttccacttagcttatgaaactgaaaaaataagcagcctaaacatccactgtgatctgagcttctctttcagtcccctttccaaatctcaatttcaggtggctatttctattttgcaagatctcattctcaaacgcagttcttactacatgaatgcattgtaccaaccatttttgcaaggaaatacaaaatttaaaataaatgtcaaaactcacarcacaggctaatgtaaaaaaagttgaccaagatgttttaagagtttgtataaaatatgtaagaatagagtttaggaacaagatttatttcttgtttgaaaagaatagtattagcccagcttttccagcttaagttaatattggtcagctaatctctcattagacagagttcacatgctataattaaatttaataaatagtctctatgatctatagtatttacctgtgactaataaaattctgttcatacgttaataggtgaataatatttataaaatattttcctatgtgaaatgtttataatcattaaaaataattattt

SEQ ID NO: 132055 - DNA, 535 bp, Homo sapiens
aaggcaaggacacttctacctttcttcacttctaaaagcacctgtcacataatggtactcaactggacactaaacacacaaatacacacacaaaaagctgattttaaattaacttaaaagttaagaaaaaactacctcttttagccaacaaggagttcacttaatgttcattatctgttacttctataaggttttactgtatttcccattagagaaatctaaatattaatgagcatctttatgttcattgactgtgctagacatcaagttcaggactttgtctgagatacaattcttgccctcaagcaacagagaggagctactaccaggggctcttctagcttctgagggtacaaaggtgaatgagatagagaaattcstcgttgtcatagagcttccagaccagaaggaagaatacctgcaacatagcaatatccaaacatgcctataataaagaaatagccaattataaaatctttaagataacttcaaacagtcatacatgctacaagataataaaactaaaatataacag

SEQ ID NO: 132056 - DNA, 535 bp, Homo sapiens
aaggcaaggacacttctacctttcttcacttctaaaagcacctgtcacataatggtactcaactggacactaaacacacaaatacacacacaaaaagctgattttaaattaacttaaaagttaagaaaaaactacctcttttagccaacaaggagttcacttaatgttcattatctgttacttctataaggttttactgtatttcccattagagaaatctaaatattaatgagcatctttatgttcattgactgtgctagacatcaagttcaggactttgtctgagatacaattcttgccctcaagcaacagagaggagctactaccaggggctcttctagcttctgagggtacaaaggtgaatgagatagagaaattcgtcgttgtcatagagcttccagaccagaaggaagaatacctgcaacatagcaatatccaaacatgcctataataaagaaatagccaattataaaatctttaagataacttcaaacartcatacatgctacaagataataaaactaaaatataacag

SEQ ID NO: 132057 - DNA, 585 bp, Homo sapiens
catccttttgaaacttaaaaaagattaaaaatgttttgcaaagatttataattgtgaagaaaggttagaccaaaatgaaggattttctatagcaggtcataaaattatgtcggtaaaattaaataaaaaacaaacaaaaaattattctttstttattttgaaaaagatacaaagctgaaatcataaaataaatttagttccacataattaaacaatcattttatgttcagtttcatttttcaacataaaatttcaaatcaaactttttatttatttattttttactatttactataaaattttgtctaatttatatcactcaagggtttggcaggaagcagaaggtacagtcaaagcagtcactggagagagtttactattttcaaagacctggacaagttttaaggaactactaagggataatctagtaacctggggctagtagaagtggaaagtcatcacctcacctaggattaaggagccaactagaaacagcagtcacttgaactcagaaagagtaaccgtatggagagtgtcgccttcggtagacagtgggcacagccaactcacagtgattacacaggg

SEQ ID NO: 132058 - DNA, 434 bp, Homo sapiens
ctagagactccagaaattaatgcaactctgctgatacatgattttagttcagcgagatccatgtgagacttctgacctccataatcrtaagataatatttacgaaatttgtcttgttataagccacaaagtttgtaataatttcttacagcagcaatagaaaactaatacaccctccaaacgtaaccctctatctaccctgctgccccactctgaggtgatggcactggtgctagtgaaattagtcatcttgtcagcatgaagagaaggtggctgtcctcaccaaaaggcagttttataagcttatgttttggggtccttaccgacttttgttttcaactgagagccttgtccatccattacagcactcttcacctagtgccatcatgctatacattcatcccttggtatctgttggggagaggttccaggacc

SEQ ID NO: 132059 - DNA, 434 bp, Homo sapiens
ctagagactccagaaattaatgcaactctgctgatacatgattttagttcagcgagatccatgtgagacttctgacctccataatcgtaagataatatttacgaaatttgtcttgttataagccacaaagtttgtaataatttcttacagcagcaatagaaaactaatacaccctccaaaygtaaccctctatctaccctgctgccccactctgaggtgatggcactggtgctagtgaaattagtcatcttgtcagcatgaagagaaggtggctgtcctcaccaaaaggcagttttataagcttatgttttggggtccttaccgacttttgttttcaactgagagccttgtccatccattacagcactcttcacctagtgccatcatgctatacattcatcccttggtatctgttggggagaggttccaggacc

SEQ ID NO: 132060 - DNA, 364 bp, Homo sapiens
tatttttaaggcaaacaacttatatgttattccatcattgtttgtcatataaatctaatctaattctctcattatcgtagccctggctgcaccatctggtgagtattctttttcatccttgacattgttcagtattaaatggttaacttaatgtataaagagtgactaatgaacaagatacctcagttggcttttgatgaactattacyatataaaaattgcactgcaaataaatgggtaaagacttctcccaaagagaaaatcttatttttcaaaaaacagaagtcatctttcctgctcctgcctttactgctatgtactcattacactctacatagcctctcaggctctgatcacgccttct

SEQ ID NO: 132061 - DNA, 578 bp, Homo sapiens
catctcggctggcacagagtggtgtgcttcaaagggctctgctattagagagacttctgagaggagctgacctgggatttcagcctattttgcagtggctccttgacccctgaaaaacaaaaaaatcctttgagaagcagcacagatttctaaagacgttagcagaataagaaagaaatgtgaaattctccttctaggcatatacaccagaaaaacttttgtttttcaaacaaaagtggtcatctgcatgtgcaaactagtacaaggatgtttgttgctacattatttataataaagaaaagtttaaagtaatttatcatatgcctaaatataagataactaaaaatatrcagtgacacctcctatgagttgaatatttgtgttctcccaaaattggtatgaggaagccctaacttcccagtgttgctaatactgggagtgtttggagagagggcctttatggaaatacttaaggttaaaggagaccatagcagcggaccctgatagagcttgctttccttcccctccccaacccaacccctgcacagaaagtaggggccacagagagatggtggcca

SEQ ID NO: 132062 - DNA, 577 bp, Homo sapiens
cttgttgaacagcctcttggagagtcagtaaagcttggaattgctcagaacatctttgcccattaaactgcctttttttttttctttacaaaatctggctgttcttcccaaaaggttttgactagaaattttttaaatgtcttcaacatatttctggaccattttttgaaaccagggggatttcaactgccactccccccagagagctttccctgctccacaccacaccacgaagcaagggtcctgagtcagaccgcacaggtcataaagctagaatcatcgtaacagcatcccaggccagggacacaatgcaagcatatcacttttgaccaatggaagtggcctcccaraactgggtccaagccaggaaaataagcactggggtggaagaggtaaaatgaacaactaaaagcatttcagatgacagttcagaatcattcagttgacaaatatttattgagcatctactaagtgccaagccctggaggcacaatgctcagctgtcttagagctcatggtctatgattcactcatgtacccaatctcctaagacatgcaacatctaagctgccctcca

SEQ ID NO: 132063 - DNA, 593 bp, Homo sapiens
cccccagggacagcgccaggcggccagccgagaagccaagtcagtcctgccctgtaaggcttcagaaaaaagacaagcaccagccccctcctgtctgggaaacattcaaagcaatctccgaagtgattcattaaaagtcctcctatggcagaagaccatcacccagatgtgaaaataaacacagagggaaattccagcatcagaacggtgtcaagtctttaaacaaatgcatggctatttcagggaagggaataatctttcgactatctttccaagccctcagaatccaagtcagactctccataaagcaggccaggcaaattcccacgatgccagactgggaaaaatgtgaaaacactcagttgactgtgggcacagtgactctctggggcccttcccacttgcacttctcagcaaccccgctccccacgccagggccagccacccaagcttaccaagctcccgawagtgcagccctcagctcggccttgataaagcatcagaggttaaagcagaagcaatcctttcattctactgaaataaatcatcacagaaaataaatgggacatgaaccaatatcaagcaaaacagag

SEQ ID NO: 132064 - DNA, 516 bp, Homo sapiens
aaaatgaacttaagaaaggatgggtaagctctgcactacagaatgcttagggagcaaagagaactgaagtttagggcaaacttgagcgtgcatcagaatcacctgaaagactgtgaaaacacagatgctggcccctatccacaatttctgatccaggaggcccggggtggagcctcacaagttgcatgtctacccagcttccagtgatgccagtgttgctggtccagggaccacactttgaraagcactggttagggaatgccaccattcaggggagaggacagaaagcagaacccacacaaacacacagaaagataatcccgcaaatctgtaacacagatcagcaaggaactttcttattagattctgtgcttctgaccccaagggtctacgatctcactgggctggagaaaggatataacccagaatttctggtaaactgtttatttaattaaaccaagagatattctgcatttacctctcattactgaaagaaaaaaaaaaagaaaaaagcct

SEQ ID NO: 132065 - DNA, 404 bp, Homo sapiens
gcatgccccgtcacctgctcatgcctgacaaccagatcatcaccctcaccgtgggcaccaayggaggcctcaaagtcgtgtccacacagaacctggagcttggtctcatgacctatgatggcaacactgggctcctggccaccaagagcgatgaaacaggatggacgactttctatgagtaagtgggtttgtaaagcatctctgaagagcccttcccttgccctagctggcattaggactgggtcgcttgtgtagctttttaaattgctttgtcacgttgtctttctaactttaatgatgtcttatggcctcaagacattcatgtcccctctccctgactctgaaatgatttgctctaatggatctctgatattgagcatcctccctactagagttgggaattc

SEQ ID NO: 132066 - DNA, 529 bp, Homo sapiens
aaatttagggggatatgttttaactatataagcctttgctaataaaagattaagaagtatgtggcttagcatcttttaattatttttttctagcaacttgaatatacaatgtttgaaawctctggttggatcaacattattttgctcagaggtttgtggactttgcatactgattctttcctgtttccaagtacatttgcttttaggctatttttattcactttaaaggaattttaataactttctgttgacagcatggacagctggtcttgagaattaaagaaaattcacttgctgactgaggaaggaagtgacatcaatgagcttctaaagtcagcccagcgggggaaattggctggtgagagagtagcctttcattgcactgtatttatcgagcgatgccttgagatgcaaattgctgtatcaatcaaacctgtggtgcctacctccaaccaacccagtgcaaactgaaggaacaatgccctgaaacactgagaataaaaaggatgaggggtgcaggagcccagag

SEQ ID NO: 132067 - DNA, 487 bp, Homo sapiens
ctctcaatcactgtcttcagtcttttatcctgcatcacaaactttatcccttactctgcacccatgaagccaatattccctaagaaccaagtctctcctgagaaaggcaaggtgatatgaatagagtgaaatagtttcatgtcccccaccactgggggtcaggaaaggagaacttcccttttaaatctttggggagatcaacccaaggactgaatctttyaatggtaaagttcaaggtccttcgaaccccaaaaggagattttaagggagtgagtgattatcacaatacttttgtgcatgcatgaccctgggaagggcaataatttggaaggcaaattctgtttcctcacattcttcagcctctccattcataaaacaagtctgaaaagtgatttcttgcctacccatataaaataatttgggatctgataaaaatgataatgtcagtcaacattgcttatgtgacaacagctgttgtcatccttat

SEQ ID NO: 132068 - DNA, 421 bp, Homo sapiens
gacctaggcaggacaattcctctgagagcgagggagaaaaaacaaaagtgtgggatttaaaaggctggtattgcaaaggatcatcttgacaggctgtggctcagatttagagaaaccccgaactgatttgcagaggactgaacaccaaaccttgtaaccmcagagcagacttcggggaggtagtcataggacctgacaagcaatcttttaatacagaatctggtacaaagatccatgtgtgtatttttgctgtggttttttttttttttctatatcttttggaatggagtctaatcgtccaaaggatagttttcacgtgtagtgtttttctctttgatttgagataggaggttttctgtggctgctaagcaatacacatatacctacgtggcatacaatgtcttttttttttggtggaatt

SEQ ID NO: 132069 - DNA, 447 bp, Homo sapiens
ggaaccatctactattggttttcaaactgtgctttactcctctttctatagccaggagataaactagagaggttaagtcacttacccaacatcagaagaaaatcagtcatcaagcaggggcgtgtttttccataaacatttatttgagcacctcctacaaacyaggcccactggtagaagttgggggttgaacagaaaatgagacagacaaggctcctggccccacaaagctggtgataaggtgatgtcatatggcagtttgcagtatatatatatatatatatatatatatatatatatattgatcccatacacaacccataaccaaagaaaaattgagtatttaccatgataaacagaaatatacctttaaaatatgacattaaaagtacatttaataaggagtccaatagtttcttcctgtacccccaaaagatcatcttcagt

SEQ ID NO: 132070 - DNA, 472 bp, Homo sapiens
gcttctcccccggtctgcaggaagacacccaggacccgctccataaccctccaggagccttgattctgatgaagctggggtaaatgccttccctggctctgtgcgtgggcacaccccccagcttgacgactggggtttcttagggagcagtgtcttttcctctcctgacccagaaccattgatcctaggactggacaaggcctcaggagatcatctctctgcctcaggattggaactagtctagcctaggtttgaaccccagcttgggtcacttttgtgagaggcagcaaagtagtgtctcacagtatagaygctggagccagactgcctgagattgaagcctgagggtgatatttagtagctgtgtggtgttgtgcaagtattgagcctctctgtgcctgtttcatattaaaaaaaaaaaaaagggataaaaatagcacctccctcataggagttatgatgaggataaaaa

SEQ ID NO: 132071 - DNA, 488 bp, Homo sapiens
atctagatccttccctctttgccctttcttgctggcttctcccccggtctgcaggaagacacccaggacccgctccataaccctccaggagccttgattctgatgaagctggggtaaatgccttccctggctctgtgcgtgggcacaccccccagcttgacgactggggtttcttagggagcagtgtcttttcctctcctgacccagaaccattgatcctaggactggacaaggcctcaggagatcatctctctgcctcaggattggaactagtctagcctaggtttgaaccccagcttgggtcacttttgtgagaggcagcaaagtagtgtctcacagtatagatgctggagccagactgcctgagattgaagcctgagggtgatatttagtagctgtgtggtgttgtgcaagtattgagcctctctgtgcctgtttcatattaaaaaaaaaaaaawgggataaaaatagcacctccctcataggag

SEQ ID NO: 132072 - DNA, 448 bp, Homo sapiens
tttcaattgtcgttgtgtatttacctaggaatgaaactgctgggtcatatagtaattctacatttaagtttttgaggaactgccaaacattttttcagagtggctgcaacattttatattcccatcagccatgtcatgtatgaggcttttaatttctccatgtcsttgccaacacttgtattttattttttaaaaatttgtacccggccaggcacagtggctcatgcctgtaatgccagtactttgggagggccgaggtgggtgaattgcttgagcccacgagtttgagaccagcctggacaacatgacgaaaccgcatctctacaaaaaattaaccaggggtagtggcacatgcctgcaatcccagctactggagaggctgaggtgggatgatcccttgaagctggaaggtagaggctgcagtgagccgtgattgcaccactgcact

SEQ ID NO: 132073 - DNA, 562 bp, Homo sapiens
atccttttaacctactaaagcttttctgtttttttcgtctttttatgagataaggtctcactgtgtcacccaggctggagtgcagtggcagtatcacggcttactgcagctttgatctctggggctcaagtgatcctccccactcagcctcctgagtagctgacactacaggcattcaccaccatggctggctaatcttttattcctaccaagtcttcaaaacctgttgtgaatctgasaagtgtacatctccatttggaccggccatattgcaagtgctaatggccacatgtggctagtggctaccatattgcacagccaaggtctgtacactttagttaatgtttgggcacagaaacatcatgtatggccttcctggaaggctccccactaccatttaatcgtttacttagccctgttcacagtcagagctcagaattctgaattcaacacatatgcattgtctataatgttccaggcagtcttctaggggcaggggataaggagtggacaaagcaaagtttctgtctatcatagagaaacacatttagagaggatgttt

SEQ ID NO: 132074 - DNA, 424 bp, Homo sapiens
gaggatcaaataaggcagtgcttgtaaagggtctagcatgcagcctaatatgtaatattaagtatttattgacatccttttattgataatattttaataactagttcatctctgaaattatgctttattcaatcatttaagttagggacaagtattttaatactttccatcctggtgtttgctaatttgctataaacttgtcaaaatgaatgatgaggtgatgaatagacgggtaagtggatgatcccaacgcgatgttagtaggggggctttygtgggaagctgggaacatgaagcaccacattccccacaattggccattcctacccaaaagtgccctccacctcctcctcccatccacaccccgcgccaaccaacatgaaactaccccctaacatataaacacatgggcaagcagaagaat

SEQ ID NO: 132075 - DNA, 399 bp, Homo sapiens
cagaaagtttgtgtcatttctgcttcctctagaagtaaatgagaatacctgtttccttgtacctttcctagatttaaggaatggaactaaaatactatgccacattttccttactatgattttatacactttagctagtgggaagagctaccgtgcaccctttgtctgggaggcagtttctttgccgtttgcccaagtrtgaaatgccatatttccttaagtcaagttacctactctcttgacattacaaatattagcattttaaaacctgttttcaaattaagacaaaagcaaacatcactgctaatgtacatttgaggaaggagggggaagaaaccatggaaaccagcagaggaattaaaatggcaactaagaattagacaccggaatagaaccagc

SEQ ID NO: 132076 - DNA, 590 bp, Homo sapiens
actctgggctttgttgataacatctattctgctcatcctgcctttccccacaagatctgagagagacatcttgaaatctcccactataattgcagatttgtctatttctccttataattctgagattaggtacctaaaaatagaaaatcactttacctttttggtatctttagtaatactttctgcctaaaagtctacttggccttatactagtaagggactaccagcgtatgtgattcatggttacacggtgtttcatttgtatcctttgacttttyaacccttccaatccccatgtgtctcttataaaaaatatatatgtatgtgtatattttatccttatttatatgtaccctaacggtccttgttagtttgggtttaaatctaccatctttctctgtgctttctatttgtcccctttattctaagtatttgttgttgtttttctcctctcctgttttccgctggaaattatgcactctttgactgatatttttagtggctaccatagaggttacaatatgcatccttgatttaacaaagtctaatatgatttggttcttctgccctttcttaggcaatacaagaaa

SEQ ID NO: 132077 - DNA, 590 bp, Homo sapiens
actctgggctttgttgataacatctattctgctcatcctgcctttccccacaagatctgagagagacatcttgaaatctcccactataattgcagatttgtctatttctccttataattctgagattaggtacctaaaaatagaaaatcactttacctttttggtatctttagtaatactttctgcctaaaagtctacttggccttatactagtaagggactaccagcgtatgtgattcatggttacacggtgtttcatttgtatcctttgactttttaacccttccaatccccatgtgtctcttataaaaaatatatatgtatgtgtatattttatccttatttatatgtaccctaacggtccttgttagtttgggtttaaatctaccatctttctctrtgctttctatttgtcccctttattctaagtatttgttgttgtttttctcctctcctgttttccgctggaaattatgcactctttgactgatatttttagtggctaccatagaggttacaatatgcatccttgatttaacaaagtctaatatgatttggttcttctgccctttcttaggcaatacaagaaa

SEQ ID NO: 132078 - DNA, 410 bp, Homo sapiens
tttttaggtcccttcaggaaaattcagcattttttcttttccctccactatatttctctgatcacttttgaaaatcataattatcattagttttataataaaataaatgaagtaatctttattaaatgctttcattgtgccaggtactgtacttaatactgacactcatttatttcttattttagtaatttttaatacattcttccttccaacaaatatttattaagcygctacaatgttggggacacaaaatgaaacaaaacaattctctgtcttcaagttccttgtggatggtggaggaaatattaatagaacgaatagatagtatgtagcgtcaagtaatgattaatacctatgaagaaagagatatcaggttaagtgatagagagtgtcaggggttgctattttga

SEQ ID NO: 132079 - DNA, 596 bp, Homo sapiens
tcggccacataactatcacattaaccaaatgtattatcttcatagtgcttattattatgtgaacatatttatgtttttactggtgcttktctctctccattactacaatataagttacgtgacagaattaccttatccttttggtttgctgctgtatccctaatgtcgagatgagttcctggagcatagtaggtactcaataaatattgaatgcataaatgaatggattcagcacaatcactgagttgtaaaaaacaatgtaggcactaattgtgtgtttgtgtatgtgtgaatctgtgtacgagtagccatatagatgtgcagacatacacacacacatacacacacacacacacaaacatatagagagtgcacctttaaaactgcagttctattttaactccagttctttaattagcagtcagatccccaaccatattgttaacacttggaaagaggcctaatgaaaatataaattcaaagttgtctctaatgagggacaacaagccaagagagtataaaaacctgtcccccatacttcattagaaagcatctcaagcccatcagattcagaagaatttcaatattggagtttg

SEQ ID NO: 132080 - DNA, 509 bp, Homo sapiens
gtaggatttatacaaaacaagttgttttctctttatttctgatgctggcatatagtcagttatttgcaaataagctacatggtcatatctgagatcagaccacagagattttggcctctgtaggtgtcactgcagagtttatacatataggatatacttatatcctgctaaagtaggtcatattttctgatcacaaattatgaagccacaggcagagtttgaaattgataaggaaaaactgcctaaatggctaccactcattatatctaaatattggcaggtcaaaaaaaaaaaaaaaaaaaatgggagttatctatcactgaatgcaatttggaaaataagctgtagtagttgtctcatcttcaagccactgtatttctaactaaataataaaartattttagtcgtggataatatttttgccatatgcgtgtgcatgggtgtgtgtgtgtaaatttaaaaaccttggctttcaataccacagaattaaatgcattttgtgaatgtat

SEQ ID NO: 132081 - DNA, 567 bp, Homo sapiens
caattctcaaaataagatatacaaatggccaataaacatgaaaaaacgctcaatatcactaattatcagagaaatgaaaattaaaagcacaatgtgatatcaccttactcctgcaagaatggccataatttaaaaataaaaaaataatagatgttggcttggatgtggtaaaaagggaacacttttacactgctggtgggaatgtgaactagtacaaccactatggaaaagagtatggagattccttaaagaactaaaagtagaactaccattcaatccagcaatcccactactgagtatctacccaaaggaaaagaagtcattatatgaaaaagatacttgaacatgcatgtttatagcagcaaaatttgcaactgcaaaaatttggaatctgcctaaatgcccatcaaccaatgagtggataaagaaaatgtggtgtatacatatactatggaatactactcagccataaaaaggaatgaaataatgtcattttcagcaacctggatgaagttggagaccattattctaagtaaagtaactcagraatggcaaaccaatatcata

SEQ ID NO: 132082 - DNA, 412 bp, Homo sapiens
ttagtttttatcatataccttctatcatgtttgatcttttcctttaagatcttgttcacttattttaatcttaaaattaaaaaataatactaaatgtcttccgagcatgtctctacaaggtccttagataatgaagttattggtgggaatgtcaagcactgatatgctgtcatatcttaggttctttggtgcccctcaaattatactgtttgtcatccttgctggctgggtgtgccaaagcataggctataaataatactctcagtttaaagtcaaaaagtcataaaacattgttttacctctttgactcctcatatcaaatctaaaaaatttccacctttgagaaaattctattccaagctataattgcmaaagtactctaccctaatttcagtagcagacatcactgaaa

SEQ ID NO: 132083 - DNA, 534 bp, Homo sapiens
actcacacatatagaagcataagtcttttctcttggtattcactccagattctctgctatatcatgcccagataacacattccattttgtgtaaaatgtaattttctggaaagcctaccattcattttactatcctttgtgagagccatatgaactttcagaggaacaaaagtccatgaaaagagcaggggaaatgcccagtgaaaagtggctgggtgacatcgactttaaatgtgcaatagttccaatgccagatttcctcctaagcagtgccaattggcagacacagaaatcctcacctcctcccagtgttaaactcagcagtcaaaaactagatgtagtgggaagtgttgatttaacaccagggaagaaacatggtctgatgctagctttagtaaacatttaaaagaaggtttttaagagtgttagcttaaaaggcagacagaaggacagagartaagagcagaggaacaaagatgacagaactgtagaaatgtgaggagaagcttcctgactgacaggaggacgaatgaa

SEQ ID NO: 132084 - DNA, 571 bp, Homo sapiens
tttactaaccagacagagatcaattaggaaacagtggacttgaacaacactgcagaccaagtggacctagcgtatatatatatatacagagcatttcatccaacaactgcagaataaacattcttctcaatcacacatggaatttctctgggatggagcagatgttaggccacaaaacaagtcttaacaaattcaaggtttaaatcatatcaagtatcttttcacaatggtatgaaaatataaatcagtaacaggaaaattggaaaattcacaaatatgtgcaaattaagtgamatactcctgaagaagaaatggatcaaagaagaaattaaaagagaaatcaaaaaataccttgagacaaatgacaacggaaatagaacataccaaaacttgtgggataaagcaaaagcagattgaagtggaaagtttattgagaaaaacgcctacatgaagaaaaataatctcaaataagcaacctaattttatacttcaaggaaataaaaaaagaatagacaaaacctaaagttattagaaagaagtaaataaagatcagagcagaaataaatgaaat

SEQ ID NO: 132085 - DNA, 571 bp, Homo sapiens
tttactaaccagacagagatcaattaggaaacagtggacttgaacaacactgcagaccaagtggacctagcgtatatatatatatacagagcatttcatccaacaactgcagaataaacattcttctcaatcacacatggaatttctctgggatggagcagatgttaggccacaaaacaagtcttaacaaattcaaggtttaaatcatatcaagtatcttttcacaatggtatgaaaatataaatcagtaacaggaaaattggaaaattcacaaatatgtgcaaattaagtgacatactcctgaagaagaaatggatcaaagaagaaattaaaasagaaatcaaaaaataccttgagacaaatgacaacggaaatagaacataccaaaacttgtgggataaagcaaaagcagattgaagtggaaagtttattgagaaaaacgcctacatgaagaaaaataatctcaaataagcaacctaattttatacttcaaggaaataaaaaaagaatagacaaaacctaaagttattagaaagaagtaaataaagatcagagcagaaataaatgaaat

SEQ ID NO: 132086 - DNA, 571 bp, Homo sapiens
tttactaaccagacagagatcaattaggaaacagtggacttgaacaacactgcagaccaagtggacctagcgtatatatatatatacagagcatttcatccaacaactgcagaataaacattcttctcaatcacacatggaatttctctgggatggagcagatgttaggccacaaaacaagtcttaacaaattcaaggtttaaatcatatcaagtatcttttcacaatggtatgaaaatataaatcagtaacaggaaaattggaaaattcacaaatatgtgcaaattaagtgacatactcctgaagaagaaatggatcaaagaagaaattaaaagagaaatcaaaaaataccttgagacaaatgacaacggaaatagaacataccaaaacttgtgggataaagcaaaagcagattgaagtggaaagtttattgagaaaaacgcctacatgaagaaaaataatctcaaataagcaacctaattttatacttcaaggaaataaaaaaakaatagacaaaacctaaagttattagaaagaagtaaataaagatcagagcagaaataaatgaaat

SEQ ID NO: 132087 - DNA, 560 bp, Homo sapiens
caggtgatatagaagagaacaatacttactgagggtatagcaacctcagaattaagtgagaggatgagaaactgaggaacttttaaaagtccagggaagctgaaggactccgggaaaggaaggtaggttcatgggatggtaggagctatattgagcataaaattatgtacaggaaactcttggtagaggatcaggtgtatggtagatgcaaaataagttataaataggaagaggagatgacaaagatggtgatcacgataaaacagttttctgagcaaacatttttaaaaagagtcattctgtatgataaattgtggaattacagtttactagcctgtggtttatatgtttgtctagctactaaacattctgatcttcacyttcaaaaagtttaagtgaagtcaaattctaatcatcactatcatcataaaaagcaactgatggtatcaatggctgtgtttagggccatggtggctagttagtcatcgtgatgattttcttggctatatgtttaagtttagcgaaaaaagaaaaaaaaagtatgtttgtgtgtgtgtgtg

SEQ ID NO: 132088 - DNA, 513 bp, Homo sapiens
ggttgcaatttttaattttttaaataaaaaaaggtaaatttatttaaaagtgaagacatttttattatcatttttaataggcacataataattgtgyttcgttatgtggtatagtgtgatattttaacacgtttacaatgaaaaaatgatcaaatcaaggtaattaacatattttttacctgaaacatgtatcatgtatcatgaaaatcctctcttctagctcttgaaaatatataataaatttttattgttaatcatagtcacattacagggctatagaacactagaactttttcctcctatctagccgtataattttgtattcaatatccagcctctccctatactcatctctcccttgcccttcctagcctctagtagcaaatattctactctttacttctatgaaacccaatttattcactgcaacaaaagagtgagaacatgcagaatttatttatctgtgcctgacttatttcactttactcgatatcgtccaggtccactgacgtt

SEQ ID NO: 132089 - DNA, 485 bp, Homo sapiens
ttcttagaaacgcagagaaaatcatgcttaattcccttgaagaatgacctctatgtacacagttgtatttgttgttattaaaaaaattacatcagacactttgatgagtacagataattttggggaatttgatgatataaatattaatatgccatagatgttgccttgaataaacttttagtctacaaaggggaaaaagtaggcaagaagataattaaaatactgtaaataaacgataatagaaggaggtaaaatgtatcaaaaaataagacagttttgaaagctagtaagagaaatatgtaactgctttaaagaggaggtgatggtcaggtgcagtggctcacacctgtaatcccracactttaggatgccaaggcagacagatcacttgagttcaggagttcgagactggcctggccaacatggtgaaactccatctctactaaaaatacaaaaatcagccggacgtggtggtacacacctgt

SEQ ID NO: 132090 - DNA, 430 bp, Homo sapiens
attacaccttcagtgtgtccttgctgcagttaagcactgcggaattgagcaatgcagagtttgcaaaggggccacctccaagcaaccacccccctccccaataagctgttagcagatcctagtacctgagtgtgctgtgactagcagatctcttgcagcagaaacaactagaggagggaggaagtgctaaaagaggcctggatgatacgtttggcttgaagtttaatacatgatgtgagagaccttcactcctcttcactcctcaagaaggaaaacgaggtaaactgaagaaatccttttatccrcaaagtaatcttccctcctggaagctctctggcttggtcacccgatgttctgtgaacatatttatctgcctgccccctccactcccttaaacaatagaggctttgtaaagggagaaaaatggaag

SEQ ID NO: 132091 - DNA, 362 bp, Homo sapiens
acagtaggtatgtacgtcaacacaataaatcccatatatgggctttatttttacccatagctaccttcatatgaaacagggaaaagttgaaagtttttcctttaagatctggaaaaagacaagaatgtccactttcaccacttctagttagtattatactggaaatcctagygagagaaattaggcaaaagaaaaaaataaaaggtgtccaaatgggaaaggaggaagtcaaattgtccctggttgtggatgatatggtcttatatatagaaagccctaaagacttcactaaaaaactgtaagaactaataaagtcaataagctttcaggatacaaaatcaacatacagaaagcagtgtttc

SEQ ID NO: 132092 - DNA, 579 bp, Homo sapiens
cctttgccccacttcgaacttggctctaatccatttctgcctcacagtctagcattggctgtctcctatttggcctttgcatatatgaaataatctctggttccttcaatgatgttaaaggaaccaaagacacaggcctctattcccagaatccagtttccccacttactgcattccctcttgcaatcctccaatctgcctgtggttcatatgctcttggcaccatggcatatcctgactagtggtgagagaagagaatgacaagacaggagtggaagtctagagaaaagtcatgaaaattaaaagttgaaaccagtagttggtgtgatgtcaggcaaagatgatcagagaaatggcctaggccctgggtattggattgctgaaatgcctttggtgtcacaggagtaaagatgtmaaacagggaagccttgggaacccaatgctggtcctactacctggggagtgtgagcttctttaagcattctggagtgttgaaggaactagaatatattatcttacaggtcttaattgttttatgggagagatactaaaagataatatcctattttctaaaagtga

SEQ ID NO: 132093 - DNA, 552 bp, Homo sapiens
ttgaaagtttttcctttaagatctggaaaaagacaagaatgtccactttcaccacttctagttagtattatactggaaatcctagtgagagaaattaggcaaaagaaaaaaataaaaggtgtccaaatgggaaaggaggaagtcaaattgtccctggttgtggatgatatggtcttatatatagaaagccctaaagacttcactaaaaaactgtaagaactaataaagtcaataagctttcaggatacaaaatcaacatacagaaagcagtgtttctatatgctaaatagtgaactatacagaaaaagaattcaagaaaacaaacctaattattatagctaccaaaaaataaaatacctaggaataaatttaagatgaaggtgaaagatctcyacactgaaaactacaaaacattgatgaaacagattgaagaggacacatataaatataagtgtatcccatgttcatggattggaataattaattctgtcacaataatctacagattcaatatgatctatagattcaatgcaatctctatcaaaataccaa

SEQ ID NO: 132094 - DNA, 582 bp, Homo sapiens
tcttcccagaaatattcctaagtcattgcaacttctgaacagagacagcaattttaggaagcaagttaggatgaattaaagagccaggaaaagtataccattggcagtagtgatcagctcagtagcatcaggggtacctaactttagaaaaatcacattgtatttgagtagcccagcaatttattactcagtgaggcagctagtaagagagaatgytacctgcccacgggggctttaaaagaccatgcagtgcataatctctccatgagctctggccttgccagccctgatccttcttccattacacacacatcaaacaagcctgtggttatttatttccccttcaaggttctctttaatgctcattttaactgattctctctctgaatcttgataaagatagaagatggaggctgcaaaagggaaaaggaaagtgagattcaagttgtattcacaactctcagataaatagtcctgaggcagaagaagcggcctactggtaataattgtacaattcaattaatctttactccctgtcaacaagtatcttctagatgaccaaaaactgactatgagaccagt

SEQ ID NO: 132095 - DNA, 582 bp, Homo sapiens
tcttcccagaaatattcctaagtcattgcaacttctgaacagagacagcaattttaggaagcaagttaggatgaattaaagagccaggaaaagtataccattggcagtagtgatcagctcagtagcatcaggggtacctaactttagaaaaatcacattgtatttgagtagcccagcaatttattactcagtgaggcagctagtaagagagaatgctacctgcccackggggctttaaaagaccatgcagtgcataatctctccatgagctctggccttgccagccctgatccttcttccattacacacacatcaaacaagcctgtggttatttatttccccttcaaggttctctttaatgctcattttaactgattctctctctgaatcttgataaagatagaagatggaggctgcaaaagggaaaaggaaagtgagattcaagttgtattcacaactctcagataaatagtcctgaggcagaagaagcggcctactggtaataattgtacaattcaattaatctttactccctgtcaacaagtatcttctagatgaccaaaaactgactatgagaccagt

SEQ ID NO: 132096 - DNA, 407 bp, Homo sapiens
ttataatagttctttcttagccttataccttaaggcatttagtttttatctgtcgtgtttactatatcaacttgtaggtattttttataaatataaagaaaagctattgatttttggcatgcttatcttatatccagccaagttccygaatacttctaatagatttttttgagctttcaaggtattcacttataatacaagcaaaagtaattttattttccagtgtctatatttaacatttcattcttttgatataatgcattcattagctctattaggagactcagcccctatttcatagcattgctgagggttgaacaacacatgtaaagtgcttagagcaatggtggcacatcttagggtgtccaagaaataactagtattatttcccaactatcagagcttat

SEQ ID NO: 132097 - DNA, 538 bp, Homo sapiens
ctagagttaacagtaatggattgcatgtttcaagtacttagaagataggcttttgaatgttctcatcacaaagaaatgataaatgtgtaaggtgatagatatgctaattaccctgatttgatctttacacatgtacacatgtaagaaaacagcacattgtaccctgtaaatgtgtacaaattatatgtcaatcataaaaaatamaatagttaatagaatctggtaattatgtattagaatattatgcagcagataaaaaataacaagcacccatatactactatgaaaatttaccaagatacattttacaaaaaacaagttaaagaagcccatgcacaggaggattttttaaagtgcacagaataaaaataacttcataaatctatgggtacattttattttctgttttagaaaaaaaactgaatacatgcttatacttagaaattgattatggaggtcagacaaaaacaagaaatggggaaagtattccctatttaataaatggtgctgggaaaactggctagccgtatgtagaaag

SEQ ID NO: 132098 - DNA, 536 bp, Homo sapiens
tggatacttctacatcagccttaaaggacccaaatggcaaaagcagcagagggtagtggtgccagcactgtagccagaccttgtggcttgaattgcaggtcttattagctgtgggtcctatggcatgggcacctctggtccctctgttttcttctttgtaaacaagtggggataaatatactcgtattgcaagactattaggaagagcaaatgagaaaatacrtcctctgccttgaacactgctggacacatggcaaatgtaatgtagcattagctattattatcatcaaatctttgttctctcctttttgtctgccattcccttcctgattacacctctttacccaacaaaacctctgaaaaaaacacatctaaaattttaccatttaccattctgttcaacataattggaactgcaaatgacttcatataacctgtcattttaggacacttggaatcatgtcctgcttaaagccattgctttgaaatgggcaactgcattctgatttttgcattccatccaggtctttatgcaa

SEQ ID NO: 132099 - DNA, 603 bp, Homo sapiens
ccagcaatgttgcgctgagtccttctcacccttcatatttttctgactcccacctctctgactttctctcctgcttttaagggcttatgtaattatgctgggcctatctagataatccagaattatctccctgttttaaggtcaactgactaataattttaatttcacctgcaaattcccttctgtcatgtaatgtaacatatttatgagtgtaacaccaggtacaaaggtcaaagggaccaaaattatgcttatcakatgcaggagttactctcgcttaattattgttcatgggctcctctacaagggagtgcaacttacttacgctgactgctgagaacacacaggagttcaaaaacagaataacgatcccttttttaaatctttataatagctcctgagtgggggagttagcattattattcccattctacagatgttagaacgtatcagaagagtttaatatttcagaatttaaggcaagaacagaaaactgaatactgcatgttctcaattataattgggaactaaacatcaggtactcatggacaaaaagttggaaacaataaacactggggctactagatgagggagagaaggagg

SEQ ID NO: 132100 - DNA, 519 bp, Homo sapiens
ggaattccataattctcagacttactctaccttgggctgacctcacatcccaagctcataacattttctctgctggattctctgaactatgctccccacatacagggcatagcaccatctgtttataaaaaacagagattggcttctccaggcatgagcctaagtttggagaataagtgaataaatatcccactgtgtcccaggtcctagggyacaaagaaagtcaggggccaaagggagtcttttgagagagttgtaagcaaggcatcaggacaatgcagttgtcttttatgacaggtataactggtttccttgtctctgcaggaatgtgagcagaactttctaggagacacttaaagggcacatacaatccctagaagtttctggaagatgctatgactgataactcttccccatatctagtacctcataaatgatctcaaattttctatacatatacaatcagaaaagtggtgctttcatttacaatatgttgtcttttacccaagatttagaaaa

SEQ ID NO: 132101 - DNA, 547 bp, Homo sapiens
gtgtctatgtatgaacctttattcttcatgaagtagctggaactcttcattaattttcattttattttcttgcaatgatgaccacaaatctctttctcccagaagaatgtaaggttcatgagtaagaaacttgtctattcattctctgctatakctccagtgcctacaagagcacatattcaatactgtatcaaagatagaggaaacctagatcttagacactcaacaaatacatgataaagaacaactgttttcaaaggataatagagacaggtgtgtaacagctcttaaatttaaatatacattaaatgaagaactggacatttgtaaaaagctcagattcttagtagatcctcagagattttggctgtcagtctggggtagagcccaggaatgtgcattttatctagcagccttttacatcacccccaatactgccttttcacaaatgaggctgaggcaagtggtctgtttaacagcactttgagaaacactgccctagcatctgctttttatttatatgtactgagtaactaatagactgaac

SEQ ID NO: 132102 - DNA, 608 bp, Homo sapiens
aggggagcagataagatgggagacttactgtttttaggttatgctacctggaatactcataatgcacccaagggaaatttacatttaaccttcaatagatctatatcaatttcacctttgtgtgcttgctcgttgcccctccttctgtcctcccatagtgccttgctcataactccattatagagctatacaaatgcagtgcttaggcatatatttcattaagtcatgtatttatagtgcttaggtatgttttcccaaagatcaggtggtttccacaayactccagcatcctaagaatcctatataaatacataatcaaatctttaaatgttttaacaactgtacaaatgggtgaaccttgtggaagaactctgatcacaaatgcgcaagaccagaggagagattcagtatgagctaaatgaaattctgtggtaacagagacagaaaatgctgcaggattaaaatagcaagtggaaagaagcagtaggaaaggggaagaaagaaccatgttagaatttaacaaatagtactaattatcaacatggaggagcataacacaggaacatgtgttgcaacaatcagcaagataatacattatattgggtata

SEQ ID NO: 132103 - DNA, 507 bp, Homo sapiens
gataattcctggttatctgactggacctgctgagtggagagtggtgccatccaccagagtaggaaataaacaattgttggcacagatgatctattcagttttggctgtgtctggaacattttcagaaatataatacatcatcacaaaagagaatagcaaggaatcgatgccaaaccatcattctgtaaagcatcctgatgcagtagtttcagagccagacaaacctgaatttggatccagaagccctgctgtatagttgtgtgactctaagtaagttcactgtcaactggttcctcaaataaaatggggagaattamaacacctacatcatagataatgtatattccctggcatgtggaaagaattcaataaatccaagttctcctctgagtggcaccctgaggaattaattatcaaagattaagtaccaattcagagtgcaaagagaaatatttatccagttcatactctatcccaggccttctgagtatataatattatataaga

SEQ ID NO: 132104 - DNA, 507 bp, Homo sapiens
gataattcctggttatctgactggacctgctgagtggagagtggtgccatccaccagagtaggaaataaacaattgttggcacagatgatctattcagttttggctgtgtctggaacattttcagaaatataatacatcatcacaaaagagaatagcaaggaatcgatgccaaaccatcattctgtaaagcatcctgatgcagtagtttcagagccagacaaacctgaatttggatccagaagccctgctgtatagttgtgtgactctaagtaagttcactgtcaactggttcctcaaataaaatggggagaattaaaacacctacatcatagataatgtatattscctggcatgtggaaagaattcaataaatccaagttctcctctgagtggcaccctgaggaattaattatcaaagattaagtaccaattcagagtgcaaagagaaatatttatccagttcatactctatcccaggccttctgagtatataatattatataaga

SEQ ID NO: 132105 - DNA, 429 bp, Homo sapiens
tttttatacattttagagatgatggggctatgggtgatttttatttgtgtgtgtgtatgtctgtttcagtattttccaaataaaacagtaagagaatgtctagagaggggctggagcaagatggccaaatataagtttccaccaatcatttcmtcttcaggaataccgcatttaacaacaatctacaggaaaaaagcaccttcatacgaactaaaaatcaggtaagcatttacaatacctggttttaacttcatattgctgaaggacacactgaagagggtaggaggacagtctttagttgccaattcccgccatcctccatccctggcagtagctgcatggcacagagagaagctgtgtgtttgggagagagagagtgcagtgattttgagactttgcattgaactcagtgctgccctgtcacagtgg

SEQ ID NO: 132106 - DNA, 529 bp, Homo sapiens
ttgtgtgacctcaagaacttcacagtctagtggaggagacattcatgtaaatgaaaaataacaatatcatgtgttaatagagataaatacatgtaagatgatagggctcagaggataggtggaagaagtgagcctcaagcagggtagagaatatttctacccttgtcaaaagatgaggaggaaatggtaaatgcagtgtcagaaaaagtgaacatacagaatgccttacaaayaccaaaatgaaggaatagtcaccaaatgtgactatttttatacacttatttttaagcttcaagatgggctcttatttgtacacaatttttgtttttatacaaattaaaaaatagctcatttaattccttatttgactcagtttcatgagagcagggcccatggtcttctagtttataccatgttcccgatatctgcaccatgtctagtgcatcataggtactcactaagcatttttaaaaatgaatctatttatggaatggaaacaaatacagaaaaatgttcacagaccataagt

SEQ ID NO: 132107 - DNA, 529 bp, Homo sapiens
ttgtgtgacctcaagaacttcacagtctagtggaggagacattcatgtaaatgaaaaataacaatatcatgtgttaatagagataaatacatgtaagatgatagggctcagaggataggtggaagaagtgagcctcaagcagggtagagaatatttctacccttgtcaaaagatgaggaggaaatggtaaatgcagtgtcagaaaaagtgaacatacagaatgccttacaaataccaaaatgaaggaatagtcaccaaatgtgactatttttatacacttatttttaagcttcaagatgggctcttatttgtacacaatttttgtttttatacaaattaaaaaatagctcatttaattccttatttgactcagtttcatgagagcagggcccatggtcttctagtttataccatgttyccgatatctgcaccatgtctagtgcatcataggtactcactaagcatttttaaaaatgaatctatttatggaatggaaacaaatacagaaaaatgttcacagaccataagt

SEQ ID NO: 132108 - DNA, 573 bp, Homo sapiens
ggtttctcctgaaaaagagagaaagaaattaagaatgtgcattttgttgcctaaatgaaytgaaaaagtccccaacgtgtcaaaacaaataaatatctattaattagtctatggttgaactgtaagaatgttgacgaggctgtagtgtttctgggcctaaatctaattataaaggccaatatccccttgaatgtacatttacatctgcataaatgatctgtttaaaatgctattataaaattatttactaaaacctttctggaaattttgtatttgagaaagttatttcaaagtgtcattctctaaaagcttctgaactgattgcataggaacttcatttttgttctatcccgttctctgaacaaagttgttcttgtttagttgaacgaccatttggcagtaaaacttccgtagtttcagcttccacaggtgtttgttttatgagaggggccacaactgcagactgaaatagggcatattgagaacatatatgatattacacaatcttcctttgctgttcttcaacaccaggaaagtgtcagtctgccgctgagatcccaatggctttggaag

SEQ ID NO: 132109 - DNA, 573 bp, Homo sapiens
ggtttctcctgaaaaagagagaaagaaattaagaatgtgcattttgttgcctaaatgaactgaaaaagtccccaacgtgtcaaaacaaataaatatctattaattagtctatggttgaactgtaagaatgttgacgaggctgtagtgtttctgggsctaaatctaattataaaggccaatatccccttgaatgtacatttacatctgcataaatgatctgtttaaaatgctattataaaattatttactaaaacctttctggaaattttgtatttgagaaagttatttcaaagtgtcattctctaaaagcttctgaactgattgcataggaacttcatttttgttctatcccgttctctgaacaaagttgttcttgtttagttgaacgaccatttggcagtaaaacttccgtagtttcagcttccacaggtgtttgttttatgagaggggccacaactgcagactgaaatagggcatattgagaacatatatgatattacacaatcttcctttgctgttcttcaacaccaggaaagtgtcagtctgccgctgagatcccaatggctttggaag

SEQ ID NO: 132110 - DNA, 573 bp, Homo sapiens
ggtttctcctgaaaaagagagaaagaaattaagaatgtgcattttgttgcctaaatgaactgaaaaagtccccaacgtgtcaaaacaaataaatatctattaattagtctatggttgaactgtaagaatgttgacgaggctgtagtgtttctgggcctaaatctaattataaaggccaatatccccttgaatgtacatttacatctgcataaatgatctgtttaaaatgctattataaaattatttactaaaacctttctggaaattttgtatttgagaaagttatttcaaagtgtcattctctaaaagcttctgaactgattgcataggaacttcatttttgttctatcccgttctctgaacaaagttgttcttgtttagttraacgaccatttggcagtaaaacttccgtagtttcagcttccacaggtgtttgttttatgagaggggccacaactgcagactgaaatagggcatattgagaacatatatgatattacacaatcttcctttgctgttcttcaacaccaggaaagtgtcagtctgccgctgagatcccaatggctttggaag

SEQ ID NO: 132111 - DNA, 608 bp, Homo sapiens
ctggatagtgagagaataaccaatattaagtgtttctcaaaatttagtaaagaatatacaaaataccacaaaaatgttatcacacttaatttttattaaagtgcacttaatattgtttatctgcttataaacagcaaattagcccttataaaaytgaaaaagtaccctcaaactttaaaaatctgtaaaaccagtacaacttaaagtaaccgtttcaagttttttacataaaaaagcagcaaatcgtgtcactcacagcaacatggatgagcctggggtacattatgttaagtgaagtaagtcaggtacagaaagataaacactatatgtcctgactcatatgtggaccttagaaaagttgatctcctagaagtagatagtagaatagtgattaccagaggggggaaagggtaagtggaaggggagatagaaagaagttggttaaaagaaacaaaattacagctaggcaggaggagtaagttctagtgtcctatagagctatagagtgattatcgtaaacaataatttattgtaatttttcaaatagctagaagagacgattttgaatgttaccaacacaaagcaatgataaagttttgagataaccg

SEQ ID NO: 132112 - DNA, 608 bp, Homo sapiens
ctggatagtgagagaataaccaatattaagtgtttctcaaaatttagtaaagaatatacaaaataccacaaaaatgttatcacacttaatttttattaaagtgcacttaatattgtttatctgcttataaacagcaaattagcccttataaaactgaaaaagtaccctcaaactttaaaaatctgtaaaaccagtacaacttaaagtaaccgtttcaagttttttacataaaaaagcagcaaatygtgtcactcacagcaacatggatgagcctggggtacattatgttaagtgaagtaagtcaggtacagaaagataaacactatatgtcctgactcatatgtggaccttagaaaagttgatctcctagaagtagatagtagaatagtgattaccagaggggggaaagggtaagtggaaggggagatagaaagaagttggttaaaagaaacaaaattacagctaggcaggaggagtaagttctagtgtcctatagagctatagagtgattatcgtaaacaataatttattgtaatttttcaaatagctagaagagacgattttgaatgttaccaacacaaagcaatgataaagttttgagataaccg

SEQ ID NO: 132113 - DNA, 621 bp, Homo sapiens
caatttgtaatctagttggaaaataaataaaaataaatagagtgttgtgtcttgcaggattgtttttatgagtggattacaagaagagagggatcaaagaaggcatgtgaatgttggcagaaaggcagacttccagaaagaagccccatcatgtggatccacactgctgtttcgtcatttctaaattcacttctagaattattccctctagactaagcctcagtctcaggctatctaacagctgaggcctcatttctagttatgtgtactgctggacagcaccgtttctttctttyttttttttttttgagatggagtcttgctgtgttgcccaggctggagtgcagtggcacgatctcggctcactgcaatctctgcctcccgggttcaagttatgctcctgcctcagcctcctgagtagctgggattacaggcacccacgaccacacccagctatttttttttattttttttagtagagacggggtttcaccatgttgaccaggctagtcttgaactcctgacatcgtgatccacccgcctctgcctcccgaagttctgggattacaggtgtgagccacagcgtccggccagcatcattaatttaatgaatatttactg

SEQ ID NO: 132114 - DNA, 496 bp, Homo sapiens
ctctactttaaaaaaaactgttagaatagattaatttagtaaagtataagttcaaaagcaacgtacaaaaatcagtagtgtttctttatattaacaaccaactagctgaaaaagaaattgagaaaacaattccatttacaataacatgaaaaaaaataaaataaactacttaggaataaatttaaccaaggagatgaaagatctaaacacygaaaactacaaagcattaatgaaagaaattgaagaatacacagataatggaaagatattccatgttcatggattagaaaattgttaaaatttccatactatccaaagtgatctgcatatttaatgcaatcttatcaaaattccaatggcatttttcacagaaatagaaaaagcaatcctaaaatcaagtgaaaccacaaaaaatctcctaatagccaaagcaaccttgcacaaaaagaacaaaactaaaggcattatactacctgattccaggtagtataatgat

SEQ ID NO: 132115 - DNA, 546 bp, Homo sapiens
gacaggactctggtctcacggagtctacaggatggttgggaaaacagaaaacaaacaagtaaatacattaactggtcctgagcaaaatgttttcaaacaacctgatcttgattaattatcatgggcctccctgtaaattaggcctgggtagcccccttgtacagagaagggtctgaggcacagagaggagaagggattcatgcaagggaatgggtgaatggcagggctggaatttgtccactttgtcactcagggacattgtttccctctttgtccagcacatcctacagcctgagattcagatagaatgagtcagaggctttggtgactgaaatggagctgaaattttgcataagcaggatttattgaaagcagaccagatgtcatcaccatcctgctggaaaccaggctactgccatctgtattttggaaaaaacaaccacaattagagcactgcygcctgcactttaattgacacactattcggaagggttgccggctgctcctggggttgagtgctgagccctttggttgcccttcagagag

SEQ ID NO: 132116 - DNA, 495 bp, Homo sapiens
gggtagtctgtggtggcgggggcgcggaggagagcaggrcttctgcggtgctggtgatgttctatttatgagatctgtttcactttgtgaaattccatccagttgtataattatggtatatgcatttttctatatatattatactttaacaaaatgttcaccaacaaatgtttataactccaaaataaatgaattaattaaaattttaaataaaaaatactgaattagagatagaaaagttaatcattcactcattcaccaactcactgtgtgactagggcaaatcttttaaactgtctgagcccacaactcctcaactatgaggctgaaaacacagcaaacttatccttgcctaaacatcatttttacatccatttgttcattttccagtctcacaactgctatgagtatgggtaattgagttttggtatcctcattttttcagtggtggagcaacgtctgtaaaggttaggcaatttgctgaaagtcacaaag

SEQ ID NO: 132117 - DNA, 495 bp, Homo sapiens
gggtagtctgtggtggcgggggcgcggaggagagcagggcttctgcggtgctggtgatgttctatttatgagatctgtttcactttgtgaaattccatccagttgtataattatggtatatgcatttttctatatatattatactttaacaaaatgttcaccaacaaatgtttataactccaaaataaatgaattaattaaaattttaaataaaaaatactgaattagagatagaaaagttaatcattcactcattcaccaactcactgtgtgactagggcaaatcttttaaactgtctgagcccacaactcctcaactatgaggctgaaaacacagcaaacttatccttgcctaaacatcatttttacatccatttgttcattttccagtctcacaactgctrtgagtatgggtaattgagttttggtatcctcattttttcagtggtggagcaacgtctgtaaaggttaggcaatttgctgaaagtcacaaag

SEQ ID NO: 132118 - DNA, 492 bp, Homo sapiens
gtagtctgtggtggcgggggcgcggaggagagcagggcttctgcggtgctggtgatgttctatttatgagatctgtttcactttgtgaaattccatccagttgtataattatggtatatgcatttttctatatatattatactttaacaaaatgttcaccaacaaatgtttataactccaaaataaatgaattaattaaaattttaaataaaaaatactgaattagagatagaaaagttaatcattcactcattcaccaactcactgtgtgactagggcaaatcttttaaactgtctgagcccacaactcctcaactatgaggctgaaaacacagcaaacttatccttgcctaaacatcatttttacatccatttgttcattttccagtctcacaactgctatgagtatgggtaaytgagttttggtatcctcattttttcagtggtggagcaacgtctgtaaaggttaggcaatttgctgaaagtcacaaa

SEQ ID NO: 132119 - DNA, 564 bp, Homo sapiens
tgtacagcaaaaaagagaaggtagaaagcaacaaaaagtttctctgaatgagatccatattaatatttcaaatacactatcactttaagtctgacattttctttccgcttttttcatatcatggtcaaatttttaaaaccataagagttttatttactcattattacacagtgataatcaaagaaactagaaaataaaaacaaaaacgtttttgacccacagacaccactatattaagatattgtttaatcagaacttttctcttctttcctcccccaacctttctgcagactctgcyagctcaacaaaacaagtggataaaaaaagccttttctgtcaagatgtcataatttaggactcgcagtgattggtgataatatatttccttgaatgttaaaggtggcaggtgacagagatgaagcaaacagtgtatttcatacagctacagagacgtgaagttagactttacataatagggactataaaaagtaatcttgcaggtctgcagtgtaaatgctatggtgcttatgaaatgcactgtaatatccagcagaatagtgacag

SEQ ID NO: 132120 - DNA, 564 bp, Homo sapiens
tgtacagcaaaaaagagaaggtagaaagcaacaaaaagtttctctgaatgagatccatattaatatttcaaatacactatcactttaagtctgacattttctttccgcttttttcatatcatggtcaaatttttaaaaccataagagttttatttactcattattacacagtgataatcaaagaaactagaaaataaaaacaaaaacgtttttgacccacagacaccactatattaagatattgtttaatcagaacttttctcttctttcctcccccaacctttctgcagactctgccagctcaacaaaacaagtggataaaaaaagccttttctgtcaagatgtcataatttaggactcgcagtgattggtgataatatatttccttgaatgttaaaggtggcaggtgacagagatgaagcaaacagtgtatttcatacagctacagagacgtgaagttagaytttacataatagggactataaaaagtaatcttgcaggtctgcagtgtaaatgctatggtgcttatgaaatgcactgtaatatccagcagaatagtgacag

SEQ ID NO: 132121 - DNA, 675 bp, Homo sapiens
atacagttattttgtagcaaacaatacacaaaacagtctgttttacatcctataaaggaatacctgaggctaggtaatttataaagaaaagaagtttatttggttcacagctccatgggctgtacaagcatgacaccagcaactactctgcttctgatgggaacctcaggaagcttacaatcatgacagaaggtgaaggggaagcaggcatgtcacatggtaaaagaggagtaagacagagggacaggaagtcctagaatctttttttaacaatcagatcttgtagtaactcatggccayagggaaggcaccaagccattcataaaggatattctctcatgactcaaacacttcccattaggtccatctccagcactggaggtcacatttctacatgagatttggagggaacaaaacatgcaaactatattagttatagattaccaaaacagtgtatttaaagaagaatttacctttcttcttttcatatcatcattttctaatttttctgcaataataatgtaattctttaatatacaaataaattataaactagagaaactattttggtctaagtgaaaaacttgagacatgacggattaatttccagtagaaaagcactctacaaaaacaatcaataaagttggatatgtctgtatatctatatgtgcatat

SEQ ID NO: 132122 - DNA, 462 bp, Homo sapiens
aaagtctttcccaaataagcaaaagctaaagaaatttgttaccattagaccggtcctataagaaatgcttcaaggagctcttcaaaggaaactaaaggatgataattactatcatgaatacatatgaaagtataaaagtcactggtacatacagagagtttatatttaactcagaaataaagtcaaatccagaatattcagtactgaaataatggtatataaattatacatatccctagtatgacagctaaaagtcaaaacagttaaaaataacaaaagttataacaagttgttaaggattaaacatataaaaatacacaaattgtaacatcaaaaacgtaagttgtgtgtgagggagtggaagtctagagtttttgtacgtgaagaagtcragttgtcatcagctttaaatagttgataacaaaatattttatgtaagcctcagggtaatcacaaaaaaaa

SEQ ID NO: 132123 - DNA, 384 bp, Homo sapiens
gaatacagcaaaagaatttctaagaagaaagtttatagcaataactgcttacattaaaaaagaaagatattaaatcaatagtctaacattatgtctcaaggaaatagaaaacacaacaaactaaacctaaaattagcagaaggaaggaaataataaaaacgagaacaaaaataagtcaaatagagaacagaaaaaacacagaaataataaaactgagttagttttatgaaaaattaaatgggcaaatcttcaattagtctaagaaaaagagaaggaaaaatggcagataagtaacaggaataaggtgcacctcctgctaagatagacagaacagcatcargagactcacattgtgaacttttgctctatgaaccaccacaggaa

SEQ ID NO: 132124 - DNA, 384 bp, Homo sapiens
gaatacagcaaaagaatttctaagaagaaagtttatagcaataactgcttacattaaaaaagaaagatattaaatcaatagtctaacattatgtctcaaggaaatagaaaacacaacaaactaaacctaaaattagcagaaggaaggaaataataaaaacgagaacaaaaataagtcaaatagagaacagaaaaaacacagaaataataaaactgagttagttttatgaaaaattaaatgggcaaatcttcaattagtctaagaaaaagagaaggaaaaatggcagataagtaacaggaataaggtgcacctcctgctaagatagacagaacagcatcaggagactcacattgtgaacytttgctctatgaaccaccacaggaa

SEQ ID NO: 132125 - DNA, 572 bp, Homo sapiens
gacatattcataattttttccaagattctcataagaaaggttttgggaataaaatcaaataaagtgatattattaaaggattaatcttgattctgctctaatacattttttaaaagcaaatcaatttcaagttaagaaaatttatgatgttamtattattaaactaatttataatactgttatataataacataactatattaataatcattagtaattataattattattttcaatgactgttgttaaaaaacttgtaataaatctcatttcattacaacataccaatgtttgtaccccgaaggtgagaattattattttgggagatgttttatgttagagcagtgaataggtcaacctataggtattcccaggactgagtctatttcatccatacaaagaaggtgttaagaagtacatccaggcttataaggggcctaggagattggtctggcagttggatattgagaacttcaaggtctgatccaattagggctttggattgcatatagtcaaagacaattaggagaagcaggccagagaggctaatggaactacccacagagttgttt

SEQ ID NO: 132126 - DNA, 572 bp, Homo sapiens
gacatattcataattttttccaagattctcataagaaaggttttgggaataaaatcaaataaagtgatattattaaaggattaatcttgattctgctctaatacattttttaaaagcaaatcaatttcaagttaagaaaatttatgatgttactattattaaactaatttataatactgttrtataataacataactatattaataatcattagtaattataattattattttcaatgactgttgttaaaaaacttgtaataaatctcatttcattacaacataccaatgtttgtaccccgaaggtgagaattattattttgggagatgttttatgttagagcagtgaataggtcaacctataggtattcccaggactgagtctatttcatccatacaaagaaggtgttaagaagtacatccaggcttataaggggcctaggagattggtctggcagttggatattgagaacttcaaggtctgatccaattagggctttggattgcatatagtcaaagacaattaggagaagcaggccagagaggctaatggaactacccacagagttgttt

SEQ ID NO: 132127 - DNA, 572 bp, Homo sapiens
gacatattcataattttttccaagattctcataagaaaggttttgggaataaaatcaaataaagtgatattattaaaggattaatcttgattctgctctaatacattttttaaaagcaaatcaatttcaagttaagaaaatttatgatgttactattattaaactaatttataatactgttatataataacataactatattaataatcattagtaattataattattattttcaatgactgttgttaaaaaacttgtaataaatctcatttcattacaacataccaatgtttgtacccygaaggtgagaattattattttgggagatgttttatgttagagcagtgaataggtcaacctataggtattcccaggactgagtctatttcatccatacaaagaaggtgttaagaagtacatccaggcttataaggggcctaggagattggtctggcagttggatattgagaacttcaaggtctgatccaattagggctttggattgcatatagtcaaagacaattaggagaagcaggccagagaggctaatggaactacccacagagttgttt

SEQ ID NO: 132128 - DNA, 551 bp, Homo sapiens
agggcatattattatccccattttacaaaggaaagagctgtcagacacagtgtcacacaggaaggtagacgataatgtcaatatccctcatcttagtataaagttgtccttaaaaactctccattatttattaatttattgactcacttattcatgttttctgcacagtgatacttatcctgcacgagactctcacaccagtgcttkgggtgtaagaacaccccaaggattgtgttcccttttctcgaagagtctgtggtctaaggggattcaatggggtccactttccaaaccaagacagcaaaggaacactaggagagaagtattctgtgcagagattcagttatatgatagctaagaggtggaccttccatttaatactttgccttgggcaagtcactctcctcagtttcctcacctgctaagtgggcataacaatagtactgacttcactgggctgttgcgaggactgaatgagatgacatggaaggtatctggctcacagtcagtgctcaataaatggtgattactaaagaaaacccatgaggaaa

SEQ ID NO: 132129 - DNA, 492 bp, Homo sapiens
tcaggtcgatctctaaagactggattgtatgtctcggctccattgagtgtcacctcagcagcttcaacctcggcggactgtgtggtgaccactgtggtgctctcctcaatctactgagactagtacttgtccagctcctcttggttcttccgagccagctccttgtattgggcccggatgtctgccatgatcttggtgaggttctgagatttgggggcatctacctccatggtcaacccagagctggcaatctgggcttgtaggccttttacttcctctttgtggtttttcttcatgaagagcagctcctccttgagagcttcgatctctgtctccagctgcagccgagtgacatttgtgtcatcagtgactttgcagagcccatggatktcgctctccacagactggcgcatggccagccctgtctcatacttgactctaaagtcatcagcagcaagacgggcattgttgatctgcagaacaatgcgggca

SEQ ID NO: 132130 - DNA, 283 bp, Homo sapiens
tccttccaaacaaccagacacataggtagagtcagatctcaacaggacccacagggccaattgtaaaatcaaatctggggagatgttaaagactaccaaagcaaaagaattgcacaattttggtaatgtacataaacaaaaatctaaggaatatgyaagaatgaattctgaaatccaagaagagagaaacagcattttagatcagattgaatttagcagtggatggacacatagcagaattctgattcaaaagctagttcaaggggccatttgctttgctggt

SEQ ID NO: 132131 - DNA, 533 bp, Homo sapiens
gagcagacttctgtttagtaaaacactcatgatcatcataaacgtagtgatgacagctcatatccattgagtcttagctttgttccttgctgaccctctgctgagtacttcaaatgatttattttaattaatccttacaaggacccaaggatgggaaccattattattcccattttataaatgaggaaattgaggcacaagaaggtaagtaatttgaggaaagaaacaaactcagaaagtgaagagaaggattttgaacgcacacagtcttaactgtaccacctgccctttcaacccccaggaggacagagctgttcattacaacagccctgaccctggaactgaggccttggaactctggtccagggctctttgcactacaccagactgatgtcagtccccaggtcttgctgagaaacaacagatccatgaagagggaggctgagagactcactctgtgtcctcgagtttgccctgacygactttatggagattccaggagtgactctggtcttgtctgggtcatcacaggg

SEQ ID NO: 132132 - DNA, 565 bp, Homo sapiens
aaaacatttgttaagaaatagagaaatcctaattagtgggcaaaatttacttataccccagcagaaacacaaactggctctatcatttattttataacaatgacatgcaaacattttagtgattcaatacttaccttttatcttcttcaactccgaagaaattgtgttaatatttttaattactttgtccacatttagcttatgatcagtaacasgcttcttacccatctgattttaaaagaaaaacagaaacaatgtataaatcagtatttatgtgtacttttaaaatacttacattttcagtatttctataaatctgttatttcagaaataattatgaaacaaatctttataaatggttagaattctaacatcaaaaggcattaatgtgttatgtaatatttttccaactaaaaactccaactggaatttgtaggatgaggttccttcctcaatcaaaccatatccacaagatagggcttacaatggaaatgaagatgtccccttttcagaaagcctcagcccttataaactaccttacaatttagcgtttgtgttaagatct

SEQ ID NO: 132133 - DNA, 455 bp, Homo sapiens
ctgtagtctctgccctcatggagcttacattctaatggaaattatgaaaaaatatggtggttgttttgcgtgtgtgcttgcacatgtgtttagtttattgcttctgtctgctacctactactctatttcctgcacctacagtctttgactggctcattctcttagtgatagacatmcaggctgcctctcacttgttgttaccacaaaggaggctgcaaagaacatccctatacccccttacaatcctattcaagcattcttgtgttttagactcaggaaggaatacccatggctaggttcagtgaacacagcagactaatccccagaagacccaccctagtctacactctctcaggagatttgatgtgccacgtgctgctgtctaatgtttgccagtatgagaaatgtaaagtcattttaatttgtgtttctctaattgctagtgaggctgacca

SEQ ID NO: 132134 - DNA, 384 bp, Homo sapiens
atttaaaatagaagttggcaaccaacatgttgtggtagataaattaatttacgaaattaaatctgttagtccaatggagtattttaagtaaacatttttttctgatttataactatgaactgtggttctaaaatttaaaatgcaataattatttaattctcatttttagtgattttatgaatcrttagttacagtggaaaacatgtacttgggcatacttattaaaatggtttaatagtgaagggtatacaccaagatctaactacgaagatgtttatcactaaattttaacaaaggacaattaaaaaaacacaattcttgaatgctacacaattgttttgataaaatcctgcttaaatataaagacataaatatattgccata

SEQ ID NO: 132135 - DNA, 600 bp, Homo sapiens
aaactctgtacgacacatatacacatgtatgcaaaacaccctcgtccacaattatttgattttgagatatgttatggtaataactgtcaactctttgactaggtgtatccctttttaatgccaaaacatttgaagacttcactcaggatgattatttttatgttactttgaattatttgagaaatacataataacaataagcttataggactttaatagcacttatarataaatatgtattttcctaatctcaaagcataacatatatttgtaagatgagagtacatctatttttttctagtcttttctctcacattgatccttctctctgtctaggcactaagactacaagcattctctccagccaggtagtgttgaccagcaatgaagaaattaattcttagtttatgcgtttcaaaggagattcagacccttccagtaaaagggccacagaaaggactcagaacacaaattcagaaattgcataatgatggaaaagcccagcacagcaaggtttccaattatagaacgaggcagcatgcctggattggggttaaggactcagaaagagacattggatgaagctaggtgtgaaagaag

SEQ ID NO: 132136 - DNA, 383 bp, Homo sapiens
ttgaattcttctcagacaggttgctgaaacccagctccctgagtcctacagcaagctctgggtgatttctacaaaatctcgtgatcacatctgttcatgtgtgtacagatgtgtacatgatcacatttctatgttctttttgggaaaggctgttgaagatcccttttgcggggggcggggagcggggkgggggcaaatgcattgaggaaaagccaaatggtggctgcaagtggccctcaaattgagtagtgttcacatgcacacagaggaaggctggcctcagaccctgagcactgcccatggccttccagggacagctgtgggctaggggtctaccaaagttcaaaggacatttgcaacctcctgctctgagcggggcatgt

SEQ ID NO: 132137 - DNA, 396 bp, Homo sapiens
cagctccctgagtcctacagcaagctctgggtgatttctacaaaatctcgtgatcacatctgttcatgtgtgtacagatgtgtacatgatcacatttctatgttctttttgggaaaggctgttgaagatcccttttgcggggggcggggagcggggggggggcaaatgcattgaggaaaagccaaatggtggctgcaagtggccctcaaattgagtagtgttcacatgcacacmgaggaaggctggcctcagaccctgagcactgcccatggccttccagggacagctgtgggctaggggtctaccaaagttcaaaggacatttgcaacctcctgctctgagcggggcatgtgctaggctgaataatggctcccaaagatgcccgtatccgaattc

SEQ ID NO: 132138 - DNA, 549 bp, Homo sapiens
caattccaagcttggagacatttctcccccatgccatccccattgccccctgctttggtttgtaacagattttaaatgaatggttcaaatatcacaggcagaagaattccraataatcatggagctacttaatgtagccatcttcaaccaggaggaacatgactcccactccttaaatattggccacgtatagtgacttccttccaaagagtatgtatagaaaggcgggcaaagagtcactttgcaatggagaaacctgacagacactacctcagccaggtggtcagcatcaacagtgataggtcatgctgatagtctgtacccttgatagaatgtgatgtgaatggaacttaacctctgtgattctccacccccaaacctattaccccagtctaatcataagaaaaatagcagacacgtttctagtcgagggacattctacaaaatatctgacgaatactccaacactgtcaaggtcatcaaaacaaggaaagtccaagaaactgtcacaacaaagagaagcccaaggagacatggtgacaaaatgtg

SEQ ID NO: 132139 - DNA, 560 bp, Homo sapiens
cttcatttccctaaagggtagaagagcaattccaagcttggagacatttctcccccatgccatccccattgccccctgctttggtttgtaacagattttaaatgaatggttcaaatatcacaggcagaagaattccgaataatcatggagctacttaatgtagccatcttcaaccaggaggaacatgactcccactccttaaatattggccacgtatagtgacttccttccaaagagtatgtrtagaaaggcgggcaaagagtcactttgcaatggagaaacctgacagacactacctcagccaggtggtcagcatcaacagtgataggtcatgctgatagtctgtacccttgatagaatgtgatgtgaatggaacttaacctctgtgattctccacccccaaacctattaccccagtctaatcataagaaaaatagcagacacgtttctagtcgagggacattctacaaaatatctgacgaatactccaacactgtcaaggtcatcaaaacaaggaaagtccaagaaactgtcacaacaaagagaagcccaaggagaca

SEQ ID NO: 132140 - DNA, 579 bp, Homo sapiens
cttcatttccctaaagggtagaagagcaattccaagcttggagacatttctcccccatgccatccccattgccccctgctttggtttgtaacagattttaaatgaatggttcaaatatcacaggcagaagaattccgaataatcatggagctacttaatgtagccatcttcaaccaggaggaacatgactcccactccttaaatattggccacgtatagtgacttccttccaaagagtatgtatagaaaggcgggcaaagagtcactttrcaatggagaaacctgacagacactacctcagccaggtggtcagcatcaacagtgataggtcatgctgatagtctgtacccttgatagaatgtgatgtgaatggaacttaacctctgtgattctccacccccaaacctattaccccagtctaatcataagaaaaatagcagacacgtttctagtcgagggacattctacaaaatatctgacgaatactccaacactgtcaaggtcatcaaaacaaggaaagtccaagaaactgtcacaacaaagagaagcccaaggagacatggtgacaaaatgtggtgt

SEQ ID NO: 132141 - DNA, 466 bp, Homo sapiens
ctccctttccagcatgtgactccatggctgcgagcactctgtttccyatatagcagcaaggtggctttcacccccacttcctggatgtgcacacatccagctaggtgggcttcgcctgcagggcaagtggtgagcaggcactcagggcccaaagaggagagagcccaggctgggagtgggctgggaggaagtcaggcttgcagataccctccaccccaaccctgcccacctcatcatggcctccactcaagaggaaatggattccagagaggctaggggtggagacctgctgggatccatgaggaggacagcaggaaaagagggtccccaaggagaaaggttgcctcccacagtgactcaaagggggtggttgagggaaggttccagcccctgacctgtgaaccagcttcaagtcagggaaacagggtgaagccactgggcctggggcccctgtcctgggagtgtt

SEQ ID NO: 132142 - DNA, 547 bp, Homo sapiens
attttatcataatgatttttgtttgggcagtaagatttagcaggcgtcagagaaaaagttttcacttttaattttattaacttccacttatttcaaggtttttacagtggttctgtagtccttatgtcatttaaaaacttttaaaactagtttagtttgtattattaaagtaaattctaagatcagaaatctgtctccttctcaggataaaacttcattagaacattcrttggcctggaactatatctccctcagggccccatgcaatcattgtactttggaaatgcttttaaaatgctaaaatgattaaaacaagtagttaaagtaaaaggcctgatgtgtcctcttttctcacttttgaagtatttatgaacattgtgaactcactctgaccatcaggggctttacaactcaacataacccaagagttgaacagtaatccagatagaataggaatccaaagaataaaatatgcatgaatagacttttactcctggccatgaggcggggaaggggaccagattaaccttcttgcctggaacaacta

SEQ ID NO: 132143 - DNA, 547 bp, Homo sapiens
attttatcataatgatttttgtttgggcagtaagatttagcaggcgtcagagaaaaagttttcacttttaattttattaacttccacttatttcaaggtttttacagtggttctgtagtccttatgtcatttaaaaacttttaaaactagtttagtttgtattattaaagtaaattctaagatcagaaatctgtctccttctcaggataaaacttcattagaacattcattggcctggaactatatctccctcagggccccatgcaatcattgtactttggaaatgcttttaaaatgctaaaatgattaaaacaagtagttaaagtaaaaggcctgatgtgtcctcttttctcacttttgaagtatttrtgaacattgtgaactcactctgaccatcaggggctttacaactcaacataacccaagagttgaacagtaatccagatagaataggaatccaaagaataaaatatgcatgaatagacttttactcctggccatgaggcggggaaggggaccagattaaccttcttgcctggaacaacta

SEQ ID NO: 132144 - DNA, 603 bp, Homo sapiens
tgatacttaagaagaggtggtgcatttcttctttagatggaaagcttcaggcctcaatagaatagtgtatcttgcagattctctttaaaggaacaaagtcagcaaggrcccttgtcctgtctatgaagctccttggtgatggtggtgtgaggaaggtgagaaggggatatatctccttttgctccttggccactgtgagctttcatccacctatttatctttgtgtcaagaaatatgtactgagttcttctggcgtgccaagtgctatactaggcactggaatactttagttaaaaaaaattggttctgggatctgatcactatgatacagaaaaactctgaacaaggaagccagaaatttaggtgcaagtctgagttggcactaactctgtcatctgtgtgttatagcaggggcttcaaattctacccctgatcgggtagtaaataactacagctggtagagtggagacccggctactctggaaatttcatgcctccctctgcaaaggtggtgctgtgacccacctttggtgaagtgtttttctgctggaaaacagcactggtgtccagattttcaagacaaacaagaaagctgacctttaa

SEQ ID NO: 132145 - DNA, 370 bp, Homo sapiens
tttttcatggcccctcctatctctcaggccactggatcaccctgtgacattgcactgggcccagacatgggtcctttctttggattccataaaaatgaactcgattacccaaaatatgtgtagattttacaaaaggcattttttgataggggtgagagggaagaagtaaaaacagttttactttacagcaaagcaaattaacttcaatagctgacatttgtggttttaagatgcyatttcccctactccttgactcctccatatttgctagttgtgggatttgggcaagttacttagcctttctgtgcctcagtttctcatatttaaaatgaggaccatagtattatagtatctacttagattcatatga

SEQ ID NO: 132146 - DNA, 370 bp, Homo sapiens
tttttcatggcccctcctatctctcaggccactggatcaccctgtgacattgcactgggcccagacatgggtcctttctttggattccataaaaatgaactcgattacccaaaatatgtgtagattttacaaaaggcattttttgataggggtgagagggaagaagtaaaaacagttttactttacagcaaagcaaattaacttcaatagctgacatttgtggttttaagatgccatttcccctactccttgactcctccatatttgctagttgtgggatttgggcaagttacttagcctttctgtgcctcagtttctcatatttaaawtgaggaccatagtattatagtatctacttagattcatatga

SEQ ID NO: 132147 - DNA, 650 bp, Homo sapiens
gatattctggtatagacttttggtttctctgaaattctgaaagctaaagagaattcaaattttgatttacctttgcctggtttgaaggaacttaaagataggaaagttagcacccgcaatccaacctctttcccaaaggygacagctgtgtggtttccagggcaagagtttacttggatggcgagagaaaatacttcttgataaataatgtgtttttatgactcctgtttctgggaaacctgatacatacaatgcacctacaagtatttgaggtcaagtttcaactgtgtttttattaaatatttgactgttttgtgtgtgtgattgtaattgactgagtttgaaacctgagtgattaaggagcttgtctgtaagaaggttgcttctctatctctcttcttctttttttctcttctttctctctctctatctctccttctatatttttatataatgttaagttttgtaattagctgattctgctttctcatgctccttaattttgatttcttagaaagatgaagcattggaaagcactgcatagctccatgttatcaatcaattaatgtcttcagtcctttaatgtcctctggacagctgggatgcttgggagaagactgttgacaagtcttgtacgtgtggaagacacc

SEQ ID NO: 132148 - DNA, 650 bp, Homo sapiens
gatattctggtatagacttttggtttctctgaaattctgaaagctaaagagaattcaaattttgatttacctttgcctggtttgaaggaacttaaagataggaaagttagcacccgcaatccaacctctttcccaaaggcgacagctgtgtggtttccagggcaagagtttacttggatggcgagagaaaatacttcttgataaataatgtgtttttatgactcctgtttctgggaaacctgatacatacaaygcacctacaagtatttgaggtcaagtttcaactgtgtttttattaaatatttgactgttttgtgtgtgtgattgtaattgactgagtttgaaacctgagtgattaaggagcttgtctgtaagaaggttgcttctctatctctcttcttctttttttctcttctttctctctctctatctctccttctatatttttatataatgttaagttttgtaattagctgattctgctttctcatgctccttaattttgatttcttagaaagatgaagcattggaaagcactgcatagctccatgttatcaatcaattaatgtcttcagtcctttaatgtcctctggacagctgggatgcttgggagaagactgttgacaagtcttgtacgtgtggaagacacc

SEQ ID NO: 132149 - DNA, 607 bp, Homo sapiens
caagatgaccgcagtgattcttccatgagcagcccctttgcagtgtgactttgcagctcatcccatgaggaagtagtctgtttctcaacaactttgaatctgggttggccttgtaatgcaccttgactaatgaatgtggcaaaaataatgtgggattctaaacccatgccttgtaattcctaggcaaaagaatcgtctagctgaacctaatccatgttgctgacattaccaattcataagtaaataacaccactaaattttgagtggtttaccgtgcagtgacagctagctaacatagtaatgtgttttttaaaatccctaaccyggatctttatatataacgaacatgaaacttttagcttcctgtccaaaggactgaactcacaaggcatgagacattttataaccctgagggtgagtgtcagtagctggggtttgtgtggaagtagtattccatgacattcattctaaccaagagccttctgtggctgaattatatattccagctcaagttctaaaggatactgatccttggtctaagatgatagttcctaagctttactgggttacagtctcctttgagaatctgatgaaatctataagaatt

SEQ ID NO: 132150 - DNA, 462 bp, Homo sapiens
ctggtcctatctatccccactttccttttctatctaccagcctatgacattggcagacatcactggaattataayagacatgtgctcagaaaaggaaaaaagacaaatgaacttgaatatgagatctcaaacaactagataggcaaatctattttaataatctcccaaagtaaatctaatgaactattgtctaagtatcatcttctgttaagagttttatatattgtcctcctttttatttgaaaggataatggagagctggttagatttccagatgtattacaatgagtggttaagttataagccactggatgtcactcttaggctatgcaagtgtagctagctgcagtggagattttccagagtaaactgaaggtagagagttacaggagatagccggggatagaaaccaattgaactgtttggataggtacatttgaaatgtcagtgaattacagcaaa

SEQ ID NO: 132151 - DNA, 499 bp, Homo sapiens
tcaactactgtgcttgcaagaagaagaatcagatacaagtcctgatcttcaggaacttgaagtccagactgaaaaccaagatttcaaaaaaaaattagctaacctcctttcaattaaaataacaatataaaattctagctgaaggaatactacaaatttctttgcctagtgagtggaacagacatattctgtgacttcaaaagagagaacatgtagtggattagggatgttagcaaagagattggaaagatagcaacaaatttttaaagaattaggaaattgacaaagaaycagaaagtttacagattatagatttaacaatgaatttgatggtgaggggagaatggaggtaatttcatattggagtttggatagaagcaggaaatagaggcctagatggaagaattgtcagaaaaatgataagaaaagtatgctaggagacataactgaaagcagtttaatttcagattctgaagagggttgactattaggctaagga

SEQ ID NO: 132152 - DNA, 767 bp, Homo sapiens
cagccctcctcccctcacttgtccctggcaaggctctccaaggcccagcttaactgtcttctctctgggacaccttcctaagccctctaggcagctctcattgtctcctcccatggtgccttagacatggcttcattgctttgtagagggatctgtctctccttccagcatgagagagcctcaaagcctggatccctgtacccagatacccccttctccgctatagaacctgacagagagctctacactgagggctgaactgacgagaatcttgcaggactagccctcctctcctgggtgtagagtcccactgagactgggcatgagaccttttggatggttctagccttctgaaccagttactgtcctggttaagcctcagtttcatctaaagaatccagaaacagggactggtcttctcctcctgggtattatggacccctaagagtctaaagtgtgccccctgctccctacctttcagggccctgccccatttgctgcatctggaaacttccctgttctccctgttctkgccctgtggctctcagcagtgagttgtcagtggtggaggagtgggccatcatagagaacttctgactccctgcgaccaaggcgccctcggagtgacttagagagaacggccacctgcacacctacccatcctacactacacatctcacctagtagaggggccaggggcagtggcaggagtctgctttctggcaaaatgttctctgtcttgtctgcccacacaacagctggctccc

SEQ ID NO: 132153 - DNA, 767 bp, Homo sapiens
cagccctcctcccctcacttgtccctggcaaggctctccaaggcccagcttaactgtcttctctctgggacaccttcctaagccctctaggcagctctcattgtctcctcccatggtgccttagacatggcttcattgctttgtagagggatctgtctctccttccagcatgagagagcctcaaagcctggatccctgtacccagatacccccttctccgctatagaacctgacagagagctctacactgagggctgaactgacgagaatcttgcaggactagccctcctctcctgggtgtagagtcccactgagactgggcatgagaccttttggatggttctagccttctgaaccagttactgtcctggttaagcctcagtttcatctaaagaatccagaaacagggactggtcttctcctcctgggtattatggacccctaagagtctaaagtgtgccccctgctccctacctttcagggccctgccccatttgctgcatctggaaacttccctgttctccctgttcttsccctgtggctctcagcagtgagttgtcagtggtggaggagtgggccatcatagagaacttctgactccctgcgaccaaggcgccctcggagtgacttagagagaacggccacctgcacacctacccatcctacactacacatctcacctagtagaggggccaggggcagtggcaggagtctgctttctggcaaaatgttctctgtcttgtctgcccacacaacagctggctccc

SEQ ID NO: 132154 - DNA, 576 bp, Homo sapiens
taaaacgcttgagagcaacagagttacaaatatttatcttgcttgaaactaaaacacaaatgcacataatgggagaataaaaaggtagaaagagcctgggtcttggataacattcacttgttcattcagcaaatacttactgagctcttactacctattaagcactgttttgagtacttggaacacatcagtgagcaaaagggactaagattctttccctggtgaagcttacattttagtacaagatagacaataaactataarcataataaacatacaaatgataaagcatgtgacaaggtggcaaaagctatgggaaaaaaagacagaacaatggggtaaatgggaccaagtatttaagatgtggttggtggcaatataaatagaataggtcagaagaaagccaatgactggaataggcttcacttgaaagatgttatttgaacatacgaacttgaacaaggaaatgagttagctatgcagatacctaggaacaaagcattctaggcagagggagcaggcagttgaaaagactaaggtaggaaaatgcctagggtgtttgagaagcagcaaaag

SEQ ID NO: 132155 - DNA, 503 bp, Homo sapiens
gtgtattgctttgtcatgtatattgctctgcaactccactgtaagatagagatggtgccatatacacatactgtgtgccacactttatatactgtgcaggataaacaaatgctaactcattcatatcgaaccatgcatgcttactgtaccattcaaaataattattttcaggawcagattctgttcagttagttgtcttagtctgtatctctcttaccaaacagcaaattcacttctcaaggcaggaaaaccctatcctctaccttacttatgctaccttacttctctatcctttgtgtaatttctgatggtgaaatcagagagctctaacaaatttaaattccaagttaatctggccagacaacagttctcaaaaaggcttcaccacatgccctctgctcatttcacatgccttctcatccaactggcttttccaaacttttcacacctctctctcccttgacctgaaaaagaaggcaatcaagcctgtacatgacaatcta

SEQ ID NO: 132156 - DNA, 530 bp, Homo sapiens
attctacttgcgtataacaactgtgtattgctttgtcatgtatattgctctgcaactccactgtaagatagagatggtgccatatacacatactgtgtgccacactttatatactgtgcaggataaacaaatgctaactcattcatatcgaaccatgcatgcttactgtaccattcaaaataattattttcaggatcagattctgttcagttagttgtcttagtctgtatctctcttaccaaacagcaaattcacttctcaaggcaggaaaaccctatcctctaccttacttatgctaycttacttctctatcctttgtgtaatttctgatggtgaaatcagagagctctaacaaatttaaattccaagttaatctggccagacaacagttctcaaaaaggcttcaccacatgccctctgctcatttcacatgccttctcatccaactggcttttccaaacttttcacacctctctctcccttgacctgaaaaagaaggcaatcaagcctgtacatgacaatctacctga

SEQ ID NO: 132157 - DNA, 405 bp, Homo sapiens
tgaaaatataaaaattaactgggcatggtaacaggtgcttgtaatcccagatactccagaggctgaagcaggagaatcacttgaatccgggaggcagaggttgcagtgagccaagatcacgccattgcactccagcctgggcaacaagagcgaaactccatctcaaagaaaaaatacagtgactgaaatcaagaactctggttcagttaaacaaccaattagacaaagctgaagagaaaactggtgaagtggaagaggaatcttataaaattacccagaacatagcaagagagataagggcataaaaaatatgaaatcgagtaatgaaaaggcataaaggctagatkgagaagactctacatacatctaaaagtagttctaagagctgacaatttcccagaattc

SEQ ID NO: 132158 - DNA, 502 bp, Homo sapiens
tctctcttcttttgttggttaatctagctaatggtctatcaattttatttatcttttgaaagaaccagctttttgttgcatttatcttttgtgttttgttgttgttgtcctttcaatttcatttatttctgctctgatcttggttattttttttcttctgttgggtttgggtttggtttgctgtttctccagttccttgaggtatgcccttagattgtctgtctgtgctgtttcagacttcctgaggtatgcatttaatgatatgaactttcatcttagcaccacttttgctgtatcccagaggttttgayaggttgtgtcactattatcattcagttcaaagaattttttaatttccatcttgatgtcaggtattctatgtcaattttttgtatttatgtgaatccttttcccctaaggtgtgtgatcctttgggggtgttaaacaaccttgttttatcatattaccagaatgtttttctgattacttctcatttgggtag

SEQ ID NO: 132159 - DNA, 384 bp, Homo sapiens
tatgtgtacatatttgggtttttttaggtaggcaaatatatatrtgtgtgtgtgtgtgtgtgtgtgtgtgtgtaacaaatatgttctcttttgttaacattcctctgtctaaatatgaatattaaatatccacgtggagctaaaacattgggagcataaacatctgaaaagcttaacccactgcttgagaagatagtgtattttttttttttttgagacagagtctcactctgtcgcccaggctggagtgcagtggcgtgatctcagcttactgcaacctctgaaccccgggctcaagcgattctttcacctcagcctcccaagtggctgggattacaggcatgctccaccatgcccagataattttcgtatttttagtagaga

SEQ ID NO: 132160 - DNA, 662 bp, Homo sapiens
ctctgcaacctctgccccccaggttcaagtgagtcttctgcctcagcttcctaagtagctgtgactacaggcgcatgccaccggcgaatttttgtatttttagtagagatggggtttcaccatattggctaggctggtcttgaactccagatcttgtgatctgccagccttggcctcccaaagtgctgggattacaggcgtgagccaccactcctgggcacgaaactattattaaacctcaggtaactactcactgatttctagccacggtacacttatttgcaacagttgtatactgaagtctgttcattttgtctttcatccaaatgtttactgaatttcctgtctttttgggttgtcaatttgactattaaattaggttatttagtgagagtttattaaaagacatcttgtcattgggggttagctgactcctcttccctactctgtctctagaagcctttaacttgcctttgataactaccaaaaatagccctgggaaaacacacacacacacacacacacacacacacacacaygtctgtaggtggataagccacatgagggccatgcttcctaatcctactatggaagcccagtgtgtaacctattaaaaattttaatttcagttgaaaactcaacagaaaagcaaaattatactt

SEQ ID NO: 132161 - DNA, 619 bp, Homo sapiens
aaagttaaaataaaacatccaaatcatggcgtggtaagtacgatttgcaatatgggatgaatatttaaggtgaagcaaagtagctgtggctacttggggccaaaagcttcccagatgctcctgctctaagcacatgatgttttttggggaaagtggtagcaggtagagggtggcagaaagtgtgagaagcacttgttgtaggtgacccagacatgcctcttgaattgaattcggtgatctgcttcttcagctgctttcttgtccctgcccagcaggatgccaggaaacacatagccctgtagaaaatcactggagaagaggatgattggagttcttcatttcttaaaaaacagtttaggttttccctgtctgccctagggcccatgtcttgctggaaaatatgctacttagaaattaaggcctctgggttcaatttttggccccagtgttgacctctgtgtaagcctggcaggatgtctcatttctgggtcaccttttccttgccaacatartgaggtatgtagaccaaatcattgctaagagccttctaactctaagacactaggtttagtcagccaaaagcatgtgattttcccagatttcccaaactccttgtacc

SEQ ID NO: 132162 - DNA, 577 bp, Homo sapiens
cagactaaactagatatatgagaaaatgtgattgtttactaactgccctagtataagagcccctgtggctttgaaaaaaagtgacttttcaaaatgcaaccaatctaaaccttttattttaggtgacacaactacttgattttaaaatagttaaaaaatactaaccttatgtaggaatgctaatgcatctttctttttggagtgagtcgtttattctattatgattcagatgctaagctcatgaattggagaaataataatttttaaaacaatttttaaaacttctatgctcttccatkgtaaaatcttaggatgtaacagttcccctgggggaatttactcttagaaagccagttacaaaataatacaatataaaataaatttcagtctgcatttgggatttgcctataacacatcagtctgatccataagccaaaagaaacatttttatttatgcttccattctccttccctcttttctctctccatttctccatttctcttctgagtgcctttagttctgttttgtcactaagaaaaaattcttacatgtttgaccaaaggccaaaggtgaatg

SEQ ID NO: 132163 - DNA, 589 bp, Homo sapiens
gtaaaaatggtttccatgaaaaaaaatggtgacttcaactctcaattcaattgcactagtgcttttccttgaggcagccattgtatttcagaatgcagcagaatagtaggcataattcccattttctcacacgaaaaattaaaagatgkatacacaatttacaagttttatggctttatcaaggccaatatcaagtaaaactagcatatttcttttttacaacagtgtgtggtggtaaagaatatactaaaagtatactaagtataccttcgtgccatttccttcatccatggcaaaggcttcggcagttttacccatcactgttttgcaccatcagcacaaaagttaatgtagtgaaaaaggcaaataaaatcttggcattaatatgaaaataatacagacctcatgaactccctacaaagttctctgggacctcaggggtccttgaacaacactttgagaaccactgccctacagtaaaataaacaaatactgtcttcatgttctgagagtccaagatgcatttagtcccttatgtagaacaggaagagtcaattaaaagtaacccatgtgttgagggttcccaaga

SEQ ID NO: 132164 - DNA, 638 bp, Homo sapiens
aagcttaatcttttctagcttttgatttaaagtaagaaacatgtgagtcttactttcacttgagacacttagaggctattgtagggtgattaattggcctaatttgaatactgttgtatctcagggagtaggaaggcctgagaaaagagagagagatggagaaacaggtggttggtggagcagtcagaacaacacaacatttatccttttagctcactgtcttatatgggcatggtttgtggtgcccaaaacaattacaaaaggaacrccaaagatcactgatcacagatcaccataacagatataataataatgaaaaagttagcaatactgtgaaaagtaccagaatgagacatagagacacaaagtgagcaaagcatgtttggaaaatgatgctgatagacttgtttaatgtagggttgccacaaagctacaatttgtaaaaaaaaaaacaccatatctgtgaagtacaatcaagggaagaacaacagaatgaggtatgcctgtaattttcttactttatggaatatttgtgttttcccctcattcttattcctaattttgtgcttattgattgtgttatttttaaatatttaggaattcagttacttaatttttcgctttaggagttacctcta

SEQ ID NO: 132165 - DNA, 528 bp, Homo sapiens
tgttgcccaggcttttctcgaactcctgggctcaagtgatcctccctccttggcttcccaaagtactaagataacagatatgagccactgcatctggcctaaattcatttttttgttgttggaaaaattcagttctttgtagttgtagggctgaggtttgtctgctttgtgctggctgttagytgaatgctgctttcagcccctataggccacccacattctctaccacatgtgttagtcagggttctccagaggaacagaaccaataagatatttatatttatattacttgaatatttgttaatatttatttattataaggaattggctcacgtgattatagaggctgagaaggcccatgatctgccgtgtgcaagctggagactgaatacccacaagagctggtgttacaagttctagtctgagtgcagaagactgatggcccagagtgaaaacaggcagaaagagtgaattctactttattctgccttctgctcaattcagacctccaatggattggaacaggcc

SEQ ID NO: 132166 - DNA, 601 bp, Homo sapiens
cctgggcctcctataattctgaccaactggctatacatcagaggttccatccccaggtttgatgatttgctacaatagcgcacagaactcaggaaggcactttgcytattattaccgggttactataaagggtacaactcaggaacagctggaaggaaggcatatgtaggacaaggtaggagggaaggggcacagagctttatgccctctccaggtgcaccccttccacccagtgtccccatgtgttcactgacctggaagctctctgagccccatcatccagggattttatggaggtttcattaggtaggcatgcttgattaaattattgaccaatggtgattagctcagtctccagcctctctccccttccccgaggttggaaggtggggctgaaagttccaccctccagtcctgccttggtctttctggtgaccagccccatcctgaggctccttagagatcccagctcattagcatacaaaagatactcttactgctttggagattccaaggtcttagaagctcatgtgtcaggaaccagggactaagactaaatattataacaaagatgctcctgtcacccctatcacttggaaaa

SEQ ID NO: 132167 - DNA, 601 bp, Homo sapiens
cctgggcctcctataattctgaccaactggctatacatcagaggttccatccccaggtttgatgatttgctacaatagcgcacagaactcaggaaggcactttgcttattattaccgggttactataaagggtacaactcaggaacagctggaaggaaggcatatgtaggacaaggtaggagggaaggggcacagagctttatgccctctccaggtkcaccccttccacccagtgtccccatgtgttcactgacctggaagctctctgagccccatcatccagggattttatggaggtttcattaggtaggcatgcttgattaaattattgaccaatggtgattagctcagtctccagcctctctccccttccccgaggttggaaggtggggctgaaagttccaccctccagtcctgccttggtctttctggtgaccagccccatcctgaggctccttagagatcccagctcattagcatacaaaagatactcttactgctttggagattccaaggtcttagaagctcatgtgtcaggaaccagggactaagactaaatattataacaaagatgctcctgtcacccctatcacttggaaaa

SEQ ID NO: 132168 - DNA, 362 bp, Homo sapiens
tatctttcctctactactgtagctgatgagctcttgaaaatgtcacctcctggccagaggccaaccactcaaaccagtgcactaaacaaaatacacccagggccctcagagtcgacttcactcccctgctacctccactggagcaggttctgctatccacagctgagagacctgaagacggttcacatcacaggactctgtgcaacacctccagtaccagcccagagcctggtggccctgctggttggctagatccagaaaagaaataaccctcattgcatttcacgctctcagggagccctatccttgggagaaggggagagcaccmaatcaagggagcacccccatgggacaaaagaatc

SEQ ID NO: 132169 - DNA, 491 bp, Homo sapiens
gacacaactttttctcagattcatgagtaagaaatagaaaggcttgttagcrtaagccactgagttttgtagttgtttcccagaattagtgcagtgataactgattaatgactacaggggtgcatcccctgtcccaggccttcaacaccagggtggggaccatgacccaagcttggtcaggaagcgtatctgtgccgacgactcctgatttcccatctcacccactgtccattctctgcccaaccctcacctgctccaagcccaggccccttcctccactgcagcccccacctgactctggtaatgcagtttcctttcctgcctctcaagccaatgggaggcaagagagtctccctgtggctaggtgcaggtgctcaacacccttgtgggctcccttgtctcacatcttagacctttcattcatttatattccaaatccccaccgcacatactgtctatttccaagtgagatggcctggtccagaccacac

SEQ ID NO: 132170 - DNA, 492 bp, Homo sapiens
tggggtgacttaagcaagctcttccctttctcagggcctcagtttccccagaaaaaataagaatttagactgctttctaagggctcttcaagctctgttattcatgggtctgtgtcgtggaagaaaggtcaacattgcctttagtctgttccaccaagatgccactctgccctgcagatgtgccagagccagagttgcttgaccatggactttggggcccttccaggcactgcctgggagttctaggttggtgggagaaatacttggttgaggcttacatccttggcatagggacctgggccttggtgacamacagcttgaaaaaggctacctccagaggtaacaaactcagatgcctacaaaggccaagcacgtgctagaaattactgaaaggagccagataagactcttggggaactgcagagagtatgtcctattttagggggcaacactgcccagctgcagccagttgttgccttagaagagggccca

SEQ ID NO: 132171 - DNA, 591 bp, Homo sapiens
tagtttgtgacttgcaccgtatcacctagccagttaaaaaatattgtcaaaatttacaaacccagaaggagagagactagtattataaacctcagatgcccattacctagatttaacaatgatcaagattttgccacgtgtatatatagctagtgctggagaaaatgatagcaatatttgtaaagcacaaatactttctactttacaaataattctttcacatttgttcatatgatcttcctatatgccaggcactattctaacatcttacaggggcactgtgaagtagattttgtcattctcctcattttatgatgagaaaccataggcacggagaagttactgaccagtctgaattcacacgacttataagagctaggatttgaatgtattttctcatttgatcctcagcatcgckgtgatactgatggtgattattagtctgttcattttgcagtctagaaaatggagggggtttatgtggctcacgtgaaaacaatttttatacaaatacatagtgagcacttctcgaagttttatttatctaattaatgggctaaccagcaagatgataaaactggtttaaaattg

SEQ ID NO: 132172 - DNA, 441 bp, Homo sapiens
tgggctcccttggaaaaaaatgccatacaattgcattaacacaactgttgctattaggaatatttacctaataataataatatgtagaacaatcaaaatagggaggaaatagccagaaagtcattcttgcagatggtcacatgtctagggaggcagaaataagaaatgtttaacaagcagtcttctttaagttatgacaaatgatgctctgactttataaaaccccctggccaaggatctgaagtccatccccataggtggaaacaggaatgatagaatcataaaatgttacaatggagaacctctaattcagtcatgtmtttccacagatggggagatagaagctcagatagcttagtggatttgctcaatgacgcacagttcattcattgcagagttggggccacaaccttcctcagacctagccttacgatccaggat

SEQ ID NO: 132173 - DNA, 572 bp, Homo sapiens
agaatttatcctttgattttaaggttgatgtaacataatgaaaagcaagtaattcaccacattaataggttaaaagaggaaaatcatattgtcttcatcacaatagaagcagaaaaaagttgttaatgtagataataatagtacatactacttagctttattgtgatgataaaatgaatctttatctagtaattagtgcctggcatgtagtaaacactcaataaaatcttatatataatcactatttataaactctaacaggcattttacacacatgtacagaagatacccaaatggctaaccacacataagaaggtgctcaactgtattacaattcaggcaaatacaaaataaaaccagagtaagatagtcttatacctatcaaacaggcaaaagttaggctgggtgcgatggctcatgccagtaatcccagcaatttgggaatatgaagtgggaggattgcttgagcccaggagttagagaccagtctgggcaaccacggggagaccccatctttacaaaaaaaawttttttttaattagctggatgtggtggcacatgcctatggtccc

SEQ ID NO: 132174 - DNA, 587 bp, Homo sapiens
tttccatccttttcttttaacctatttgtgcctttgaacctaaaacagatctcttatagatagcatataattggctcttgctttttcattcagtctgacaatctctgccttttgagtggagtatttagtgagtgtttagtccaatcatgtttaatgtaactgttgataatctttgcatttatgttagccattttgctgtgtgttgtttgtctcatgtatttcctttgttcctgctttactgcctccttttgtgttaaataaatatttttaatgtgtcatttttaattcctctgtgtacattttactatatgtcrtttaggtgttttcttagtggttgtattagggtttacaatatgcacttcaacttatcacaatctacttcagaataatactaagtcatttctggtaaaatatagaaacattgctctaatacaggggtttccaattttttgacttccctgggccacattggaagacaaagtgtcttgggccacacataaaatccaataacactaatgatagctaatgagctttaaaaaaattccatgcataaatctcataatgttttaagaaagcttacaaatttg

SEQ ID NO: 132175 - DNA, 622 bp, Homo sapiens
gtgtaattttattgaatttttttcttgatgtaagttaaattttagatttttaaaatattatgaggaatgaaatgtgctgaggcagaaaataattcacacatttacagcttgctcttttctagtcacagtggttgaaagtttatacctcagaaaaaaatgcacaaaaataattaaaaatggataactcatcatcaccctctccttattgaaggcttcaatcctaaacctcagatgttgccaaatattatgagtggaacttctcattctctctttcattaaatttatatttttgaattgttgttgaagtaataacactgtttttgctagacaactgtatttttcaaagcacaatgtaaatattattctatatggtaataggaaaagaattcaggcacctgcccatgaaggtgttatattctcctggtgtaagtaattaatactgtggagaattaaactctatsaggggagctgtatattaacaaggcaggaggcatgcagtagtcccctttagccctggttttgctttctgagatttcagtaacctgcagtcaactgtagtctgaatatcttaaatgaaaaattccagaaacaagcaattcacaagttttaacttgtgcatgat

SEQ ID NO: 132176 - DNA, 571 bp, Homo sapiens
ccttgaagggaagggcctagtcctggcaggattcatcatctgctgattaaagagcccttgggctgtgaataatgagtagtggtagccaggcactacttgctgtgggtcttggtgagactcagagatgggctggcttcaggtatgacccagaaaattcccagctgtggtggctatgagaaactcctgcttgagaaaaggagtggaaaaaataaaggctactttgtcttatagcttagataccagcttgaccacawtggggtagagcacaaagtagactcttggggtccccagttccaggccttgtctcttggatggcatttctggacatgtcctagcacagaggggagccccactgccctgagtagagagtcccaagcctggcagcattcactatgagctgactgaagagcacttgggccttgagtgaacatcagcagtagccaggcagtattaattgtgggcttgaggttgtgttggccatagggagagacttccttgcttgcagaaaggggagtgaagagtggaaaggattctgtcttgtggctttcatgtcaaacatgaaggagaaata

SEQ ID NO: 132177 - DNA, 447 bp, Homo sapiens
caaattaattaaggtttttctcagcaatctgcaaggtaaaagctacttctaagagaagacgagaggacaaaggacagcagcaatcactgctctggaagtcttcaaggctattgtccacttgctatgcctgctgtaaagtgatgcagtgttcatgyggctagatgaagttggagtccagcaaactatgatacagagtgatttctgtctttttaatgctcttaaaaaaaataactctcactctgtgacccaggctggagtgaagtggcatgatcatggtccaccacagccttgacttcccagactcaaccgattctcccacctcaacttcccaagtagctgggctgcagatgcatgccactaggcccagctaattttgtaatttttttgtagacacgaggtctcaccaggttgcccagctgatctagaactcttgggcttaagccatcc

SEQ ID NO: 132178 - DNA, 447 bp, Homo sapiens
caaattaattaaggtttttctcagcaatctgcaaggtaaaagctacttctaagagaagacgagaggacaaaggacagcagcaatcactgctctggaagtcttcaaggctattgtccacttgctatgcctgctgtaaagtgatgcagtgttcatgtggctagatgaagttggagtccagcaaactatgatacagagtgatttctgtctttttaatgctcttaaaaaaaataactctcactctgtgacccaggctggagtgaagtggcatgatcatggtccaccacagccttgacttcccagactcaaccgatyctcccacctcaacttcccaagtagctgggctgcagatgcatgccactaggcccagctaattttgtaatttttttgtagacacgaggtctcaccaggttgcccagctgatctagaactcttgggcttaagccatcc

SEQ ID NO: 132179 - DNA, 470 bp, Homo sapiens
gtgttcagttctgactcatgtgagaactggactcaagtgttttcttctcttcagttgatcataggatgtaacccagaagtagggtgactttatacccagcttgccagggataattccagcatatgccaggtatcacaaagtaattaatagcattaaattttactctcaaatgcatctcagtttggataattcattataaggtcactgtacttaagagaccagaaataaaattgagaaagaggcatcaatatagcacaagtacatgtcatggactgtatgtttatgtaatttactgatayatatttgaacctgctcagccttgattccaaatactccatttctaccttttgatggattgatgctatgctcatctgttttttgataggtataatcaaatacaggtcacgataaaagctgcagttacatagttatttgatgtttcatggtcagacacttggtctttaccaagg

SEQ ID NO: 132180 - DNA, 563 bp, Homo sapiens
tttttcttacttgagtttgtgaagactttctccactgttttgttttagtttyataactgtaacttttatgttaaatctatgatacatttaattttttgatatgatgtgacataagggtaaagatttactatttttgtgcataatatccaattgttctagtgttgtttgttaggaatattttccctcatatgttgaattatcttaaaaacataatggaaaaccaatgaccaaatatgtgtggataaatttacaaacccccattttgtttcatcgatatttataattgtctttatgcattcctgataaccatagcattattgtaatttggaaattaaataataaaatttttacaacgtggttcctttaaaaatgtgtttaggctattttagatctttttcatttccatataaacttaagaactgggtttttataagagtaagtcttatggaattttgggagtttgctaaattaacagatcaaattgaggagaaattatatcttaataatattgaatcttacctctccaattattttgattgtcttttatatctctgcaataattg

SEQ ID NO: 132181 - DNA, 378 bp, Homo sapiens
tttgtatatgtgcaagagcgaaacatgacaaaaacatccattyacgtatataaatggatttttttaatatgttcaaattaaaaatgtgataagaaagcactgtttcttaatttaatagacagggatttttttcccccctacgtggtgcatagtaccataggtgatgtcttaggtttgttgaaatatgtaacataatggacttctataaatccatgagagataatccaaattcatatttaaagaaattcaaatgactcttaaagatatgaacagggattgatgttattcataattttcaagataaagtctttttttaagatgaaatcctattttggctatcagatttatcaaaactcaaatacagtgtgggtgagggta

SEQ ID NO: 132182 - DNA, 378 bp, Homo sapiens
tttgtatatgtgcaagagcgaaacatgacaaaaacatccatttacgtatataaatggatttttttaatatgttcaaattaaaaatgtgataagaaagcactgtttcttaatttaatagacagggatttttttcccccctacgtggtgcatagtaccataggtgatgtcttaggtttgttgaaatatgtaacataatggacttctataaatccatgagagataatccaaattcatatttaaagaaattcaaatgactcttaaagatatgaacagggattgatgttattcataattttcaagataaagtmtttttttaagatgaaatcctattttggctatcagatttatcaaaactcaaatacagtgtgggtgagggta

SEQ ID NO: 132183 - DNA, 265 bp, Homo sapiens
agcgctggggagttagattaagtgttgagaatgcctgctttaagcacatcctgagcctccacaccmgcccaaggcactgtattgatcctctttcttaccatggactttgcctgaataaaccagctcaggtttcagtgagaacattttaactgcagaaagctaacctataagctgagaccaagcaaaagtaaataaataaataaatacatacatacatacatacatacatacaagaagaagttgtgaaaggaaaggaacagacatt

SEQ ID NO: 132184 - DNA, 504 bp, Homo sapiens
tgaattcaactgcctgggtccaattctggcttgtttacttactggacaagtgaccctgggcaagttgcttgctgtttgagcctcakcttcctcctctgtaaaatgggtacaattctgagcttgcatggttgtcatgaggagtgagggatgtaggcacatagagcaggatgaatggggctgatgttacatcgcagtcagagcccacacctcctgcgggcaagataccctgagctatgttgagggagaagtgggaatgaaacccggccagggaatgcccagagttgctgaagagctctggaacaggctctggaaagaggcaggaggaatcaaaagtcagaggctgtgggacacaggaaagtgatcagcttgagatgcctgaaggactgggggggatctcctttcctgcctttctagggcattgtgtgggcaatgtatctgaaccactgtgcactcacccactgacgggggaccccaagtgaggcctaggaatctgcattacaagca

SEQ ID NO: 132185 - DNA, 441 bp, Homo sapiens
gaattcatcttcttggtttggaaaagaagggggtgacattagtggcgaaacctccgtgtagagctctcgcaccrcaactctgagtcatagcttacatcgatcaagcactcactctgaagcaggctcggggctaaaccttcacaaccattgactctgtgctacagaggagacagtgatcttcacagaagttagttcccagagggctttccccagccccaccattgggagcagaggggcagggctgagcccagtctcactcgagtcctgctcacaccttcctccaggactgcacgggccacctcgcccagccctcatggcaatgctgaaggcaggtgtgattctcgccattttacccaaggggaaagggaggcaccgggggaaagggaggctgggagcggcagacctcacagctaggaagtggccaaggcacgaagaagccca

SEQ ID NO: 132186 - DNA, 428 bp, Homo sapiens
ttagtggcgaaacctccgtgtagagctctcgcaccgcaactctgagtcatagcttacatcgatcaagcactcactctgaagcaggctcggggctaaaccttcacaaccattgactctgtgctacagaggagacagtgatcttcacagaagttagttcccagagggctttccccagccccaccattgggagcagaggggcagggctgagcccagtctcactcgagtcctgctcacaccttcctccaggactgcacgggccacctcgcccagccctcatggcaatgctgaaggcaggtgtgattctcgccattttacccaaggggaaagggaggcaccgggggaaagggaggctgggagcggcagacctcacagctaggaagtggccaaggcasgaagaagcccaccggcctttcaacaccaacagaatt

SEQ ID NO: 132187 - DNA, 601 bp, Homo sapiens
tgtggtatctagactgatctttcactcaagaaatgaccctgtctgaccctaatggttggagaacaatctcatattgttaggaaatcgagtgtcattttccatattacttccttcattcacatcatccataattatctcttctaatttccctgtgtctcctggtttgtccttccctgccatttttagtgaaattcaggacctgatgccatgggggcaggtggagacaatgacaggggtaaattctagtctgatgcagcatcaaactgatcactcacaggttactggctccctctctgttttatttccttttcagaaacatcagtcaggaaagcagctttcatggcaagcaaacttataatgagagtgatattttctctttgcttttcttataaacctccagaatgcctaagattcatcracttttgtgtgaacatagcctttagcagaaagctggtccaacactctaattttacagatgatgatgctgtggtctggagatattaaaagtatgcccaaggtcacaaagctattttctaaatggcttctccttaggccactattaagccaaaattcaagatcctgtcagtctgtcttgcccaat

SEQ ID NO: 132188 - DNA, 601 bp, Homo sapiens
tgtggtatctagactgatctttcactcaagaaatgaccctgtctgaccctaatggttggagaacaatctcatattgttaggaaatcgagtgtcattttccatattacttccttcattcacatcatccataattatctcttctaatttccctgtgtctcctggtttgtccttccctgccatttttagtgaaattcaggacctgatgccatgggggcaggtggagacaatgacaggggtaaattctagtctgatgcagcatcaaactgatcactcacaggttactggctccctctctgttttatttccttttcagaaacatcagtcaggaaagcagctttcatggcaagcaaacttataatgagagtgatattttctctttgcttttcttataaacctccagaatgcctaagattcatcgacttttgtgtgaacatagsctttagcagaaagctggtccaacactctaattttacagatgatgatgctgtggtctggagatattaaaagtatgcccaaggtcacaaagctattttctaaatggcttctccttaggccactattaagccaaaattcaagatcctgtcagtctgtcttgcccaat

SEQ ID NO: 132189 - DNA, 542 bp, Homo sapiens
actcttggaatggaaaaggcctttgagagatgattcgaatcagcacttaactgagaatcatctatgtgcctgtgttgagctaagcactgagaatcaaagataaggtaacaaccctcaattagctcacaatgtggggaggggaatggatgtaaaaatcgctctagtctctccattctagcctgacatggtatacttaatgtgaggtaaaagcatgactgtaggaataacatactgaaggtcagtctgtggtaagmaggggtgaaaattctcactctcccagggcctgacttaactacccacaatggtcccacataagcttcagaaatgcgctgaaatattttcgtgcataaagattaacattcacaagcagctttaaagaggacatgatttctcttcgtttcaatatgaaggtatgtgtgtctataggaatatatattcatctttgaaaagcacctaggatgacagcacaaataacatgttgtaaagaagaagtataaattgaaagctcagctacacaggagaaaaaaacaaactgaagcatt

SEQ ID NO: 132190 - DNA, 542 bp, Homo sapiens
actcttggaatggaaaaggcctttgagagatgattcgaatcagcacttaactgagaatcatctatgtgcctgtgttgagctaagcactgagaatcaaagataaggtaacaaccctcaattagctcacaatgtggggaggggaatggatgtaaaaatcgctctagtctctccattctagcctgacatggtatacttaatgtgaggtaaaagcatgactgtaggaataacatactgaaggtcagtctgtggtaagaaggggtgaaaattctcactctcccagggcctgacttaactayccacaatggtcccacataagcttcagaaatgcgctgaaatattttcgtgcataaagattaacattcacaagcagctttaaagaggacatgatttctcttcgtttcaatatgaaggtatgtgtgtctataggaatatatattcatctttgaaaagcacctaggatgacagcacaaataacatgttgtaaagaagaagtataaattgaaagctcagctacacaggagaaaaaaacaaactgaagcatt

SEQ ID NO: 132191 - DNA, 575 bp, Homo sapiens
gtttgtgattttccaagtaatcaagtatatctggagatgagaaaatatgactcatttagtctgagacagtccgtcaaacaaaatctatccacatattatgaagtctttataccttttctcacttgtattatttctgcatttgctatagcaagtgctctatggatcttaggtaaaagaatatgtgagtcgcatgcgatttatgcagctggtttctgaagtggtttctatgtatgcatatcctcaccatattatgagctagccctggtcaataaatatcgtgactactacttgaattgctacccttcctttcaggctggctctattatttaaaacaaatatatatatatatatatatatatatatatatatatatatatrtaactttaaataaaaacaatagtaaaacctaacacaacagattttccctggaaatagagaaatatccaggaataatttgaattccttgaaatttacattattcagtaaaaattctgtggataattccaagaaagcctatgtctagattgataaaacgtaactaattgtattaaagattttcttttttttttttgaga

SEQ ID NO: 132192 - DNA, 393 bp, Homo sapiens
ctgctgtgcattaggtctctagaattatttcattctacaaagctgtaaatttgtatcctatgatggagtgcagtggcccgatcaccgctcactgcagcatggacctcctgggctcaagcaatmctcccacctcagcctccgaatagctgggactacaggcacatgccaccacgccaagatgattttttgtttttgttttttgtgctcaggctggtctcaaactcctgagctcaagcaacccgcccaccttggcctcccgaagtgcaaggatgacaggcgtgagccaccatacccagtctatttcacttttaaaaagattctatgtagaagatcgatcatgcaatatttttccttctctgtctggctgatttcacttagcatactgtcctttaa

SEQ ID NO: 132193 - DNA, 450 bp, Homo sapiens
acagtatttaataagtgtcagttttctgagctatttcttcagtaatttatcatgatatggtacctgccaatctcaacggctttatacacctttctcctcttttattatactcctctcatctggcctytttgggttcctcagatgctctcagttcattcccatttcatccccttgaagttttttctgcctctaatgctcttcctcaaatctagactttggcattgctgatattttcatcactcaactcctagttcaaatgtgatctcctgtgagtgtgctctctataccatgattctgtttttattttctgaagagcatttattactctcagacaccatctgatttttttgttacttgtttatggtcagctcttctctaatattattggaatgcaattccataaaagcagatcctgaagagaagtgctagaaacatggtaagacactgaat

SEQ ID NO: 132194 - DNA, 550 bp, Homo sapiens
caacaattgtaatgtgacttataacctccttggcctgaagttttaaaatgatgtaatgattgactttttaaaaaataaattgtcagaatgttaattcaaattttttgtatataatttatttaaaacatattatttaaatttgaatagcttcaccaaacccaattagtagtcatggcaatagaagtctgtcacataaatataggcccacgtggtcttagttgcctgtaattgattacagtaaagttcccgaacactgtcttaccacagtgttagtgtgccagtaactcctagtgcttattattttatagcatttacaaatacggctttggtgagcaaggccwagctatgctcagaatagagagatcccactgcatgaagtttcttagcctatgaatcttcatgaggtcaagcagttaaaaaatctctctgctctgccattgatatgcaggtctgtcagtgaaacttctttctggtaactgagttctatagctcttcatgctaaagtatgaatgcatatagtccttccacactctcaaatgttgatgagaga

SEQ ID NO: 132195 - DNA, 534 bp, Homo sapiens
ctaagtcacaaaggccggggggaaaaagtgaaaggtcactttcacaatgggttttccaggattatttggatgtaatgaataaaattgcaaattctattgaggcttttagaactaatgaaaattatcaatgtgttacacagctgcatttcagttttgtttgtctgagcctggaacagaatagattttataaatagaacttaaatgtgaccacagagcacgcatactaatcagttcattttaagatattgttttgcaatacttttaagatgcacacatgctgggaaaaattacttctcagaggaacaatgtggagcaatttcttaccaaagttgctaatggaacgacttttttcttctttctttttttcttttcttcctttttttttttttttgacgcaaagtatctatcattrtccatcttttattttaagtaaatgttaaaatggaaaaggtttagagagaaggaaggctttgctccaggaattctgtaggaaatgtgacttgttcgtgggaaagtgtccattaatttgagaag

SEQ ID NO: 132196 - DNA, 627 bp, Homo sapiens
ttctcctccatttgctgggaaaccagtccttcttgactacagtcaaaagcatagccaaggacaaaacaaattagttagaaacatgttctccaagtcagtctatgaattatcccagtgattctcaaacttgagaaagtattgaaattatctgaagattycttaaaccacagaatcctgacccccttccccaaaaactgttggattcaacagctcttcagtggggcccattaatttgcattctttaacaaatttccagatggtgctggcgttgcttctctggagatctgactttgagaccccctagattgttctgtttgtttctatgcttcttgagtcctcctctggccttggctttcccaacttgatattcagcttgtgtgcactgacagtggccagcctcaacgctggccctatcgagggtagtttttcattttattatctaaactgggacacttttgaaagtgaaggcaatactagtaataactactacacggggattgtcttaataaacaagaatatatatccaagccctgaaagcactaatttgattcgactcaatcctctacatacattttattccaaatgattatttacataactaataattgagttaggtttatagaaata

SEQ ID NO: 132197 - DNA, 647 bp, Homo sapiens
ggggatgggaaacaggaccctaaggtcatagaacagaggagacagcttctcttcagtaggggtgataggagtgtcagggaaagacactgacctacagggaaacctgagacaaggatgcttccaaatttctcagcagggagggatacaggagaggagccacagaaatggaggaggaatgcatagagaagaaaaaatgatttctcccccaggacaaacttcacctcacttccaatcaagctgttttcagaaaacacatgggatgcaaaatccaagcccttttgtctttctccttcttcaaataaaaagcaaaataggcattaacacgcaaaggggtcacaaaacctcaagtttttgcccatcttagaggccctgcctctaagggaggatgagagaagcataataatttgacactcagtattgttggttaaagagaatgttctacccacagacagcctgagatatggccagagtcctctttaaaattaaagtctaagagwctgaaaacttcctgaagcagtttccaaacaaaataaataggcaggtgtttatgccaccctgattttgtttaggatttgctaggtgactactaaacattttatttaaaaaaattacttttgccatgtaagaaaacttaatgatttttctaa

SEQ ID NO: 132198 - DNA, 506 bp, Homo sapiens
caactgataaatatataaccttgttttacatgtttctatttacagaaaactcatgtaatacaccattgatgcattaacactgagcttatggccaatagcactatagcttccatctatacacacattttctcccttatcatacacacattttctccctaagacacatcacagccttcttactcttaggaacactacacagcactttagcactctgattgggggccattttaatgacaaaatcatcaacagaaagtcaaaaatgggaaaaatgtggcactaaattgaccactaaaagaaaacttgtttacagaatgagagctgaaacaaaatggaagagttcaatctcatttgggaatgtgaacttctggtaacaaatttttcactggacttttcrcatctccagtgactgtaaaagtgctgtatcaatttggggattacatatcaattttggagagtaggtgaattcataaatacagaattcaagaataatattgatgaactatgtg

SEQ ID NO: 132199 - DNA, 596 bp, Homo sapiens
aactggctttctgctccctgaggattctctctggctgccagagcctgctctccccaaacctctggcaggtttgaagggccagagagttaacactccttgggagcagctccctgccccacacccctcgccagtgtaccctcctatgggttgactctgaggcacatgtgccacactgacttacagcttcatcctagtggggatgaaaatccagtgaattggagaaacaatgcactttccttctctgtctcactcccctgctcctctgccagtgcctctgggatcacctcccaaataaaccactttccttgaaccttgtctccgtgtctgcaaatgcccatatggaccatgatggcataggatccaggattttaaatatttttgcaagaatgcatattttctgttgctgtgttctctctactatagaataaaaatcaaggaggggatggataatctccwtgctgggaaatccactgttaacatattttctagaaataaatgaaaagaatatatatttatgaagaaaaatgtaaatagcatgatagtataaaatataaaaactaaatttgtattttctcaccttcttccaatagtaaatt

SEQ ID NO: 132200 - DNA, 361 bp, Homo sapiens
tgttgtccctttccatcttcaaagccagcaatggacatttgagtctttctaaaatcacatatttctaatcctgactcttctgcctccrtcttccccatttaagagccctatgactatattggtcccaactaaataattgaggttgatctctatattttaaggtcagttgattagcaaacctaatgccatcttatacctttagttctttttccgtggaagataacatattcactggttccaggaattaagaaatggacatctttggggttcattactatgcctaccacaactactatataccatatgaagtctgacccaaacttatatgattcttgttctattgaacaatgtcttaaagagc

SEQ ID NO: 132201 - DNA, 414 bp, Homo sapiens
agctattctgatattatcaaccacagactactcacaactgcccatttcagcattcttgtggcagatatgtgcaaaagacttgtccttttcaacattcctgcactgtgttctttacaaggccatctttccatatatcaagacttgactctgtgaaaattctgcaaccagcaatatagaagatggaagcctctcactgtgtagacacaatatccatgataacctaaagatttgagtcctgaagaaggtgaacttccagatagggttggaggaaaacaaaaggtctaatttctaaaacaattgagaccgagctataaactgaatactcttaatatcttagcataacttgaggtgcagaaatacacctaccccaacactcctgaactactgcrgggtaatcagagtagctgcatagtt

SEQ ID NO: 132202 - DNA, 486 bp, Homo sapiens
cctttaaaacttccatgttagtgtgtagtgtgcaagacaagctgtcccagttttcccaaggtcatgcaggttatgaggcmgtcaatattgtatgtagtgatatttcacaaatttgcattgttgtacgatatttcattatatgcatatgccatattttatttacccattttactgttgatttgagttttatttatttctgtatgtgacaaataatgcaactgtgagcttccttgtacatatattaagtggaacgaggtcatcatagcttttattctgtagcaaggtatacacaaatgagaaagtgaaaatactatttttaacatgttgtaaataattctactgaagtgctttataaagagataaatgagaaatattccagtttaataatcatttgttaacatttctttctaaccacaatttaacatgcatatttttctttctatcctacccagcatccatggacagttgacatgactttaggatttg

SEQ ID NO: 132203 - DNA, 404 bp, Homo sapiens
gctctattaggcagagtttagcagtgctctggagaaatgatgaattgaagcccaagagggattttttttctggcagcacactggcctctgcttgcgtggaggcttttctctctgagagctgacagaascattgcccagcccattatacccactatgggcactctgtgaaattaatgctcctttaaacttcctatgctcactaaagtgcaagatgtaagacactgggtatgttaggccttttgcagatgtatttttgtgatgtttcctagtcatacagctttaaaggaatgaaaaaagaggttactgtaatcattaagttgacccatgacaataattactcttaagacttcatcctctatccttattctcaaaccagattaattacataatcatcttctgcaata

SEQ ID NO: 132204 - DNA, 550 bp, Homo sapiens
ggtgtgatctcggctcactacagccttcgcttctggggctcaactgatcctcccaccttggcctccagagtagctgggatttcaggcacgcaccaccatacccagctaatttctgtattttttgtrgagatggggcgtcgccatgttgcccaagctggatattatcactgttttcctcaattttcatcacatactatcatatctctctccatcccctccatcccttctagggactctctcttttttttcctccctctttaattaatataaacatataatagataaagctgcatcaaaaggaacagaaagggggaactatgtgggattttattccaagtactcaatcagtgttcataatcaaactaatctttacatggcattattatttattatcacataataattagtattattagtagacaaactgttaaaatgatttctgatttttatttattttcttgaaaaagttaattctgcagttgacttcataataatgtttatccattcaacaaatatacattgaccatcaattctgtgagataagtactat

SEQ ID NO: 132205 - DNA, 550 bp, Homo sapiens
ggtgtgatctcggctcactacagccttcgcttctggggctcaactgatcctcccaccttggcctccagagtagctgggatttcaggcacgcaccaccatacccagctaatttctgtattttttgtagagatggggcgtcgccatgttgcccaagctggatattatcactgttttcctcaattttcatcacatactatcatatctctctccatcycctccatcccttctagggactctctcttttttttcctccctctttaattaatataaacatataatagataaagctgcatcaaaaggaacagaaagggggaactatgtgggattttattccaagtactcaatcagtgttcataatcaaactaatctttacatggcattattatttattatcacataataattagtattattagtagacaaactgttaaaatgatttctgatttttatttattttcttgaaaaagttaattctgcagttgacttcataataatgtttatccattcaacaaatatacattgaccatcaattctgtgagataagtactat

SEQ ID NO: 132206 - DNA, 581 bp, Homo sapiens
atatatatatatatatatatatatttatttatataaaatgaaaacatgatttctgccttgtgttgcctgggcacttgctttactcctcagtccctgaccccttactccactacataagcttcacaacagaaaccttcttttaatcatctctaagccagtcaccagactaatagtcatartggactattaacctggtggctgacttaaaggtgattatagataatggtggtattaatcacttgtgacaattacattgatacaacagtatatcattcatcaatgaaatacataatgtggaatgctattatatatattttccattgctcattgtgttctctaagctagaagagattattctttttgtcatgttgccacggccagctcatcaaattctatccataatttttgactcttttttcttctctgttgtcatcctgagatgtgggctagaaaagtggacaaatgggtttcttacgggaaacttacattggtgggatcctcctgccatcataacgaatcacaaggaaatataccacatttctcccaaatcagaataccattaaatctgtcatattgtcttt

SEQ ID NO: 132207 - DNA, 581 bp, Homo sapiens
atatatatatatatatatatatatttatttatataaaatgaaaacatgatttctgccttgtgttgcctgggcacttgctttactcctcagtccctgaccccttactccactacataagcttcacaacagaaaccttcttttaatcatctctaagccagtcaccagactaatagtcataatggactattaacctggtggctgacttaaaggtgattatagataatggtggtattaatcacttgtgacaattacattgatacaacagtatatcattcatcaatgaaatacataatgtggaatgctattatatatattttccattgctcattgtgttctctaagctagaagagattattctttttgtcatgttgccacggccagctcatcaaattctatccataatttttgactcttttttcttctctgttgtcatcctgagatgtgggctagaaaagtggacaaatgggtttcttacgggaaacttacattggtgggatcctcctgccatcataacgaatcacarggaaatataccacatttctcccaaatcagaataccattaaatctgtcatattgtcttt

SEQ ID NO: 132208 - DNA, 591 bp, Homo sapiens
atctaacataagcaatgttaagttcattcagtttatctctactgtccactttcatggaagatggattttgaataaaaataaaattgcaaagttctatatatggacatctgtgcctgtagtcttcaccgtcttttagtttcttttccaactcacatgtaagcagctaaaagctttgttgcygtttttggtttgttgccgttttgctttgttgtcgttttgctttgttgccattgtcttgcacattagcagtcttgcattgtcaatcaaactgatactttgtccctttgtagttttctgaagatctacatagttaatgttctgcaataaaatcctattctttacttactttgataaaatgaggcagctgtgtatagagctctgcataccctatgattcccatttaaaggtttccattttggttgtggtatcatgtagctgaatgaccttaaggaagtcattttctctttgaacctgcaatttcttcatctcaaaacaaataaaaatcagactagactgattttgaaggtttacttcactcctgaaacactgtgtcatatttcctggtatttaacatctctgttacgaagcaaa

SEQ ID NO: 132209 - DNA, 631 bp, Homo sapiens
ttacctattatgttacttctgagatacttattttaatcctataataatctaaaagaatccatcaatcagagcatgtcacttacacataacccacctcctctatttagcatctttgaataatttctccctgcaattggaataaaatgtaaactgtctgcatgtgccacattttataacttcctttttatcaaaataattttaatccccttgtcccttcccaggtgccaggtcttctaaaaatttaaataacagacaagrtttctctttctcagaaccctcccttaatttaataatgatcaaaaggttagtttcttcttacattttaagctttactttaaacatcaacccctcaaaaaggtcttctctgagcattccatctaactagcttctcaccatccctgtattctccatggcacataccataatgtaacattatacttttctctgctgacatgattcacagtatatctctctcactaaaatataaggtacacaaaggccagaccaaatctattcatcagtgtttgtcatttcaactgatacatagtagacaggcaataaatatttgtaaatagagtgaattaaatccacttatacctcctttcccattgctgaaactgcccatcagaag

SEQ ID NO: 132210 - DNA, 573 bp, Homo sapiens
ttcatcagtgtttgtcatttcaactgatacatagtagacaggcaataaatatttgtaaatagagtgaattaaatccacttatacctcctttcccattgctgaaactgcccatcagaagtcatgaaacaatgtagtctcacgagtgactcagttacccaacttgcttatgcaatcacatgacctgtattattacacctctcttcaggtatcaccactgtcctgacaatgaccaccctcagcaccattgcccggaaatcgctccccaaggtctcctatgtcacagcgatggatctctttgtatctgtttgtttcatctttgtcttctctgctctggtggagtatggcaccttgcattattttgtcagcaaccggaaaccaagcaaggacaaagataaaaagaagaaaaaccctgtatgtatcattttccattggcaccattgaaatttttatgatttcggtttagtttgttttcattagcctatctgcaggctaaggctcagcagtttgggmtccaagatgaaaacagcatgtatgagtttagccaggccataacgattcatttacagtcattag

SEQ ID NO: 132211 - DNA, 569 bp, Homo sapiens
ttttcagctacagcaaataaaacagtgaaagccctgactatttacagtagtggtatccttactagattcataatgcaattagatagaaaaggtccaaaactgtaccctatgttcactccgggtcaagttgtgataaatttgatcccaatagaatacctccctcatttaagaaaaatcataactcactttaaatatgaaagcctagtccagaaatctattacacctttatctcaagataggaagaaaatttcctccacattcatgtacaatgatgtaaatatttcaataacttagaatgcttcaagtttagtgcatgcatctctttagatccaaaataaatggaytgaagttatcatcctattgtcttttattttgtgtccttgggctataaaagaatcctgaatgtaattataaggatttgggtttggaaatggagggaggaattttcattgccttctccctcatgcatgaagattcgaacagcttattttttccttgtatgacatattacaacactttaagtaaaatatagactggataatcaacatttgccacctctaaatatgccc

SEQ ID NO: 132212 - DNA, 569 bp, Homo sapiens
ttttcagctacagcaaataaaacagtgaaagccctgactatttacagtagtggtatccttactagattcataatgcaattagatagaaaaggtccaaaactgtaccctatgttcactccgggtcaagttgtgataaatttgatcccaatagaatacctccctcatttaagaaaaatcataactcactttaaatatgaaagcctagtccagaaatctattacacctttatctcaagataggaagaaaatttcctccacattcatgtacaatgatgtaaatatttcaataacttagaatgcttcaagtttagtgcatgcatctctttagatccaaaataaatggattgaagttatcatcctattgtcttttattttgtgtccttgggctataaaagawtcctgaatgtaattataaggatttgggtttggaaatggagggaggaattttcattgccttctccctcatgcatgaagattcgaacagcttattttttccttgtatgacatattacaacactttaagtaaaatatagactggataatcaacatttgccacctctaaatatgccc

SEQ ID NO: 132213 - DNA, 492 bp, Homo sapiens
gtagaggtgtttatagtattctctgatggtagtttgtatttctgtgggattggtggtgatatcccctttatcattttttattgcatctatttgattcttctctcttttcttctttattaatcttgctagtggtctatcaattttgttgatcttttcaaaaaaccagctcctggactcattgatttttttaagggatttttgtgtctctctctccttcagttctgctctgttctgctcttawtttttacatattagaaaaagtgagggcacagatgggttaattgacttgcctaaagtcaaacggatagtaagtggtgtcacagggattagaacccaggcttacaacaaagcccccattcttaacataccattgtgccttactaggataaagtaatatgacagtctacgacggccgcagggattgtatttcattactgtcaaaacaccagcacctagctcagtgtcagacagatgggcaatcatacatgtttg

SEQ ID NO: 132214 - DNA, 608 bp, Homo sapiens
cattgctgaggtctgcatttttatacatagaggactccaagttggctggcccttaagaggaaataggataggattctgagtctcttttatctttttttttttaatttttgaggttaaactagataaatctaattttcaggatatgctcatgcaaaactgattgaaataacaaaagtgtgtggaaatgtgtaaagcccaactgatttttgttattttcacatcaaactggggttttcaaatcggtctatctacctactgtgtgtgtatggtagagggaaagggtctttgtttcaggttccatacttttatgcaaattaaataccaaaacaccgtctagtccataggctggcaaagtacacctgtttttgtaacgaagttttattgcagcagccatgctcattcatatacgtgttgtctatggctgcttttgcactacagcagcagaactgagtagtgtgacaaagatagtatgatccgcagagccttaaatattcactayctgggcctttacagaaaaacattgttgacccctgatctttcaacacattttgcattctttccaggtgaacaataaagaaaacgtccttggcacactactgcagaagctt

SEQ ID NO: 132215 - DNA, 638 bp, Homo sapiens
atttctgtaatagttatggcccctaacagagggggcagaaatgctttgaattcaaaaaaggataggaattttaactgggcacagggtagtccaagcctcttaggaaaacaatttcacaaattttttctaagtcccaatattgtcatctctttccctgtttcctccaaatctcattgctaccaccaccaccaattgccatggcaacycacccaaggaagatgaacttgtcttatgtaacctatttggggtcttgctcttcatgtcttatttcatgacttacaccatcaccaggtaggcctcagccagactccatgatttctatccccacctaacaggtgcctaataaagcacagatagcttaaaccccacataaccaaatttaacatataagttatgctactcccagcaagcctccaaactgtagcagagacaccttaagacagtagttggaaacaacaggaaaattatttggcaaatacaaggcctttcaagggcattctgccttgaggaaatagtgtaaggtacaaggtagagaatggtgaggtggaagagttaaaaatttttcttcccttctgtttcactccagttctgtttaagtattaaaaatttctgacatttgcatctatttagtactgttc

SEQ ID NO: 132216 - DNA, 638 bp, Homo sapiens
atttctgtaatagttatggcccctaacagagggggcagaaatgctttgaattcaaaaaaggataggaattttaactgggcacagggtagtccaagcctcttaggaaaacaatttcacaaattttttctaagtcccaatattgtcatctctttccctgtttcctccaaatctcattgctaccaccaccaccaattgccatggcaacccacccaaggaagatgaacttgtcttatgtaaccyatttggggtcttgctcttcatgtcttatttcatgacttacaccatcaccaggtaggcctcagccagactccatgatttctatccccacctaacaggtgcctaataaagcacagatagcttaaaccccacataaccaaatttaacatataagttatgctactcccagcaagcctccaaactgtagcagagacaccttaagacagtagttggaaacaacaggaaaattatttggcaaatacaaggcctttcaagggcattctgccttgaggaaatagtgtaaggtacaaggtagagaatggtgaggtggaagagttaaaaatttttcttcccttctgtttcactccagttctgtttaagtattaaaaatttctgacatttgcatctatttagtactgttc

SEQ ID NO: 132217 - DNA, 374 bp, Homo sapiens
tggtggtgaacagaaggcaggaagagaggtagggagccatttgaggctgggtctgaaaaggtggaagcaaatgaatcgggacattctcagtgaytcattctgtttaccctatttttctttccctccaataaataaagagatccacaacacatgaggatttttttaagattatttttatttataatgattttttgtttatgcttggcaaaaaaaaaaaaagagtcacaggatgcttgagtattttttcaagaaaagatgctgcgaagagccacaatgtattgctcattaagggaaaatccactccttgcatagcaacaaaacatatgccaaccagaaatatgaagcccaattcacccccatttaggtaaaaggat

SEQ ID NO: 132218 - DNA, 352 bp, Homo sapiens
tgcctgaaaaagactgtatctttccttcatacatgatgcttagtttcactggatacaaaattcttggctgataattgttttgtttgaggaggctgaagatagggccccaatactttctagcttatagggtttctgctgagaaatctgctgttaacctgataggttttcctttatagcctacctggtgctcctgtctcaaggctcttaagattctttccttcattttaactttgaataacctgatgaaactgtgmctaggtgattatctttttgcgatgaatttcccaggtgttctttgtacttctagtgtttggatgtctagggctctagtaaggctggggaaattttcctc

SEQ ID NO: 132219 - DNA, 457 bp, Homo sapiens
tgttggttcagaataaacctcttccaaaatattttacaaagtttagtttttccattaacaagtagaaactgtccttttatacgcttagattcaacaaagtatggatggctatgtagaaataggattgggcaaaagggtataatccaatgttaatagacgaagtggggaaacccagcaaggcctgtctgtctagatgtctcttggcctctctgagcagaattccttcctcctgcatatgcagcaggaccctctctggaatgggggggtcctctgatctacaatcaaacaagataggtcacataatttctttatggtctatttttacaragtaaggcagaggaaagttagagtaatattttcaggttttatagctggctttggagagaagagattttgttttttatgacccaccttcaggaaggggagttctaatttctatggctaccctcagggggag

SEQ ID NO: 132220 - DNA, 628 bp, Homo sapiens
ctggggcacttgttaagaatgtcccttgggggactccacccacagagcttctgatttcatgagtatgcagtggattttaggagtctgcattttartaagttgctcagccaatttggatatgggaggtccagagacaactcttcaagaaacattaatttaagatgtcaccaatctgttttctcttctgcaaatgggggtcaaatcagtcttcctctcagatcacaaggtgaactgagacctaactcctaaactgtttacaaaatactgctaaatattgaatgcacattaataataatgaaatgggaatcaggcatccactaagccttcacatttagcaaaaaaaaaagaactgccagatggtgtcccttcatgagagactgagttagaaaggttggtctagggggtgagagagcagatctgatgttcttcattgttccaaatggcagtctttaaagcaacataaagataaatgacctgctctctctgttttctgaatgtgtcatgggaagtcttttccattccataaatagttatattagcaaatcaaataagctagtgaaacaggcagaatcccagggaaaaaacataccagtgttgtttcacttcattaacgttattactaaattat

SEQ ID NO: 132221 - DNA, 391 bp, Homo sapiens
gaattccccactatttctaatttactgagaattatctgtgtcatgaatgggttttgtcagatgttttttctgtatttattaattgtggaattttccttttttagcctgttgatgtaattgattatataaattcatttttgaatgctgaacaagccttgcatatctgggaaaaaaatcctacctgataatggtgtataattctttttaygcattgttatatccaatttgctgatatttcattgaggatttttgcacctatgttcatgaactattgggttttagttttctttccttataatgatctcatctggttttggtgttagggtaatgctggcatcatagaatgagttaggaagcattccctctgcctctatattctaaaagagattac

SEQ ID NO: 132222 - DNA, 391 bp, Homo sapiens
gaattccccactatttctaatttactgagaattatctgtgtcatgaatgggttttgtcagatgttttttctgtatttattaattgtggaattttccttttttagcctgttgatgtaattgattatataaattcatttttgaatgctgaacaagccttgcatatctgggaaaaaaatcctacctgataatggtgtataattctttttacgcattgttatatccaatytgctgatatttcattgaggatttttgcacctatgttcatgaactattgggttttagttttctttccttataatgatctcatctggttttggtgttagggtaatgctggcatcatagaatgagttaggaagcattccctctgcctctatattctaaaagagattac

SEQ ID NO: 132223 - DNA, 578 bp, Homo sapiens
tgagaagtagaatggtatattgctttatgaaacaggtaacagataagaaattgtattttaaataaataacttgagaatcttgagtagcccacttttatctgagagatttccataattatagcatccatttctggaagatgagaaggaacccgttatcaactttgctgcatatcatatcrtaagataattttgattttatcccattcctgtgggagcacttctagctcactgaattgaagagaaagaacaaatgctttattgatcaatcagaactttttcttactgcaagagccaatgagtgtggtggctttatggtttgtaaataatttttgcctcacaatgcacattggtgtgtacattactgtaaactttgttttcttttctactgccttcacttttctgttaactttcagtagttaataatgacaataaaaacaagtgagattctaaacattatacagctattaattcatttagttttcataaaaacactgtaagacaagtagaattattaactttattttaaagatgaagaaaatgagtcaacgatgcattaaataacctgttagtgagagtca

SEQ ID NO: 132224 - DNA, 369 bp, Homo sapiens
ggtcatataatgcagcaaacactcaccttggtatagtatctgaaattctcaactggaagcccactgtgaacatttgaaatagagtcccattcccctcaagcactttatattcccttggggcatggcgaaggtattatccagctcatcagggaattygtggaaaatgattggagagttcaaatggaagtgagacagcctccaggtgagcctactcatcccccctccctcctctgcttcgctatttctgatgatttctgattaatatcctgaaacagcatcctatattatgtttggcataatgaacttcctacaactatctttaaaaataaacaggtaatttttattatttcttaaaacattacatgtttt

SEQ ID NO: 132225 - DNA, 484 bp, Homo sapiens
gaattcgagatgaagaccaggaaatcttccaggttaagagagggggaaaagcattccaagmagaaagaagaagtttcatgaggtccctgatgcaggaaagaagttggcatcttataaaaacaaaaatacaaagtcacctaaagattgaatgggagactgtttcaagatagaactagatatatagtctcaaaaatgatatccagacatttacagggagtagttttatcaagaaagtctttaaacaatgatttctggccccaattttgttttatttctagaatatattatcctcactgtaaccagaataatcttcataaaacaaaaatctaattatacgatgctttcacttacacctcttaatagctccccactgctggcccttgactacttctccacaatcattccttttctcacttcctcccccactagctgccctccagaactatctgccatcttcaaacatacttgccctccctcatgcctc

SEQ ID NO: 132226 - DNA, 496 bp, Homo sapiens
tgttacagctccctaatacccagtttttctatctttaaatgatttctactctggagtccgaaggttagaggagatatggcctataagtgattaccatagtgcctgccataagtccattttttttttaaatctaccctacagggatttcaaagtrggtacagagatagaggaattaaagttgatttgagttaggagagagttagacctgaatctaaagttgtaaacgttttgttaccacaaaccaagagggtggaagtgcaaaattaggctaatgataaggcaagcgtcacccctcatggaaaaaaagccagattttatagcacccagaatctcaagtagacctcaattaccaagaaattgtatgatcatctgtaagtcatcatagaaaacagaggacattttggttgtaatttcaggttttgttcagatgtttgtcatcatgtactaatcaaacacactataaccctactgagaaatgaatatgttcctggctaga

SEQ ID NO: 132227 - DNA, 171 bp, Homo sapiens
ttttttttaaatctaccctacagggatttcaaagtgggtacagagatagaggaattaaagttgatttgagttaggagagagttagacctgaatctaaagttgtaaacgttttgttaccayaaaccaagagggtggaagtgcaaaattaggctaatgataaggcaagcgtca

SEQ ID NO: 132228 - DNA, 513 bp, Homo sapiens
gtcctactgaccaaacatgacaacttttcagtagaatgattagaaggcaggactgggtgaggaggttgatgatgttgtgcacacctgaagaaagacacttcttatccattctcaatttttccattgcacaatgaatattgtagaaataatgcaagttgtaaaaatgaaactatgtggaagatatgactcrgtgcagtgaataagatcccagctttggaatcagagaggttggattgaatatcctatccacgacctctagagtctaatggagcaccaggcttacatttttacaatgtaagtcaggccatgtcactcttctgcccagaatcttcttttggctcaccatctttaaaaaataaaatttaaaatccttgcaaggtctgatagtaccctacttaaatggtgcattcccattacttctgatgttatcgtccacaagtttttcctctctcgtttcctttcagccaccatatgtgtactgacaattgagcacactaggtacattacttcctc

SEQ ID NO: 132229 - DNA, 513 bp, Homo sapiens
gtcctactgaccaaacatgacaacttttcagtagaatgattagaaggcaggactgggtgaggaggttgatgatgttgtgcacacctgaagaaagacacttcttatccattctcaatttttccattgcacaatgaatattgtagaaataatgcaagttgtaaaaatgaaactatgtggaagatatgactcggtgcagtgaataagatcccagctttggaatcagagaggttggattgaatatcctatccacgacctctagagtctaatggagcaccaggcttacatttttacaatgtaagtcaggccatgtcactcttctgcccagaatcttcttttggctcmccatctttaaaaaataaaatttaaaatccttgcaaggtctgatagtaccctacttaaatggtgcattcccattacttctgatgttatcgtccacaagtttttcctctctcgtttcctttcagccaccatatgtgtactgacaattgagcacactaggtacattacttcctc

SEQ ID NO: 132230 - DNA, 423 bp, Homo sapiens
tctttttaagggagagcatagtggtgcacttcacaaatgcacattgagtaaactagcggagaccctatggaatagggggtggcaagaagtgccatgaaagccttacacrcaaatctgtttctctccctgatgtatcaaagttagctcttcattctttcaagtatatgctgctttttccctggtagcctcttgtttcctaggaagagggacatatcaagttgtaataccacagagtcaatgattcgatcatatttttttagaaggaaaaaaagacttgtgttatgagtactggagacctatttatttagaattagaagaaacctagagaatgctcaattcaatatactcccacccctatattacagacatgaattgacaagatggaagaagatagaagtggtaagccagagaaatgggaaaaca

SEQ ID NO: 132231 - DNA, 409 bp, Homo sapiens
ctggaatcaagctacagcttggagccaagtccaggtgaagtcaactgagatcagccaaaccccagccaacctacttatgcagattcttaagcaagaaataaatgcatrctgtttcaatccattgaaagtttgtatttctttgttacacagcagctacgtaatagagactttctcaagactacacagtaagtagacggcggaatcagcattaaaattcagggctccagaccgtgccccctcgccaagcccagtgtatttcctactctatttttttcttaagtcctggtgatcctcaatctgccactttccttattttatacagttggcctatctgtcacactaagccaagaaaatggcccttcaattcttctttgcaagactttctcgcaagaatgttttcagtctgtat

SEQ ID NO: 132232 - DNA, 409 bp, Homo sapiens
ctggaatcaagctacagcttggagccaagtccaggtgaagtcaactgagatcagccaaaccccagccaacctacttatgcagattcttaagcaagaaataaatgcatgytgtttcaatccattgaaagtttgtatttctttgttacacagcagctacgtaatagagactttctcaagactacacagtaagtagacggcggaatcagcattaaaattcagggctccagaccgtgccccctcgccaagcccagtgtatttcctactctatttttttcttaagtcctggtgatcctcaatctgccactttccttattttatacagttggcctatctgtcacactaagccaagaaaatggcccttcaattcttctttgcaagactttctcgcaagaatgttttcagtctgtat

SEQ ID NO: 132233 - DNA, 592 bp, Homo sapiens
agcaggaattattttaatttaaaaatgctctcttagtttggctgctataacaataccatagacttgggagcttaacaagtttggctgctataacaataccatagattgggagcttaacaatacatttatttttttatagctctggaagytgaagtctatgatcagggtatctatatgttctgattctggtgagggtctttgggatggttaattttaggtgtcaacttgactagattaaagtataccaagatagctggcaaatcactatttctggatatgtctatgagagtgtctacagaagagattaacattagaatacatgaactgaacaagggaggtccactctcacccaatttgggtgggcacaatgcaatcagtagagggccatactagaaaaaaaggcagaggaaaggtaaattttctctctctcttttctggatccaagtcatgtaggttctctaacgtttaaactcgcaccagctgcaccccaggttctcaatcctttggacttgtactgagtcactctactggatttcctggttctccagcttgaagatggcatattgtgagacttttcagcatctgtaattgc

SEQ ID NO: 132234 - DNA, 592 bp, Homo sapiens
agcaggaattattttaatttaaaaatgctctcttagtttggctgctataacaataccatagacttgggagcttaacaagtttggctgctataacaataccatagattgggagcttaacaatacatttatttttttatagctctggaagttgaagtctatgatcagggtatctatatgttctgattctggtgagggtctttgggatggttaattttaggtgtcaacttgactagattaaagtataccaagatagctggcaaatcactatttctggatatgtctatgagagtgtytacagaagagattaacattagaatacatgaactgaacaagggaggtccactctcacccaatttgggtgggcacaatgcaatcagtagagggccatactagaaaaaaaggcagaggaaaggtaaattttctctctctcttttctggatccaagtcatgtaggttctctaacgtttaaactcgcaccagctgcaccccaggttctcaatcctttggacttgtactgagtcactctactggatttcctggttctccagcttgaagatggcatattgtgagacttttcagcatctgtaattgc

SEQ ID NO: 132235 - DNA, 592 bp, Homo sapiens
agcaggaattattttaatttaaaaatgctctcttagtttggctgctataacaataccatagacttgggagcttaacaagtttggctgctataacaataccatagattgggagcttaacaatacatttatttttttatagctctggaagttgaagtctatgatcagggtatctatatgttctgattctggtgagggtctttgggatggttaattttaggtgtcaacttgactagattaaagtataccaagatagctggcaaatcactatttctggatatgtctatgagagtgtctacagaagagattaacattagaatacatgaactgaacaagggaggtccactctcacccaatttgggtgggcacaatgcaatcagtagagggccatactagaaaaaaaggcagaggaaaggtaaattttctctctctcttttctggatccargtcatgtaggttctctaacgtttaaactcgcaccagctgcaccccaggttctcaatcctttggacttgtactgagtcactctactggatttcctggttctccagcttgaagatggcatattgtgagacttttcagcatctgtaattgc

SEQ ID NO: 132236 - DNA, 497 bp, Homo sapiens
aagtataatagcatgggaatcttggaaataggagttactaaataagttataatttttcttcttcttcagttttaatgtttgtgggaagactacagaagcagcagttgtcttgccttcagtatgctccagaatttttgktacttgtttctttttatttattcaaatacacatcaattttttttatcttttggagatcagactcaagttcaatggagcttagactaatataaaaacacaaaataataaccaaatttttagtattatacatttctctaatgttttaacacatattatcaatccttgcaagagtcctgtcagataagcaaaatgggtgttaatgttaattccattttgtagacaagtcagccaagacatcaacttaaataaagatagaactttggagagatttaggactctaatcctcaacctttggcttggagtatgtgtggaactgccactatactgctctgaatttattaagacaatagaaaaaacag

SEQ ID NO: 132237 - DNA, 450 bp, Homo sapiens
gttttgttttgtttcgtttttagagacagccttgctctgtcacccaggctggagtgcagtggtgcaatcacggctcactgcagccttggcctcttaggctcaagagatcctcccacctcagcctcctgagtagctgggactacaggcacacaccaccatacctgsctaatttttacatttttgtagagatgcgttctcattatgttacctaggctggtctggaactcctgggctcaagtgatcctcctgcctcagcctctcaaagtgctgggattacaggcatgagccactgtgcccaggtagagtccattctttaaccattctctatagcagggtttctcggtctctgcactgttgacattggggttggataactgtttgttgtggagggctgtcctatatgttgtaggatttttagcagcatccctggccaccatccactagatgcca

SEQ ID NO: 132238 - DNA, 447 bp, Homo sapiens
ttgttttgtttcgtttttagagacagccttgctctgtcacccaggctggagtgcagtggtgcaatcacggctcactgcagccttggcctcttaggctcaagagatcctcccacctcagcctcctgagtagctgggactacaggcacacaccaccatacctgcctaatttttacatttttgtagagatgsgttctcattatgttacctaggctggtctggaactcctgggctcaagtgatcctcctgcctcagcctctcaaagtgctgggattacaggcatgagccactgtgcccaggtagagtccattctttaaccattctctatagcagggtttctcggtctctgcactgttgacattggggttggataactgtttgttgtggagggctgtcctatatgttgtaggatttttagcagcatccctggccaccatccactagatgcca

SEQ ID NO: 132239 - DNA, 622 bp, Homo sapiens
tcactgcaacctccgccaggctggagtacagtggcgtgatcttggctcactgcaacctctgcctcctgggttcaagctattctcgtgcctcagcctcccgagtagctgggactacaggcatgcaccaccacacccagctaatttttgtatttttagtagagacggggtttcaccatgttggccaggatggtctcgatctcctgacctcgtgatctgcctgcctcagcctccaaaagtgctgggattacaggtatggagtgctttttaaaaatattgatgccatrttgatcagaatcaaccccagatgctctgaatcacttggtctggggagaggcccaggaatctatattttttgttctgaggtgtttggtggtaaatgttggggcttttggtctcccttttgaatcactactcggccttctttgtccctgttctccctagtccaggtttgcacatgtttgtgcaagacaacctcttcatgtcatcccagagaaaggggagagaaaggtttatgataattttgtccaagatagtacttactaaagagaagacagaaaatttagatgagcagcttagctacaattgtgatcaccttaacaaatttgaaccttttgatcataag

SEQ ID NO: 132240 - DNA, 622 bp, Homo sapiens
tcactgcaacctccgccaggctggagtacagtggcgtgatcttggctcactgcaacctctgcctcctgggttcaagctattctcgtgcctcagcctcccgagtagctgggactacaggcatgcaccaccacacccagctaatttttgtatttttagtagagacggggtttcaccatgttggccaggatggtctcgatctcctgacctcgtgatctgcctgcctcagcctccaaaagtgctgggattacaggtatggagtgctttttaaaaatattgatgccatgttgatcagaatcaaccccagatgctctgaatcacttggtctggggagaggcccaggaatctatattttttgttctgaggtgtttggtggtaaatgttggggcttttggtctcccttttgaatcactactcggccttctttgtccctgttctccctagtccaggtttgcacatgtttgtgcaagacaacctcttcatgtcatcccagagaaaggggagagaaaggtttatgataattttgtcyaagatagtacttactaaagagaagacagaaaatttagatgagcagcttagctacaattgtgatcaccttaacaaatttgaaccttttgatcataag

SEQ ID NO: 132241 - DNA, 613 bp, Homo sapiens
aaaaccccgaacccattagggagaaactccccaacctcccctccccttcctctggcaaccatgaatctgggttctgtctctggatttgtctgctctggatattttttataaatgyaatcatataatatgtggcctcttgtctctgttcctttcacttagcataatgttttcaaggctcacccgagttgtagcttctgtcagtacttcattctattctctcttcatggtagacatatacatagcagttaggtaagagtcaccacctcccttttgcagataataaaactaaggcccacataacacagctcttcctgaatttacctttttgtgtgcatgtgtgtgagacagggtctcactctgtcacccaggctggaatgcagtggtgcagtcaccgctcactgtagcctcaacctcacagggtcaagtgatcctcctgcctcagcctctcaattagctgggactacaggtatgcaccactgcacccagctaattttggttttgttttgttttgttttgtttttataatgatggggtcttgctgtcttgtcctagtgatcctcccatgtcagcttcccaaagtgttgggattacaggcatgagccaccattcccag

SEQ ID NO: 132242 - DNA, 613 bp, Homo sapiens
aaaaccccgaacccattagggagaaactccccaacctcccctccccttcctctggcaaccatgaatctgggttctgtctctggatttgtctgctctggatattttttataaatgcaatcatataatatgtggcctcttgtctctgttcctttcacttagcataatgttttcaaggctcacccgagttgtagcttctgtcagtacttcattctattctctcttcatggtagacatatacatagcagttaggtaagagtcaccacctccmttttgcagataataaaactaaggcccacataacacagctcttcctgaatttacctttttgtgtgcatgtgtgtgagacagggtctcactctgtcacccaggctggaatgcagtggtgcagtcaccgctcactgtagcctcaacctcacagggtcaagtgatcctcctgcctcagcctctcaattagctgggactacaggtatgcaccactgcacccagctaattttggttttgttttgttttgttttgtttttataatgatggggtcttgctgtcttgtcctagtgatcctcccatgtcagcttcccaaagtgttgggattacaggcatgagccaccattcccag

SEQ ID NO: 132243 - DNA, 622 bp, Homo sapiens
atcaacccaaagaaaaccccgaacccattagggagaaactccccaacctcccctccccttcctctggcaaccatgaatctgggttctgtctctggatttgtctgctctggatattttttataaatgcaatcatataatatgtggcctcttgtctctgttcctttcacttagcataatgttttcaaggctcacccgagttgtagcttctgtcagtacttcattctattctctcttcatggtagacatatacatagcagttaggtaagagtcaccacctcccttttgcagataataaaactaaggcccacataacacagctcttcctgaatttacctttttgtgtgcatgtgtgtgagacagggtctcactctgtcacccaggctggaatgcagtggtgcagtcaccgctcactgtagcctcaacctcacagggtcaagtgatcctcctgcctcagcctctcaattagctgggactacaggtatgcaccactgcacccagctaattttkgttttgttttgttttgttttgtttttataatgatggggtcttgctgtcttgtcctagtgatcctcccatgtcagcttcccaaagtgttgggattacaggcatgagccaccattcc

SEQ ID NO: 132244 - DNA, 622 bp, Homo sapiens
atcaacccaaagaaaaccccgaacccattagggagaaactccccaacctcccctccccttcctctggcaaccatgaatctgggttctgtctctggatttgtctgctctggatattttttataaatgcaatcatataatatgtggcctcttgtctctgttcctttcacttagcataatgttttcaaggctcacccgagttgtagcttctgtcagtacttcattctattctctcttcatggtagacatatacatagcagttaggtaagagtcaccacctcccttttgcagataataaaactaaggcccacataacacagctcttcctgaatttacctttttgtgtgcatgtgtgtgagacagggtctcactctgtcacccaggctggaatgcagtggtgcagtcaccgctcactgtagcctcaacctcacagggtcaagtgatcctcctgcctcagcctctcaattagctgggactacaggtatgcaccactgcacccagctaattttggttttgttttgttttgttttgtttttrtaatgatggggtcttgctgtcttgtcctagtgatcctcccatgtcagcttcccaaagtgttgggattacaggcatgagccaccattcc

SEQ ID NO: 132245 - DNA, 612 bp, Homo sapiens
aaaccccgaacccattagggagaaactccccaacctcccctccccttcctctggcaaccatgaatctgggttctgtctctggatttgtctgctctggatattttttataaatgcaatcatataatatgtggcctcttgtctctgttcctttcacttagcataatgttttcaaggctcacccgagttgtagcttctgtcagtacttcattctattctctcttcatggtagacatatacatagcagttaggtaagagtcaccacctcccttttgcagataataaaactaaggcccacataacacagctcttcctgaatttacctttttgtgtgcatgtgtgtgagacagggtctcactctgtcacccaggctggaatgcagtggtgcagtcaccgctcactgtagcctcaacctcacagggtcaagtgatcctcctgcctcagcctctcaattagctgggactacaggtatgcaccactgcacccagctaattttggttttgttttgttttgttttgtttttataatgatggggtcttgctgtcttgtcytagtgatcctcccatgtcagcttcccaaagtgttgggattacaggcatgagccaccattcccag

SEQ ID NO: 132246 - DNA, 484 bp, Homo sapiens
ggagggccttgatgttggaacagatctacaaggccttggttccatctcccaccctcctgtatgagatgacmcatctggcatgtgtggcctgtggccccgaacactaaacgcagctaggaatggaaggatatcggttctgcaggagccaggccacgcccagagtgtagtacagcttgaccagagcttccaggatttcctctttctccttatttgaggtcgtatttgccttccaggtcaacagtgtattcttggctgatgtagcatgtttcttggcctgaactgggaggcctgggggagttagagggtgaggagcaagaagacagacattaaaaaggcatgcttcagtcaaaaacattcctgggaggggataaagtgggcagtgcagttgtcgtatggtctatagcattggttcctaaatctggctgtgaatcagaattattggaaatgcttgtaaagaatacaggttcctgggccccactcaaga

SEQ ID NO: 132247 - DNA, 458 bp, Homo sapiens
tacaaggccttggttccatctcccaccctcctgtatgagatgacccatctggcatgtgtggcctgtggccccgaacactaaacgcagctaggaatggaaggatatcggttctgcaggagccaggccacgcccagagtgtagtacagcttgaccagagcttccaggatttcctctttctccttatttgaggtcgtatttgccttccaggtcaacagtgtattcttggctgawgtagcatgtttcttggcctgaactgggaggcctgggggagttagagggtgaggagcaagaagacagacattaaaaaggcatgcttcagtcaaaaacattcctgggaggggataaagtgggcagtgcagttgtcgtatggtctatagcattggttcctaaatctggctgtgaatcagaattattggaaatgcttgtaaagaatacaggttcctgggccccactcaaga

SEQ ID NO: 132248 - DNA, 512 bp, Homo sapiens
actgggtgtgtgtacactcagggcagcactgactctagactttgggtgccaatgtgcgtgggagggaggctggcaggggggcgggctgagggcagcttggcgctggcctgcaggtgcccctcagcacaaactacctgggtgccatgaacagccacaggagccagacaggctccagggcagaaaggggtgggtccgcagtgaagccccaccttcaaacccaggaaggcctaaagactggaggccaggctgccagtccagtggaacagagtgggaatttatggtgctttttccatgcccgcccatggttgtccgtggaccaatcagcacatacttccttccctctgaagcccataaaaaacccagactcagggagatgacaagatgaccagctgcagaaaacagctacctactycacggtctcctctctgctgaaagctgaacactcaataggatgacctgcctgcagaaaggacctacccactccagggtcttctttctgctgagagctgaat

SEQ ID NO: 132249 - DNA, 563 bp, Homo sapiens
gtggccttttttacttttattaaatcacaaatattcactagggaatattcattccctagaaattcattatttggttaaaagggtcagaaaaccaaacacaaaatgtcttaagcaaaaagataaaatttacctgatgtatataaatgaaaggctttaggcacagctagatctagttgctcaaataacatcaccagattcaatatctgttgtctttattttcccttctttggttttattatcaagctttctttcctctcatagtgctaaaaggattgccaagcagctccgcagttttatcttattctctcaataaccatgctgaatagtcatagtgagatttccttttttaaaacatagcaaaaatctcagaatttcatttcattgattctgctgggaccacctgatcacccttgaaacaatcatggtggccatgggaatgtggtgcmctggtagggcaaacctggtcctctcctgtacaccaaattggtagtagagtcagcaacgctggaattatttgtgtggggagtggtgaaggcttatatatccaaacaaaaacaggtttc

SEQ ID NO: 132250 - DNA, 575 bp, Homo sapiens
ggaatgtttatccaatgcctgtaccactatggtatctcggaagtaaataacttgtttttttgttttttaatcatacaggcttataggtagaaggagcctgtcttgggacttttatgagattttggactttggattttttatttagttgatgctagaaagagttaagactttgggggactactaagaagggatgattgtattttgcaatgtgagaaggacatgasatttagggggcaaaaggtgaaataatatggtttggatgtttgtcttctccaaatctcttgttgaaaggtaatccccagtattggagctggggcctggggagaagcgtttgtgttatggaggcagatctctcatgaatgtcttagtgcctgtcttgtggtaatgagtgagttcttgctctgagttcatgcaagatctggttgtttaagagtgtggtacttcctctctctctctctctattcctctctctctattgctcactctcacctcaccatgtgacacacctgcttctgcttcaccttccaccatgagtcaaagctccttggggcctcaccagaagccaagcagatgtc

SEQ ID NO: 132251 - DNA, 453 bp, Homo sapiens
ctttgacagacagaattgccacagagttgacattgcacccgttctaggcataagcttgaagatgcctggagtttctgcttttgctgtcttgaaaaatcagatccaccacttaagaagctcagattaaactgctggagaggccctgtggtgagaaggagaggcaatcatagaagtttcagactcatctgagctttgggtaaatgcggtcacatgagtgattccagataacaccatgtggaggagaagaactgctccctctgagcccagccagcccatagaattatgacaaataataaatcattattgttttaagctgstaaatgttggggtggtatgttgtgaagcaatagatttatgagacagtaatattcagcgtatttgtccaaaatgttgctggaagtaaaatcttatttgaagtttctccctggatttatatgttcatttcattcataa

SEQ ID NO: 132252 - DNA, 579 bp, Homo sapiens
tgccacttggtttcacttcccttagctttctgtcttctttctcaattcttcctaactgtaatgcttctgaacacgtgtatttaaaggagattaatcattcaaataccgtaattagttcaagaattgtgtctttttgagatggaatgagctaattaattttttttttcttccagggaacctactctcagatgtgagctaattagtgagctgcacatcaaaagaagtgaagtgtatcttgtaaataggatttcatttaaaacagatcaaagaaagatctactgaatcactccctcatccactgatttctccaagcatcaggcagacagtgaagagaacaacaagtcacgagaatgataaacatagctccaamgaacaactgtgatgctcaagtcaaatattaatgagaagagagaaccaaatatatccaggggtggaattatacttcctgggacatgcatggttgggtttctgatgtaggccaggagggcagtaatctgtgtttgtgacccagtctacttctaaaaatacaaggttagaaataagatctctagactctgttctgactgactggctgtgtga

SEQ ID NO: 132253 - DNA, 492 bp, Homo sapiens
ccctctctctctcttcctctctgtagtatccaatgtagtatataaggtaaataaaaggattgattatggaaaaatgagtaaagatttaatatataaatactagccaaaagaagccttgtaactattttaacatcagaccaataaactacaggttaaaaatatttttagaaataaagagtgtcactatctaatgataaaagattcaatttgctaggaaagtaaaagaattccaaattttataaatcttataaattagcctcaaaatataaacaaaatacgtagaattkgatgaatccacaatcatactgggaggttttaatacatttctataattaattcattatcaaacaggacaaaaaaataaagaaaacaatgatatctaatgaagactagtaagatttcaacagcctatttacccagctgaatcaaatggacatatatgatagaatatcatcctcaacaattgaacaacagatattctgctcaaacata

SEQ ID NO: 132254 - DNA, 580 bp, Homo sapiens
cctcatgtgggccaaagcacagctgcctcttcccccagttactacacagtgtttccaaacaccagaaaactgcttggaaaccatcagtttgcaaaggcaaaaaagggcctttgggtggcttcttttcttcccatccccagataggcccattcatttggggtcggctgccaaaacacaaaacaaggttgttaaatgatagaagtggctgattagaaagaaagctttaagggtcttaggatacaataaagacttaactgatccaatgaactagtggattctgctataaaatctttttcttctgcagtaatagtcacacagaagtgtctgttggcctttaaggttactgaattggaaattttgtgacttgttyaagtgtgcaacagcggctttctcaggctgctaatctcatattgtccatgtattatctgcttatttctctcaataacaggctcatcatgagtatatattactaaaatagatggtgcatatgtaatctactcttagggaaaaggtctcccttgttcctggagaattttactcctgaatgaatagaaggtacatcattgagcaggcaggaaca

SEQ ID NO: 132255 - DNA, 627 bp, Homo sapiens
attcagaattcatgtagttatgttggtttttttccttaatcccctgaggtttgcctgattaatgactatttgaatcatttaattaatacacatttaactgtcttcgtaagaagatgtacattaattttataaatgtraagtctctttttagaagacctaaatgtctagcacgatgttgaatacacatacaatagccatttaatatattttggactttgctattagactgttaactgtttgaaggtagtactatgtttatttattttttttaaatacctggttcaattcctagaacatagctaacattctgtaaatatttgttaaccaaattagtgaattacttaaatgaaattagtgggacggattactaaaaaaacagttttctgtttttctcagtagattcaacgtatcacgtaatgaatggtcaataatttcctttactctttctcacttcatttcttccctcttatttttcctcctttttttctttctcttatttattcttgtgaagaaaatacaagaaaagtatatattttttaatctgtgcctggtattaaagaatatcagatggtaaaactttctctagctttgcttgttgaataaagaatgtgctagccaggtgatatg

SEQ ID NO: 132256 - DNA, 594 bp, Homo sapiens
tgaactcttacctttttttcttcaaaatttctgagtactttcttcctagtttctgctggtattaatctggcagtttctttagatacacatagtatcttccataatgacttctgatctcaagtaattaatggtctttgttgcttaatgcaaagccttgtgtatgatatgtgtttaatgatcatcaattgattgaattaatgaacccaaaatttactgtagccagaaattaatattaggaaataaatttctaaagctactcagcattgtctacggttgaagtatgtacttcctttctttcgggaatatgagatgctttgtgaatgtatccttgatcccagtgattttcaaatgattttgaatgacccactgtgcaaaacattttgcatgatgactcactgctcacacatatacatacatacatatataaacacatgcccagcacacatacatgtacatatattattaaagcaaaaatctaatgaaacaatacttatccttacatctttgtggtaggcrgaattctaaaatgactcccaaagagtcatgctcttgtataatcccctctccttgagtgggggcaataactgtgagtat

SEQ ID NO: 132257 - DNA, 480 bp, Homo sapiens
ctgtactaactgctaatttttaatgactattagctgtaaagagctttgcttcttgggcctagcttttcaaacaggaagctaaaaccctctgcagaactttgttttgatgggcatgatagttccctttgcttctgaaaagaaaatawcaataattaagcacttaaagcttctgcagatgagcctattttttctccttcttaaaaaaaatcatcagactctttgtaaacaggacctaattaatataactagtttcatcgtaattatcaaccctgtaagacaaatttggtatccatgatgtacaatctgcacagaattccctaagttgtaactatggagaaaattactggtcatcagagtttaccaaatggcgctgtaaagaaatactaaacccattagaatagcaggtttcatttaccagaagatattaaaatcctgtccatgtgatttccatcatgaaggttttcactgaaataataaaaa

SEQ ID NO: 132258 - DNA, 448 bp, Homo sapiens
ggaatatactatacttatataagataaattagactttaagtgaaaaactgtcaagagacaaggtgtttatacaatgataaaagggtcaattcagtaaaaggatataacaaaaataaacatgtatgctcccaaatttggaacccaaatatataaagcaaatattaatagattaaagggagagatagactgcagtacaataactgggggacttcaacaccccacttctgtcaatggacaaataatgtagtcagaaaatcaacaaagaaaygtcaaagttagatgtattctgcaccaactgctgcagaatacatatgtttttcatcagcatatagaacattctccaggataggccatatgttaggtcataaaacaagtatcaacaaattcaaaaaagtcaaagttatatcagttacctttcctgaccatgtggaataaaactagaaattga

SEQ ID NO: 132259 - DNA, 508 bp, Homo sapiens
cataatttgaatctgagaagaaatagcagtggggagggggggaatgacaaaaaatatttaaagaaaaaaaaatccagatctgttgaaaaccatcaattcacagatccaagcagatcaatgaacatcaatcaaataaacccaacagaaatcatgccaaggcttatcatcaacttgctgaaagttaatgatgaaaaaaaaatttaagagcaaccaaagaaaagagaccatacttacagaggaataaacattagaatgacaacagacttctcrtcaaaaactatgcaagtcaaaagaaaatgaggatgcctctttcaggtatattagagaaataaggattggatttatcctactggcttaaacaactaaaaacaaacaaaatacatatgaacaatagttttcagacattggacaacaggcagcacaggacagtgattcttgagaacagggaaacaaattaagtgagccctacaattgctctagcttactgcctagaaagaatttacaagct

SEQ ID NO: 132260 - DNA, 588 bp, Homo sapiens
tgagtataattatccaaagcaaataagcagtaacatgacctacagggaatgagacataaatttaggaaatcttgattaataytggctcagtattacaaagcataaccatcaagcatgagccaatgtaattatgatttgcaaaactataatttactcaaatttgaaaaggcaatgacacagtatgtcataaaatatacagatgcacccaccaaaataatctcagctccttaagcacttacaaagtattttctatttaattttatgcatgcccatatatttgtaatctatctgagatttctgtatgtttgagtctgaaataagttcagttccagctgagtgagatgcctgctgaatgttaatgagacagattttctattttaatatgtgtttttgtacaaactgattatattaaagtatgttgtaattgaattattttccagactattatttaggagtacttgttacttttgagctctggttttttaacataccaatagtgatgttgaaatgtttaaaataacacagtttgtaaaagaaaaaagatcctattaccagtaaaggttacttgtataacacataaaaatagac

SEQ ID NO: 132261 - DNA, 559 bp, Homo sapiens
cacagctacagttaccaattttataaatttatattggcataatacttttgtccaatctactgtcatgttctaattttgtcagttgatctaataatgttctttatagcattttctccatctggtacaggatccactccrgagtcatatataggatttggttgttagtggtcatgtctctttaagctttctttaatctggaacattttcacagcttttctttctcttttatgacattgacactttttaaaagaatctagtccccccaacttcttctattttaatatagtgttacaaagaacattttcatagatctaattttaaatgaatgaattttaattctgtgctagaatgtaacaaaattaagaaattccatgattttatggcatctaaatatgagaaaacattcaagaaatcataaatagtgatatccttgtttattaaattttgtcttttagaatgattttccaaagacagatactttaattggaagcaaaagacaggacctgtgaaagtattttatctgaaatattttggtatttcaacacacaaaaaatagaaa

SEQ ID NO: 132262 - DNA, 559 bp, Homo sapiens
cacagctacagttaccaattttataaatttatattggcataatacttttgtccaatctactgtcatgttctaattttgtcagttgatctaataatgttctttatagcattttctccatctggtacaggatccactccggagtcatatataggatttggttgttagtggtcatgtctctttaagctttctttaatctggaacattttcacagcttttctttctcttttatgacattgacactttttaaaagaatctagtccccccaacttcttctattttaatatagtgttacaaagaacattttcatagatctaattttaaatgaatgaattttaattctgtgctagaatgtaacaaaattaagaaattccatgattttatggcatctaaataygagaaaacattcaagaaatcataaatagtgatatccttgtttattaaattttgtcttttagaatgattttccaaagacagatactttaattggaagcaaaagacaggacctgtgaaagtattttatctgaaatattttggtatttcaacacacaaaaaatagaaa

SEQ ID NO: 132263 - DNA, 647 bp, Homo sapiens
aaaacatcttttattctctcagccttttctctccctctatctctttccctaagaatagtacttgagggagaaagggatggctcctgtgacctcaaaggagggtgggaaaatgacaggtcatcagatccttgtggtatcactgtgttattccaggctcttctggtcactgatagcttctgaggcagatgtctgtaacacttgaagtgctgagttcggcctccctcttgacatgatctgaaccatggggcacttcctgcttcacttggcctccccttgctccccattgccttatagccttccaagcctgacactccttccatccagatcattggcttgtcctctactstcagcctttaagtctacctatttccctcttttgtggctcttaaaggagcatccacactatataggagtatcctgaggtggaagatggggggattggaagatgaggtggaaactgggggattgtagggacgcttcatcatcataggtgaaagtgtgactttttcagtgctactgaaaaagtgaggtctcaaagtgaggtctgtgggccggggccatctagaaaactctgttgtgctccacgacgagctaagtacaaaattgaaatgtgtttcatacttttgtaggaacttgacgaagtattt

SEQ ID NO: 132264 - DNA, 647 bp, Homo sapiens
aaaacatcttttattctctcagccttttctctccctctatctctttccctaagaatagtacttgagggagaaagggatggctcctgtgacctcaaaggagggtgggaaaatgacaggtcatcagatccttgtggtatcactgtgttattccaggctcttctggtcactgatagcttctgaggcagatgtctgtaacacttgaagtgctgagttcggcctccctcttgacatgatctgaaccatggggcacttcctgcttcacttggcctccccttgctccccattgccttatagccttccaagcctgacactccttccatccagatcattggcttgtcctctactgtcagcctttaagtctacctatttccctcttttgtggctcttaaaggagcatccacactatataggagtatcctgaggtggaagatggggggaytggaagatgaggtggaaactgggggattgtagggacgcttcatcatcataggtgaaagtgtgactttttcagtgctactgaaaaagtgaggtctcaaagtgaggtctgtgggccggggccatctagaaaactctgttgtgctccacgacgagctaagtacaaaattgaaatgtgtttcatacttttgtaggaacttgacgaagtattt

SEQ ID NO: 132265 - DNA, 458 bp, Homo sapiens
caggatggggaattatttagtcagattcccaagggaatgggttccattttatttcattaatctgaagtaagcaattcatattttcacacaacctcatttccattcattcagctgtattgaagccagttcctgtggttggcttcttcgttgttcaggagagatttcatcaactaattgaaaggaacacagctctgtcctcagcagagctaaatacatacaacaatttcaccaccaaygccagacacattatcagtgtcctgatctttggcctttgatactttcaagagatgtcccaggggaaatctttagctggaatgttaatctgttgcttctctgaccttctacacatgtaccacattattattacaacccacatgcttctcttttcacgctgtcattttgacaatagaaccatcgggcaattcatcgttagactagatggctggaacaaagtgcat

SEQ ID NO: 132266 - DNA, 623 bp, Homo sapiens
cttgcctgctgccagcaccaagccatgatagcttctgcagttttttgccttctaaatctgtgcaagttcctctcattggtaaaatccaatctggaaatctgctggctgggattatagaaaatagtgttgccagtctttatattttgcaatacagaggagaacataaaaggaacaaaatggtacctgcttatcaatagataatctgaatataccttgactgtttataaaattgagtaatgtgttctttcccatataaatattctccaatgaccactggcactaagtgttactatagggcctgattagttttctcccatcctcctactttctttttaaaaaatcttgacaccaaagaacctttttctttatttttgaagttcaattatatcatgcagcgtctgggcatttatcgtgaattgtattattcctaatgatccctgaacctgtaagaggagtgtattttcccaaccgggtatcawgcttggccacgtgacttgcattgaccaatagaatgtaaggagaaatgacacggtagcagttctcaaccagaagcttttatagtcattgtgtttttgctaacttgcttactcttttctttgtcaagagaattgcatatcctagat

SEQ ID NO: 132267 - DNA, 448 bp, Homo sapiens
ggtagggcttccttgtctaaatttagacttcagctcaaatctcttgcttctttttttttttttttttttttttgyttagaccctggccaaacatgaggttcaaattgatgtatgttttgtttttccattgttattcctggagcactcccagaactagaggcaaaatataaaataaaaatgaagacacaagaatatctattgtttgcataccacacgctttcagttagttagaaaaatgtgtttatttcattacatttcctttaaagagctatgatttaagttaaagacaaatgagttttttaaactgagaacttatgttcaaaatgttttggcacttgtcatgaaactagagtgtgaccaagttctttgtcactaagcctcttcttccaattgctttccactggcagtgccctgtctctgtctcctctctttgttgagaatggaattc

SEQ ID NO: 132268 - DNA, 559 bp, Homo sapiens
tataagctcatttaaacacacctattaatatgttcctgtcctgtacgcatctgttccagtctagtcaaccggacaaaaggaagaagccgaaactgattcttttgcatcccttttccctcctagtagtgcaacttgaagaggcaacaagaaagaactaggctctctattactaagtctcctgtctcagtttccctggacaggattttctacctaaaaagaggcatgttataagtcttcaggaattagtgggatgaaatgctttggattccttgggagatggagtgctctataaacagaaagtccagaygatcctgagtcccatgcactaactgtggaaggtggctttatatcatcccaagtgcatattagatggcacaagataaatcatttagatgttttattctaacatataatttaatatagataactacaaagaaaacaataagtagagcacattctccctatccagataacttctgctacttttaaaaataatatgtgtaaggccacaaatttttcattctaattttgactaacccattttcagatctatattgta

SEQ ID NO: 132269 - DNA, 577 bp, Homo sapiens
ggacttttaaactttatgcctttccaaatatttttgtttttaccacaatgcatttttttaacaagttgggctgatcacaaggtcaagagaccgagaccatcctggccaacatggtgaaaccctgtctctactgaaaatacaaaaattagctgggcgtggtggtgcatgcctayagtcccagctactcaggaggctgaggcaggagaatcgcttgaacccgggaggcaggggttgccgtgagctgagatcacaccactgccctccagcctggtgacagagcgagactccgcgaaaaaaaaaaaaaaaaaagtacttataggcagggtgcagtggctcacacctgtaatcccagcactttgggaggccgaggtggtaggatcttttgagcccaagagttcaagaccagcctaggcaactgagcaaaaccttgtctctacaaaacattttttaaaaaaccagctgggcctgtagtcctagctactcagaaggctgaggtggaaggatcacttaagcccagggactaaggatgcggtgagccgtgatcatgccactgcactccagcttgggtgccagagta

SEQ ID NO: 132270 - DNA, 577 bp, Homo sapiens
ggacttttaaactttatgcctttccaaatatttttgtttttaccacaatgcatttttttaacaagttgggctgatcacaaggtcaagagaccgagaccatcctggccaacatggtgaaaccctgtctctactgaaaatacaaaaattagctgggcgtggtggtgcatgcctacagtcccagctactcaggaggctgaggcaggagaatcgcttgaacccgggaggcaggggttgccgtgagctgagatcacaccactgccctccagcctggtgacagagcgagactccgcgaaaaaaaaaaaaaaaaaagtacttataggcagggtgcagtggctcacacctgtaatcccagcactttgggaggccgaggtggtaggatcttttgagcccaagagttcaagaccagcctaggcaactgagcaaaaccytgtctctacaaaacattttttaaaaaaccagctgggcctgtagtcctagctactcagaaggctgaggtggaaggatcacttaagcccagggactaaggatgcggtgagccgtgatcatgccactgcactccagcttgggtgccagagta

SEQ ID NO: 132271 - DNA, 495 bp, Homo sapiens
ttcatactcacaatgtggcctatatcatatatattttttattataattgtggccagcctttaaaatagctacttcacatttaagttcagttttccagctcttctctaaacatcacaagaactgtgatgcccatcttgctttcacakctggcacagtcagctggatctgaggagcgacctgcctctgggaaagagcatgcgccatgggttcactgtggtccccaccactccctagtttgtcctcagtcctgagccttgcctccctgtctatgtgtatttgtttacatgtgctgtgtcgagcctggacgtttgagctcgtgatgtctggtgggcgttcattgccacacccctgcaccccgggactgctctgatgggcctcctgccttgagtctcacatggctacagcatcatccttcataacgccatcagattccagcatgatcccagccacctcaccagaactcaaacttgagctcatccttggcactgccacttg

SEQ ID NO: 132272 - DNA, 561 bp, Homo sapiens
cttagtgctttctccaccaaaacctacccacccatatcacatgtcatcagtgacaatgagttcatatattaattcttgctcacatactaatggcaacagaagtgtaaaaatgttatcccttctaggaacaaatgctcatgttttagctagagscaaacacaacaaaatgtccaaaatgttcacaacaaaaattctcccacaggagaatttttatcaccaaggaagttcaaatagaaagaaatttgggacaagcaagacattttctgacaataatatcgaaaaatgtctatgatgattttgtatacttcataaagtacttttacactcagtatctcaggggcaataattattattccactacaccattaaaggaatcgaggcttagaaagtttcatttggttgctcaaggtcacgtggctaataagaggcagattcagaactatttaatccagatcttctgacgccaagtacagaatccatcacccaagtatttataaatcatctaccatgtaccacacattttgtgggctttggagatacagaagtaaataaaacagaaaa

SEQ ID NO: 132273 - DNA, 561 bp, Homo sapiens
cttagtgctttctccaccaaaacctacccacccatatcacatgtcatcagtgacaatgagttcatatattaattcttgctcacatactaatggcaacagaagtgtaaaaatgttatcccttctaggaacaaatgctcatgttttagctagaggcaaacacaacaaaatgtccaaaatgttcacaacaaaaattctcccacaggagaatttttatcaccaaggaagtycaaatagaaagaaatttgggacaagcaagacattttctgacaataatatcgaaaaatgtctatgatgattttgtatacttcataaagtacttttacactcagtatctcaggggcaataattattattccactacaccattaaaggaatcgaggcttagaaagtttcatttggttgctcaaggtcacgtggctaataagaggcagattcagaactatttaatccagatcttctgacgccaagtacagaatccatcacccaagtatttataaatcatctaccatgtaccacacattttgtgggctttggagatacagaagtaaataaaacagaaaa

SEQ ID NO: 132274 - DNA, 424 bp, Homo sapiens
aatttaaatgagaatgaaataacattacaacctcatcagaattgctgaaacgtaaaaactacttattcttttttttttttttttggcaaaggtgtaaagcaaaggaaaccctcatgtgcttacttgtaggaacatatgtgtttatacccactttggaaaccagtttgstatgtctaccaaagttgaacatacaaatgaccctatgagctggttgtttcatacatagagaggtatagcaaaaagaaatgcatagcctgtaaccccagcattttgggaggccaaggcagcagaatcatttgagcccaggagtttatgacaagcctgggcaataaagggatacctccgtctctataaaaaatttaaaaattaactgagtggggatgcacatacctgtagtcccagttactcagaaagctgaggtggg

SEQ ID NO: 132275 - DNA, 568 bp, Homo sapiens
cctttgctgttgctcttccttctacccatatacagtactctttatgcacatgtaactgtaccaaaacctctctcctggctgattcctccttatctttcagtgtcaaagctggcacttcctcttggaagctttctttgaggtccccaaaggatggggttaggtgtccctgcctgctgaactcatccttaacatagcatgtagactgaattgctattgcctacatagttgtcagtctctcccattgtcaaagtgacaatcccaaagtggttggggatgggctggtttaccactgtatctccattgcctaacatagtgtcttcacaartgccagatactgggtgtcgaatggtgggtggatggatagatggaccaaagaataggtgtgtatgtgtatagacttcccagggatgagacaggaatacatcaaacataccactcaattttatttgcttatatttcaatagattctaatgtagtaatgcctctttatctggcatcaggggaagacagtgtgctacatgagaggattttccagaaactgaagctgacccatgtcccaagactattt

SEQ ID NO: 132276 - DNA, 537 bp, Homo sapiens
ggcattaagcattatagagatcaaacaatcatttcacagatgggaaagctgaggcctaggagagcgtgggatttacttaaagtcatacaagtactctgtaatgataaaaccaaaaagagaatcgtccaggtcttctgacagctagcctagtactttgtctacagaaccatgttatctcttctgattgaatattggttgtgacagattcaaagtagatataatacctcacaactactaattatatttatcaacatttaaccaatgactgccttctcccacaggccttgggcctatagggtctgtctgtctgtttctgtctctctctctttcttttacttcctctctctctgctgttgcttargtttggctgaagtgtagaaatggtctgacagtcaggcactgagcaactctgggagccagggttcactcaagtaaatccaggccaggctacctccaagccatgctcttttagggagtagtgcgtaaatgcaccctcttagccttagaggagaaagcactctgtttaaggtaagagat

SEQ ID NO: 132277 - DNA, 506 bp, Homo sapiens
tggaaacgcattctgagaataattctcttaatgcaccatgtcactctacagctcactaagctttcatggctcctgagtccaaactcaatgcaaaaggacctcagactttggagtcaggcagatctggatctgaaacctaggttctgtcctctccagctgtttgactttggacaaactctctctgcctcaatttcagcacttatataatggggataaaattctctatgccttcattttctcatgtctataatgaggataaaaacaatgtctatcttataaaggttttgtgaaactgaatgagatgactatgaagtgttcagtgcctrcaacatagtaaaaactcaaaattctttctctgttttagatgttatcatcatcatcatcctcctcatcataatcttcatccttctctgggctttctaattcttcctcctttgaatttaacatcacattttccaaatgttttctatactttttcttctctatgtctttactcatgttattcc

SEQ ID NO: 132278 - DNA, 628 bp, Homo sapiens
cttggtactaggacagctattactcagaggcctcagcaatagaacacagacagagtttgaatgttatggattctttaaggcactaactgttctactttatgaagtacaaatttggccttccctcttggaaagagaaacccagcaaaacttgttccwttgagatggaagttctctgggccggagtcagggatttgaattgcagttttcaattcaggcaggataagataatagttaagagcagagataaaaccagactggctagggttcaaatcccagctctagtatttactggctttgtgaccttgaccaggtttttaatctttctacatctcaagttcttgatctgtaaaatgggcatcatcatcataataatagccacttttagagggctcttgtgagaattaaaagaatcaatatatgtgaagcacttagaacagagtctgccccacagtaagtggtacaagcaagcatttgcctatttttgctattcctagtgcctactaggaccagcttcttgagtccctttcttccttgggcataagtgaatccgtctgtaaaatgtgaatgaaggcctctgttctataaaactgataaaaaggcaagataacatagtcgatggaaaaagtgc

SEQ ID NO: 132279 - DNA, 628 bp, Homo sapiens
cttggtactaggacagctattactcagaggcctcagcaatagaacacagacagagtttgaatgttatggattctttaaggcactaactgttctactttatgaagtacaaatttggccttccctcttggaaagagaaacccagcaaaacttgttccattgagatggaagttctctgggccggagtcagggatttgaattgcagttttcaattcaggcaggataagataatagttaagagcagagataaaaccagactggctagggttcaaatcccagctctagtatttactggctttgtgaccttgaccaggtttttaatctttctacatctcaagttcttgatctgtaaaatgggcatcatcatcataataatagccacttttagagggctcttgtgagaattaaaagaatcaatatatgtgaagcacttagaacagagtctgccccacagtaagtggtacaagcaagcatttgcctatttttgctattcctagtgcctactaggaccagcttcttgagtcmctttcttccttgggcataagtgaatccgtctgtaaaatgtgaatgaaggcctctgttctataaaactgataaaaaggcaagataacatagtcgatggaaaaagtgc

SEQ ID NO: 132280 - DNA, 628 bp, Homo sapiens
cttggtactaggacagctattactcagaggcctcagcaatagaacacagacagagtttgaatgttatggattctttaaggcactaactgttctactttatgaagtacaaatttggccttccctcttggaaagagaaacccagcaaaacttgttccattgagatggaagttctctgggccggagtcagggatttgaattgcagttttcaattcaggcaggataagataatagttaagagcagagataaaaccagactggctagggttcaaatcccagctctagtatttactggctttgtgaccttgaccaggtttttaatctttctacatctcaagttcttgatctgtaaaatgggcatcatcatcataataatagccacttttagagggctcttgtgagaattaaaagaatcaatatatgtgaagcacttagaacagagtctgccccacagtaagtggtacaagcaagcatttgcctatttttgctattcctagtgcctactaggaccagcttcttgagtccctttcttccttgggcataagtgaatccrtctgtaaaatgtgaatgaaggcctctgttctataaaactgataaaaaggcaagataacatagtcgatggaaaaagtgc

SEQ ID NO: 132281 - DNA, 527 bp, Homo sapiens
cactggttcttaatgattaaccataatcaaacatcaaatggaaaagttcacaggagtcaggtccctgtcctgatactgccaccaggctactatcagatctgggcaaarcattttccctctgtgggtcttgacttcctatctgtacagtgagagtttggaccagatgatcctaactttcccttccagcttctaagttgggcaatccattaatgtctgagtacctaactgattcggggaggaaggcacaaaattcagaaaaagaaagaagagcatctatatatggttcatgcaaggaattgaaggtgaagtcatccacatacccatctgaccattcatccaccatccatctattaactcatctgtttttccaatcagcgaatattgtcatgacagatttcatgcaacataaaattcccacctaaagaagaatctccacatacaaggaaggtttatgaaagaaagaacgcagtgagcatttcagatgggtccttggggttacagtaacaccactctacccttggaatcag

SEQ ID NO: 132282 - DNA, 586 bp, Homo sapiens
attttgaggaactccaaaattattttccaaagtggctgcatcacccatcaaattttaatcaataacaaatttttccatgtgacagtttgaatgatggcaagtgtctcttaatgataactatttctacagtttattatcctgttctgtctttgcaattttccatgtttccattaagaagtggtttctagctttttatctataacraattttcaggttttaacttacttaactgaacatataactggcttcagttttaaccatgttattttgtgttgattatctctatgagcaatagtaattgaacaaaggattaatatttgttactcatttctggagtaaagtctgttagtagaaataaggcacagggtgcatgaatctaaaaatgtgaccaaagcatcctgcctaatccataaattctgtccttctttctgacctggtatccagccttagatagatccctgccttactcttctttccccttcttcaactaacttgtcttggcaatatttcggagtgaggacttgaaataagaagggcttagagaagtaggttaatttaggcccagctgttaatggctaaatatatt

SEQ ID NO: 132283 - DNA, 586 bp, Homo sapiens
attttgaggaactccaaaattattttccaaagtggctgcatcacccatcaaattttaatcaataacaaatttttccatgtgacagtttgaatgatggcaagtgtctcttaatgataactatttctacagtttattatcctgttctgtctttgcaattttccatgtttccattaagaagtggtttctagctttttatctataacgaattttcaggttttaacttacttaactgaacatataactggcttcagttttaaccatgttattttgtgttgattatctctatgagcaatagtaattgaacaaaggattaatatttgttactcatttctggagtaaagtctgttagtagaaataaggcacagggtgcatgaatctaaaaatgtgaccaaagcatcctgcctaatccakaaattctgtccttctttctgacctggtatccagccttagatagatccctgccttactcttctttccccttcttcaactaacttgtcttggcaatatttcggagtgaggacttgaaataagaagggcttagagaagtaggttaatttaggcccagctgttaatggctaaatatatt

SEQ ID NO: 132284 - DNA, 471 bp, Homo sapiens
aaacccctaataaattacaacaataataacaatggcaataacttccacaattgactgattgctacattctagacactatgataaacacttaaatgcatgtcaattaaaccttcccaatagcccttgaggttgatattatcctcagatgaagaaacagagcttcagaaaggttgacttttccacagtcacaaaacatataaagtgatggagctgcacttctcctcagggccatggaatcccaaaatttgtgttcttattaccgtgccatgtgagtgctggrcagggagagttggggaaagagtcaggaaagagagggggttgtcctggacaagacagcttgagtttaaatcttgtctacagtagcagcaatagatctgacattccaacccaggctctcaaattcccattggacatctgtctcaccatttactccatggtttaggtactcatattggcaatcgcagtggcact

SEQ ID NO: 132285 - DNA, 445 bp, Homo sapiens
tgtgccaagttctaaagcctaaacctcctaaggcttgcagcttcctccttcactctgttgggatgccatttggagaccaccatgtgggcaagcccgcctagatactgaaggataagaggtcgtgtcgaggagaactgaggtccccagaagtggggcaccaatgagcaggcacatgagtgaggccatctgaccattcagctgaatgcagccctatcagtgatcacagactaggccagcagaggagtcacccagtcaacctatagaattgtagacaataataaactattgtagatttaagacacaagttttgakgcaatgtgttacagagcaatagataacttatacacaagtgctaattcccttttcttttccaaattctcttaaactcttcattgtattctgcaaataagtcttcccatgtcaccacggtggcacatatattgct

SEQ ID NO: 132286 - DNA, 414 bp, Homo sapiens
gatgccatagttggatgaggccttgcgtgtattaraggtggatgagcgcacgtggaagtgacgtggattttggggccagagaatgggctgcggtatattgctatgttgccgctccctgtgaatggtgtctccttgtgcctatgccctttgcagttctccacactgattctgggcttgggcatgtggcttgccttagccaaaaggaagggcgtcagcaaacattatgtaagcagaggcttggtaattgcttgcatttcttctcaccacccaggattcattacttcctgttcacagactcatgttttcaaaggttgtctcctccaaacaaactgcagtttttaaaaagttaaattcatgcccccatttaatgagttaaccactgacaaataactgagaccaaagaagataatcact

SEQ ID NO: 132287 - DNA, 420 bp, Homo sapiens
ttggatgaggccttgcgtgtattagaggtggatgagcgcacgtggaartgacgtggattttggggccagagaatgggctgcggtatattgctatgttgccgctccctgtgaatggtgtctccttgtgcctatgccctttgcagttctccacactgattctgggcttgggcatgtggcttgccttagccaaaaggaagggcgtcagcaaacattatgtaagcagaggcttggtaattgcttgcatttcttctcaccacccaggattcattacttcctgttcacagactcatgttttcaaaggttgtctcctccaaacaaactgcagtttttaaaaagttaaattcatgcccccatttaatgagttaaccactgacaaataactgagaccaaagaagataatcactgtgtttgactgaattc

SEQ ID NO: 132288 - DNA, 420 bp, Homo sapiens
ttggatgaggccttgcgtgtattagaggtggatgagcgcacgtggaagtgacgtggattttggggccagagaatgggctgcrgtatattgctatgttgccgctccctgtgaatggtgtctccttgtgcctatgccctttgcagttctccacactgattctgggcttgggcatgtggcttgccttagccaaaaggaagggcgtcagcaaacattatgtaagcagaggcttggtaattgcttgcatttcttctcaccacccaggattcattacttcctgttcacagactcatgttttcaaaggttgtctcctccaaacaaactgcagtttttaaaaagttaaattcatgcccccatttaatgagttaaccactgacaaataactgagaccaaagaagataatcactgtgtttgactgaattc

SEQ ID NO: 132289 - DNA, 449 bp, Homo sapiens
tatattccctgccttagtcctgtagtcagccatttctccaatgacccctggttcctttaattgaatggcattagaaaccgaggtctggggctgggcatggtggctcatgcctgtaatcccagcactttgggaggccgagcctggtgggtcacctgaggtcaggggttcaagaccagcctggccaacttggcgaaaccttttctccaytaaaaatagaaaaattagctaggcaaggtggtccatgtctgtaatcccagctactcaggaggctgaggcaggagaatcacttgaaaccgagaggcagaggttgcagtgagtcgatatcatgccactacactccagcctgggcggctggaaaaaaaaaagaaaaagaaaagaaaccaggacctgggccgttgttatgctcattgctgctgggatgtcattgcttttaggccctctcagctgac

SEQ ID NO: 132290 - DNA, 563 bp, Homo sapiens
gaaaaatgaataaatgtatttaaaaagaaaacctcatatcagcaccttaaataaggatgcaacattactggctataaatataagatagctataaaaataaatatattgggaggctgaggtgggcaaatcacgaggtcaggagtttgagaccagcctggccaacatggtgaatccccgtctgtactaaaaatacaaaaattagctgggcgtggtggtgggcgcctgtaatcccagctactcgggaggctgaggcaggagaatcatttgaacctcggaggcaggggttgcagtgagccaagatcgcgtcattgcactccagcyggggcgacagggcgactaaaataagtaaataagtaagtacataaataaataaataaataaataaataaataaataaataaagtggaaacaagatcaagccaggggattctagacaaatgggggccacgaagtccctatatatgagattctagctaataggagttgaaaacttgtgaaatagctctcaggatcttcatttaatggcttccactgagtgaaatggaataaagtgtgtaggagag

SEQ ID NO: 132291 - DNA, 617 bp, Homo sapiens
tctaagggctctagtcctcaccattccagtttctcagaaaatgttaattctaagagcaaaaaagacaagatgtgcagagaagtatacattagaggaagaaggagagttgtgatgatgcttgagtccttggatccagtagactttgccatgttaggagtttaaaggcccagtacacccccacttttgattaagccacattgagctgagcttccatcatttcaacccccaaaatactgatatactgtcctatatcagtaacatagatatccccatttcacagatgagacaattgaaggtcagagggtcttggttccttgctcaagatcccagagcctctcagcgtcagtgttaggaactagaaattagaaataacttgtgctgtttagaagtcaagccatatctctttctcactatgcagtacctcctttcttcaggggcyttttctatttgtggacttttcccttatcaataaaagaatgtttcctttcccattgactttctcaagggttatttattttatttctgtggtgaactctatgctttctgcctcctaggaaatcctcatgtcctcaggcatttgacaacatggtttgtttgtactccatttcttctgtttg

SEQ ID NO: 132292 - DNA, 566 bp, Homo sapiens
aggatgagaaattgcttccctaaaagccaatgaagccagaccatggagtcttttttttctttgaggccatttctgtaggaagtcaaagtgtccattagaaaagtatttaaaaacctagaaatcatgaaataacaggcattattaggaagccctgtaaatcagtttgaacttttcattaaaattgccatttttttttcctgaaatcctatgaggtagcctcataggtgatcccaaagttttgccaagmcagtccttgtagctataaggcaaaatctgctctctctcatcattttacagtgaaactgcgctggacaaatggctgctgacattgtggacaggctcttctggtctattaatttaccagggcatgtactcacataaaggcctgcccatctaggggatgggatgctacctaattggtgtcctacataggtctgaatagtgcctcgggggctactctgggatcaatcttgtttactccaacctcatggctaaatagactgccagcagggctccagaggctgaggggatatccctcagatgagttgcaaaaaggtgccccaagc

SEQ ID NO: 132293 - DNA, 352 bp, Homo sapiens
taaagagtaaaggaaaaagttaaaggaaggaggagttcaggcaagtgtcagcctaaatgtcctttgagtcccctaggaatagagaaaagggaggcaaagagcaggaagacaaatccagattctgaattagatctccagggacacaaaaggaaactcctctggccagaawgttggccgcagacccagggactacagtcacaaccttagaggcacactgaggtggccgggtagagaattcattttcaggtttctgtaaggagcttccgcgtggatgcagaattgtcttcttggttcttcggcccctgaatggatcctcctcatttccaggctcccactcatccagatgccccaa

SEQ ID NO: 132294 - DNA, 558 bp, Homo sapiens
ctgcccaagagacatcccactagaaagggccaactccccttccttttcccaagcctctctcctgacccctcagcctcaacccatctggcctcactcttgctgctttcctcctgggtcctggcacctgggttctccctgacacttgatttcccctctgatcctgaccttggccattctcctccagtataactcacactcagccccagttcgtgctgctttaggtcagactgtagaacttccccattcagtacaaacccttatgttctggggtctgttgctctaagctggcagggctcccacctttccagactcagtgtctttccttattgcccaggtgtcacaaacccccsccacagaccccaaccctcaggcaactgcagaaatgccacacagatgtcctttctcacctatccaatgactacgtccttcaaaagaaagcagagaatttcactttgagagtgttatgggctgaataggggtccccacctccacaaattcacatgttaaagtcctagccccagtacctcagaaggtaaatgtatttggagactgggtttt

SEQ ID NO: 132295 - DNA, 600 bp, Homo sapiens
gttcaacctactcaaggggaataaaactaatttaatgtgttcaagactaaagtaattaaaataagattagactagaataaaatatatagattagagaatagagtacattctgggtagtatggatcaatactattttatgaaaccccccttcaatttatatctagctatatccatatctatatacatgtgcatagatacgggcataccttggagatattgtggatttgattccagaccaccacaatattgaaataaagtgaatcacacaaagctttkggtttcttgatgcatgtaaaagttgtgtttacaatatattgtagtctattaagtgtgcaatagcattatatctaaaaggtacatattttagtcaaaaagtatgtattgctaaaaacattgtatagcatgcaatgctgtttgataactttttacccaccactagaacttctttcataattggagtcagtcctctcaaaccccgcagctgctttgtcaactaagtttacgtgatattctaaatgatcatctgagccttcagtgagtcatcatcttttcgttggtggagtagggcctctgtgttgatggttgcttactgattagggt

SEQ ID NO: 132296 - DNA, 441 bp, Homo sapiens
cttttgaaccaattactatttctaggggccagagtcagccccacctgaaccacaggcacacagagaggaaagggaaagcagaatgtagwgatcagagcagcgggcggggtgggggagactggatatagggcagacaggacaataactgctccattgcagaccctggctgcatgaatcggcactgattcatgcaaacagcatccaaaccagcctgaaacttctcattattgccatggctgttttcaccctccatgcctttgatcaatgctgttccttttacctgaaattaccctttttaagcaaccacagttacctaccccaaatacatgtacttgccccaaagctacagatccttcaagggccatcacaaacaccgcattcctctgaaagccattcttgactttgccagttagaagtactccctctcttctcactcccttt

SEQ ID NO: 132297 - DNA, 405 bp, Homo sapiens
ttcctccttcactctgttgggatgccatttggagaccaccatgtgggcaagcccgcctagatactgaaggataagaggtcgtgtcgaggagaactgaggtccccagaagtggggcaccaatgagcaggcacatgagtgaggccatctgaccattcagctgaatgyagccctatcagtgatcacagactaggccagcagaggagtcacccagtcaacctatagaattgtagacaataataaactattgtagatttaagacacaagttttgaggcaatgtgttacagagcaatagataacttatacacaagtgctaattcccttttcttttccaaattctcttaaactcttcattgtattctgcaaataagtcttcccatgtcaccacggtggcacatatattgcta

SEQ ID NO: 132298 - DNA, 532 bp, Homo sapiens
aatctgtttggggattcaatttcttcctggttcagacttgggagggtgtatgtgtctaggaatttatccacttctagattttctagtttatgtgcatagaggtatttataatattccctaatggttgtatttctgtggggtcagtggtgatatctcccttatcatttctgattgtctctatttatctcttctcttcttctktatgtgtctagcttgcagtctgttttattaattttttcaaaaaactaattttttgaaaactagttttatctaggatgtaactaacttgcttttgctttttatgggctcataggcagaagggactttctttgactcagatgagactttgggcttggacttttgggttaaagctggattcactgattttcttgaaggatttttcatatctttgtctgcttcagttcagctcttttgttggttatttcttgtattctgctagctttggggtttgtttgcttttctagttcttttagctgtgatgttaggttgttaacttgagatctttctagct

SEQ ID NO: 132299 - DNA, 532 bp, Homo sapiens
aatctgtttggggattcaatttcttcctggttcagacttgggagggtgtatgtgtctaggaatttatccacttctagattttctagtttatgtgcatagaggtatttataatattccctaatggttgtatttctgtggggtcagtggtgatatctcccttatcatttctgattgtctctatttatctcttctcttcttctttatgtgtctagcttgcagtctgttttattaattttttcaaaaamctaattttttgaaaactagttttatctaggatgtaactaacttgcttttgctttttatgggctcataggcagaagggactttctttgactcagatgagactttgggcttggacttttgggttaaagctggattcactgattttcttgaaggatttttcatatctttgtctgcttcagttcagctcttttgttggttatttcttgtattctgctagctttggggtttgtttgcttttctagttcttttagctgtgatgttaggttgttaacttgagatctttctagct

SEQ ID NO: 132300 - DNA, 524 bp, Homo sapiens
agatctgggaaactctgagctaccaaaatcagacgtcctcgattccaacatgggaagtgcctgccagtaggaaggcttggagttttctaacacgaaatgtttggctagtggggtattgccctctgttgggaagaagggctgccaaatggcaaggagtaaagatcagccctcaaaaattcacttcattatctttttaaaagtggcattggagctctgtccaagagaaaggatatgctctaggtaagacgaatgaggtgggagctgagttgctagagggaatcgwgatagaaaagagaaaatgatcgctcattgctccatggaaagcacaaatagttcttagactagccaagtttctttttgactaggccaggtgactggctctctgcagcagaaggggagctttctgccaagggaaggagacagggctttgcccagccgagcacttgccgcaagaagggtacactttgtctcggcagccacttcccatgtggctctcaagtcaggccagaaccagagtcagaaat

SEQ ID NO: 132301 - DNA, 638 bp, Homo sapiens
caatgtagcaattatgatcaggactgcttaggaggataattggaccaggccaaacaggtgtgagtaattgcctgccactccagagcatgggttctgaaggtatgagtgctaacacagaactcttcaatgatttgcagggctgccaaatgactgtcatcatggctaaccaaggcctgataaatctcccttaatccccagatttctatgtaataatatttccatggaaaagaagattcagtttcagggatcagtgcctgggagagttctctttgtcttttctagttttataaaatgattatggcaagagataattggtggtaatgttgaggccatgagaacactgtaaggagttgcatgtaacraatgttttaataaaataatacaaaactgatcacgtctacattctacattgttctttctggatcctctgatcttgggagatagatttattcagccatttattgttgttacttattagtattctcacaggtattggaatcacatcctgcccatgtgggcgtaacactctggattggagtaccttttctttgctatcaacattgggttgaagttgatattggtttttcctttagtggagccaaaaacacttttcttcactgttcttgcatctgttacta

SEQ ID NO: 132302 - DNA, 482 bp, Homo sapiens
ttaaatagaaggaaatatactggatcatgcaactgaaaaagctagggacatatagatcagattgcccagaagctcaaagaacaccatctgctgcctggtgtgttgctcccttcttaagtttatcccctcgtattgagtaacaaaatggccagcaacccctccaaaatgactattggttctgaaagccccagaggaaggagaacatctctttctcaataattctaattaaagtgctgaggctgagtcccacgtgttagcacatgttcattctaatgagatggccaggtgggaagggcttcccrgcaaaactcaggtcataaacggacttaaaggatggtgaatgagggggttttattgagtggtggagggactctcactgggatggatggggagctggataggagatggaatgggaggatgatcttttcctggagtttagctgtccagtggctgatctctccaactgtccccagttgaactcc

SEQ ID NO: 132303 - DNA, 573 bp, Homo sapiens
gattatggggattacaaatcaagacgagatctgggtggggacatagagccaaaccctatgagaacacaaaacagaggtgttcagtgaaagaaaatatgttttcagtttgttaaggtactggaaaggctttatgaagaattcataaaggtggcatttgagttgggccttgaaggatgcaatgtcatttatgatctaaatataaataagtccacttctaaagaacatcacaattggctgaatttccatgaatggaaatacaaaatgcaataattstctggtgctatctgtacttataggccaaaagttcttggtaaaagaggaaacagtcctacattatttactaccatgtgttacagtagtgaaaaatgtatgagttgcaaaaatttgatggttaggatttctcattactgaagttaaattggtttccaaactagatcctatcagacagagtggtcagtttgcatttttcctccacacagtgttgcccaggcaactatcgcttctgatggaagacaccatctgagcggcacttccaaaggcattttctgcagactatttgtacttcaaaatgct

SEQ ID NO: 132304 - DNA, 570 bp, Homo sapiens
tctagatacaaatttttaataaaatttgttatattctcagagagagaaaaaatgatgattatgagagaataagaagtaaaaaaataatgaagaggaactgctagttgtggcttcaacatataaaaagagtggaagtcatcacttctgtacacataataagaaaaagcttgacaagctataaatcaaccacttttcttgtacccattagagatctaaggttacagggcaaacatccctccaaaatttggagaggtgaatatataacagagtcatagatgagataatatttacctggagcagaagccactgatatcataaacaggcaggaacatrtatatgataattttgacaaatttccagaggtcaagtgtatactaactagcctgactgtgagaaattccagggtgccacagtcttagagaaaccttaacactttttggattctatttgcgggatcaacaccagattgtcaaggtggaaatcctacaaagatccccttatggctctggcagaaggagggaaggattatcattgtaaaatgtacattgagtattttgaactacaaaggct

SEQ ID NO: 132305 - DNA, 477 bp, Homo sapiens
accagtggttttcaactagaggcaattctgacacctatggcataggtaacaacatgtctaatattttcttgtcacactgaagaaggagggtgttactactggcatctagtaggtagagtccaggaatgctgctacacatccggtagtgcacaggaaagctacctccaacccccaaataaagtttatttagcccataatgtcaaaaatgctgaatttgagaaattctggtctagatttatattctggatgtctcctgtattcttcaacttttgtttatatgatataatttcacatcttttattacattaattattctccccttaccagcttttagttttgtgrtgctacttaaactgcactacaatctttctgacacactggttattcagaagtaactagttgaccaaaagatttggaggagaaataagacaggaaatataataaacatacactcctcccctttgtatttcaattgtg

SEQ ID NO: 132306 - DNA, 478 bp, Homo sapiens
tgatttcagtatgtagttttcctttatctaatctctcataagcttggtccccacacttataaactaataatcactaaattttcttctagcttcttagatttctttccttctgctttctttcacttaatattattgtaaacagccatacttcatgttaaattataatttggaaatgctcaaaatcatgattctcargcaaatgtatatgtgtgtgcacgtgcacatacaagttaaaaaataaatcttaggataaattttctaggttggatacaaaactagctagtgtcccacagggttatatgacataatttttaaagggtccttttagcaagttacttttttaggggtgatatgacttggctttttctccccacccaactatcaccttgaattttaatctgcatgatccccatttgtcaagggggaaccaggtgtaggtaattgaatcttggagacagctttccccatgctgttctca

SEQ ID NO: 132307 - DNA, 478 bp, Homo sapiens
tgatttcagtatgtagttttcctttatctaatctctcataagcttggtccccacacttataaactaataatcactaaattttcttctagcttcttagatttctttccttctgctttctttcacttaatattattgtaaacagccatacttcatgttaaattataatttggaaatgctcaaaatcatgattctcaggcaaatgtatatgtgtgtgcacgtgcacatacaagttaaaaaataaatcttargataaattttctaggttggatacaaaactagctagtgtcccacagggttatatgacataatttttaaagggtccttttagcaagttacttttttaggggtgatatgacttggctttttctccccacccaactatcaccttgaattttaatctgcatgatccccatttgtcaagggggaaccaggtgtaggtaattgaatcttggagacagctttccccatgctgttctca

SEQ ID NO: 132308 - DNA, 478 bp, Homo sapiens
tgatttcagtatgtagttttcctttatctaatctctcataagcttggtccccacacttataaactaataatcactaaattttcttctagcttcttagatttctttccttctgctttctttcacttaatattattgtaaacagccatacttcatgttaaattataatttggaaatgctcaaaatcatgattctcaggcaaatgtatatgtgtgtgcacgtgcacatacaagttaaaaaataaatcttaggataaattttctaggttggatacaaaactagctagtgtcccacagggttatatgacataatttttaaagggtccttttagcaagttacttttttaggggtgatatgacttggctttttstccccacccaactatcaccttgaattttaatctgcatgatccccatttgtcaagggggaaccaggtgtaggtaattgaatcttggagacagctttccccatgctgttctca

SEQ ID NO: 132309 - DNA, 547 bp, Homo sapiens
atatttcacctgacaataaaaaaatcattgtrtgttattcttcttctgtccctggagaatatgaacgttaatgataacagcattgtgtctacctaaatgaaaacaaaaacctaattgtaataatccagtacatacaagtgtgccataatgaaaaataaagtaaaatatttattcagatgtcatgtcttctttcaattatttgaggtaacatttctaagaggactttcacctcctcttaagtttatgattctttttgactttgtagaaagtgacagaataaaaaatatttcttatcaatagtaacattgaatatgtctgatatatttgatctttcacaggtgtgtcatattttttgaaaagaaaaagtgatcacaaaattctttttgatgtaaccacagaagcgaaacgttttcataaatggtaaaaccctcatacaattttgaaaacaatgaaaattgcctattattaaaattgaaatctttttgctacttgatacataatttattttattgtgtggcaaaattatttgcaattcaaattataccat

SEQ ID NO: 132310 - DNA, 294 bp, Homo sapiens
tggctattttcagttttccaggtgaaaattttcttctctggtggtagagctgcttttgactggactggacataaagcctcatgcatcttaactatattgaccatctgtagttttgttttttgagatggggtagaatgagtgaatctttagcagccatgacccctaccttctattctttcmcttaagagatctgagacattaagaacataatttagttcctctcttctttagtttgcacatcggcaaaatgttgatggtcatttcagggggcttttattagccctctaataattt

SEQ ID NO: 132311 - DNA, 491 bp, Homo sapiens
tagatcttttgcacttgcttctgcttggtgtattctccccaacagttctttgcatgactaccacctcccattgctcaggctgaacagcatcctcccttcagaraggccttccctgaccaccttagctaaagtagcctctcccctttttactgacattatcttctttaaagtgcttattggtacctggattatctcatttattcatttgtttacatgtttaatctctgcccactagaatgtaagcttcttgatgacaaggcctctgtctgtcttgctcactattgtccacattacctggcactaaataggcaatcgagaaatatttgttgatagactgccttgcttcagacaacacggctagaaagggtaagagcttgggcttaatttcaacaccctggcctctccatgtgtctacctcctgaacttcagtgacttctatctctacttcttgagccatgtacttctacctctcataactgttttgcccagta

SEQ ID NO: 132312 - DNA, 614 bp, Homo sapiens
gactcagtcagcatataacttcctacaacttaatatagtttgtaattgtacatttatgtttgtgattatcagctttagtctcactcccctactaaccaataagctccatattgacaaggwttatgtctgttttgaactcaccattgtatctctgaagactagtggagtgcctggcatatagagactactcactgcataagtgctgttggtgcaggaattaatgcaatgggaagtatctcacctaccatatttggaaagcaacatgatattctggcaaaagagtcattgtcttaatttctttaatatccaattaagataactctggaagttagtaaaacctgaaaggatggcactatatgtattagagataagggacctgtggtaaagagaaataaaaacatataccatatagtttccctgctggaagagatggaccacagattcattcccatatgctttctaccactccatacatgggaaagaaattgatgtgatatgggcctgaagatgtcaagtacatttttaaaattatcttcggggaagttttatttatagatattcaaatagacaagacaatgcattactaagaagagagaaaaagcaagaaggtaaac

SEQ ID NO: 132313 - DNA, 596 bp, Homo sapiens
gttgagatgaaggattgctgttttgaaagagttaatgcactctgcctacatgggacttgactgtctcacccctgaatccccactgggaaagaaggtgactatcccagtggcttttccatctagtatgatggatgagaggcccatgaaggaagcagccaccaaaggttctgcagtggctcctgttggctttctgatcacatcgcagctggctgtcaagtccgtggcccagcgatttatggygtccctgggcaggaggagcctgtgcaaggctactgctgcagcagcccagggacaggtgccaagttcttgctctccttgaagctggaactcctcctcctgtgagctgggaagtctccctgcatcaaagtagaaagaatgcactctggtgtacccccctggcccagctttcttaccatgactccacagctgctggtgctatgactctgtggacaacccaggttggtacaaggcagatatctttgccagattcagctttccaaaccactgacagtaagaaaaaagccatttactatctctatcttcacacttcagacatgtgtctggctactgcagaatctcaggaagagctgaacaaa

SEQ ID NO: 132314 - DNA, 603 bp, Homo sapiens
aagcttgaacttgatcaaagttcaagaagaaaaattatcatgggcttccttgccaaaacacagctctatctcatgcaaactgtagtaattttttctcttcctacagcaatccaaacacgacaacaaatgccttacaagcagaaatccccatggaactaatgggagcagaggcctcccacacaccccaagcgggaatagacacatttcacttccaaactctgactaacaggatctcctgtggctctttctgccacctgaaaatgttcacttttcatcacaaatccattgtatcaaagaatctttgctaaaggcttctgactcaaccaggctgggtgaatcctgattyatctgcgtagttgccgatacagaaaggaactcgatgtggcacagaaagaggatgatttgctaagagtttgcaaatcaaaagtaagatgtatggaattccgcttctttcaggaagactttttggattggatcagatgaaatccaatggcttcctcaaccctatgctgacaagtatgttgttttatggttgctcccttctagggctgacattggagctaacatcaacacgttatatattgaaacactttatttgataat

SEQ ID NO: 132315 - DNA, 602 bp, Homo sapiens
tcaattaatcctatttctattcagatgcaaacaaggctgttggcacagaggtggcaggtagaccaggtggtgtgcttggatcataaattaaagcctgaaaacattctataacctcttcccatggctttttttttttcttttttggagacagagtcttactcttgcccaggctgcaatgcagtggtgcgatctcrgctcactgcaacctccacctctcgggttcaagcgatcctcttgcctcagcatcctgagtagctgggactacacaccaccactcccagttaattttttgtatttttagtagagatggggttttgccatgttggccaggctgatctcaaactcctgaactcaggtgatctacctgccttggcctcccaaagtgctgggattacagacatgagccactgcacctggccctcatggcctcgattagagtataagagacagaggcactggggggaagcatctaaactgtcttaaacccaaaaacaggtttgaaagttcaggttttcggcctgtaagccattctactgtctccttgccctttctttgttccagggacatgatgggaatctatctacatcctggtctaggaggag

SEQ ID NO: 132316 - DNA, 515 bp, Homo sapiens
ctgtcctttcttcattgtgtgttcttggcccctgtgtcaaatattaattgactataaatgagtcaatttayttctgtcctctctattctgttccattggtctatatctttatttttatggtactgctatgccgttttgacataatcttttatgtatagaaaatgctaatgactccacccaaaaagctgttagaactaataaatgaattcaataatgttttgcatggcacaaaatcaacatacggcatcagtagcatttttatatattaacaacaaactttccaaaaaagaaatcaagaaaacaatctcatatgcaattttatgcctatataaataaattttatataaatgaagaaaacttcagaataaattcaaccaaagaagtaaaagattcatgtactcactgatgaaagaaatggaagaaaacaacaaataattgggaagatattccatgtttatgaatatgcataaataatatttttgaaacgttcatactacccaaagtaatgtacagat

SEQ ID NO: 132317 - DNA, 563 bp, Homo sapiens
tgtgtactcacttgtcaagttttcaggaaaacatgctctatagatggctttaatatgagcttcatgtgaaggtcaggtggccatgaaattcagggactatatttatgattttacctgaggaaatgcaccargtaaaacacaaatgctcaatactgcttttctgagtagacgttgctaattaaaatgccttatgaaatcatttaaaatgaacccagaaaaaggtgacagaaacattttatttgatgataaagagtggacaagtgaaacatttccataattcttttgctcaataactgatctactaaaatgcctctgtttttgctttttattgatacctcggttgatgtttcagaatattgggggatatttggatcacttatttgcacttatttggggcacttatttgctgtcccattcccagttttatggtctctatcccagagtaataatttgtataatgacatgattgagggaaaaacatttcattgaaaaaactggaaaaagaattttatcaagttttctacatagggctacgttgtagaagcctcagttatgaagatgat

SEQ ID NO: 132318 - DNA, 563 bp, Homo sapiens
tgtgtactcacttgtcaagttttcaggaaaacatgctctatagatggctttaatatgagcttcatgtgaaggtcaggtggccatgaaattcagggactatatttatgattttacctgaggaaatgcaccaagtaaaacacaaatgctcaatactgcttttctgagtagacgttgctaattaaaatgccttatgaaatcatttaaaatgaacccagmaaaaggtgacagaaacattttatttgatgataaagagtggacaagtgaaacatttccataattcttttgctcaataactgatctactaaaatgcctctgtttttgctttttattgatacctcggttgatgtttcagaatattgggggatatttggatcacttatttgcacttatttggggcacttatttgctgtcccattcccagttttatggtctctatcccagagtaataatttgtataatgacatgattgagggaaaaacatttcattgaaaaaactggaaaaagaattttatcaagttttctacatagggctacgttgtagaagcctcagttatgaagatgat

SEQ ID NO: 132319 - DNA, 519 bp, Homo sapiens
ttttatttttttatatatgaggaaaaataattttgttataattctatctaatagcatacacatgcacacaaacacctacacagacacacatacaggcagcattgtgttgcagttaaggttgacgactagttgcagttaagtaaagcaaacgtggactctaccagtttctacctctgtaggtttgttaccttgggaaactagcctaacattctaagctcgaggtttcttttctttttctttcttttttttttttctttgaagacggagtctcactctgttgcctaggctggagtgcagtggcgcgatcttggctcactgcaacctctgcctcccaggttcaagcgattctctggcctcagcctcccaagtagctaggattataggcatgtgccaccaygcacggctaatttttttgtatttttcgtagagatggggtttcatcatgttggtcaggctggtctcgaatttctgacctcaaatgatacactcacctacctccaaaagtgccaggattacaag

SEQ ID NO: 132320 - DNA, 594 bp, Homo sapiens
cagtggtccttaggcactgtcattgctattgatctgaaaggaccgtcaaagaaaaaattatattttgtgtagtttcaggattaagaatgtgtagttgatataacatataagaatatcatttcccaagaattaatagtaatctttctcaaccagaatattgtatcaaatgcaacaccctagaccatgaccacatagaaaatttatggtatgatagttatcatattgctgctagacaaacatgaatgtcttcttctactattacaactctctttatgttcctctctacagtcttccagtattgaggggaaagtatactatggataaaataacaaagctgctgtatgtacactggctgccactcagagtaagatgcagcctgtgtctctattcatatacagaacgtaactccaatgtcaggctgctagaagagataagaatccctgaaagtaaaacaatgtgttttgaagataagaacttgcttcctgaattgcacccaagtctgagagtttcactctatatttgygaatttagaattcatgtggaggcctctgtaagaacctccatacctctggtctctccttcccctaatctggt

SEQ ID NO: 132321 - DNA, 542 bp, Homo sapiens
gagacctcacatagaccatacacctgctttaagcatcttgctcctaggttgtcctaaattgcaccatttctagatattgaacatcaagcaagtatttaatttgcattaactaccaagcagctcattttataaaagggcaaaaattttaagtgcccagaatgaagttttcagaaaataaagttttcattctgcataatagttgggcaatttacttatttatgataatccagattgccttagaaatattttttcttccccaagtacacacaaaccttagacagtgcacagtgacctagacaggcacaatcaaggtcatgatgttgcaacaagtagaaacctaggatgccaaggcattcacctcacacactctcattgattcatttattcacccagctgtcatttattgaacatttgcaatgagytcggagttttttgctttttgtccatgtgcctcatgttcaattacacatccacaaagggaattgcctgcatgattgacagtagcctcttttccttcctatatttgcttaagagttttaatt

SEQ ID NO: 132322 - DNA, 542 bp, Homo sapiens
gagacctcacatagaccatacacctgctttaagcatcttgctcctaggttgtcctaaattgcaccatttctagatattgaacatcaagcaagtatttaatttgcattaactaccaagcagctcattttataaaagggcaaaaattttaagtgcccagaatgaagttttcagaaaataaagttttcattctgcataatagttgggcaatttacttatttatgataatccagattgccttagaaatattttttcttccccaagtacacacaaaccttagacagtgcacagtgacctagacaggcacaatcaaggtcatgatgttgcaacaagtagaaacctaggatgccaaggcattcacctcacacactctcattgattcatttattcacccagctgtcatttattgaacatttgcaatgagctcggagttttttgctttttgtccatgtgcctcatgttcaattrcacatccacaaagggaattgcctgcatgattgacagtagcctcttttccttcctatatttgcttaagagttttaatt

SEQ ID NO: 132323 - DNA, 629 bp, Homo sapiens
aagaggagatgggctttattctgaagggggtgagtggatattcagggtacactttacaaaaggaaaaatgtctctgccacttggaggcaggtcaggagctaagtagggtgacactgtccatggatctccatgctgaagatgaaataataaagtatactgaagaggttacgagcatgagctttggagtgggcaaactcagattcaaatccagtctctgctatcttttagytttgcagtttataacaaaagacaaacacttctgagctgtttcctcatctactaaataatgatagatatttcatacatctggtgtgcagatcagataaaatgatatttatatacacagtacagtatgggatatgcagtataatttcaacacatataacccattaatattatgaaccagttacattatctggttgcatgttcagcatcctgttcatttccattttgatgtaattacacctttagtgaagtgctcttgaaacagtcaatctaatctcagccttgctgtgcaaatgaagaaaatatctggtttttgtccatacttggtccaatacattgaaggcaaagaaggaaagaagggggaagaacagggagaagaacctctaagtggcagaggaaagcaa

SEQ ID NO: 132324 - DNA, 310 bp, Homo sapiens
gaaatgcttcagggaaggtgtgtgggtgtatttacgcctctggcttatgatgttcacatcaggtttcacaaagtgctctccagcattcactaaaaatgataagaaatctgcaaatgtggcattttcacctaattaggatcaagtatgaaatgaagcccagccaagaagggagcttttgcaggatgacggcattgctggyacctttcctgagcctaaaagtaaactaagtaaacacgtttgcattcccaccaccctcccgctacaaaatttgcccacagagagatttataatatgttgtgaagtcctaaac

SEQ ID NO: 132325 - DNA, 530 bp, Homo sapiens
tcttttcttttcttttctttttgagatggagtctttctctgttgcccaggctggagtgcattggtgcgatctcggattactgcaacctttgccttccaggttcaagcgattcaccagccttagccttcctgagtagctgcgattacaggggcctgccaccacgcctacttaatttttgtatttattagtagagacggggttttgccatgttggccaggctggtctcaaactcctgacctcaggtgatccacccacctcatcctcccaaagtgctgggattacaggcgtgagccatcrcgcctggccttgttcttacttttctattaaaaatagggtaccattcatgcatttttgcgtggattctttcagttaacagttaattgagcacttaccttgtgctaaaagtataatggtgagtgttatttctgctctcaggtacccagattgactggcatttggatagaaaaaaaatttttagttaaattagatctctgctgattttgttcagataatgtcaaatgattggttct

SEQ ID NO: 132326 - DNA, 584 bp, Homo sapiens
  misc_feature (1)...(584): n = A,T,C or G
ctgcagctgatggtgcctgccctctttaggaggaagaatgtgctcttttacttatgcctagtccccatcacccccttttgttgtatacatggttaggcttactttttttcttaactccctaatcgcaataggtgtttgacatgatagctcctatttggggctgtttctaaaatgtggctgtaagtctgggaaacttactcatttacatcttccctaaaacccaggataacttagcatccactgaggtatgtctcccccttttcttatactgttctgccctcaaagggaagcattcatgttcctgtcttcccctatcagtattatttagataatattwacaataataaaagcagttagtatttactcaatgctgactctgttccagacactgttctaggcatgctacagaattcattcattcatttaaaattcacatcaattccagcntgggnnntattgtaattcccttttttacagataaagcaattaaaggaccagttatgaaagcaggggcagagtcaggctgtgtaccgagcagtgtgacttcagagcctgcattcctctctgctatgctgcatgcacta

SEQ ID NO: 132327 - DNA, 584 bp, Homo sapiens
  misc_feature (1)...(584): n = A,T,C or G
ctgcagctgatggtgcctgccctctttaggaggaagaatgtgctcttttacttatgcctagtccccatcacccccttttgttgtatacatggttaggcttactttttttcttaactccctaatcgcaataggtgtttgacatgatagctcctatttggggctgtttctaaaatgtggctgtaagtctgggaaacttactcatttacatcttccctaaaacccaggataacttagcatccactgaggtatgtctcccccttttcttatactgttctgccctcaaagggaagcattcatgttcctgtcttcccctatcagtattatttagataatatttacaataataaaagcagttagtatttactcaatgctkactctgttccagacactgttctaggcatgctacagaattcattcattcatttaaaattcacatcaattccagcntgggnnntattgtaattcccttttttacagataaagcaattaaaggaccagttatgaaagcaggggcagagtcaggctgtgtaccgagcagtgtgacttcagagcctgcattcctctctgctatgctgcatgcacta

SEQ ID NO: 132328 - DNA, 598 bp, Homo sapiens
tgagttatttaaggtccattaagcatgtttgtcatgactcagaaagacatgttcatgaaaagctcattaactgtgtttattgtattgacttcttcctgtagaaacagctctgttataaatcaaaaagtctcaaacaacagatttagatgtttattcctgagctttttggaatagattaattccaggacagcttcttctatattttaacttccaaatatatttgagagtttttacatgagttaaataaggcacttactaaatatagataattgcatcaaaatccttagctttgggatgcttatgtttattgatccctccctttgttttatttattgttatatttkttttattattataataataattaatattttttatttggggttggtagcatgtgccaggtacttatcaaagggcttgagatataagtatgacagaacagatgtggctcctgatctcataacacacctggaaagatgcaagtttgttgtatatctatattttgttgcatagaattccatgtatatgtagggagtaattatttattttgcatatttatgtgttgggaagctatttacatccatcttgatatctctgc

SEQ ID NO: 132329 - DNA, 583 bp, Homo sapiens
cagcagagcaaatgagcagctgcatagggtggtgctgcctctccaggcattcccttctcaacaaccagtctcagtaactggttagttcattctttttctcagtagcctgttcactggaggttctaatgccaggcagacctggtttggaaccccagctttgctaccatgggcaaggtgctcagcycctaagcccccatttctgtacctgcaaatggagttaacaatacctcaatggttgctatgaggattaggtgagatagaggtctgtgaagtcctctgaataatggttggtacagaatgagggcttaataaataagagatggatggatggctggatggacggatggatggatggaaggatgatgaatggatggatggatgatgaatggatggattgatggatggatggaaaatggatgatgaatggatgcctggatgaatggatggatggatggatgatggcttgatagatgattaatggatggatggatggatattgatggatgtatgatgaatggatggatggatggataatgaatggattgatggatggatgggtggatggatggatgatggattgatg

SEQ ID NO: 132330 - DNA, 593 bp, Homo sapiens
tagcatcaacatcaacaaaaacgatgtcaacacaaaaaccccatccaaaggtcaccaaagtcaaagaccaaatgtagataatacacaaagatgaggaaaaacaagcacaaaaaggctgaaaattctaaaaccagaacacctcttctcctccaaaggatcacaactcatcaccagcaaggggacaaaacaggacagagaatgaatttgacaaattgactgaagtaggcttcagaaggcgggtaataacaaactcctcagagctaaagaagcatgttttaacccaaagcaaggaagctaagaaccttgaaaaaagattacaggaattgctaagtagaataattcgtttagagaagaacataaatgatctgaaggagctgaaaaactcagcacaagaacttcgtgaagcatacacaagtaccaatagcagaatcaatcaagtggaagaaaagatatcrgagactaaagatcaacttaatgaaatgaatcatgaagagaagagaaaaaagaatgaaaaagaatgaacaagccctccaagaaatatgggactatgtgaaaagaccaaacctacttttgattggtgtactgaaagtgac

SEQ ID NO: 132331 - DNA, 427 bp, Homo sapiens
ctactcactccaaatactataaaagatgggaagaactgacgtgatgctaagcagaaccrgaaagtaaaacagaaaggatatgggacagaagttatgccttccctcaggtacagagcctgagtaatccaggcagtcctgattgggagtgcccatggaagtagcagaagcctcttggaggaaggaaacctatttcagacctcaggatcattcacaaataattttccgatgacaatgataagcaagcagtcagaagttataagacatacaagtaacaatacagtgagaacagaaaccacagatggcagcaatcacctttttcaatccaaattaagccactctcagttgagatccactgagagagagagaaagagagagagaaagagagagtgtgcaagccagtgcacacaaattgatcaaatattactgc

SEQ ID NO: 132332 - DNA, 549 bp, Homo sapiens
tgttttgtggcagacacataaaattgattttactgttcattttatgtatctttgacatttttatactaaacatagttcaaaataataacttagtaataatatactcaygagttttacttaagccacgaaaggcaaatatgtggtgtgccatcacttctgccttccttgcccacggaacacactgttaaatgatgaaggcacattttccaataagcaagactaactttctcagtcaaaccctctctctggacaaacagaaagaacataaattgatgctagcatgaaaaaataaaacatctctgcaattgtccctgtgatatagtctagatgtttgttttctccaaatttcatgttgagatttaatccccagcgctggaggtgaggcctgtaggaggtgtttggactatgaaagcacatcctccatgatttggtgccatctttgcagttatgaatgagctctcactcttagttcacatgagaactggttgttagaaagagtatgacacaacccaccccctttctctcttgccatgtgatgcctcctctcct

SEQ ID NO: 132333 - DNA, 588 bp, Homo sapiens
ttttaatggcagaatttatcaagtggaagaagtagtgagttttaaggcaggtttttgtttgaaaatacatggtcaaakaaggcaaaataaaaaaaaaaaacaatgaaacatgcctacaagatctaggaaatagcctcaaatgggcaaatctaagagttattggccttaaagaggaggtagaaaaagatagtggtagaaagtttattgaaagggataacaacagggaactccccacacctagagaaatatatcaatatccaagtacaagaagattataaaacaccaagcagatttaacttaaagaagactacctcaaggcatttaataatcatgctcccaaaagtcaaggataaagaattctgaaagcagcaagagaaacaaataacaaacaatggagctccaatatgtcgggcagcagacttttctgtggaaatccttcaggccaggagagagtggcatgacatatttaaaatgctgaaggaaaataacttttaccctaaaagggtatatctgtgaaaatatccttcaaacatgaagaagaaatgaagatactcccagaaaaacaaaagctgagggatttcattaatg

SEQ ID NO: 132334 - DNA, 588 bp, Homo sapiens
ttttaatggcagaatttatcaagtggaagaagtagtgagttttaaggcaggtttttgtttgaaaatacatggtcaaagaaggcaaaataaaaaaaaaaaacaatgaaacatgcctacaagatctaggaaatagcctcaaatgggcaaatctaagagttattggccttaaagaggaggtagaaaaagatagtggtagaaagtttattgaaagggataacaacagggaactccccacacctagagaaatatatcaatatccaagtacaagaagattataaaacaccaagcagatttaacttaaagaagactacytcaaggcatttaataatcatgctcccaaaagtcaaggataaagaattctgaaagcagcaagagaaacaaataacaaacaatggagctccaatatgtcgggcagcagacttttctgtggaaatccttcaggccaggagagagtggcatgacatatttaaaatgctgaaggaaaataacttttaccctaaaagggtatatctgtgaaaatatccttcaaacatgaagaagaaatgaagatactcccagaaaaacaaaagctgagggatttcattaatg

SEQ ID NO: 132335 - DNA, 588 bp, Homo sapiens
ttttaatggcagaatttatcaagtggaagaagtagtgagttttaaggcaggtttttgtttgaaaatacatggtcaaagaaggcaaaataaaaaaaaaaaacaatgaaacatgcctacaagatctaggaaatagcctcaaatgggcaaatctaagagttattggccttaaagaggaggtagaaaaagatagtggtagaaagtttattgaaagggataacaacagggaactccccacacctagagaaatatatcaatatccaagtacaagaagattataaaacaccaagcagatttaacttaaagaagactacctcaaggcatttaataatcatgctcccaaaagtcaaggataaagaattctgaaagcagcaagagaaacaaataacaaacaatggagctccaatatgtcgggcagcagacttttctgtggaaatccttcaggccaggagagagtggcatgacayatttaaaatgctgaaggaaaataacttttaccctaaaagggtatatctgtgaaaatatccttcaaacatgaagaagaaatgaagatactcccagaaaaacaaaagctgagggatttcattaatg

SEQ ID NO: 132336 - DNA, 571 bp, Homo sapiens
aaaaagcctggtgaacttgagttcccattatgtactactgcttttgcaccacttttccaattataatcttccagatgtcccccactttatctgtcgtgaatgctcatctagcacagatcctaraaaaacctattggtatcgctatttacttccattttacagaaggtaaatgagtctcaggttaaatcacatttccaaggtttcagattaaacaacttaatttgtaatatgtgtgtgttgggaatggggtaagtgagcacagccttatggtttacttgagaatttactgaacaactcagcctgtgtggcaaatcccctcagattctctatggcatttaacattctgaagtaactgctgtgctttgaggttgctcttttggaggctgacctccttcataggaacagatttatcacgttactagtacccactttacacaacagtcaggaagaacacctttttaagtttataactttttcttttgaattttctattgcaagaatagaccaaagaacttcatatgtactctttgccttaaggccacattcaaattttgccatctgtgccatttgc

SEQ ID NO: 132337 - DNA, 413 bp, Homo sapiens
aataatatggaatgtgctctttataacaactcattaaggaaggartttttgttaccctagttttgccagtgagtaagttaagactcagaggatttaagtaatctcccaaggatcatgatacaattaatggaggaaactgctgagttcagtcaaggaaaagaagcaaagtgaaggttccaataaggagaggtaattgtaggtttcattgtttgccatgaatgtttgaaaagaatgaatcctaagaaaaagccattgtgtttcaagatgaggtatctttattgcagtttgaaaatgtgcttttatcaaagaggagtgggaatagggtcaaagggtggtcaaaatggtggtaaaagataggatcacagatttttttttaaatttttgatagtcaaaggaggaatggaagaagctga

SEQ ID NO: 132338 - DNA, 395 bp, Homo sapiens
atatggtgtgaggcagggaattcaactgtattgttttgtatgtaaatacacagytatcccagcactgttcgttgaaaatacttatctttcctcatttaattgttttataaccttcattgaaaatcaattgaccacaaatttaaggatttatttctgaactttcaattttattctattggtctatatgtctatctttgtgccaataccacactctcttgattattgtagattttcatagtaagctttgaagtcaagaagtatgggttcttaaaatttgctcattttcagactgtttggctattctgggtactatcctcaggaagtattaaacgtattgtcaaagaataatgcatagatatgttctgcacagtagttctaagggtaaaatacaaaaa

SEQ ID NO: 132339 - DNA, 395 bp, Homo sapiens
atatggtgtgaggcagggaattcaactgtattgttttgtatgtaaatacacagctatcccagcactgttcgttgaaaatacttatctttcctcatttaattgttttataaccttcattgaaaatcaattgaccacaaatttaaggatttatttctgaactttcaattttattctattggtctatatgtctatctttgtgccaataccacactctcttgattattgtagattttcatagtaagctttgaagtcaagaagtatgggttcttaaamtttgctcattttcagactgtttggctattctgggtactatcctcaggaagtattaaacgtattgtcaaagaataatgcatagatatgttctgcacagtagttctaagggtaaaatacaaaaa

SEQ ID NO: 132340 - DNA, 574 bp, Homo sapiens
atcaaataataacagctaacatttatagagtgtttgctgcctgccaagcactgttctatctggattacaaacattacctcacaagaaacaaatgagggtgaggatgtggagaaattggaacctttgtacactgttgatgagaatgtaaaacagtgtaactgctatggaagagtatggtggctcctcaaaaaattaaaaatagaattatcctatgattcaacaatcccacttctgcatctatatgccaaaagatgaaaacaagatctcaataagatatttacactctcatgtttattccagcattattcataataaccaaaatgtggaagtaacccaaatgcccattgatggatgaayagaaaatgtgatatatacaggcaatggaatattattcagccttaaaaccttgaggacttcatactaagtgaaataagtcagtcacaaaaagacaaagtgtgtgaagctacttctatgaggtatttaatgtagtcaaactcagaaacaggatgtaaaactgtggtttccagagctagggtaggagaaaatggagagctcttgttcaatggacatagag

SEQ ID NO: 132341 - DNA, 571 bp, Homo sapiens
tcaaataataacagctaacatttatagagtgtttgctgcctgccaagcactgttctatctggattacaaacattacctcacaagaaacaaatgagggtgaggatgtggagaaattggaacctttgtacactgttgatgagaatgtaaaacagtgtaactgctatggaagagtatggtggctcctcaaaaaattaaaaatagaattatcctatgattcaacaatcccacttctgcatctatatgccaaaagatgaaaacaagatctcaataagatatttacactctcatgtttattccagcattattcataataaccaaaatgtggaagtaacccaaatgcccattgatggatgaatagaaaatgtgatatatacaggcaatggaatattattcagccttaaaaccttgaggacttcatactaagtgaaataagtcagtcacaaaaagacraagtgtgtgaagctacttctatgaggtatttaatgtagtcaaactcagaaacaggatgtaaaactgtggtttccagagctagggtaggagaaaatggagagctcttgttcaatggacatag

SEQ ID NO: 132342 - DNA, 606 bp, Homo sapiens
caggaaggaaaagaggtctctgaacaatcaaataataacagctaacatttatagagtgtttgctgcctgccaagcactgttctatctggattacaaacattacctcacaagaaacaaatgagggtgaggatgtggagaaattggaacctttgtacactgttgatgagaatgtaaaacagtgtaactgctatggaagagtatggtggctcctcaaaaaattaaaaatagaattatcctatgattcaacaatcccacttctgcatctatatgccaaaagatgaaaacaagatctcaataagatatttacactctcatgtttattccagcattattcataataaccaaaatgtggaagtaacccaaatgcccattgatggatgaatagaaaatgtgatatatacaggcaatggaatattattcagccttaaaaccttgaggacttcatactaagtgaaataagtcagtcacaaaaagacaaagtgtrtgaagctacttctatgaggtatttaatgtagtcaaactcagaaacaggatgtaaaactgtggtttccagagctagggtaggagaaaatggagagctcttgttcaatggacatagagtatcag

SEQ ID NO: 132343 - DNA, 603 bp, Homo sapiens
aggaaggaaaagaggtctctgaacaatcaaataataacagctaacatttatagagtgtttgctgcctgccaagcactgttctatctggattacaaacattacctcacaagaaacaaatgagggtgaggatgtggagaaattggaacctttgtacactgttgatgagaatgtaaaacagtgtaactgctatggaagagtatggtggctcctcaaaaaattaaaaatagaattatcctatgattcaacaatcccacttctgcatctatatgccaaaagatgaaaacaagatctcaataagatatttacactctcatgtttattccagcattattcataataaccaaaatgtggaagtaacccaaatgcccattgatggatgaatagaaaatgtgatatatacaggcaatggaatattattcagccttaaaaccttgaggacttcatactaagtgaaataagtcagtcacaaaaagacaaagtgtgtgaagctacttctatgaggtatttaawgtagtcaaactcagaaacaggatgtaaaactgtggtttccagagctagggtaggagaaaatggagagctcttgttcaatggacatagagtatc

SEQ ID NO: 132344 - DNA, 521 bp, Homo sapiens
aacatgtcaacactgttttgaaatgatttgccaatgaaaaattctagaccagcaaccaacaacatccttcccaaaggtgtgttatatatrgtacatgctctatgtgctaaacaccaaattcattgataacagctaagaaccaggaaacaaaccatcgttaattatggcatctcttgaaaaatctaaagatctggactcactgggcttaaatgactgcatgataacaactggttgagtaacaactgtttccctttcatggagcagttactctccagttctcagttcctaccactctctatagttgtacactcatcatctgtcctcatctgaattacctgccaatgactactggcatttgagtttctaatccatggtctatgtgtatgcctcctcaccagtgtgagaactcatgtaaacaggtattatgtcttttcatctctctcctaatacctaagacattcctggcacaccagagcatgtcaatgcttctaaacatatctatattaaaatgctaccaaagc

SEQ ID NO: 132345 - DNA, 521 bp, Homo sapiens
aacatgtcaacactgttttgaaatgatttgccaatgaaaaattctagaccagcaaccaacaacatccttcccaaaggtgtgttatatatggtacatgctstatgtgctaaacaccaaattcattgataacagctaagaaccaggaaacaaaccatcgttaattatggcatctcttgaaaaatctaaagatctggactcactgggcttaaatgactgcatgataacaactggttgagtaacaactgtttccctttcatggagcagttactctccagttctcagttcctaccactctctatagttgtacactcatcatctgtcctcatctgaattacctgccaatgactactggcatttgagtttctaatccatggtctatgtgtatgcctcctcaccagtgtgagaactcatgtaaacaggtattatgtcttttcatctctctcctaatacctaagacattcctggcacaccagagcatgtcaatgcttctaaacatatctatattaaaatgctaccaaagc

SEQ ID NO: 132346 - DNA, 651 bp, Homo sapiens
aagaaagtaatgtatatctttaaaaacaatgaattatcacttatctattaaattgcaaaggttttgtaaagtctttkttgaaggttggtggaaagtggtttttcatacatagttgctgaaagtgttctgataataaactttctaaaaggtatttgaggaatatgtatcaaaagcattgaaagttatgcatcccattctccttataaaaccacaccttggtatatgtcccaaggaaataaagaatagacacaaagacttaaaagcaagaagagtcttcaggtaatagtgccccagaatgtgatagccatgatatccactaacagcagatttgtaaaatgaattacagtaaatacatataatggaatagccagtggccacttaaaatcatgaaagagtaatataaaataaacattagtatgatatattaaatttttaaatatattacattttaaattgataaagtggtatgtatgatatctcaattttataaacaactaaatgcttatatacacatgcaaatatatgatactctaaaatattcaaatactaccttgcaaaacatataaagaaaaaaatacagaaataggatttagttggtcttcaactttggttcactcattattccatcactgaataaacttactagtgcct

SEQ ID NO: 132347 - DNA, 651 bp, Homo sapiens
aagaaagtaatgtatatctttaaaaacaatgaattatcacttatctattaaattgcaaaggttttgtaaagtctttgttgaaggttggtggaaagtggtttttcatacatagttgctgaragtgttctgataataaactttctaaaaggtatttgaggaatatgtatcaaaagcattgaaagttatgcatcccattctccttataaaaccacaccttggtatatgtcccaaggaaataaagaatagacacaaagacttaaaagcaagaagagtcttcaggtaatagtgccccagaatgtgatagccatgatatccactaacagcagatttgtaaaatgaattacagtaaatacatataatggaatagccagtggccacttaaaatcatgaaagagtaatataaaataaacattagtatgatatattaaatttttaaatatattacattttaaattgataaagtggtatgtatgatatctcaattttataaacaactaaatgcttatatacacatgcaaatatatgatactctaaaatattcaaatactaccttgcaaaacatataaagaaaaaaatacagaaataggatttagttggtcttcaactttggttcactcattattccatcactgaataaacttactagtgcct

SEQ ID NO: 132348 - DNA, 440 bp, Homo sapiens
ttcggtattaagcaatacacttctaattcatggttcagagaagaaaatatctcgaataaaaataaaataaaaatatgacttatcaaaatttgtaggatctaaagcagtattccaggaatgcaaggttggtttaacattcaataattggtcagtgtaattaatcacattaatagaataaaaagagaaaaaatataatcatttcagtggatgtaattgttcagagcttcttaaaagaagcaactcactattttactagatgatttgtttcttctgaattcctctttaaggctacaggtggtgcttcttactttgaactgatcactttctaggtccccacccttacttcttgtttttcatacccttgtagagttttctccayataggaaacccatgcttgacatttgctcaccagagttacagagctctcagggaggagactc

SEQ ID NO: 132349 - DNA, 518 bp, Homo sapiens
gcttgacatttgctcaccagagttacagagctctcagggaggagactcagagttctaaccctcttgccctccttttttcccaggacgacaacatcatgaggtctctccagctgtttcaaaatgtcatgtaactggtgacactcagccattcagctctcagagacattgtactaaacaaccaccttaacaccctgatctgcccttgttctgattttacacaccaactcttgggacagaaacaccttttacactttggaagaattctctgctgaagactttctatggaacccagcatcatgtggctcagtctctgattgccaactcttcctctttcttcttcttgagagagacaagatgaaatttgagtttgttttggaagcatgctcatctcctcacactgctgccctatggaagktccctctgcttaagcttaaacagtagtgcacaaaatatgctgcttacgtgcccccagcccactgcctccaagtcaggcagaccttggtgaatctggaagcaag

SEQ ID NO: 132350 - DNA, 485 bp, Homo sapiens
cataccaaaatctgcagatactcaagtcccacagctagccctgagggactcgtgttttcagaaaatttggcctccatatatgcaggtttcacatcctataaatactgcattttctatcacttttggttgaaaacaatctgcrtgtaagtggacccaataagtttaaactcatgttgttggagggtcaactgtacttacgttgtgccaggcctgtgccaggcaatgacttcatcctccccagcccccaagccttccccagcaaacatccaatccaaatgcaaatactgtgaccaaatgcaaatgcaacttcgagacaagacccttcacaacactttgcttccaacaagattgccacttctaagaccctctgatatggaaagcctggagcccctgtggtgtgagtgggagtgcagagataaagaggatgacggggcctcctgctgagagattttaggctctagaggaccatcaagcggcttcagcct

SEQ ID NO: 132351 - DNA, 570 bp, Homo sapiens
ttacagagcataaagaccattctccacctattcctaaaactagctctgatgatatacaaacaccagaaggtgtcaggaagcagatgctatgaaaactattagtaaaaagcaatgaaaacaaacccacaaatctgagccaaattattcctcctgtaaaaggaatcatgccaaggacttgtgcaaagatggccatatgggtttcttagaggagctgaaataagcatgtccttccacatcaaaataaggctcaacctaactggcagacttcagctagccctgcagtctgctccattgccttactggggaccaacaaagctcagaacttgaagactggggggagcccragaggcagccagccccaccgggtaggatcctgaagacccatgatatgctacaggtcccagttctagaataaaacatagggaccaagactaagccaatcattacctcccatgcctctggccacagtgaaattttaggaataggcttaaaacctaaactcacgcaaatagcatggaatgttagggcttttactgagaacaatgaaagttgctcattgtcctgcctgac

SEQ ID NO: 132352 - DNA, 461 bp, Homo sapiens
gtggctgcataaattcatcaaaccatgaagatgaagaatacacaagcacatcaggtcttttccttaaagaagttaagctggggctaaaagagctccatgactgattgattgattgattttgagatggagtctcactctgtcacccaagctagagtgcagtggygcgatctcagctcactgcaacctccacctaccaggttcaagtgattctcctccctcagccttctgggtagctgggattacagaagcgtgccaccatgcccagctaattcttgaactgaggtcttgaactcctgacctcaagtgatccacccccgtcgacctcccaaagtgctgagattacgggtgtgagccaccgtgcccagccgagctccatgacttaaaaaaaataaaaataaaaaagttttctggtaagcccaagcaattaaaaaaaaaagttgaaaaaagggatactttgaaag

SEQ ID NO: 132353 - DNA, 479 bp, Homo sapiens
cctcaaggagtttgaactccatggtggctgcataaattcatcaaaccatgaagatgaagaatacacaagcacatcaggtcttttccttaaagaagttaagctggggctaaaagagctccatgactgattgattgattgattttgagatggagtctcactctgtcacccaagctagagtgcagtggtgcgatctcagctcactgcaacctccacctaccaggttcaagtgattctcctccctcagccttctgggtagctgggattacagaagcgtgccaccatgcccagctaattcttgaactgaggtcttgaactcctgacctcaagtgatccacccccgtcgacctcccaaagtgctgagattacrggtgtgagccaccgtgcccagccgagctccatgacttaaaaaaaataaaaataaaaaagttttctggtaagcccaagcaattaaaaaaaaaagttgaaaaaagggatacttt

SEQ ID NO: 132354 - DNA, 462 bp, Homo sapiens
tcagtttttatccaggatctagcacactaaggacatgcaaagaggtatgtacrtatttattgatatattgattaactggtgaaaaggaaaaaggcatatataaagagtttgaaaatcacagtaatgacaattgtgaacactttctccctgccatgttttctcctgtattcaattgctctgaggtatgtcatatatcagctgaatgtttctcacgttatgaagaattgtatgtttccgcactgaacatgttattcagacctgccatccctttcttcatttttaaaatccacttctcatttttcatttcctctatcaaaaacctttactcattcattgattcagtagttttttagtatcagtttcaaagttctgtgggtgttactggcaatgaatcagatacaaaccttgccctaaaggagcttataatataataagatggagaaggcatatccctagtgtaac

SEQ ID NO: 132355 - DNA, 462 bp, Homo sapiens
tcagtttttatccaggatctagcacactaaggacatgcaaagaggtatgtacatatttattgatatattgattaactggtgaaaaggaaaaaggcatatataaagagtttgaaaatcacagtaatgacaattgtgaacactttctccctgccatgttttctcctgtattcaattgctctgaggtatgtcatatatcagctgaatgtttctcacgttatgaagaattgtatgtttcygcactgaacatgttattcagacctgccatccctttcttcatttttaaaatccacttctcatttttcatttcctctatcaaaaacctttactcattcattgattcagtagttttttagtatcagtttcaaagttctgtgggtgttactggcaatgaatcagatacaaaccttgccctaaaggagcttataatataataagatggagaaggcatatccctagtgtaac

SEQ ID NO: 132356 - DNA, 462 bp, Homo sapiens
tcagtttttatccaggatctagcacactaaggacatgcaaagaggtatgtacatatttattgatatattgattaactggtgaaaaggaaaaaggcatatataaagagtttgaaaatcacagtaatgacaattgtgaacactttctccctgccatgttttctcctgtattcaattgctctgaggtatgtcatatatcagctgaatgtttctcacgttatgaagaattgtatgtttccgcactgaacatgttattcagacctgccatccctttcttcatttttaaaatccacttctcatttttcatttcctctatcaaaaacctttactcattcattgattcagtagttttttagtatcagtttcaaagttctgtgggygttactggcaatgaatcagatacaaaccttgccctaaaggagcttataatataataagatggagaaggcatatccctagtgtaac

SEQ ID NO: 132357 - DNA, 392 bp, Homo sapiens
ttttactgaaacacatcctcactcatttattcagatattatttttttgcttctttcccmcaacaatggcagagtaaaatagttgcagcagacatcatatgacccacaaagcccacattgcttaaaatatttagctggccttatacagaaaaaaatgtgcaggtctctagtgcagatagaagagagagaaaaatgctggaggaaaacccaaagttatgcaaaatgtcaaggaaggtaggtttgaccaagttatgaacaagacacacaaaatgtctatcagacaattctaatcaacagggctattccttaaaagggagaactcagcctcctaaagcaaaaaagatgggaaaaaaacagaatagccagagtttatcaaaggtaaatattgggcct

SEQ ID NO: 132358 - DNA, 389 bp, Homo sapiens
ttttactgaaacacatcctcactcatttattcagatattatttttttgcttctttcccacaacaatggcagagtaaaatagttgcagcagacatcatatgaccyacaaagcccacattgcttaaaatatttagctggccttatacagaaaaaaatgtgcaggtctctagtgcagatagaagagagagaaaaatgctggaggaaaacccaaagttatgcaaaatgtcaaggaaggtaggtttgaccaagttatgaacaagacacacaaaatgtctatcagacaattctaatcaacagggctattccttaaaagggagaactcagcctcctaaagcaaaaaagatgggaaaaaaacagaatagccagagtttatcaaaggtaaatattggg

SEQ ID NO: 132359 - DNA, 389 bp, Homo sapiens
ttttactgaaacacatcctcactcatttattcagatattatttttttgcttctttcccacaacaatggcagagtaaaatagttgcagcagacatcatatgacccacaargcccacattgcttaaaatatttagctggccttatacagaaaaaaatgtgcaggtctctagtgcagatagaagagagagaaaaatgctggaggaaaacccaaagttatgcaaaatgtcaaggaaggtaggtttgaccaagttatgaacaagacacacaaaatgtctatcagacaattctaatcaacagggctattccttaaaagggagaactcagcctcctaaagcaaaaaagatgggaaaaaaacagaatagccagagtttatcaaaggtaaatattggg

SEQ ID NO: 132360 - DNA, 542 bp, Homo sapiens
tagaaatatgaaacaagcaatcctgctcttaattactattctaatctataataatagaaactttgctgtagtttatagtttacttagagctttcatayccgtaatctactgggcctcactactactctgtggagaaggcaggcaggattggacagacgaacaacatgccaagtttcagagtggtgacgtggcctacttcacccagacagcaagtggctgaagtaatactgaaattctttcttttgaaatctaattttatctgttcttggatcatgttttattgcccataaatttattagctcaatgtagccttcatgatatgtttttcttctccagcaatttacattattgtgggcttaaaatgttaatctatttatacatctaaggactattttgtttcttacattttgacgttccttgatcatgtcttttgcagctgaattgtgatgattttaaaaaaggagaaagagatggggattttatctgtcctgattattatgaagctgtttgtggcacagatgggaaaacatatgacaacagat

SEQ ID NO: 132361 - DNA, 542 bp, Homo sapiens
tagaaatatgaaacaagcaatcctgctcttaattactattctaatctataataatagaaactttgctgtagtttatagtttacttagagctttcatatcygtaatctactgggcctcactactactctgtggagaaggcaggcaggattggacagacgaacaacatgccaagtttcagagtggtgacgtggcctacttcacccagacagcaagtggctgaagtaatactgaaattctttcttttgaaatctaattttatctgttcttggatcatgttttattgcccataaatttattagctcaatgtagccttcatgatatgtttttcttctccagcaatttacattattgtgggcttaaaatgttaatctatttatacatctaaggactattttgtttcttacattttgacgttccttgatcatgtcttttgcagctgaattgtgatgattttaaaaaaggagaaagagatggggattttatctgtcctgattattatgaagctgtttgtggcacagatgggaaaacatatgacaacagat

SEQ ID NO: 132362 - DNA, 426 bp, Homo sapiens
gctacaccttttgcctgaagagaccttccttttttttcacctgatagaatcttgctgttctcaaagtaatgtggaagtttggaggggaaagtttaattcaggcagaggaaccaaagaagcacatgaagtggaagtgacatttgaacaaggatttaagttttgagaagtggaaacagtcaaatgagggtcactccaagcagaaggaactgctgaactaaaacaatggacaatcacaaattcaaaaactccactgttgccgaagagaggcgtaacagcagaaaaggacgagttcgaatgtagaaagataatgagatattttgaatgtcatcccaaartcctaataagaggcactgaagatttgaagagttgtgccatctgtttaaaaaaaaagaagaaaactaaaaagaaataaaagaaaaaaaagat

SEQ ID NO: 132363 - DNA, 458 bp, Homo sapiens
aactttaaaatccatgttcttcactaacagctaaacaggctaacttaatcatcacctgcctttcatcataaccttcctatgaatattgaattatgttggctggcctaaaatttcgaacagcatgatctgtgattgagttcctgcttgccattgtctcatcccagtgggtggatagagccccatgttccagcctctccgagtcattaaatcccactgaagttaaccaggccatgcctagaattatcccaatatataatatgtcatctayttgatcctcccaaaatcttggtggaattgacaccacatagatcataagccccactccctatatgagagtggccaagacacaaaaaattactttgaatagtctgggttaaatatagctagccagaagcaaagccatgaccagacccaggtttcctgactcaaacactaaagcttcatgcattaaattcaca

SEQ ID NO: 132364 - DNA, 458 bp, Homo sapiens
aactttaaaatccatgttcttcactaacagctaaacaggctaacttaatcatcacctgcctttcatcataaccttcctatgaatattgaattatgttggctggcctaaaatttcgaacagcatgatctgtgattgagttcctgcttgccattgtctcatcccagtgggtggatagagccccatgttccagcctctccgagtcattaaatcccactgaagttaaccaggccatgcctagaattatcccaatatataatatgtcatctatttgatcctcccaaaatcttggtggaattgacaccacatagatcataagccccactccctatatgagagtggccaagacacamaaaattactttgaatagtctgggttaaatatagctagccagaagcaaagccatgaccagacccaggtttcctgactcaaacactaaagcttcatgcattaaattcaca

SEQ ID NO: 132365 - DNA, 478 bp, Homo sapiens
aaggtttggagaactcaggtttgggtcagagttaggttatcaaggtattcttctaactcaaaatatcatccttgtttttaactctttcaattattcatcaaacatgtagaaacttttttcctctcattagaaatgagtgggcttagataataaaaactatgaaytttacaaccttacgcatttatgaggttggcagaatctgaaggatactgatacagggggaggaaatgagaaaattataaagattgttgtagatcagtaatgttactacaaacaaaggttatttccaaaatataaagttaccatatcattcctaaagtcttctgtttttctacacagagggagccttgatgacgataatagttaataaataactatagtcttttatgattagatcaccttccacagctttcaaaacaacctgccattcattagctcttttgatttgtttatgcagtgttgtgaggcagccaattag

SEQ ID NO: 132366 - DNA, 545 bp, Homo sapiens
ataagccaactttagttactgacccggagaaccaggttatgaagggctcagctaagtctcactagctgacaatacagaattgcactttcatttaccattttaaatgcaattatgtatataaagtttctacataaataaggattttatctgtagtgtgtcctttccagatgttctttgtctttgtatgaattgaatctgctaacataacttttagtttcaggctgctctctttaaatgtatagacttagccaccacacgaagttgtatattgtctatgttaagaatggcgtttgattcgcatagaccctaccatcattaaagaaaatgattaaaaaccatatccaaacatatgcccctagaactgtacccaacttttacggggaaagtatcaagtcagattttcaaaagcagccaagttaaattctttytgttcctcaagactaggctgctctgagaatcagaatgctaattgcatatgcttgcccttaaacctgcttcacgttgaagaatgaagaattaattttcttttctcccatagaaaggta

SEQ ID NO: 132367 - DNA, 328 bp, Homo sapiens
ccacagcatactgcagtgcttgttctcaaaggacactgcagcagagagaccctagactctggaacacctggcacccagaaagcaggagaaggcatccaactaaagacaggttctgagaatgccagctcccttccctacctcactctcaaaacactttcaaataaatttarttttaagaaaatatctgctgacagaatatcagaggatcccttggtggagaaaataaatgccccccaagaagctctatatataatttttgtgaaatagttttgtgaatagatctctcagttgtctaatcatcaatatgccggagatgatgatgcccagt

SEQ ID NO: 132368 - DNA, 399 bp, Homo sapiens
gtctggaggagaaccaacattgtcttgcatatcaactgcctcaaaggaggccattacaatttcctcaggcaatgcagtgttaatcatcacagacaggttggagggtactatcactggaaatggagaagctgcttccaatggggttgagaagcctctccactagcaaagaagactcatcagaatttaggggcttaatgtccccagcttcatcaaggtcttcccatatgtcccaatcctaatttacagaatcccattttttttttcagtaagtgccctcmttttgacaatagtcactctgcaaggctggaattctaatttgtgttgtaattcagccagtcacaggatgagatgctgtgtttgattttcaacagtctcagctctggggctacaggagatagg

SEQ ID NO: 132369 - DNA, 438 bp, Homo sapiens
gctatcaggggttcatatttgaaagatacgtacctaggttgagaagtataaaccatagcacaaggtgttctgaaaggaaagacaaacagccctttggacaaacaccttcttatgagaatgatgctctcaactcaaccacytgtttttgtataaccagatcgagtcaaccacctatttatgtatggtctgcaagcaaagaatgttttttacacttttaaatagttggacaaaaaacaaaagaatttgtgacatatggaaatgctaggaaattcaaatttcagtgtccataaataaagttttattggaacatagctgtgtacatttgtttatgtagtgtctgtggctgctttctctcaaaaatggcagtgtaaagtagttgcaaaagagatgatgcagcctgcaaagctaaaaatatttattgcctggccactttcagaa

SEQ ID NO: 132370 - DNA, 519 bp, Homo sapiens
ttggttaagtttttggtggaaaatttctcactaaaagtgctgaacagaatcatcaattaatattatattactccacgtaaatcgttgatatgaggcatgatttaaagaaacacaaccataagtacttacaggtaactttttattggacattagatttgtctattggcaattaatataakcttgatcatatcttcacacttgagaagaaaacttccacttcagacaggtggaagccttatatgtagagaaaaaatgagaatcctacagagtctctggaccgttatctatcaaaagctttagcaggcggtttcctttcagcttttgatctctgtcaagagaagtctgtcagggagcaaattagcaggcaaatgcccttccaagttccttacttttgatctgtctctcctcagatagcatagatattggtttttaaggggaaaagttatacgaaaatgtgctgtttgtgtatttgaaatctactgagcctttctttaatcagaaaaaaaaaaatcattgttg

SEQ ID NO: 132371 - DNA, 479 bp, Homo sapiens
tagacattgaatgtacaaaaaatagtaagacagagctcctgcttgcacagaagccatgtgtaattacaattaagaccatgggctccagaggcagactgcctggtttccaattccgatccaaacctactacttgtaagctctgtgacactggrcaacttacttaacctctctgatctaaaatttctaattctgtaaaacagcaataataataacaactacctcttggagttaatcagattaaaagagataattcttataaatctcttagcatctggcctagtgaatggaaagcacagaataaatggtagtttttatcagtgattgtccaagttctatattataatgagaaggtcttgttctaagccagggcctctcatcagtgccactgcagttaattggactatatctagtcgtatcctgagatgtgacaagcagagactcagtatcttgtcatcattggatttccattaaaataccat

SEQ ID NO: 132372 - DNA, 504 bp, Homo sapiens
taagaattccaaagaatcacaatcaggataaaggaacgaaacccccatgtaggaaaagtaaaactactraaatccaaagatgaagagaaaactctaacagtcagatggaaaaatccacaagataccttcaaaaaccattgaataacactttgggaggccaaggcaggcagatcatttgaggtcaggagttccagaacagcctggccaacatggtgaaaccctgtctctactaaaaaaaaaaaaaaaaaaaaaaaaaatgtagccaggtgtggtggtgcctgcccataatcccagctacttgggaggctgcggcaagagagaatcactcgagtccaggaaacagaggttccagtgagccgagattgcaccactgcactccatcctggatggtagagactctgtctcaaacaaacaacaaaaaaagcaagaataggaaagacaggtgattttcaccaagaacacaggaacaaaagaatcgaatgcaatgaaatattatcctcaatg

SEQ ID NO: 132373 - DNA, 503 bp, Homo sapiens
acgaaacccccatgtaggaaaagtaaaactactgaaatccaaagatgaagagaaaactytaacagtcagatggaaaaatccacaagataccttcaaaaaccattgaataacactttgggaggccaaggcaggcagatcatttgaggtcaggagttccagaacagcctggccaacatggtgaaaccctgtctctactaaaaaaaaaaaaaaaaaaaaaaaaaatgtagccaggtgtggtggtgcctgcccataatcccagctacttgggaggctgcggcaagagagaatcactcgagtccaggaaacagaggttccagtgagccgagattgcaccactgcactccatcctggatggtagagactctgtctcaaacaaacaacaaaaaaagcaagaataggaaagacaggtgattttcaccaagaacacaggaacaaaagaatcgaatgcaatgaaatattatcctcaatgtgctaaaaatgaaaacaaatcaaaacaagaattc

SEQ ID NO: 132374 - DNA, 504 bp, Homo sapiens
taagaattccaaagaatcacaatcaggataaaggaacgaaacccccatgtaggaaaagtaaaactactgaaatccaaagatgaagagaaaactctaacagtcagatggaaaaatccacaagataccttcaaaaaccattgaataacactttgggaggccaaggcaggcagatcatttgaggtcaggagttccagaacagcctggccaacatggtgaaaccctgtctctactaaaaaaaaaaaaaaaaaaaaaaaaaatgtagccaggtgtggtggtgcctgcccataatcccagctacttgggaggctgcggcaagagagaatcactcgagtccaggaaacagaggttccagtgagccgagattgcaccactgcactccatcctggatggtagaractctgtctcaaacaaacaacaaaaaaagcaagaataggaaagacaggtgattttcaccaagaacacaggaacaaaagaatcgaatgcaatgaaatattatcctcaatg

SEQ ID NO: 132375 - DNA, 616 bp, Homo sapiens
aattttcgggtttaaataccctctagaggtttcccattgattcactctagtggcccgcgaccagccggattgattgagggaggggacggtaggcctgcaaccagtccggttggttgtgagagggggccaatcagaggtactttcattttccaactgccacgcagcaagtgccacgcagcaactgccacacagcaaaaggaggggttggaaagggagtagcgtctgayatctagtcagcatgagtcggccttttgttccctgcctccaaatcctattctcctgcctccttaggtttatgtgggcacatctttaaagaacactggatcacacagggagagaattgttctttttatctttttctttttcattcttctgattatcataaagtcttaatttgatactggtatgtttttaaaaagtctgtgacacctgtaacctcccctttcaacaaagaggccctggcgggtaacacagaatttaactagaagggaataacattattctatgttcactgtgctgtgttcatttttatagttgccttttatttatgtcaagtttgtttcttcttgttgttgttgttgttgtttgagacagagccttgttctgtcacgtggct

SEQ ID NO: 132376 - DNA, 616 bp, Homo sapiens
aattttcgggtttaaataccctctagaggtttcccattgattcactctagtggcccgcgaccagccggattgattgagggaggggacggtaggcctgcaaccagtccggttggttgtgagagggggccaatcagaggtactttcattttccaactgccacgcagcaagtgccacgcagcaactgccacacagcaaaaggaggggttggaaagggagtagcgtctgacatctagtcagcatgagtcggccttttgttccctgcctccaaatcctattctcctgcctccttargtttatgtgggcacatctttaaagaacactggatcacacagggagagaattgttctttttatctttttctttttcattcttctgattatcataaagtcttaatttgatactggtatgtttttaaaaagtctgtgacacctgtaacctcccctttcaacaaagaggccctggcgggtaacacagaatttaactagaagggaataacattattctatgttcactgtgctgtgttcatttttatagttgccttttatttatgtcaagtttgtttcttcttgttgttgttgttgttgtttgagacagagccttgttctgtcacgtggct

SEQ ID NO: 132377 - DNA, 440 bp, Homo sapiens
gtataatggtggcctctgcatgggggcatgagagttgttctgaagaatctaaaaagctgcttcattggttggggggaccctatgggatttagtcttcatgaactacaaacatggcaccaatgatagataatctsaagaaacagacttctgcatagcatatggaactttcctatagcccaaactttccacaggtagaaagtagttgcaagaggacaaacctagagcccaggaggcatgcctgggttccagtcttcccctcaaccaggagtttttggtgaatgagattctagagagcagcttaactgtccagctttgtgttccccatgtgtaaggtaagagtgttggacttgatgagaggtgggaaacaggctcaccttggtaatactgattgctttataatttgtggcctgaaactccttgtcaagaaaaatgttaagccc

SEQ ID NO: 132378 - DNA, 574 bp, Homo sapiens
tgcaatttaagacttctgaattgattatttttgtaatttcccatttaatgtttcagaccacagtggaccgccggtaactgtgagaaagcatcggtaatgaaaccaataagggaagactactgtaatccattaagctgtgtgtgtgtgtgtgttctactaagtgtttaatatttcatagtagaaaaactttaaaagaatgagagggaggcagcacagtcctgacccacacgggctttcactaaattttaactcattatcattacaaagataaagtataataagaagccaaaagctaagacatgagacctggaraggttttagtcataaaattgcttcacgattgcccacagagcagagtttttcaaattccttagtatatttggaatttgatggttaggaatatgcagcttggaatagtcaagtgagttttctaaggcagaaagctatgaaatttatttaacagcacttgaacttgaatgttctcttttgagtccagtactctttctcccacctccaggaagctgatcataaggaggaataagaaactctgttgaaagtgactgagcatgtggga

SEQ ID NO: 132379 - DNA, 569 bp, Homo sapiens
gctaggtggctcacgcctataatcccagcactttgggaagccgaggcgagcagatcttgaggtcaggagatcgagaccatcctggctaacacagtgaaacccgtctctactaaaaatacaaaaaattagccgggcgtggtggcacatgcctgcagtcccagctacttgggaggctgaggcaggagaattgcttgaacccaggaggcagaggttgcagtragccaagatcacgccactgcactccagcctgggtgacagatgagagtccatctcaaaaaaaaagaaaagaaaagaaaagcacctgtatccatggctggaacagagttgacacttgactactgattggcaaatgaatgttgaatgaggaaataacttcctaatttggttaggttttaaatttgatagttttgcaacgaaaaggaaaacagaggtagggaatccagaaattgattattaaatgacatttacttattttactctagagtgtgaatgagacattattctgttaatgttgtacatacgtgtgtttgttttttataagcttgctcaataagaaactcacccccaca

SEQ ID NO: 132380 - DNA, 569 bp, Homo sapiens
gctaggtggctcacgcctataatcccagcactttgggaagccgaggcgagcagatcttgaggtcaggagatcgagaccatcctggctaacacagtgaaacccgtctctactaaaaatacaaaaaattagccgggcgtggtggcacatgcctgcagtcccagctacttgggaggctgaggcaggagaattgcttgaacccaggaggcagaggttgcagtgagccaagatcaygccactgcactccagcctgggtgacagatgagagtccatctcaaaaaaaaagaaaagaaaagaaaagcacctgtatccatggctggaacagagttgacacttgactactgattggcaaatgaatgttgaatgaggaaataacttcctaatttggttaggttttaaatttgatagttttgcaacgaaaaggaaaacagaggtagggaatccagaaattgattattaaatgacatttacttattttactctagagtgtgaatgagacattattctgttaatgttgtacatacgtgtgtttgttttttataagcttgctcaataagaaactcacccccaca

SEQ ID NO: 132381 - DNA, 470 bp, Homo sapiens
caggtccctccctcacacctggagattacaattcaagatgtgatttgggaggggacacaaagtccaaccatatcaccttctaaagtttgctggaaatgaaccttaaaatctaacttatttttattcagacatgagcttgggttttcaaatatagtccttaaagaaggagagggagagaagagggacacttcagggcacaatcacatttcagagatttttttcacttgaaatctctcaggctttgattaatagcacttacaataacaacagcaatgacaatgatgatgatagaaatcaacctacacttttctctttgatggttcccacactcagtgactcaaataagcataaaatatgaaagatgtggctgcttctgttggcatctgtggtttttcaggtctccaaatggmctgttgttaattccatttatagcaaattgaagaaatacataaactcttaacttgggtacc

SEQ ID NO: 132382 - DNA, 597 bp, Homo sapiens
aagccaggtctaactttcatttgaatgttcttttattgctatagtaggtgaatttagctactttgagggtataccaagtgcaaagttattgatattcaatatgacttaagtacttactctgtgctggtagcatgctttctatgcattatcttatttaattctaggaggtagaacactattgctgtcccctttttgcagttgagcaaactgagtcttaagagaggttaagggatctgaccaaagttacacagctattaaatgtcagaactggatattagcctggtacyctctgacttaaaagactcttctcttaattactagatcgttaggggccctcaataaacaaatagtttgtgtcttgttactcctgaaaagtcaattgaagcttaggatttcaatagttttgacatagtaccttgatgctctaagaaagccagagcttcaacactgtgcctttgcctttctgacactccagatgatgcaggcacctctttttagccatgtctcacattttactcatttttaatggaatgctaattttgtatgcattctccatatccagatttagacaaggcacatagttgagcagacttagtt

SEQ ID NO: 132383 - DNA, 523 bp, Homo sapiens
ttataaaaaggggaaatctggacacagagacaaacacatacaaaggatagatgatgtaaggacagaaggagaacatcacctacaagctaagaaacatctaaggctatggaaactaggagagaagcatggaacagccctcagaaggacccaagcctgcagacacctagatcttgaacttccagccttcagaattgcaagcaatacacttctttttgtttaagccacccagtttgtggtagtttttaaagcagccctaagaagctaatacagtggattagacctgcaagagattagagaagacacctgtgtcgaaaaakggggctggcatcaaaggaggatgggaatcccatcagagttccatgcaggtctgtcccttatgaaacagaaaaggaaggaagtttaagtgggagagtctttggctgcactccaattctaagaaagcttggcaaagctgataggaggtccttgaaacaaagttcttgaacccataagacaagtcccacatctctcaggaataggctgg

SEQ ID NO: 132384 - DNA, 523 bp, Homo sapiens
ttataaaaaggggaaatctggacacagagacaaacacatacaaaggatagatgatgtaaggacagaaggagaacatcacctacaagctaagaaacatctaaggctatggaaactaggagagaagcatggaacagccctcagaaggacccaagcctgcagacacctagatcttgaacttccagccttcagaattgcaagcaatacacttctttttgtttaagccacccagtttgtggtagtttttaaagcagccctaagaagctaatacagtggattagacctgcaagagattagagaagacacctgtgtcgaaaaagggggctggcatcaaaggaggatgggaatcccatcagagttccatgcaggtctgtcccttatgaamcagaaaaggaaggaagtttaagtgggagagtctttggctgcactccaattctaagaaagcttggcaaagctgataggaggtccttgaaacaaagttcttgaacccataagacaagtcccacatctctcaggaataggctgg

SEQ ID NO: 132385 - DNA, 643 bp, Homo sapiens
acagtgtttagaagtgatggaaccaggattgagccaatcttggtctagatctactactttaaccacaagcaatactgcctctgcttatgagcatgtgtgagacactttctaaatactacctagatggtcagaaagagctaaggaaggtgatgcctgacctgagtccttagggtaaggagaaaccaaccagtctgagaaagagaaaaaaggtgtttagagagcattgcaaggaaaggggaatggaacagacagagcatagaagactttttgggcagttaaattactctctatgatattacaatgatggacacatcccactatacgtttatcaaaacccataaaatgtacaacaccaagagtgaactttaagataaactatggactttgggagattatgagtcagtgtggtctcatcagttgtaacaaatctaccactcttttgggggataataatagtaataataattatgagggaggctatagatgtgtgggggtagggagtcgatgggaactctctgtaccttctggtcaatttcactayaaaaactactctaaaaaaggggggttgaaaagttacgtgttgggtacaagtttcactattcaagagatgagtatgctgaaagcccagactttagcactacgc

SEQ ID NO: 132386 - DNA, 547 bp, Homo sapiens
ttcaaaataattctttaaggtaaaaatctttaactttaaaacagttctgatcttttaaaagaaaaaagtttattaagatccctttagcttgataaacaggaattatctcttctggttgcactctagtgaacatgagtgcacttcatatgctcattgactgtgttactacatgtccgttgcaggtaggtgtgatcatgtgactgagctctgatcaaaggatcgtgggaacatccaggctcgacccatgagatcttcccctttttctccttgaacagcaacattacaagttgaatactgcagacttgcaaaatggaagaaacctgaattcctaaatcacagctttggacagaattgccaaatgatctggaaccccatttggaaatcaaaatgagaaatwtatttctattatactaagctgctgaggtttatctgtttcagcaggtagccttcattaccttaactaaataaaagcagggaaaggaatatcaatattacaaacgcagacattcaaataagagcaatcttcagaatgtccaggccctatact

SEQ ID NO: 132387 - DNA, 622 bp, Homo sapiens
cttttcttctttcttaactttagatttgggaatcagctctccacaactgagtatctgtacctctgtaaatgctttgctagcggcatccatcttgtggttttctatctctctyacaacttcttggctagagattacttgcccaaaaacaacatgatgcccatctaaatgaagagttggtttcattgttatgaagaactgtaaaccatttgtatccttccttctgttggccattgacaagagaaattctttgttgtttttaacagcaaaattctcatcttcaaaaaattcttctagatagattcccctcctcgtccatttccttcactgaagtcagcaccttaaaccataaaatccttgacaactctgaaagagacaactcttacaatgtaatggctctgagttgatttccctgtccccctttcacctgtacaaagacaactaaacttctcacgtgttttggggcacacatcagaaaataattcaaagacaactcttccagcaggttgttaatggcaatgtcaaaaaaaaaaaaatcgaggacattgaatctttattcccatggctccaatacttaatcttcaaatgaaggcaagaccaaaaaaaaaaaaacaagggacaactg

SEQ ID NO: 132388 - DNA, 434 bp, Homo sapiens
gcctccagtacacaatttgaagaggctatttcctggccccaatcctaaagtgtctgtaaaagcattaatgatttcccactgcttccatggtgacagcgagagagggctgactatcaagtgctcatgtggaaatggcccatggctcaggccctgtatgcctgaayagatacctgatgcattgctgctcctgtcacctaccattttagatgggcccatgcttccaagcatcaaactagattgaatttccataaaaaagaattattcttctgtggcttgtcagaagcctgctgaagttagcagcaaatgtaatctgctctataaatgagaatttccctttgatacatgtggtagttgatgaagacaatgattcacttcgagtgtccccatctctccatatcactcccttcttcccacctctgcattcattttacttg

SEQ ID NO: 132389 - DNA, 568 bp, Homo sapiens
ttagcatattcaacaccttgtgygtttatcatttctttttgatgacaacattcaaaaaccagtcttgtagctattttataacatacagtaacttactgttaactgtagtcaccctcctgcacaatagaacaccagaacttatttctcctatctaaatgcaacttttatccattaaccaaactccccatccttctctcctccatcccctcccaatttatggtaaccacctttctattctcaacttctatttaatatgaaatcaacttttttaaaattccacatatgaatgagatcctgtggtatttttctttgtatgtctggttattttacttagcaaaatgtcctctggtttgcccattttgtcccaaatgacagaatattattctttttatggctgaacagtattccattgtgtacacataacacattttctttatgtattcttttttatgtatttcttgttggccatgtaggttgattccaagtcttggctattgtgactagtactgcagtaaacgtggaacttaagacatctctttgatgtattgatttcatttactttgggtat

SEQ ID NO: 132390 - DNA, 568 bp, Homo sapiens
ttagcatattcaacaccttgtgtgtttatcatttctttttgatgacaacattcaaaaaccagtcttgtagctattttataacatacagtaacttactgttaactgtagtcaccctcctgcacaatagaacaccagaacttatttctcctatctaaatgcaacttttatccattaaccaaactccccawccttctctcctccatcccctcccaatttatggtaaccacctttctattctcaacttctatttaatatgaaatcaacttttttaaaattccacatatgaatgagatcctgtggtatttttctttgtatgtctggttattttacttagcaaaatgtcctctggtttgcccattttgtcccaaatgacagaatattattctttttatggctgaacagtattccattgtgtacacataacacattttctttatgtattcttttttatgtatttcttgttggccatgtaggttgattccaagtcttggctattgtgactagtactgcagtaaacgtggaacttaagacatctctttgatgtattgatttcatttactttgggtat

SEQ ID NO: 132391 - DNA, 562 bp, Homo sapiens
ccctccttttgttttcttataaagaaatatatatttaattcctgctgtgagttaggcactcacctaggttctaaggatataatgttgaacaatagtagtaatatttaggtcccacaatgtgccctaagatctcccaattcgtccagagccatttgggyctataaacacctaatgtcaaatcttactatccagcactgtttcatgggtccatgctcaccagagcagggctgaaacaacaattatttaatctttgaatgtcactttagagtttatagggattttcatatgtactttaaattctcataaatatctattaatagaaggaaccagggaagataagctttaataagtcatttaagattaagcaactaacaacttgaggacaacaagttattactaaaacccaatggtctatgacagtatctacctcataggttattgtaaaacatcaatgagatattacaggcaaagcacttagaatagtgcatggcacacagtaagagtgcaataaatgttaatttattgttgactgtgacgatgttcttgtttagaaacagggaat

SEQ ID NO: 132392 - DNA, 589 bp, Homo sapiens
agaactcacagattatttcctatcctagtcaagttgttgcatacatctcaaaatcgtgtttatggtctctgctgctttgaaatgatggtagttatcaaagacaaacatacattattttatcacgacttttttttaatgtgttggcaactgtatctaattagctttctttggtaatcctggacattttgtttaatgctgttaaaaatataattttgagaagggatttgtagttccaatagcttgacaaaggcacccatgacaagaaaaaaaaagtgaagaaacactgccaatgtcctaaaatcayagccagtctctaagaactttctgcatcattcctatggtgctggggagggggcttgttcctagcaggggcctaactgctattactgagaggcataggtgccatcgctagcctgagtcatcctcttaatctctaagaaggtgatttattgttttttcatttatcttccaccaacccatatcctgagtacctttaaggatggttttaggaatcaaatcaaatgacagaggcaaatgtgcaggtatctggttgtaactaatgctaccatgcagatgtgatcacatgtca

SEQ ID NO: 132393 - DNA, 590 bp, Homo sapiens
aatttgcttgtagtctattagatattttcttatttatgacttgacacatttttcttaaagcttttagaattctttcttttgctttgacttttgaaaatttgattataatgtgccttggagttgagtctaattgggaatctttttgcttcctggatctttgtagacgtggcragttttcagctattattttgttaaattagttttctgtgcctttcttcatctattccccatctggcatttgtataatgcaaacattcgttaacttaatagtgtctcataaatcttgtaggctatctttattcatgcttattcttagtcctttttatctgactggactatttcaaaatacctgtcttcatgttcaaaaattctttcttatgcttaaccaaatttgttattgacactgtcagtcatattttttgtttcatttattgaatttttcaactccaagatttctggggtttttataattatctctgttgaatttctcattcagatgatgaattttttcctatttcattgaattggtggtctgtattttcttgtagctcaatgagtttcctaagctcatgattttgaattccttttca

SEQ ID NO: 132394 - DNA, 557 bp, Homo sapiens
tctggatgaaaacatatctatagagcatattatccttagaatatcatggcattttttcctgagtcagggactaaattcacacatgggtccttgattatttccaagtagatactgtaatgcaattctaacaaaaggtacggacagagagaagtaacaggatagtaggagatggtacaatttaggagatctgcagtttgagtggagaaaaaatggactccataggaaactgtgactacgtgaagagaaactacagtacagaagccatcagagggggtgtgaggaatgaccagagaaaccacaatgggtagagaaaggaaataacatggtctcctcttcatgaaactggcaagcgtcctgcatggctaccgagaaagccagytgggtaagcagcacagatcaacctgtaactactgtttacttctccaagataagatggcatttcagttaaggacagggtgtgagaatcaacctgggttggagtattagatgtatgttctttctgtgcctttctaagcctttgactgttcatctctaaatagaagatcaaagtgatagag

SEQ ID NO: 132395 - DNA, 352 bp, Homo sapiens
tgatttgtgcaatgcaagtacatgtgcctatggttggtgtctatcatgaaacagttattcagtgccatatatggcgatttatgattgcttttaggtaaaagaactaccagaaatgaaaaaaaaaaaaagccagtattcactgaattcatcacagttatgatgaataacttgaagcaatagaaagaatagttcyatttgtttcaacgtaccattttaaatacattttggcgggagggacaggggcatggttgtttggtggctggaatggttttcaggctctctgtctgtttatccatctgtctgttcttttgtgttttccttagttgctggtggtgagtacatagcatctcag

SEQ ID NO: 132396 - DNA, 560 bp, Homo sapiens
ctcacaaccgccctagaacataggtactactattatctccattaaatgaagcttggaaggagtcaagctgcttgttcaaagctccatcatttataagcagcaaagctggagtttcaacccaggccactgtgtttggaaccacctatactgttagtcaccacaccatctaagacagagtgaacaggccttcaggatcagctgttagtggtcttgggcccctcctaacccctctacatgggcatgagttcctgtgaaattaatgaaggtccagtgtaaggtcaagagaaaggagccacacccagcaacagcctgcacctrtggttacctaatctctctcttctcctatccccagagtccacaaccagctcactgcatgcctcctttctgcccttgctccagttgtaatgaatgctgtttcactttaggtttctctaaagttggcagtcttcttcttaattctttctcttatttttgaattcttgaataactgaattcaagattttccccagattctggaaccttatttatttacccagtcatctgagccctttcagggggct

SEQ ID NO: 132397 - DNA, 519 bp, Homo sapiens
tgatggttttttaaaaaggtcctctgctttggctattggagaaaataatttatattccttccttcaggaagaaaatgaattaatggagtctacagtcctcaaaggcaataacctcygtccatgccacccgtgccctgcttccttccattctatggcaatgcagttcacaacatttgggggcaaagaggtcagaaagcagtacagaaatggatgacaaccttgaaaacttgaagggaatagataggattcagagttctaaaaggacagagcatagtgctgggacatgtggggagaaaactcaacagttcatgtgtagaaagtggaaacacagccaaagtaaagttgcagaaaaaagatctcagggttttagtgaataacatgaaagtgttacttaaaagtagaccaggcataagtcaccccaaatagtgtgttgttccagaagaagtaattacgtaattttcttcagttcaggataaattcttactctaatatggtttgaggatctagtttttaaaaaga

SEQ ID NO: 132398 - DNA, 607 bp, Homo sapiens
ctatgttataccttatgaccaacttctaagtaaatatccaacaaatgcgcatatagtacaccaggagagaaattcatagcaacactattcacaaacgctaaaattagaaaatacaaatgaccatcaatagtagaacaaaacagtatgttcttcccacaaaatggaatgctatcaatgaaaaggaatgaatgataattcttcacagcaaccttatgaatcttacaaatatgaggttgagaaaaagaaatcagacaaaagaatataygttttccaactacaattacataaaattcacaaatgtgcaaaacaagactatagtgtttagggtggtacttaggtggtaaaactataaagaaaagcaagaaagtggttactttagaattaatgacaatggttgtctgtaagggaaagaagagagaatgaccaggtggagggattcagaggggcttcagggaggctgacacactacaaatttaccattttaaaggactttccctttatgataattcattaagttctagatttgttctttgtgattttctgtttgtgtattatacttcataaaaagatatttaaaaggctaacacagggaccaaacaccctaaca

SEQ ID NO: 132399 - DNA, 591 bp, Homo sapiens
taaaaagatatttaaaaggctaacacagggaccaaacaccctaacaacataagttaggatttttggggaaaacagycccaaatgcatgtcatgagccctgaaacgcctcactgcaccacaaccaaggacagtatatttatgacaactatgagtcatgaaaaacatattaagttagtgccatatttgcagctagacaaggcaaggaaccaagaaatgcatacgtaacaggataaaggaaagttacaaaggttgcagcagctttgactgaaagggaagcagtgctcaagttagcagttggggataggtttaacttctctcctttcagaattcttcctcactctcccactttcagtgatctttttgggacaatccttagaaagaatagccactaattagcaactggcctctcatgagagatgggggtagaaaagttgccttcctgcatagctatctgggcacattactgaaatatttccatccaatttttccatttacatcaaatatttacattcatgtaattaaataagcaaatgcactaaataggccattattaatacaatcaatatttgtttttactacccagaattctga

SEQ ID NO: 132400 - DNA, 541 bp, Homo sapiens
caaattgttctctcacacagtctgtttttgggccttttatcttgggctttctcagacttttaatgaagaactcttttgtattttctctattcctttcttatcacacttgaaagtgaagggtagaaaccaattatagtggatgtttggttctccagagacttyagagagttactagaaagcatgtcattgggtagtgaagaggtttatgtgaattagtatataaaaattttttggaacaaatcctgacacataatgggtgctatattaggaccttgatattataagagttaattttcctagtaattccttacatttaaattatgttttatatttttctgcaaccttttatttatattaccctgtttgatccagttttcctccttttacaaaggaggacattgaggttaggagagagtatgatttctaaggtcatttaacaagttacagagctggtgctcaaacgctctttccacagtctgaatctcctgattctgaactcattatacttcccatgacgtcactatttcctcagctttagggt

SEQ ID NO: 132401 - DNA, 659 bp, Homo sapiens
actgttcaatgctttcaataatatataaaaaatagtttcaaagttattaagatgaccactggaacaaaaatgcaaacctttcaagttcaaaacacatgcatacacaaagaatatatatacaggccatatagtgaaaaataaatgagcactacaaacaaaacctaacaaaaaaacaaaagataggtaaagtragataaaagatgacatgaccttcttttcaatgagcactgaaaattttcaattaattttctcaactgggatatcagggcaaatctcaaccttgtgctatatacataagatacagtgaaaacaaaatgatttagaaaggtggaaaataaaaagataggtgaaggcataccaagcaaattaaaaccaagatcaagattttatctccaagttaaattcaagaaaaaagtattaaataagacaaagataggcactttataaaacatgagatgcaaaattaagatttcacgcttatgaatatcaatgtaccaaataacataaaattgaaatttataaaggaaaactacatcaaattcaaagagaaatccacagaaaacatgactagttaatttatctcatccagaacagatcaagttgtcaaaaattaagtaggatatagaaggcctaaataacataattagcaaggtagattg

SEQ ID NO: 132402 - DNA, 401 bp, Homo sapiens
tgcttcccctgaagccatcttacatagtggctgctttttttcttccactgtccttatatatctgggcctacatttggggaaggccacctctttgctcctcgttgccactttcagacttttctcacttgcctccctaaaattytcccaagttaaatcgcatgttatcagattaactcacccaaaaatgttcatttttgctgtcatctattgacacctgggtcagtctttttcatttctcaatgctattagctccagtctgataatatctctctttagtcttaattcttagagatttcaacaactaaagtaggtgatccttccaacaccatagtttgtcagtttttttttaacttctttgctcaaataaccttgttctccaccatacctcagtcactcaccct

SEQ ID NO: 132403 - DNA, 414 bp, Homo sapiens
aaaccaggtctctcctgaggatatgcttcccctgaagccatcttacatagtggctgctttttttcttccactgtccttatatatctgggcctacatttggggaaggccacctctttgctcctcgttgccactttcagacttttctcacttgcctccctaaaattttcccaagttaaatcgcatgttatcagattaactcacccaaaaatgttcatttttgctgtcatctattgacacctgggtcagtctttttcatttctcaatgctattagctccagtctgataatatctctctttagtcttaattcttagagatttcaacaactaargtaggtgatccttccaacaccatagtttgtcagtttttttttaacttctttgctcaaataaccttgttctccaccatacctcagt

SEQ ID NO: 132404 - DNA, 639 bp, Homo sapiens
ttatttatttttatttttattttattttattttttttttttgagacagagtcttgctctgtcgcccaggctggagtgcagtgggtgatctcagctcactgcaagctccgcctcctggttcacgcctttctcctgcctcagcctcccgagtagctgggactacaggcgcccgccaccacgcccagctaattttttgtattttttttagtagagamggggtttcaccgtgttagccaggatgatctattccttctatatttattaaagaagagctggcccttcgcttcattaatttatttacttattcatttacttgtttatatcagtatggactcaggaacatttattgtgttttatgggttataatccattactatgattatccattctttagcataccttgtcccaaatttcactgggacctccttcgatatggctcctgtgtcattttcacatactccatcattttttagtacttccttagtttctggcaccacaaaacgttcaggctcatcttatatatttcctggaattgattatttctctaaagaacactttacttatttgctcaatcctaatacatacataaagtagtctcagagttgctaacccatgcctctgtctgtggaaacaaatttac

SEQ ID NO: 132405 - DNA, 639 bp, Homo sapiens
ttatttatttttatttttattttattttattttttttttttgagacagagtcttgctctgtcgcccaggctggagtgcagtgggtgatctcagctcactgcaagctccgcctcctggttcacgcctttctcctgcctcagcctcccgagtagctgggactacaggcgcccgccaccacgcccagctaattttttgtattttttttagtagagaaggggtttcaccgtgttagccaggatgwtctattccttctatatttattaaagaagagctggcccttcgcttcattaatttatttacttattcatttacttgtttatatcagtatggactcaggaacatttattgtgttttatgggttataatccattactatgattatccattctttagcataccttgtcccaaatttcactgggacctccttcgatatggctcctgtgtcattttcacatactccatcattttttagtacttccttagtttctggcaccacaaaacgttcaggctcatcttatatatttcctggaattgattatttctctaaagaacactttacttatttgctcaatcctaatacatacataaagtagtctcagagttgctaacccatgcctctgtctgtggaaacaaatttac

SEQ ID NO: 132406 - DNA, 639 bp, Homo sapiens
ttatttatttttatttttattttattttattttttttttttgagacagagtcttgctctgtcgcccaggctggagtgcagtgggtgatctcagctcactgcaagctccgcctcctggttcacgcctttctcctgcctcagcctcccgagtagctgggactacaggcgcccgccaccacgcccagctaattttttgtattttttttagtagagaaggggtttcaccgtgttagccaggatgatctattccttctatatttattaaagaagagctggcccttcgcttcattaatttatttacttattcatttacttgtttatatcagtatggactcaggaacatttattgtgttttatgggttataatccattactatgattatccattctttagcataccttgtcccaaatttcactgggacctccttcgatatggctcctgtgtcattttcacatactccatcattttttagtacttccttagtttctggcaccacaaaacgttcaggctcatcttatatatttcctggaattgattatttctctaaagaacactttacttatttgctcaatcctaatacatayataaagtagtctcagagttgctaacccatgcctctgtctgtggaaacaaatttac

SEQ ID NO: 132407 - DNA, 422 bp, Homo sapiens
cccccacgtggagctgggtcgtggctgtcctcttcagctgggacacatgctctcgggtcagcctcagctccacctgcccggcttcactcactaccacgcctcttctgtagacaccctgcacatggctaaggctccccagacattcccaagaagtcaggactggaccccaggttggcgaagcagtgcaccctcggtggcaccccactgcctttcctggtgctgtggcctctgctgcagatcacagattcatggccttctgtctgtccctcttctccaatcccagctgttccttctgtaaatctgtcccccagggcaggtccctcccccaaaggccccattcatactggtgttggtcagtcacccagtgtttgctcacccaggccaccctttatccagycaagccaccctccactgctcctgca

SEQ ID NO: 132408 - DNA, 559 bp, Homo sapiens
aaaattcaccccagagaggggacaagatttgaagaaggtcacacggcttctagccgagcatggtctccaacccagtactctgtttcttaacagcagacatttcttcaacttctactgagcacttggctggaccacacaaaggggaaaatgctattccgttcatgccagaatcttttttttttttttttttttaaagcgacagggtctcactttgttgcccaggctggactgcagcagtgcaatcatagctcactgcacctcctgggctcaagtgatcctccccacctcaacctcccaaktagctgggaccacaggcatgtgtcatgctgcctggctaattttattttttgtagagacagggtctcattctgttgcccaggctgctcttgaactcctggcctcaagcagtcctcccacagccttccaaagtgctgggattacagacatgagccagcacctttaagacatggacagaataatgaacaaatatttgtgggtagaaattttttaaggctatctgcaatggtacatgaagggtctatcctagcacgaagaatgt

SEQ ID NO: 132409 - DNA, 539 bp, Homo sapiens
gggagtcggctcaacattacaccctagttgataatatggagtccatatcattggattttcacctgaaaggaggaaaataagagacagagtatttagaaaaacccatatctttcaatgcttatttatcatcctgggagtaagggccaaaagtgcagcagtaagtgatttatcccatccctcttgatgaggatctatcccatcccatgccaaatggcatgttccgaagggggctgaattgaaaaaagattatggaatcttgactcgggggaaggggccttgtggctcggtcagaatgtcctcctttgaggcataccttccatgaacccattgtacattaagaggaccaaaatttaaaatcttcaattgtcatattttaaagtattcccaagctctgaataaccagaactcacatccaggctcctaaaacatttggactttgttgtgcacgatcaattaacaatgtctggtgtgggcgaaggtggtgaggaatcatggtgtgcctrctgtatctttgctgaccctagtctgtgggctttttt

SEQ ID NO: 132410 - DNA, 383 bp, Homo sapiens
gatggagcctaatggaaggtgtttgggtcatgggggaggactcctyatgaatagatcaatgccctcccttgtgtgggacgagggtggaagtgagttctcactctattcgtttctgcaggagctggttgttgaaaagagcccggcacctccctccgtctcttgcctcctctcttgcatgtgacctctgcacacagcagctctcctttgctttcctccatgagtggaagcagcctgaggccctcaccagaagcagatgcaggcttctcgtacagcttgcagaaccatgagccaaataagcctctattcattgcaaattacccagacacaggtattcctttacagcaacacaaacagacgtagatgcccaacttgcaaatcagagc

SEQ ID NO: 132411 - DNA, 400 bp, Homo sapiens
agatctcaggttgaaatttgatctctgctgttagagatggagcctaatggaaggtgtttgggtcatgggggaggactcctcatgaatagatcaatgccctcccttgtgtgggacgagggtggaagtgagttctcactctattcgtttctgcaggagctggttgttraaaagagcccggcacctccctccgtctcttgcctcctctcttgcatgtgacctctgcacacagcagctctcctttgctttcctccatgagtggaagcagcctgaggccctcaccagaagcagatgcaggcttctcgtacagcttgcagaaccatgagccaaataagcctctattcattgcaaattacccagacacaggtattcctttacagcaacacaaacagacgtagatgcc

SEQ ID NO: 132412 - DNA, 402 bp, Homo sapiens
gatggagcctaatggaaggtgtttgggtcatgggggaggactcctcatgaatagatcaatgccctcccttgtgtgggacgagggtggaagtgagttctcactctattcgtttctgcaggagctggttgttgaaaagagcccggcacctccctccgtctcttgcctcctctcttgcatgtgacctctgcacacagcagctctcctttgctttcctccatgagtggaagcagcctgaggccctcaccagaagcagatgcaggcttctygtacagcttgcagaaccatgagccaaataagcctctattcattgcaaattacccagacacaggtattcctttacagcaacacaaacagacgtagatgcccaacttgcaaatcagagcctggatttgaaccagatct

SEQ ID NO: 132413 - DNA, 553 bp, Homo sapiens
ttagagcaggactgagaacactgcctggtgcttgccattattatcaccatattattrttactgttgtcaccattgtcatccttacctctgcggtctttctggtcctgtcaccctgtgactgcatattcagccccacctcccagttccagaggtggaaggtatgaactactgtaatgcactatccggtgccccctccccaaacacacactcctttcctccattccagcatttagagctgtcgctgtcattgcctcaggaaagggatattttgcaagaagcagaggaagggcttcaaaggtatcgaaaacctctggattcagggcaggcaaaacccacaggaggtcacggcactgccctttgccccagaagagacagagtcccccaaactggggacaaggaacttcagagcaggagctaagtgtgagtagatgctgtggtgcctagaaagatggaagagccccagggaaagtgacagtgacaaaggcacctgttcagacgtgaacagcaccagccctatttcgcagatgggaaaggtgaagcgaagacagatttg

SEQ ID NO: 132414 - DNA, 539 bp, Homo sapiens
gtgcagcgagcactggcatcaaggaagggggctttggatggttcctactccatctcctctctcttagaagataaatgcatcccagtgatagacagatagctgctaccaccagcctccaaccccagacaccgtgggaggagaagagagatcagagacccaggcacaactcccatcgaggcgctcactctcaaatcacaccaagttgcttagattttcctaaatgtgcttcgtgtgtcggcccctcctggcctttgcttgttctgttccccgtgcctgaaatagccttcctcacccactgccgatctgtctggtgaatgctgcatgagtattgaaaaactcagctcaggggtctcttctgtgaagcctcttctatcctatacctcccactgggactggcccctcctgcctgaagccacttccgggagactcgattgtgccacccagttgcactttgctgtggtgtgagcagggggctgtgaactcaagtgtttcagcctgttgttgccatgckggaacatgggcccagtgtggccagatct

SEQ ID NO: 132415 - DNA, 603 bp, Homo sapiens
aattggttggggggtgggcacatgacccaagtcaggttcatgagactcaactcctggacttggctgaagctactgggaaacaaagctcatctttcttctgtggtgctaagctggtgggatttgagccaggagttgctggggaccctcttgccaccacccagcctgagaatgaaattgacccaaaagaaagcagagccatgaaaaggggctggatccctgagctgaagccattatccctgaacttttcaatcatggaagtctcagtttctttttattttttttccttgatttttttctaccctgaagccagtttgaattgagttttggtcattgggaaccaaagttattatatgtttacttgctataaattctccttttttgcatgagttagttttgacgtgaatttctagtctttatagccaaggatcttaagggtgaccaagtctgrctcaaccctgatggcccagtcaggggacagagcaggggattctcaaactaaaggcctgagcaaagaaaaataccttgcatgagtggtggagtccagtaactgagtgtgtggagggaacttccctggggagagagggggtttgctagagcccaagg

SEQ ID NO: 132416 - DNA, 303 bp, Homo sapiens
agatggtctcaatctcctgacctcctgatccagccacctcagcctcccaaagtgctgggattacaggtgtgagccaccacacccagccccaatacaagttctttgtagtattctttcaatgcttctggagatttgaaacttkccaaaataaacaactgaagtaaatgtgcctaggaagtgggaaggcactgagcttattggggacatacccaaagaccccactggaacagaactaaagaaccagttctctgattcgttaccataagagaggaagtttcaggagaaggaatgcaaaagttctat

SEQ ID NO: 132417 - DNA, 303 bp, Homo sapiens
agatggtctcaatctcctgacctcctgatccagccacctcagcctcccaaagtgctgggattacaggtgtgagccaccacacccagccccaatacaagttctttgtagtattctttcaatgcttctggagatttgaaacttgccaaaataaacaactgaagtaaatgtgcctaggaagtgggaaggcactgagcttattggggacrtacccaaagaccccactggaacagaactaaagaaccagttctctgattcgttaccataagagaggaagtttcaggagaaggaatgcaaaagttctat

SEQ ID NO: 132418 - DNA, 470 bp, Homo sapiens
gaaaccccatgaatgtaaggaatgtgggaaagcctttatctctgattcacatcttattcgacatcagagtgtccatactggggagaaaccctgtaagtgtaaggaatgtgggaagtcctttcgtcgtggctcagaacttacccgacatcagagagctcatactggtgaaaaaccctatgagtgtaaggaatgtgraaaggcctttacttgtagcacagaacttgttcgacatcaaaaagttcacactggggagagaccccataagtgtaaggaatgtgggaaggctttcattcgaaggtcagaactcacacatcatgagagaagtcacactggtgagaaaccctacgagtgtaaggagtgtgggaagccctttggtggtggctcagaacttagttgacaccagaaaattcatactggtgagaaaccatatgaatgtcagcagtgtggaaaggccttcattcgggcctcac

SEQ ID NO: 132419 - DNA, 470 bp, Homo sapiens
gaaaccccatgaatgtaaggaatgtgggaaagcctttatctctgattcacatcttattcgacatcagagtgtccatactggggagaaaccctgtaagtgtaaggaatgtgggaagtcctttcgtcgtggctcagaacttacccgacatcagagagctcatactggtgaaaaaccctatgagtgtaaggaatgtgaaaaggcctttacttgtagcacagaacttgttcgacatcaaaaagttcacactggggagagaccccataagtgtaaggaatgtgggaaggctttcattcgaaggtcagaactcacacatcatgagagaagtcacactggtgagaaaccctacgagtgtaaggagtgtgggaagccctttggtsgtggctcagaacttagttgacaccagaaaattcatactggtgagaaaccatatgaatgtcagcagtgtggaaaggccttcattcgggcctcac

SEQ ID NO: 132420 - DNA, 502 bp, Homo sapiens
gtaccagggactggtttcgtggaagacaatttttccatggagcacggggcggcagtggggctgggcagggaatggtttcaggatgawgttttataagcacattacatttattctgcactttatttctattatattacacagtaatatataatgaaataattatacgactcaccataatatagagtcagtgggagccctgagcttgttttcctgcaactagatggtcccatctgggggtgatgggagacagcaacagatcatcaggaattagattctcctaaggagtgtgcaatccagatccctcacatgcaaagttcacaatagggtttgggctcctatgagaatcgaatgctgccactgatcggccaggaggtggagctcaggtggtaatgcgagcaatgaggagtggctgtaaatacagatgaagcttcgctcacctgccactcacatcttgctgtgcagccctgtttataagcactggtccgtggcccaggggctgggg

SEQ ID NO: 132421 - DNA, 569 bp, Homo sapiens
ggtgaagtggtcacaggttccaagcttgtgtccaacatgtctgtggtcttcatcatgacaggggtgaaaagagaagtcacccggagaggagaygagtggctactctcagatggtgtggaataaagtggcgaaggtgaggttactgcagataaagacaccagggaagatggagggctagttttttccactgatgggcggcttggccatgacacatcctcaggacctctgctcataggagtggtcatccctgagtgtggagatctgtgagttgcagctgagtgagttcctggccaggaggctctgcttgatgtgtccaaggtaaaggtaccttgtgaggatgccccagaatgacctgttttgggggtgatggtcatttctgctgatcctgtcgtggtgaggggagtagaaattctagtgatggtttccgtggagatttctggtgatattgtggattgagcaggacctggggtggatgttctgcctaaggagagggcttctgttctggagaccttagtagtagcaccagtgggcattccagaaagagaagcacttctctctgttgctgagct

SEQ ID NO: 132422 - DNA, 570 bp, Homo sapiens
atgtttattttagggaacagctatacacaaatgtttatattaaaagaaaaaaagactaaaaaaattaatgagccagcagtccaatctacagatgagacactgataaaggatatcccacactcaaaacagtgattatactttttgttcccagtgaaaattgtggccactcagtgaagagttcaggctgaggcatcctaacactgattacattcctaggggtttctccatataagttctytcatatacaagaaagagaagaatcactgaaaaattttccaatattaatatactcataggttttgcatccagggagaagttccatattttccctaacacagaggcatcactgaaggctttctcttcttctttatatttcaagtttctctgtagtgtgaatgctcacaagtttcctaacaaatgtagaaaaacagaaagctctccaatattgatgatgttcaatggggcattctctccagaattaattctcaagtcccttaaaaaccgatagaacattcaaggctttcccatagtcactgcagaataccacactatagtttgctcagtaatgtg

SEQ ID NO: 132423 - DNA, 434 bp, Homo sapiens
tcccagatgcttctgagttatctgtttcctggtattcataccttctgcagtctctcacattgtatcaggattggtgtgttgtgagaccaacacaataggaaataagtgaaagcttagcagtcctcctgaggataggycataaaagccattttggcctctgtattggtcctctcttggatcactaaccttggcgagaacttattgccaaattgtcaaggagctgggccttgtaaagaggcctacatggtaatgactgaaggtcccctgacaacaaccaacatcaactttccaggcatgtgaataagtcatcttggaagtggactgttcatcagtaaagatgttagatgactatagctttggctgacatcttgattgtaagtaaaggcatgagagatcctgcagtgtaactacagagataagctgttcttgaattc

SEQ ID NO: 132424 - DNA, 521 bp, Homo sapiens
tggtagggtggggcgagccgtgyccaggactcgtcacaggtcttgggtccccgtgatgaggatgagagcccccgggatcttcacctcgaccctcaggcctttgatccagggtgcataggacacccagacccctcagaggagttccagacctcaacccccacccctcctgaggttgtccgcctgggagcctcaggaggcacgagaaagggtttggtctcagccctgcacttgctcggcgatcgctactgatctctgggcttcaacttccacctgtagaatggactcaccctgggagctgtctcctacacacacacacacacacacacacacacacacacacacacacatcgtgcaggcatagagtactaaagggagcacacactgcatccccacacgcggccagctgttattcttgccgtccccctcggcctccctgagagcagggattgtcttgtctcggagctctgctccccaacccggccccaagaatggatgtaactcaggcaactggagggtccctt

SEQ ID NO: 132425 - DNA, 377 bp, Homo sapiens
gcccccaagcgtagccctgtgggattctccgcagcgctggcctgactccttgactcagcaagtccaggtcaccctctgtccccacctctgaccgagccccctggtcgtgagtctrtgcggccgcctgttgggttctgctgttcgccactgagtcccagccctggccgtttccccagctgtgatgtgacagggtcccaggccctcacccaaacttggtaacaacactcaggactgcctgctcagcagaggtggagcctggactctgttccccggggccccctgcctcacactgtgtcctgaccagcctgccctttgcagacccctcctgctctgtgagatgagagatggagtgtctgagaaacgtgcatgggtcccag

SEQ ID NO: 132426 - DNA, 377 bp, Homo sapiens
gcccccaagcgtagccctgtgggattctccgcagcgctggcctgactccttgactcagcaagtccaggtcaccctctgtccccacctctgaccgagccccctggtcgtgagtctgtgcggccgcctgttgggttctgctgttcgccactgagtcccagccctggccgtttccccagctgtgatgtgacagggtcccaggccctcacccraacttggtaacaacactcaggactgcctgctcagcagaggtggagcctggactctgttccccggggccccctgcctcacactgtgtcctgaccagcctgccctttgcagacccctcctgctctgtgagatgagagatggagtgtctgagaaacgtgcatgggtcccag

SEQ ID NO: 132427 - DNA, 410 bp, Homo sapiens
ctgaattccagaaggaactactgagatgcaaagaagcacagcagcttttgcacacatgcgtgggrttagatggaaaacaagtggattgagggtctgccaatgaaagcgacccatactgaagtccactggctctggttgagacccagaagagtcatgcatcagaataaaggtggacaggaaataccctggcctttgtagggactgagcctgcaccgatgacttcaattgcagcctgtatggaggacccctgaccatcccccagaagtagactcccatctcttctgcagcaagataacatgctactaggcctcaattcattgctaaacattttttaacaagtatctcacatttaacaaaaaaagatcagtcatatggcagcaaaatacaatgtcatatgaccaaaacatgaa

SEQ ID NO: 132428 - DNA, 421 bp, Homo sapiens
gaattccagaaggaactactgagatgcaaagaagcacagcagcttttgcacacatgcgtgggattagatggaaaacaagtggattgagggtctgccaatgaaagcgacccatactgaagtccactggctctggttgagacccagaagagtcatgcatcagaataaaggtggacaggaaataccctggcctttgtagggactgagcctgcaccgaygacttcaattgcagcctgtatggaggacccctgaccatcccccagaagtagactcccatctcttctgcagcaagataacatgctactaggcctcaattcattgctaaacattttttaacaagtatctcacatttaacaaaaaaagatcagtcatatggcagcaaaatacaatgtcatatgaccaaaacatgaaagactgtgaaaat

SEQ ID NO: 132429 - DNA, 410 bp, Homo sapiens
ctgaattccagaaggaactactgagatgcaaagaagcacagcagcttttgcacacatgcgtgggattagatggaaaacaagtggattgagggtctgccaatgaaagcgacccatactgaagtccactggctctggttgagacccagaagagtcatgcatcagaataaaggtggacaggaaataccctggcctttgtagggactgagcctgcaccgatgacttcaattgcagcctgtatggaggacccctgaccatcccccagaagtagactcccatctcttctgcagcaagataacatgctactaggcctcaattcattgctaaayattttttaacaagtatctcacatttaacaaaaaaagatcagtcatatggcagcaaaatacaatgtcatatgaccaaaacatgaa

SEQ ID NO: 132430 - DNA, 372 bp, Homo sapiens
tctctactaaaaatacaaaattacccgggcgtggtggtacatgcctgtaatcccagctactcgggaggctgaggcaggagaatcgcttgaacctgggaggcggaggttgtggtgagctgagatcgtgccactgcactccagcctgggcaacaagagcgaaactctgtctyaaataaataaataaataaacaaacaaacaaacaaacaaactatcacagcataaagtaggaatatttcgttactgtctagttaaactggttaatgcagaaaggaagtctggtaattccagttttaaagtaaaattttggacattgtaggattgattatttggcatagttgtgatgtttgttcctgcgttatggttttgttggc

SEQ ID NO: 132431 - DNA, 590 bp, Homo sapiens
ccttcacaagtaacattgtaggtacaattagatatataatctataatatctaattatatgtataatatatatgaaaatatatctaaatatatatggtaatatatagttaacaatttgttgtttttaatctattctgttatccattatttaactaaatgctcttatcattcctaatcattttgtggttgattctgttatgaatctataactaaagtcttattatctatcatggtaatttgttaaattgttgtcccaataaaccacacctcctggtgttcgcacccttgtgtagtctcttgcccttggttctaggctgggtctgtggcttgcttttgattaatagaaaggaatsgaagtgacgttgcgcctaatccttaagaagcccagcagtttatgcttttgtgctgttgggaaccctaatccaccttgcaaaaagtctgattctattgcgggaaagaccacgtgcaaaggccataaagagagaaagatggaaaaacccatccaaactggcagaatcatgagcaaataaaatggctgttatcttaagccactcagttttggggtagtttgttacacatcaatagatagtt

SEQ ID NO: 132432 - DNA, 367 bp, Homo sapiens
cagagagaagccacagcctctgcctagcctactgggcacctgtctgcagcctaatctcaggtgatccttccctaggacgaacaacagaagcaagctccgtggcagaaaggagaaattcacggtagacctgtgaaggtgtttgctctctgtcccactggttcatcagcatcctcattcaacaaacataccttgtgccaggttctgaggatcacggatgaattgtttgcacagcaaacaaaactccccgctcccctgtggtttcctttcccagggtagaggcaggcctggagccagcattcccaccmgtgaggccctcctaatggcgactgtgatcagggcttggaggaggacaggagaggtgccgcaa

SEQ ID NO: 132433 - DNA, 403 bp, Homo sapiens
cgtctctcctagtagctccatggacaaccaccagatgttttcttcattccttctcttccttgatcctatcccagaccctatgcctgggacagaagagactctcatggatatcttctttttttttttttttttttttctttgagacggagtcttgctctgtcgcccaggctggagcgcagtggcgcagtctcagctcactgcaacctccgcctcccaagttcaagccattctcctgcctcagcctcccatgtagctgagattacaggygcccgccaccatacttggctaatttttgtatttttagtagagatggggctttgccatgttggccaggctgttctcaaaactcctgacctcaggtgatccacctgcctcaggggtgtcttctaatcagtttggaagt

SEQ ID NO: 132434 - DNA, 441 bp, Homo sapiens
aggggggagcaggctctgggttgctcctgctgccccccagtggtgggggcttgcccagtgcccagtcacatcagcaggtcacaagcctggcacccactaccaggtgagagaggatactgggttgggggtccactctgaacttctgctcctcctctgtgtctctttcctatctatagctcttatgagttygggatttggaggggaatcggggtattgactcctggatcttagggaaagaggaggctggggccctagactcctggatctgagggaggttggggctgtggggtctagaccccttggaccagaagaagtaggggactgggggcctgaattcctgggtccagagggaggagactgggggcaggacttaggacaggaaagtagaggagaataaggttggatccccaagtcccctgtggcacaaggcagttcaccccc

SEQ ID NO: 132435 - DNA, 512 bp, Homo sapiens
gaattcgtatttaattgaacatacactggttgtcagacactgctcttggaactttttttttttttttttttttttttttttttttgttgagacagagtctcactctgtcacccagactggagtacagtgatgcgatctcggctcactgcaacctccgcctccgggtttcaagtgattctcctgcctcagcctccaragtagctgggattacaggcgcctgccaccatacccggctaatttttatatttttagtagagacagggttttgccatgttgcccaggctggtctcgaactcctgacctcaggtgatccactcacctcagcctcccaaagtgctgggattacaggcgtgagccaccatgcccagcctgctcttggaactttacaaacattataatttactttgatgacaaccctattaaatataaatgagtatccccgtttttacatatgaggaaacagaggttccaagtgaaagaatggacttgtctagtgacacagttagctggtg

SEQ ID NO: 132436 - DNA, 512 bp, Homo sapiens
gaattcgtatttaattgaacatacactggttgtcagacactgctcttggaactttttttttttttttttttttttttttttttttgttgagacagagtctcactctgtcacccagactggagtacagtgatgcgatctcggctcactgcaacctccgcctccgggtttcaagtgattctcctgcctcagcctccagagtagctgggattacaggcgcctgccaccatacccggctaatttttatatttttagtagagacagggttttgccatgttgcccaggctggtctcgaactcctgacctcaggkgatccactcacctcagcctcccaaagtgctgggattacaggcgtgagccaccatgcccagcctgctcttggaactttacaaacattataatttactttgatgacaaccctattaaatataaatgagtatccccgtttttacatatgaggaaacagaggttccaagtgaaagaatggacttgtctagtgacacagttagctggtg

SEQ ID NO: 132437 - DNA, 568 bp, Homo sapiens
ttttctttttaaaaaaatctattggttattaatttgaagccttccttttcatagctgtgctccttaattgggagcaaacatgaatggaccacaacttagccaattttctatataygatctttgccatcctaatttaaaggaatattaattctttcttttcctctttcattccacaaacctctattgactacatctaagttctaaatggtgcactggatgttgaaaaagttgatgatgagcaagaacaaaattcctgctttcaggagacttacagttcaatatgggaaatataatttgttaaaatataaaagtgcaattgtgttacatgctgtacgaagtacatgttgacatgtgagcatataataaatgggctggaggccagaggattgccaaagagaatgggcctcctgctgagatgaaaagttgagcagggattagttggcgaaagtggagggacgatcctttctagccaggaggaagaacatgtacagaatctctgaggtgtgatgcgacaaagtctatataaaaaactgaagaaaggtctaatgtggcttaaatacagaagcta

SEQ ID NO: 132438 - DNA, 409 bp, Homo sapiens
cgaaccagctgtccttctgacagctcggtgttcagcttacagagaccacccctttcctccacagggagaggctcctccctctcctgggacagctcacaggtcctagtgattctctcaaccctaacaccgtctggcacgattgtgaccgctgaagtacaccacgagctccaggcttcagaaagtggtgctgagaacttgctccaagaagaagtcaaaccaaacttgcagttgatttggggtcatgtttaggtcagaatcaccgtgcccttgaacaagcaggtaggggggcttgatwacttaactttccacgtggacagaatttttttttttgttttgtttttgttttgcagacacagtctagctctgtcgcccaggctggagtgcagtggcacgatctcagctcactgca

SEQ ID NO: 132439 - DNA, 614 bp, Homo sapiens
aatgatctcaagcttggacctcgtggacagactggggaactcaagcwaaaccccggtcctcacagttctgcacgttgcaatcctgtgtcgttccgtccaatctaatccatctcaaggaccccagttcctgagcaccctggcttggctcggccaagggaagcgtctacagaatctgagtctagaatgcccggaggtctgtacttcttgctgttttcaggagattcaactgcaaagccctccccaagtcatccacattggctcacgtttctgtgccccacccttcctgcctgggaggacccttcttgttcagccaaaaaagcaacctgagggtggtgtggtagcagggactcacccatttctctttccatcttctggcccggatgcaaccctggaaggaagacctcaggacgatgatcatcttcataggattcccgacctgtgcctggctttgtcctgaatattagccttggcagcctggcctgggctccgatggtggatgaacttggctttccacgggctgccacctccagcctgcgctgtggagagaccaggtcctcggaacagtattttaaccttgtcctcctttcccttccagggtttaccaagacatagcg

SEQ ID NO: 132440 - DNA, 607 bp, Homo sapiens
tcaagcttggacctcgtggacagactggggaactcaagcaaaaccccggtcctcacagttctgcacgttgcaatcctgtgtcgttccgtccaatctaatccatctcaaggaccccagttcctgagcaccctggcttggctcggccaagggaagcgtctacagaatctgagtctagaatgcccggaggtctgtacttcttgctgttttcaggagattcaactgcaaagccctccccaagtcatccacattggctcacrtttctgtgccccacccttcctgcctgggaggacccttcttgttcagccaaaaaagcaacctgagggtggtgtggtagcagggactcacccatttctctttccatcttctggcccggatgcaaccctggaaggaagacctcaggacgatgatcatcttcataggattcccgacctgtgcctggctttgtcctgaatattagccttggcagcctggcctgggctccgatggtggatgaacttggctttccacgggctgccacctccagcctgcgctgtggagagaccaggtcctcggaacagtattttaaccttgtcctcctttcccttccagggtttaccaagacatagcg

SEQ ID NO: 132441 - DNA, 614 bp, Homo sapiens
aatgatctcaagcttggacctcgtggacagactggggaactcaagcaaaaccccggtcctcacagttctgcacgttgcaatcctgtgtcgttccgtccaatctaatccatctcaaggaccccagttcctgagcaccctggcttggctcggccaagggaagcgtctacagaatctgagtctagaatgcccggaggtctgtacttcttgctgttttcaggagattcaactgcaaagccctccccaagtcatccacattggctcacgtttctgtgccccacccttcctgcctgggaggacccttcttgttcagccaaaaaagcaacctgagggtggkgtggtagcagggactcacccatttctctttccatcttctggcccggatgcaaccctggaaggaagacctcaggacgatgatcatcttcataggattcccgacctgtgcctggctttgtcctgaatattagccttggcagcctggcctgggctccgatggtggatgaacttggctttccacgggctgccacctccagcctgcgctgtggagagaccaggtcctcggaacagtattttaaccttgtcctcctttcccttccagggtttaccaagacatagcg

SEQ ID NO: 132442 - DNA, 607 bp, Homo sapiens
tcaagcttggacctcgtggacagactggggaactcaagcaaaaccccggtcctcacagttctgcacgttgcaatcctgtgtcgttccgtccaatctaatccatctcaaggaccccagttcctgagcaccctggcttggctcggccaagggaagcgtctacagaatctgagtctagaatgcccggaggtctgtacttcttgctgttttcaggagattcaactgcaaagccctccccaagtcatccacattggctcacgtttctgtgccccacccttcctgcctgggaggacccttcttgttcagccaaaaaagcaacctgagggtggtgtggtagcagggactcacccatttctctttccatcttctggcccggatgcaaccctggaaggaagacctcaggacgatgatcatcttcataggattcccgacctgtgcctggctttgtcctgaatattagccttggcagcctggcctgggctccgatggtggatgaacttggctttccaygggctgccacctccagcctgcgctgtggagagaccaggtcctcggaacagtattttaaccttgtcctcctttcccttccagggtttaccaagacatagcg

SEQ ID NO: 132443 - DNA, 483 bp, Homo sapiens
tgagctgtccgcagaagcagctggaggccaggggagaaactccagaaggagaggtgagttcaatctyatggaattcatttttacaaaaggcgtatgagaatctaggggaatgcaataatgtcttgattccacaagtgttgtctgaggccaactccatgacagacacactgtatttctggaggatattgggacctctgccctggtaacggttaggcaactcttagattttcaataccaaggcaagagacttgacaatctccatttgcttgaatttcatcagaatttggtagactttctgaaatgatggacagaggttcggtggctgcgttactcaacgtcaggttttcctatggtttggtattgttttcctattctccccttcccacaacccctggcaaccatcattcttctcttattttctgattttttttttgttcagttttttgttccttttaattcagaaggagaaagggaaggaaatga

SEQ ID NO: 132444 - DNA, 483 bp, Homo sapiens
tgagctgtccgcagaagcagctggaggccaggggagaaactccagaaggagaggtgagttcaatcttwtggaattcatttttacaaaaggcgtatgagaatctaggggaatgcaataatgtcttgattccacaagtgttgtctgaggccaactccatgacagacacactgtatttctggaggatattgggacctctgccctggtaacggttaggcaactcttagattttcaataccaaggcaagagacttgacaatctccatttgcttgaatttcatcagaatttggtagactttctgaaatgatggacagaggttcggtggctgcgttactcaacgtcaggttttcctatggtttggtattgttttcctattctccccttcccacaacccctggcaaccatcattcttctcttattttctgattttttttttgttcagttttttgttccttttaattcagaaggagaaagggaaggaaatga

SEQ ID NO: 132445 - DNA, 480 bp, Homo sapiens
aggggagaaactccagaaggagaggtgagttcaatcttatggaattcatttttacaaaaggcgtatgagartctaggggaatgcaataatgtcttgattccacaagtgttgtctgaggccaactccatgacagacacactgtatttctggaggatattgggacctctgccctggtaacggttaggcaactcttagattttcaataccaaggcaagagacttgacaatctccatttgcttgaatttcatcagaatttggtagactttctgaaatgatggacagaggttcggtggctgcgttactcaacgtcaggttttcctatggtttggtattgttttcctattctccccttcccacaacccctggcaaccatcattcttctcttattttctgattttttttttgttcagttttttgttccttttaattcagaaggagaaagggaaggaaatgaaaagcaacgtttgtttaaattactat

SEQ ID NO: 132446 - DNA, 480 bp, Homo sapiens
aggggagaaactccagaaggagaggtgagttcaatcttatggaattcatttttacaaaaggcgtatgagaatctaggggaatgcaataatgtcttgattccacaagtgttgtctgaggccaactccatgacagacacactgtatttctggaggatawtgggacctctgccctggtaacggttaggcaactcttagattttcaataccaaggcaagagacttgacaatctccatttgcttgaatttcatcagaatttggtagactttctgaaatgatggacagaggttcggtggctgcgttactcaacgtcaggttttcctatggtttggtattgttttcctattctccccttcccacaacccctggcaaccatcattcttctcttattttctgattttttttttgttcagttttttgttccttttaattcagaaggagaaagggaaggaaatgaaaagcaacgtttgtttaaattactat

SEQ ID NO: 132447 - DNA, 488 bp, Homo sapiens
atgtaattgtaaattcattttctggtagtcacataaaatagaacaaaacaagcctaatgaattttaactcagaatataatcatttaagatgtgagcaacttgaaaccttctcaagcagatagtttacattctcttttccccattacgtcttcacaaagaggagtgtatttggctcacagcacatctccattcagatacgccccatttcaggtctcaatagccatttgtcactggtggctaccatatgaaacagcccaggtgtagactcctttactatttcaactcaaagtctttcrgtgaatcatgccctttattccaatgagtattacagatattagaagttcagggcctcgagtcattgacatttgtattcatgttgtgtcttcatcactagcagtagtgatttaaagtatggtgccatgatagctccatgcatgtaaagataaaagccccaaacactatcagctgttcattcagctcgtggaaat

SEQ ID NO: 132448 - DNA, 342 bp, Homo sapiens
atatgctatttgctaatcagggataacttttaccatargaatgttgccttttaacacaactgatgttccaccttaacagaacctagaaatttgccaagatcagtcgacaaggccattgacccagacagaaagagttcagacttatcgttgatggcctatcagaaaggagcttctatcacaccacaggaattgtctaggatgttagctttggatgaattggcattactgtgtggtttgattgtctgattccacatctatttttagatctcatatttcttgtgcctcaaaatcccttctctgaagtctgccttccctggagaagcaagatggcagaatcggatt

SEQ ID NO: 132449 - DNA, 408 bp, Homo sapiens
agggttgacaatttcaaaagaaacactcccctccaaagtttctgtatgatactcaattctcaacctatatgctatttgctaatcagggataacttttaccataagaatgttgccttttaacacaactgatgttccaccttaacagaacctagaaatttgccaagatcagtcgacaaggccattgamccagacagaaagagttcagacttatcgttgatggcctatcagaaaggagcttctatcacaccacaggaattgtctaggatgttagctttggatgaattggcattactgtgtggtttgattgtctgattccacatctatttttagatctcatatttcttgtgcctcaaaatcccttctctgaagtctgccttccctggagaagcaagatggcagaatcggatt

SEQ ID NO: 132450 - DNA, 557 bp, Homo sapiens
gcgcggaggaaatccgtccccgtgatccaatcatctcccacctggtccctcccccaacactgaggatgacaattcaacatgagrtttggctggggacacagagccaaaccgtatcacttgatatgatcccacagaatactattcattttcattcagtcttttatttcttaacaaatggtggtaaagtatatataattgaccatcttaaccatttttaagtgtaaaattcaatggtatttatgatgtccatattattttgccaccatcactgccattcatctccagaaatcttttcatcttccaaaattgaaactatatacccatcctagcccactttttaattcacctatttgttgtcttgcctgagtgccttatgtattctggatattaaccccttatcggatgtatggtttgcaaatatcttctcccactgtgtagattgtctcttcaacttattgtttcctttgttgtgcagcagcttttacatgtgatgcgatcccacttgtctatgtttgcttttgttgcctgtgatttaggtggttatatcaaaaaacaag

SEQ ID NO: 132451 - DNA, 570 bp, Homo sapiens
agcgcggaggaaatccgtccccgtgatccaatcatctcccacctggtccctcccccaacactgaggatgacaattcaacatgaggtttggctggggacacagagccaaaccgtatcacttgatatgatcccacagaatactattcattttcattcagtcttttatttcttaacaaatggtggtaaagtatatataattgaccatcttaaccatttttaagtgtaaaattcaatggtatttatgatgtccatattattttgccaccatcactgccattcatctccagaaatcttttcatcttccaaaattgaaactatatacccatcctagcccactttttaattcacctatttgttgtctygcctgagtgccttatgtattctggatattaaccccttatcggatgtatggtttgcaaatatcttctcccactgtgtagattgtctcttcaacttattgtttcctttgttgtgcagcagcttttacatgtgatgcgatcccacttgtctatgtttgcttttgttgcctgtgatttaggtggttatatcaaaaaacaagtttgcccagaca

SEQ ID NO: 132452 - DNA, 557 bp, Homo sapiens
gcgcggaggaaatccgtccccgtgatccaatcatctcccacctggtccctcccccaacactgaggatgacaattcaacatgaggtttggctggggacacagagccaaaccgtatcacttgatatgatcccacagaatactattcattttcattcagtcttttatttcttaacaaatggtggtaaagtatatataattgaccatcttaaccatttttaagtgtaaaattcaatggtatttatgatgtccatattattttgccaccatcactgccattcatctccagaaatcttttcatcttccaaaattgaaactatatacccatcctagcccactttttaattcacctatttgttgtcttgcctgagtgccttatgtattctggatattaaccccttatcggatgtatggtttgcaaatatcttctcccrctgtgtagattgtctcttcaacttattgtttcctttgttgtgcagcagcttttacatgtgatgcgatcccacttgtctatgtttgcttttgttgcctgtgatttaggtggttatatcaaaaaacaag

SEQ ID NO: 132453 - DNA, 557 bp, Homo sapiens
gcgcggaggaaatccgtccccgtgatccaatcatctcccacctggtccctcccccaacactgaggatgacaattcaacatgaggtttggctggggacacagagccaaaccgtatcacttgatatgatcccacagaatactattcattttcattcagtcttttatttcttaacaaatggtggtaaagtatatataattgaccatcttaaccatttttaagtgtaaaattcaatggtatttatgatgtccatattattttgccaccatcactgccattcatctccagaaatcttttcatcttccaaaattgaaactatatacccatcctagcccactttttaattcacctatttgttgtcttgcctgagtgccttatgtattctggatattaaccccttatcggatgtatggtttgcaaatatcttctcccactgtgtagattgtctcttcamcttattgtttcctttgttgtgcagcagcttttacatgtgatgcgatcccacttgtctatgtttgcttttgttgcctgtgatttaggtggttatatcaaaaaacaag

SEQ ID NO: 132454 - DNA, 539 bp, Homo sapiens
agaattcatcaccagcatgctaacactataggaaatgaagtcttcaggctaaagaaaaatgatactgtagagaaaattatatgaacacataggaatgaagagcaattaaaatggttaataagtgaataaatttgaaacagcttattctgtaataaaacatctttttaaaaaacaaactcttttcaggcagggcgcrgtggctcacgcctgcaatcccagcactttgggagtccgaggtgggtggatcacaaggtcaggggtttgagaccagcctggcccacatgggtgaaaccctgtctctactgaaaatacaaaaaaaaaaaaaaccacttagccaggcatggtggcacgtgcctgtaatcccagctacacgggaggctgaggcaggagaatcacttgaacccgggaagcagaggttgcagtgagccaagactgcaccattgcactccagcctgggcgacagagcaagactacatctcaaaaaaaaaaaaaaaaaaaaaaaaaaaaagaactgttttcaataaacatggagtttatac

SEQ ID NO: 132455 - DNA, 539 bp, Homo sapiens
agaattcatcaccagcatgctaacactataggaaatgaagtcttcaggctaaagaaaaatgatactgtagagaaaattatatgaacacataggaatgaagagcaattaaaatggttaataagtgaataaatttgaaacagcttattctgtaataaaacatctttttaaaaaacaaactcttttcaggcagggcgcagtggctcacgcctgcaatcccagcactttgggagtccgaggtgggtggatcacaaggtcaggggtttgagaccagcctggcccacatgggtgaaaccctgtctctactgaaaatacaaaaaaaaaaaaaaccacttakccaggcatggtggcacgtgcctgtaatcccagctacacgggaggctgaggcaggagaatcacttgaacccgggaagcagaggttgcagtgagccaagactgcaccattgcactccagcctgggcgacagagcaagactacatctcaaaaaaaaaaaaaaaaaaaaaaaaaaaaagaactgttttcaataaacatggagtttatac

SEQ ID NO: 132456 - DNA, 539 bp, Homo sapiens
agaattcatcaccagcatgctaacactataggaaatgaagtcttcaggctaaagaaaaatgatactgtagagaaaattatatgaacacataggaatgaagagcaattaaaatggttaataagtgaataaatttgaaacagcttattctgtaataaaacatctttttaaaaaacaaactcttttcaggcagggcgcagtggctcacgcctgcaatcccagcactttgggagtccgaggtgggtggatcacaaggtcaggggtttgagaccagcctggcccacatgggtgaaaccctgtctctactgaaaatacaaaaaaaaaaaaaaccacttagccaggcatggtggcacgtgcctgtaatcccagctacacgggaggctgaggcaggagaatcacttgaacccrggaagcagaggttgcagtgagccaagactgcaccattgcactccagcctgggcgacagagcaagactacatctcaaaaaaaaaaaaaaaaaaaaaaaaaaaaagaactgttttcaataaacatggagtttatac

SEQ ID NO: 132457 - DNA, 538 bp, Homo sapiens
gaattcatcaccagcatgctaacactataggaaatgaagtcttcaggctaaagaaaaatgatactgtagagaaaattatatgaacacataggaatgaagagcaattaaaatggttaataagtgaataaatttgaaacagcttattctgtaataaaacatctttttaaaaaacaaactcttttcaggcagggcgcagtggctcacgcctgcaatcccagcactttgggagtccgaggtgggtggatcacaaggtcaggggtttgagaccagcctggcccacatgggtgaaaccctgtctctactgaaaatacaaaaaaaaaaaaaaccacttagccaggcatggtggcacgtgcctgtaatcccagctacacgggaggctgaggcaggagaatcacttgaacccgggaagcaraggttgcagtgagccaagactgcaccattgcactccagcctgggcgacagagcaagactacatctcaaaaaaaaaaaaaaaaaaaaaaaaaaaaagaactgttttcaataaacatggagtttatac

SEQ ID NO: 132458 - DNA, 621 bp, Homo sapiens
tttccagtagccaagtttgtggagctcttgcctcatgggaagacttcggtgaaattctgagatgtgtaaagaactttccaggacattgactgagctgactcacatgggtgggggcgcctctcaaggggaagtgatttgtgctcagaacaagctgcaccagacagaaatttgtgggcatcttccmggcagaggtagggctaggatacaaacttcctgaaagggtcatgcagagggaggctggaggcctggggcgccactttgagctagtagccatagctggggtaaagtcattccaacaaggatcattgttgcctattccattcattaattccacatttcctggaccccatttatttcttctttgttcaccatttacataaatattgactaatgacaatgcctagacctgattagatgaagtggtcgacagggtaatggcccccaaagatgtccacttgctaatccctgtgaaaggcgttagccagcttgcattaggcagacagtaagggaagggtcccctgagaacctctgacccacctgataagcagttacaccagatgttttgtgcagataagggaacttgcacagggggcttgcctaaacaccccagcaggggactaa

SEQ ID NO: 132459 - DNA, 500 bp, Homo sapiens
gaggaattctccttttaatgactgactgagctatcactcctctctgtcagtaaaaacagcagcaaaaaaaatgtcttggctgggcgcagtggcacatgcctgtmatcccagctctttgggaggccgaggtgggcagatcacctgaggtcaggagtttgagaccagcctggccaaaaccccgtctctactaaagatacaaaaattagccgggcatggtggcaagtgcctattgttgtacctgagcgagttagaaaaacgccacactttgagacgaattaagagtcctttattagctagcgcctgagagacgtctaaggcttaaaattctctcagcccggaggaaggggcttgattaacttttataccttggtttaggaaggggggggcgtccagttaaaacaattttacagaagttaagtaatcaaaaagttaaaaggataaatggttacaggaaagtaaaacagttccaggtgcaggggctttaagactattacaaggtg

SEQ ID NO: 132460 - DNA, 500 bp, Homo sapiens
gaggaattctccttttaatgactgactgagctatcactcctctctgtcagtaaaaacagcagcaaaaaaaatgtcttggctgggcgcagtggcacatgcctgtaatcccagctctttgggaggccgaggtgggcagatcacctgaggtcaggagtttgagaccagcctggccaaaaccccgtctctactaaagatacaaaaattagccgggcatggtggcaagtgcctattgttgtacctgagcgagttagaaaaacgccacactttgagacgaattaagagtcctttattagcyagcgcctgagagacgtctaaggcttaaaattctctcagcccggaggaaggggcttgattaacttttataccttggtttaggaaggggggggcgtccagttaaaacaattttacagaagttaagtaatcaaaaagttaaaaggataaatggttacaggaaagtaaaacagttccaggtgcaggggctttaagactattacaaggtg

SEQ ID NO: 132461 - DNA, 381 bp, Homo sapiens
tgaattcattgaatgctgacagcaactccacgaggaatgccttggggcttgttttcctattatttatctgtgaataagcactctattgagattgttcccacgccatacattttacacgtttaaagttgygtttagcagagttaggggttttttagtgtattcacagacgcgcaaccatcaccacagtccattttagaacattttcatcacccaaaaagcaagcatgcagccattagcagtcactctccattccccggtattagtttgctgggactgccaaaaccaaggaccgcaaactgggcggcttgaaacaacagaagtgtcttctctcgcagttgccagaggctggaagtccgagatcaatcagggtgtcggcagggc

SEQ ID NO: 132462 - DNA, 423 bp, Homo sapiens
gggggtctgcagacacgaaggggaaggaggggaggatggtgagagcagaggcccagagtggaacggtcttgctggcaggagacagagaggagtcgccagggggagggggacagtatctttgaggaagkcaggggcaggctcacagcctcctcaggctcaggtggagggtctggactcttgactctggggcactggcgagccacggcaggctcttaccaggggaggcccacagagcacagcaactaatggaaagaagcagggaggggtgttccaagcagaggaagggctccaagcaacagcctgaccctaaaggtaatgccttgggctggagtagaaagcagtgagaaaccagcctgaagatgacggcctggccttttggctcaggggcactggggagtcatagaaagctttagagctggagag

SEQ ID NO: 132463 - DNA, 577 bp, Homo sapiens
caaatggaagcaggatttagaagcaatatactaggaatagcacctataatattgaagcttagagatacttttaaaaggattttggaaacctttctccttcatgcatcaatgtatccatggagccaaagatgagatatttaggatggtggagggcaagagaggaaaggacatcaccttttacattaggaaaatagccagactcctacyggaattaggtagcccagatatgaggggaggcctttgagagatttcagggtgttttctgaatacacaaggataaaaagcagatgtttagagaattcttaatcttgttgatgcaaacgttatttcactgatgatctcaaaaacattggaaattgtatggaaggagaaaaggaaggcattagagacatctctcacctcatggtctctcagggaacatgaatttgaggcagcagatctaatctgaagaaatgcacaaactagatagagataaatagcaagtctggatggcattgcctaagtgttttgaaagaactcaaggttgaaattggggacgtgttggccaaaatgtggaatggatctttacaaatggctg

SEQ ID NO: 132464 - DNA, 408 bp, Homo sapiens
ctgcactgggaatgtggagacacaaagaaaaggaggatttttggagcacgtggatggttgatatayggaatgaagacgattgtgtctgattgcatgtgtaatgaagcctcataattttaggttagggttatgtggatgtcccaattaatgggcaatagattgtgtggagataattctagttgatcatactttttcttcaatatctttgaatgcttaaatatccaatttcctgagatttttattgttcaattttcttcttaaatgaccctcccttcctccaagttaaagttgctaaagcaatgaggtatgagtcccggcagcctaaggtgagcaaagctggccggctcaggttcaacgagggaatggttcatggttccgaatgcttggaatattccataacaaatgctg

SEQ ID NO: 132465 - DNA, 391 bp, Homo sapiens
actgggaatgtggagacacaaagaaaaggaggatttttggagcacgtggatggttgatatatggaatgaagacgattgtgtctgattgcatgtgtaatgaagcctcataattttaggttagggttatgtggatgtcccaattaatgggcaatagattgtgtggagataattctagttgatcatactttttcttcaatatctttgaatgcttaaatatccaatttcctgagatttttattgttcaattttcttcttaaatgaccctcccttcctccaagttaaagttgctaaagcaatgaggtatgagtcccggcagcctaaggtgagcaaagctggccggctcakgttcaacgagggaatggttcatggttccgaatgcttggaatattcc

SEQ ID NO: 132466 - DNA, 620 bp, Homo sapiens
tccttgaacccagaaggcagaggttgcagtgagcagagatcatgcctttgcactccagcctgggtgacagagcaaaactccatctcaaaaaaaaaagaaaaattattccatgtcttgaacatgctgtcctgttagtcattttcatgcaactgtgcatgaygttcttgctgccttgatcactagctgctcctgcacagtaccccatacctcacctctcatttgataattctgtatttttggggtctctccttacctggcactcacttcagagtcttctccagcttccctaaaccacttaggtgtccctgctatgactccttcaagtcccatatgcgagcttagtgcctttccagctgttcatacttctttcttcctgaaattcctctacttcaatttgtccaaagatattttgaaattaggattgctaagtttaccaaatacaaatttaagatacctaattaaatttgaatttcaaattcaaattggtaaagaatgattaattttttagtataaaattaccaagtattaaaaataaatatttgttgtttatcttgaaatttaaatttaactgggcactctgtttattatcagtgaatctatctgaaatgcttgtttacctt

SEQ ID NO: 132467 - DNA, 525 bp, Homo sapiens
atacaaaaaattagccaggcgtggtggcacatgcctgcaatcccagctacttgggaggctgaggcaggagaattgcttgaacctgggaggcggaggttgcagtgagctgagatcgcaccattgcactccagcctgggcaacaagagagaaactccatctcaaaaaaaaaagaaagaacgattcaaaataaaacaaaaattctataccaataaatttgattacttagacaaaattttaaaaaatgtatttgacataaactaccaacgttcactcaaaacagataacctcaacagttctatttttctttaaataattgaatttgtagtttaaaatcttccaacacagaagtctccaggctcagacggtttcactagcaaattatgccaaatatttttggaaaaaaawtataccaattctacacaaagtcttccagaaaattgaggaagagggaacacttctaaactccttttatggattcagcattatgctaatgccaaaactagaaataacactacaagaaaacaa

SEQ ID NO: 132468 - DNA, 476 bp, Homo sapiens
cactttaacagtgcctggtgcaaaataagggctcagtgagtgttattaaattgttcattcattttatttatccattcattcattaaacaatctttgctgatgcttggcatctgctagactctttgaagcagggtttattggagtctgctgctgatctgaaagggtattttcaaggaaagtgaagtcagtttggtgtgaggcctctagacaggcataaatgtacaatgtgtctcaggaagtcaatcatagcagccccacccatagctctggttgctggcctggtcatcactctcttttttttctctccatctgctcccatgggtcctggtatataggatacactaggaggaaaaagagaaggggaatgcytctttcttgctttcacgattccagttacagacttctgttttcagtgctgcccatttccgcagttttgacattgcctctcccttcccttcccccatttacctgcttct

SEQ ID NO: 132469 - DNA, 573 bp, Homo sapiens
ccacatcccggggagcagcctttgaaggagccagggctgtcaatggagttatactaattaggcaacaggagcggcctcaaatgcctgtcctcatttgcaattcagtgtgtctttaatttgccagaaatatacatatatatatcctctctggatataaaaaaatatatccaggttggtgagagagactaacttgactaccatttacaaagtgcctaaagtaccaggcagttgctaaatctcttacgtccgtaaggtaggtaggcactatgtttttcatccccattttacaggtaaggaaactgaggctcaagaaaaggaagcactcccctaatggtcacaaagctggtaaggggcaaatctgggtgtctgtcattgtatttatagcaactgttcttaaccagggcgacttggtccttcaggggacatttggcaatgtgtagagacatttttggttgtcacaacttgggagtgggagagrtgctcctggcatttggggaatagagaccagagatgccaatgaacgtccttccctgcaaaggacagcttctcaaaacacagaattatttggcccaa

SEQ ID NO: 132470 - DNA, 495 bp, Homo sapiens
atggagctggggatcatgtcatccccacaaggaagaaagcatggagtatgtctggacggtcctgactagggaaggaaaagcaaattgtgggaccttcagggaacctggaggttactggaaaggtctgcagacagacaaaggaatcacaagtaatggtcaagctgataraagtcaggaactgttgaaaaaggttgaaggagcctggaaatcactggatggggtccagagcaagagtaatttttatttttatgtttttattgttgctgcttctcttttagagacagggtctggctctgtcacacaggctagggtgtagtggtgcagtaggatcattgcgcactgcagcctcaaactcctgggctcaagtgatcctcctgcctcatcttctcgagtaactgggactacaagtgcataccatcatgcccagctaatcttcttcttaaggtttttgtacggacagggtctcactatgttgcccaggctagtctcaaactc

SEQ ID NO: 132471 - DNA, 495 bp, Homo sapiens
atggagctggggatcatgtcatccccacaaggaagaaagcatggagtatgtctggacggtcctgactagggaaggaaaagcaaattgtgggaccttcagggaacctggaggttactggaaaggtctgcagacagacaaaggaatcacaagtaatggtcaagctgataaaagtcaggaactgttgaaaaaggttgaaggagcctggaaatcactggatggggtccagagcaagagtaatttttatttttatgtttttattgttgctgcttctcttttagagacagggtctggctctgtcacacaggctagggtgtagtggtgcagtaggatcattgcgcactgcagcctcaaactcctgggctcaagtgatcctcctgcctcatcttctcragtaactgggactacaagtgcataccatcatgcccagctaatcttcttcttaaggtttttgtacggacagggtctcactatgttgcccaggctagtctcaaactc

SEQ ID NO: 132472 - DNA, 552 bp, Homo sapiens
atgaaatattgggaaataattcatcatgtaaaaactggatataaagaaaaaacttttcctgcaggacaytgttgcaggaagtcagggaccccaaacggggggactggctgaagccatggcagaaaaacatggattgtgaaggtttcatggacatttattagttccccaaattaatacttttataatttcttatgcctgtctttactgcaatctctaaacataaattgtaaagatttcatggacacttatcacttccccagtcaatacccttgtgatttcctatgcctgtctttactttaatctctcaatcctgtcagctgaggaggatgtatattacctcaggaccctgtaataattgcattaactgcacaaattatacagcatgtgtgtttgagcaatatgaaatctgggcaccttgaaaaaagaacaggataacagcaatgtttaggaaacaagagagataaccttaaattctgaccgccggtgagccaggtggaacaaagccacatttctcttctttcacaagcaaatgggagaaatatcactgaattc

SEQ ID NO: 132473 - DNA, 578 bp, Homo sapiens
tactggactgattttcaagttaacactttatgtataggaaacttcattccctggggaaattcatctggggactcagtctttgagtaaggcttcatttgctctaagaaaactctggagatgagtctgtctagaaggaaatatgtctacctattggatgtaagcatgtcattttgtacaatggcacattttctttttacctgataagaatttgccaggtagtcctccaccatcgttcctatctttgtcttttcttcaaaagggcagattggttccctgggaaaaaaccctagtggaaaagtaagaaggcatgagaagccaaagctgcccacagtctcatgcccagaagtcattccatcctagcttgaaattcccatatgctcctgcacactcgagaaaactacacacacacaacactttcatgaaatgccatagtartcctgtgtcacctagactcagataagcagacatgggccaaactgcctgttgggtaaagggatatagcttcatttttcaaggaaacttacaccctgaaaaatgtgactatctatctacccatagtagtaacactcatgaagctt

SEQ ID NO: 132474 - DNA, 548 bp, Homo sapiens
aaagagaatgcacacctaggggtaggtctctgaactggcccaagcccccccgggggcgtacctgtctcttatggtygagattgcagaggtgaaataaactccagtctcccatagcgctcccaggcttattaggaagaggaaattcccacctaataaattttggtcagaccggttgatctcaaaacctgtctcctggtaagatgttatcaatgacagtggtgcccgaaacttcattagcaattttaatttcacctcggtcctgtgatctcgccctgcctccacttgccttgtgatattctattaccctgttaagtacttgatgtctgtcacccacacctattcgcacactccctccccttttgaaaatccctaataaaaacttgctggtttttgtggcttgtggggcatcacggatcctaccaacatgtgatgtctcccccggacacccagctttaaaatttctctcttttgtactctgtccctttatttctcaagccagccgacgcttaggaaaatagaaaagaacctacgtgattatcggggcaggt

SEQ ID NO: 132475 - DNA, 548 bp, Homo sapiens
aaagagaatgcacacctaggggtaggtctctgaactggcccaagcccccccgggggcgtacctgtctcttatggtcgagattgcagaggtgaaataaactccagtctcccatagcgctcccaggcttattaggaagaggaaattcccacctaataaattttggtcagaccggttgatctcaaaacctgtctcctggtaagatgttatcaatgacagtggtgcccgaaacttcattagcaattttaatttcacctcggtcctgtgatctcgccctgcctccacttgccttgtgatattctattaccctgttaagtacttgatgtctgtcacccacacctattcgcacactccctccccttttgaaaatccctaataaaaacttgctggtttttgtggcttgtggggcatcacggatcctaccaayatgtgatgtctcccccggacacccagctttaaaatttctctcttttgtactctgtccctttatttctcaagccagccgacgcttaggaaaatagaaaagaacctacgtgattatcggggcaggt

SEQ ID NO: 132476 - DNA, 548 bp, Homo sapiens
aaagagaatgcacacctaggggtaggtctctgaactggcccaagcccccccgggggcgtacctgtctcttatggtcgagattgcagaggtgaaataaactccagtctcccatagcgctcccaggcttattaggaagaggaaattcccacctaataaattttggtcagaccggttgatctcaaaacctgtctcctggtaagatgttatcaatgacagtggtgcccgaaacttcattagcaattttaatttcacctcggtcctgtgatctcgccctgcctccacttgccttgtgatattctattaccctgttaagtacttgatgtctgtcacccacacctattcgcacactccctccccttttgaaaatccctaataaaaacttgctggtttttgtggcttgtggggcatcacggatcctaccaacrtgtgatgtctcccccggacacccagctttaaaatttctctcttttgtactctgtccctttatttctcaagccagccgacgcttaggaaaatagaaaagaacctacgtgattatcggggcaggt

SEQ ID NO: 132477 - DNA, 548 bp, Homo sapiens
aaagagaatgcacacctaggggtaggtctctgaactggcccaagcccccccgggggcgtacctgtctcttatggtcgagattgcagaggtgaaataaactccagtctcccatagcgctcccaggcttattaggaagaggaaattcccacctaataaattttggtcagaccggttgatctcaaaacctgtctcctggtaagatgttatcaatgacagtggtgcccgaaacttcattagcaattttaatttcacctcggtcctgtgatctcgccctgcctccacttgccttgtgatattctattaccctgttaagtacttgatgtctgtcacccacacctattcgcacactccctccccttttgaaaatccctaataaaaacttgctggtttttgtggcttgtggggcatcacggatcctaccaacatgtgatgtctcccccggacrcccagctttaaaatttctctcttttgtactctgtccctttatttctcaagccagccgacgcttaggaaaatagaaaagaacctacgtgattatcggggcaggt

SEQ ID NO: 132478 - DNA, 512 bp, Homo sapiens
tttacctaattttttcttaattaagaaaactgaagcattccaaggggaaaatgttggagctatgtgcccattttctaattgttcagtaactaatttctctaaagcctccagtttctcyttacttagcggccattgttctatccgaattggcttatctgttaaccattttaaaggtataggttctggaggcttaacaatggccgccatcaaaaatgacatcccaatctttggcaggaactttgtctttccacttgaagtggttttttcaaaccttgcaaatttttttctagtcccataccagggacataccccatttcatgcatcatatgttgattttgagggctatataattgttctggaattagaacttgtgctccccattgttgtaataaatctcttccccataaatttataggtacataagttataattggttgaatagtcccaggttgtccatcgggcccttcacaatgcaaaatataactactttgatatacttcaggggcattacc

SEQ ID NO: 132479 - DNA, 512 bp, Homo sapiens
tttacctaattttttcttaattaagaaaactgaagcattccaaggggaaaatgttggagctatgtgcccattttctaattgttcagtaactaatttctctaaagcctccagtttctctttacttagcggccattgttctatccgaattggcttatctgttaaccattttaaaggtataggttctggaggcttaacaatggccgccatcaaaaatgayatcccaatctttggcaggaactttgtctttccacttgaagtggttttttcaaaccttgcaaatttttttctagtcccataccagggacataccccatttcatgcatcatatgttgattttgagggctatataattgttctggaattagaacttgtgctccccattgttgtaataaatctcttccccataaatttataggtacataagttataattggttgaatagtcccaggttgtccatcgggcccttcacaatgcaaaatataactactttgatatacttcaggggcattacc

SEQ ID NO: 132480 - DNA, 512 bp, Homo sapiens
tttacctaattttttcttaattaagaaaactgaagcattccaaggggaaaatgttggagctatgtgcccattttctaattgttcagtaactaatttctctaaagcctccagtttctctttacttagcggccattgttctatccgaattggcttatctgttaaccattttaaaggtataggttctggaggcttaacaatggccgccatcaaaaatgacatccyaatctttggcaggaactttgtctttccacttgaagtggttttttcaaaccttgcaaatttttttctagtcccataccagggacataccccatttcatgcatcatatgttgattttgagggctatataattgttctggaattagaacttgtgctccccattgttgtaataaatctcttccccataaatttataggtacataagttataattggttgaatagtcccaggttgtccatcgggcccttcacaatgcaaaatataactactttgatatacttcaggggcattacc

SEQ ID NO: 132481 - DNA, 512 bp, Homo sapiens
tttacctaattttttcttaattaagaaaactgaagcattccaaggggaaaatgttggagctatgtgcccattttctaattgttcagtaactaatttctctaaagcctccagtttctctttacttagcggccattgttctatccgaattggcttatctgttaaccattttaaaggtataggttctggaggcttaacaatggccgccatcaaaaatgacatcccaatctttggcaggaactttgtctttccacttgaagtggttttttcaaaccttgcaaatttttttctagtcccataccagggacataccccatttcatgcatcatatgttgattttgagggctatataattgttctggaattagaacttgtgctccccattgttgtaataaatctcttccccataaatttataggtacataagttataattggttgaatagycccaggttgtccatcgggcccttcacaatgcaaaatataactactttgatatacttcaggggcattacc

SEQ ID NO: 132482 - DNA, 378 bp, Homo sapiens
gtgcaccctccgacagcagtctgggcaccccctcggatggacggcctgaactccgaggcccgggtcgcagccgcaccaagcgctggccttttggcaagaagaacaaggtgggggccgggacccttgggatggtgggggagaaggacagtgaagtggggacagtggggcccctattgagtcagccccagccgcctgaacgccgagtcycgggcaggaattttcctcttggctgccagcccggactggagggaaggaaggcggccgattggcctgggagtcccccgaggcgaaggcgggggcagggtggggaggtggggaggtccgtggcgtttgtctgctgcttctcgggatgctgggagaaaacctgctggtggaatt

SEQ ID NO: 132483 - DNA, 337 bp, Homo sapiens
cccaaccaagattacaagctgctggctcacctctccagcagttccaacctcaagtggtgtccatggggaagagtgagcagctccaggccagatgagactcccatgttgccccgctgatctctggtcactcccaggaggcctgtggcctgcagaagggaatggggaagtcaggtgaagmgtgattatgtaggcatggttgggtcttgccctgggcctggggaggagcatcccaggaggtgacccacctggcagtctaccaatagcaggtgaagggcggtgctcccaggatggtgctccaggaacaggccacggagggtatgcaggacttggggttcca

SEQ ID NO: 132484 - DNA, 402 bp, Homo sapiens
gcccagcctggagtgcagtggcacaatctcagttcattgcaacttstgcctcccgggttcaagtgattcttgagcctcagcctcccaagtagctgggattacagaagtgtgccaccacacctagctaattttttattttttatttttgtatttttgatagagacagggtttccccatattggccaggctggcctcgaactcgcgacctcaggtgatccacatgcctcagcctcccaaagtgctgggattacaggcgtgagccaccgcacccagcctatagatcccatctctatctctctgtgtatcttctattggttctgtctctcgggagacacctgaccaattcagggagggctcctgtgagaagtttcttgagtcaagacgcagatgagcagggggagc

SEQ ID NO: 132485 - DNA, 600 bp, Homo sapiens
tcccctgccgggcggcctgacccagcctcttgtgcagagacacctggggctccccggcaagatcccttctaagcattccttcttattttgcagatggggaaactgaggcacggagctggacagtgactcagacaccaggtgaacactggcttttgagggcagggttgggactcgtgggggcagcaatgccagctgggtcatcacagtgaggagtgagctctgactcccaggagggtacataaggtgaggactgtcctagaggaatcagaagaycccaggggaccctcagggatacttcagggaccccaacccccatgtggctgatcacagcccctgcatctatttctcttcaaacccttttcctgcaggagctgcctggagtggagctgagagctcaggtctgggctcagccagtccagagtgcaaatctactgtcccttcctagctgtgtgatcttggcaagtgacttcccctctgggggaggggagggctcagttttcccatctgtgaagtggatcagagctttcctgtcaaggttaggggtcatccagcactgctcctacccactgctatgaactcttatacatgcctaaaaacccc

SEQ ID NO: 132486 - DNA, 538 bp, Homo sapiens
gacgtggtgccttgcatcccagctgcttcagccccagctgtggctaaaaggggccaaggtacagcttaggccattgctttcagagggtgtaaaccccatgccttggtgacttacacatgggctgtgggcctgcgggtgcacagaagtcaagaattgaggtttgsgaaacttcacctagatttcagagggtgtattgaaacacctagatgtccatgcagaagtttgctgcaggggcagagccctcatggagaacctctactagggcagtgcagaagggcaatgtggggttggagcccccacacagagtccccactggggcactgactagtggagctgtgagaagagggctactgtcttccagacctcagaatggtaaatccactgacagcttgcaccgtgtgcctggaaaagccacagacacccaatgccaacccatgaaagcagccaggagggggccacaccctgcaaagccacaggggcagagctggcgcaaagccatgggagcccacctcttgcatcagcgtgccctggatgtgag

SEQ ID NO: 132487 - DNA, 538 bp, Homo sapiens
gacgtggtgccttgcatcccagctgcttcagccccagctgtggctaaaaggggccaaggtacagcttaggccattgctttcagagggtgtaaaccccatgccttggtgacttacacatgggctgtgggcctgcgggtgcacagaagtcaagaattgaggtttgcgaaacttcacctagatttcagagggtgtattgaaacacctrgatgtccatgcagaagtttgctgcaggggcagagccctcatggagaacctctactagggcagtgcagaagggcaatgtggggttggagcccccacacagagtccccactggggcactgactagtggagctgtgagaagagggctactgtcttccagacctcagaatggtaaatccactgacagcttgcaccgtgtgcctggaaaagccacagacacccaatgccaacccatgaaagcagccaggagggggccacaccctgcaaagccacaggggcagagctggcgcaaagccatgggagcccacctcttgcatcagcgtgccctggatgtgag

SEQ ID NO: 132488 - DNA, 441 bp, Homo sapiens
gtagcttctagaagccttagttttccccactgtaaaggagatagcgatgggcctctctcacaaagatgctatgataaagaaacaagacagtcttgctggctcacacctgtaatcccagcactttgggaggccgacayggaaggatcactgagcccaggagttccagaccagaccagcctgggcaatataacaagaccctcatttctgaaaaaaaaaaaaaaatatatatatatatatatatatgaaaacaaaaattgaaaaaataaaaaaataaagacaatgaggttatacatgtctacctagcaccatttcaggcatatcaaaaacactcagtgttcatgcattctttcaacaaacattgagcacctgccatatgccaggcattgatcttggaactggggccacatcagagagtaaaataagcaaattcctctcttcttg

SEQ ID NO: 132489 - DNA, 391 bp, Homo sapiens
gagatagcgatgggcctctctcacaaagatgctatgataaagaaacaagacagtcttgctggctcacacctgtaatcccagcactttgggaggccgacatggaaggatcactgagcccaggagttccagaccagaccagcctgggcaatataacaagaccctcatttytgaaaaaaaaaaaaaaatatatatatatatatatatatgaaaacaaaaattgaaaaaataaaaaaataaagacaatgaggttatacatgtctacctagcaccatttcaggcatatcaaaaacactcagtgttcatgcattctttcaacaaacattgagcacctgccatatgccaggcattgatcttggaactggggccacatcagagagtaaaataagcaaat

SEQ ID NO: 132490 - DNA, 441 bp, Homo sapiens
gtagcttctagaagccttagttttccccactgtaaaggagatagcgatgggcctctctcacaaagatgctatgataaagaaacaagacagtcttgctggctcacacctgtaatcccagcactttgggaggccgacatggaaggatcactgagcccaggagttccagaccagaccagcctgggcaatataacaagaccctcatttctgaaaaaaaaaaaaaaatatatatatatatatatatatgaaaacaaaawttgaaaaaataaaaaaataaagacaatgaggttatacatgtctacctagcaccatttcaggcatatcaaaaacactcagtgttcatgcattctttcaacaaacattgagcacctgccatatgccaggcattgatcttggaactggggccacatcagagagtaaaataagcaaattcctctcttcttg

SEQ ID NO: 132491 - DNA, 418 bp, Homo sapiens
atccacaatgacttaagtcaactctgattttccatagaaatagaataacaattagtggttacatttcattatgaccagtccagttcttcagaggtatggccatccacagtatttttagtcacctaacaactgtaagtggtgtccctctgaatcaaatcgtgttttctaacatgcataccccaaaggactgacttctatattttttgaaatctttaggaaaggaaccctgctgaataggggagaagctatggggttatgtcaaaacaatgagaagggctggtgggggcagaggcagcagagaaagaaacagaggcagcagaawaaaaaacttttacctgaagtcaagggcatggagtgtgatttgttgtgctcgttgggaagtggatggcttggatggtggacagtatcacttggtacc

SEQ ID NO: 132492 - DNA, 563 bp, Homo sapiens
gtgagaaaaagaaaatgacctcaaagaggagaaggggacctgtcagtgaggctggaactgtggggctaatggagcaccaaggygggactgggcagggtcaggcccaggttttctggtggcagtgaatttttatacctatttggaggtgtccaaggcagacaggcctctaaactggattcctctgaattctggttcagtgaagtattaatatgtgctccatgatataaagggcttcatcagagtctcttcattttggaaatgttgtattggttgtctcaagttagcatgttaataactgagaagtcctgcactaaagacatcaggcaaactttattaccttacaaaatccagtttggaaaaccctgctctcaggactaccgactggtaaaagaggtggaggagcatatctgtagtaaaaagacaggatcaagcaagtcagttttcatgtcccatgaaacattccagggcccaattcgtgtaagccagttaatctccagaaatgtcactgctacccaattatctgaaaggattttgtgtgacatgtatgtagtacttgtactaac

SEQ ID NO: 132493 - DNA, 640 bp, Homo sapiens
tattagggtaatactggcctcaaataatgagttagaaagtgttccttcatcttctattctttgaagaatttgtaaagaattggtattaattattcatagtgttctgagaatgtctactaggtattgttggcttttagtgttgttcatgccttctattttcttattgttttctgcctagttgttatatccctcttgaaaattgggtattgaagtcttcaactaccattgttgagttatctgtttcttccttcatttttgtcagtttttacttcacatattttggcactctgttgtttactggatatatgtctataattgttatatcatcctaataaattgtcttttttatcactataaaatgtccctctttacctttggtractttttttttttaacgtctattttgtctgatattaacatagcctctccagctttcttgtgggtgctgtttacatggtatatcttttcctttccttttactttcagtctatttgtatctttgaatataaagtgtggctctgtagacagtatatagttcaatcttgctttttgtttttaactaaagattgtttaactctctgccttttgattggactgtttaattaaaagtatttaatgtcattattgatacagtaaattt

SEQ ID NO: 132494 - DNA, 547 bp, Homo sapiens
aatattttaaaaactttcaagagcttctayggagcttgcagtgagccgagattgcgccactgcagtccgcagtccggcctgggcgacagagtgagactctgtctcaaaaaaaaaaaaaaaaaaaaaaaaaaatactttcaagagcttctaaaaatggaaaaaagtcaagtaaaattccagttatatgtaaaagtattgtctttttaatgctttgatattattggtctagctctgttttcgtccagtataccaattgactctagctaatattgcagatgttttaaagaaaacctagtatctatgaagttggaatatttctccaggaaactaggtgaacacccaagtaggtctcccaggatgcaagactggtttggacctcagtcttatatgttcagaaacccgatatgtcagcacactaaagacagatctatctcttagaagcagtctcccaatggtcaacctcaccacgactgatagaaaaaaacagaatgccagttggccaattaaaatgaaaaacaggactcccaagaaaactggcaatctttgg

SEQ ID NO: 132495 - DNA, 541 bp, Homo sapiens
gtggtaatgtgatatgcagaaatgatgaacaactctcagtaagactttaaacacaacaaaatatagtcttcccttgatttacaagtagttttactcctaraaaatttacaacatatcaaaattgtgcaaaagatactgtgtttatatataaaacagaatacaattctaggcttaaattattagaaacagatttttttacctaaatagatatctgctgggacactggaaaactgtgcgacatgcaaggcaaggctttgcttatgtggaactgtattgtgcactgtaggtctttggtcaatggaatgtgggctgagtggcagtgtaccagctctgagtctagggttaagaggtaggtattagcttcagagaaacagaactagaaggatgcatatggatataaatatagagagaaataataaagagacttgttataaggaatcggctcatgcaattatggaggctaagaagtgcagacccaggagggtcaatggtataatttaaatcaaagcctgaatccaaaggtagaagatcaatgtcccag

SEQ ID NO: 132496 - DNA, 575 bp, Homo sapiens
cggagcatcatgctggtggcgcacaggcatggcatgaccagtggagactacgccttcttcaacattgagctcttcaacagctcttcctatggtaactctgcttccactttcccctcctctgctagggttccaagagaggttgtcagatgcccatgaatggtgggttggataaataatatgtggtacataaacaacatggaatagctatgcagttataaaacaatggaatcatgtcyttagcagcgacattaatggagctgagccatgatccaaagaattaatgcaggaacagaaatctacctgcatgctctcactttacagtggagctaaacattgagcaaatacggacataaacatgggacaatagacctggggatcttctagggttgttgtggttgggttaaaaaaccctgttgggtactacgttcaccacctgggtgatgggatccatactccaaaccccagcatcacgcaatattcccatgtaacaatctgcacatgtacccgttgtatctagagtaaaagttaaaataaaaaacaagagggttgtgagaaagattcagaaatttgagtta

SEQ ID NO: 132497 - DNA, 431 bp, Homo sapiens
taatcattccccttgaaaatagaaagcactcggttacacattagtgattattattctttcaccttactcttggttttgccctctctggacaatagatttcttgagcctattctgatttgtttggttgtgtgtattgacgtggactcccttatgtgatagtgatgcagggtcatgagccactactttcactgtcgggtgtagaattcaggatcacctgaaatgactctgctggggaggatttggaagcaagaagagagtcagagagtcatggttcaaagactttgaaggcattttcccagcaattctttgaaggtttactctgggacacagtaagccggtagcaaacattgagatggagagagaaacagagagaatgagaggggtatgygtgtgtctgtgtgtgccacccaaggcaggctctgcttgatatt

SEQ ID NO: 132498 - DNA, 559 bp, Homo sapiens
ctcagcagggggagggttgctaggctgtgcatcacctggaactggagagtgctgaagatgaggcctggtgagaatcccaccataatcaagatacccgtaaatcttctctcagaagtggtgtggatcaatgaaygacatcatcattcctgcacccctacagactttatgatttgccaaagtatttgaggtcaacattgtgtgtaaatatgggttcacaacaaattctgaggccataatccaggcccatgtttttttctttcctttttttttttttttttccagagatggtcttgctctgtccctcaggctgaagtgcagtggtgcgaccttggctcactacagcctgaacctcctgtgctcaagcaatcctcccacctcagccacttcagcagctgggaccatagttacatgccaccatgcccagctaattttcattttttttgtagatgaggtctcactatgttgccccggctggtctcaaactcctgagctcaaaggatcctcccaccttggcctcccaaaatgctgggattacagatgtgagccaccatgcccagtc

SEQ ID NO: 132499 - DNA, 620 bp, Homo sapiens
tagagcaagctcccatataattatctcccccacttaaaaagaaattaaacatccatgaagatttgaaacgttatttatgttgacaggtcagatttttgggtgaacattcagacatattttgactctaagggtccaggaggggagaagatatgatcattaaagaaattcagtagaatactgagatcaagctttggtttatcaaagaaaatactgtggaatgagcttatttagttatctgttcaaattctattttgatgtcttatagcatatagtttcatttatggtgctatttgtcattaattcatatgccacaggagagcataaataaaagttaataccagctttagggttgaaaataatagaagtgatcatttaaaataatggtatcaaataagaagagaaagacggttcatgggttgtgagacatatkccatgaaggattggaagaaaaagataatttgaatagagattgtagataatgagaaagctgtcctgagattatgtgagtttcaaggaagcacacgtgaatatcaataagtagatttgaggcaagttagaaattactttgaaatccagagtaaagtgtttggatttcacttggttaatggaagccattttat

SEQ ID NO: 132500 - DNA, 554 bp, Homo sapiens
ggttctcacactttcagcttcaggacccctttatactcttattgagaaccctaaagtgctatagatttcgtgggttgtacctattgataattactatattaaaattaaaattcagaaatttaaaaaatatttattaactaattacaaaataaggctattacattagcagaaataatattttatgaaaaatttttttcagaacaaaagtttagtgagaataatggcattattttacatttttgccaatttctttaatgtctggcttaatagaagacaaacatattctcacatctggttctayattctgtgtgttttgatatgttattttttttgttaaattatatgaaaaaaattctaggacctcaccaattccctgaaagtgtcttggggaccccagggatctctgaaccacattttgagaaccagtggtatggggaaatgtaactgagatttagtaatttaatttatactaatatctatttagttattttcaaacattcaagaaagtatgtgatggtgatatttatgcttacatttacacaaatgtgctaggt

SEQ ID NO: 132501 - DNA, 571 bp, Homo sapiens
ttcttaatatatctatttttcagttttttccattatggtcaaatacccataacataaacattaccatcttaattttcaagtatacattcagtaacattcaacacagtacattcacaatgtggagcaaccatcgttaacatctgtcaccacaactcttttcatcttgcgaaaatgaaactccatacccrttaaatgtaactcctcattctccctttctttcagcctttagcaaccaccattccactttgtttctatgattttgagtactctaagtatctcacataggttaaatcatacaaatttgtctttttgtaattggcatatttattttagtatagtgtcctcaacgttcacctacattgtagcatatgtcagaaatttctttcttaaggctgaataatattccattgtatgtgtatatcacattttgcttatccatttatccatcaatggaccatggcttagttcacattttagctattgtgaataatgctgctatgaacatgggcatacacatattcctttaagactctgctttcaatgcttttggtatgtacccagaagtgaaatt

SEQ ID NO: 132502 - DNA, 628 bp, Homo sapiens
tgcaaagttatagtacttgtgccctcagatcctttatggaacaatgtggaatggaaattaaacatgcatacatgcacacacatgcacacgcaaagctgtaactctgattgatactttattttaatacaaggtttaaaatgaaaaccagatcattgaaatcttaaattaatttcacattaaaccttgatagttttgaaatggtgtcacccagcaaataccaaataacctgaactttgagattaaacctcttctatggaacactrttcaataagtctttcccattataagccttttgtgaaacaaagtggtgtagaaatatatgtaataatagcaacacaataacataataataatagtaaataaaccaatgcctcaatcttgtgaaatatctcagtacttagttttgctaggctttctttcagcagctttgatttcccagatgtatggcctctgaaaaatagcaaaaataaatcaattacaataggaaaggtagcaaaggcaaggatggtgattgtgtttatgtttcactgagcgaagacattagcggtctctggtatttacttacttgattttacttacttataatcatttttcaaggattggaccttttttttttttttttttttaa

SEQ ID NO: 132503 - DNA, 470 bp, Homo sapiens
tactttttttgtcttgtctaagaaatcattccctaccttcaattcatgaagattttcctattaaatgtatacactgtctttaagtcctatttttcacatttgatctttaatttattcagaactttgtattagtctgttcttggattgctataaagaactacctgagactggataatttataaagaaaagaggtttaattggctcatggttctgcaggctgtacaggaaacatggctgaggaggcctcagaaaacatacagttatggcagaaggcaaaggggaaggaggcacatcttacatggctggagcgggagaaagagaagacaagggggaggtgttacacacttttaaacaaccaggtgtcatgagaattcactcactatcatgagaacagcaaggagaaaatctgaccccaaaatccarttacttcacagcaggcccctcctccaagattggggattacaatttga

SEQ ID NO: 132504 - DNA, 489 bp, Homo sapiens
cccaccaacagtgtaaaagcattcctatttctccacatgctctccagcatctgttgcaaaacaaacagtttatttcctatacaatttgctcattgtctataasattgggaaataaaggagaaaagtgtgacaagtgactaaataatttcagtgatgactaggacatttgtgaagtttatcagccaacaaaacataataaaattgagttggtccctagtctcccaaatatcccctctctgcagctctggagggctgtgacgtcaactcaacgaggaataatggctcgcgtccacggttctggttgttttctccttcagttttcacaattcttttttttttttttttttttaagtgctaacctgctttctttctctctgccaggggtggatgtgattacaaagctcttctcagcctcaggtaaagattattgttacctgtggtcctgagagacctggctctatttctcaaaccttttgtatgtgtgctggg

SEQ ID NO: 132505 - DNA, 618 bp, Homo sapiens
tgacacaccactgcacccagatgaatgccatgacttttaaagggaactccttatttctacctagagtcagtttccagtggcttctgttttgaacagtttggtcatcctgttacagtaggtagctagtcagatatgagcagggcaggaaagggccccctgcctcccactaggaatgtcaggcgaccatcaggtgatggttggaggttgttaaactgcctctctaaaataataattggtcgtagccagcgccagggaaaggcagtctcccaacagattaaaaaaaccgggccagacgtggtggctcatgcttgtaatcccagcactttgggaggccgaggcaggtggatcacttsaggtcaggagttcaagaccagcctggccaacatggtgaaaccccgtctctactaaaaatacaaaaattagctgggtgtggtggcacgtgcttgtaatctcagctacttgggaggctgaggcaggagaatcacttgaacctgggaggcggaggttgcagtgagctgagaacaagccattgcactccagcctgggtgacaagagtgaaactccgtctcaaacaaaacaaacaaacaaacaaacaaacaccaaaaaacccctgaaact

SEQ ID NO: 132506 - DNA, 554 bp, Homo sapiens
atggcatgttaaaatgaaagtaaggcttggattgaattttggcagacacataaattaatatttattcataaacatgaaaacwaatgcaaaactattttgaaggcagaatggaccagcctaggaaaatgatcagatcttcatgcagttaaaagtgcaggaccatcgagaagtgagacctgaagatggtaataaactgctgggcgtgccagattctgcaggccagggtggtagagctgtgctccttctgcctatcccttatgccaagtaagaaaccctctgggttagattttgacaaactatttgaagtgctaaataaccacctttgaaggttattgattcctgattgggattcctaatagctaattaactgccctgaggggtaggggtagattcctgattaggatactttgaatgtttgctaactgctgataaacgtttgctaactactgctaaatgtttgctaactgctgctaagagttaatttatatacacactacagcatactgttcatagccaaatacagcatcactgttttcccaatctcccaagctaga

SEQ ID NO: 132507 - DNA, 554 bp, Homo sapiens
atggcatgttaaaatgaaagtaaggcttggattgaattttggcagacacataaattaatatttattcataaacatgaaaactaatgcaaaactattttgaaggcagaatggaccagcctaggaaaatgatcagatcttcatgcagttaaaartgcaggaccatcgagaagtgagacctgaagatggtaataaactgctgggcgtgccagattctgcaggccagggtggtagagctgtgctccttctgcctatcccttatgccaagtaagaaaccctctgggttagattttgacaaactatttgaagtgctaaataaccacctttgaaggttattgattcctgattgggattcctaatagctaattaactgccctgaggggtaggggtagattcctgattaggatactttgaatgtttgctaactgctgataaacgtttgctaactactgctaaatgtttgctaactgctgctaagagttaatttatatacacactacagcatactgttcatagccaaatacagcatcactgttttcccaatctcccaagctaga

SEQ ID NO: 132508 - DNA, 497 bp, Homo sapiens
ggttgaggacaaagaagaataaatcaaccttttagctatggtaaaaatttaatttattttatttatttatttgtttgtttttgagatggagtctcactctgtcactcaggctggagtgcagtggtgcgatctcagctcactgcaacctctgcctcccgggttcaagcgatgcccctgcctcagcatgccgagtagctgggattacaggtgcccaccaccacacctggctaatttttgtatttttagtagagacagggttttaccatgttggccaggctggtcgcgaactcctgacctcaagcaatttgcctgcyttgtcctcccaaattgctgggattacaggagagccaccgcacccaggaaaaatttaatttttaaccaatataaatgctctgatttaaaattgctagctgaggaatcgaatgtgggagctttcaaattaaatttaataaacacaaaaattcccattcctaccctactgcttccaggacttctaa

SEQ ID NO: 132509 - DNA, 523 bp, Homo sapiens
gagctgatgctgcagttcaaggtctaaagccatctgctggcagaatttcctctcactgagaggaggtcagtcttttgttctattcatgcattcaacagattggatgagactcacccatattatgggggcaatctgctttactcaaattctaatgattgaaatattaatctcatccaaaaacaytctcacagaaacatccagaataatgcttggccacatttctggacaccatggcccagccatgttgacatctaaaattaaccactacactacacaagactgcaacaaacatagaagaaattatggggatagaggagtggctacagaaggccaacgtgatttatcctaaaagacacatccattggttttactgtttaaatttgaaggctcaatgagaatactcaagtggaaagaaaatgctaccttcttaaataaagctcagataagtcaaagttgacactgacataaggctcctgatgaagaggtgatttaggccatctgcccaacttgggaagctaaagtg

SEQ ID NO: 132510 - DNA, 390 bp, Homo sapiens
agttgagggcctaatttatagcaaagccccttaacctgtatctcaagtatgagcctacagggtagaaagccctgtccaagatgctgtgtgwaaagaaagacgaacaaaatgtggagcctgccagtaggagatgactgttttataaaacaaaacctccagtgcaagagcgacttgcataccatagtcagtcatcttgaggcaagtagttagagattagagagatgtgtgtaaaacaaacacagtgaatcaaatcagctttctataagcaataactcaaatagtctgagtaggaaaaccatcaacccatttcagactaaactcagacaatttgtttagggtgtaaaaccaaaaaccactgttgagctaatttgacagacacctcatttcatg

SEQ ID NO: 132511 - DNA, 526 bp, Homo sapiens
gactcccttccatacagcagaaactaaaacagaattagacttggttccttgactggcatcttgagatttttctgaatagtcaacgaatatttcctcaatgtctggcactatagaagacaacagagatatagttgagcccaagayagacaagtccttcctatcatgttgcttatattttagtaaaagaaaaacaattaaattagaatatattagactataaataaattcacttcacctaatgagaaaaaccatttaaaaaactcataatggtagaagactttaacatagatcaatgttaaacagagagaacatgtgagtatatactataattctacaccaaataattatttcaagtaaaagcaatcagtaggttttcaatcaccaattggaagagaaaaaaactctattccatgtccatatataaatgagctacttggcaagcccatgcctttggtgataaggggaaacaagcagaggattataggtggcttatggaaattcaatcattacacttaaaaaaatcctc

SEQ ID NO: 132512 - DNA, 526 bp, Homo sapiens
gactcccttccatacagcagaaactaaaacagaattagacttggttccttgactggcatcttgagatttttctgaatagtcaacgaatatttcctcaatgtctggcactatagaagacaacagagatatagttgagcccaagacagacaagtccttcctatcatgttgcttatattttagtaaaagaaaaacaattaaattagaatatattagmctataaataaattcacttcacctaatgagaaaaaccatttaaaaaactcataatggtagaagactttaacatagatcaatgttaaacagagagaacatgtgagtatatactataattctacaccaaataattatttcaagtaaaagcaatcagtaggttttcaatcaccaattggaagagaaaaaaactctattccatgtccatatataaatgagctacttggcaagcccatgcctttggtgataaggggaaacaagcagaggattataggtggcttatggaaattcaatcattacacttaaaaaaatcctc

SEQ ID NO: 132513 - DNA, 481 bp, Homo sapiens
ttaaacaacaatattgccttttctcctggttccttctcagtttctttttaaccaaaggagtgtgggagaaatgtttgatgctrtgtttctcaggagtctctggccttgctttttgatgttccaggatatataccaggatgtaataagtctatcgtgctaactttaaagatccttatttatctaaatgttaattgtgggaggaatttggggaataactttctaaagcaattagttggtacaaccaaaaaacataaaggaacaacaggaaagacatggaattgtgtggcttttcaaaagcacgctgccctgagaaaagtggtcagagacctagcagagaatggtataatggggagagtttgaaaatgttctgttgttctatatttgtttagaattctattttgacagtaagcctcaatttgattaatactacacatttaacaacataaaaaataaccttagaggaaattcatttatgaatata

SEQ ID NO: 132514 - DNA, 418 bp, Homo sapiens
gaattctattttgacagtaagcctcaatttgattaatactacacatttaacaacataaaaaataaccttagaggaaattcatttatgaatataggtaggaatgtttctttttctttttttttttccttttttttttttttgacagacagggtctcactctgttgcccaggctggagtgcagtggcgccatctgggctcactgcaacctctgcctcctgggttcaagcgattctcctgccttagcttcctgagtagttgggattacaggcacccaccactacgcccagctaatttttgtattttcagtagagacacagttttgccatgtcaagckggtcttgaactcctgacctcaggtgatccacgcacctcgccctctcagagtgctgggattacaggcatgaaccactgcgcccag

SEQ ID NO: 132515 - DNA, 595 bp, Homo sapiens
cttaatttttgtgtatcccaaattaaattatttaaggcactttctctgctaaaattacaactaaactattgttataaacaatkaaaatacttgttagtctttctcagaaatataagaattgaatatcaatacttttaaaagaataaaggtattgtggactactgtgccccaaaattcaaatagcaaacatagctctaatgaaaagatgaacagaagggcccccaaaaggtcttgcctttcggttttaatatcctaaggaggagacgaactgatacaagttatgtcccaggtcactctatacatctgccacagccacagggcccacttcagctctgcactatagaaccaaacaatatcaaatacccctgcatgctgaaactgatcaaaaccagctataaatactaacattgaaataaataaaatatcataggatatagattcattgaataaggtaatggaaggatttattttgctcatgggttaaaaagaggagaaaactcatcctgaaattctaataggagagaaggtgaatcatttgactaggggataaactgagtggaaatctgagaagccaaagtagaaatcagacaaaatt

SEQ ID NO: 132516 - DNA, 595 bp, Homo sapiens
cttaatttttgtgtatcccaaattaaattatttaaggcactttctctgctaaaattacaactaaactattgttataaacaattaaaatacttgttagtctttctcagaaatataagaattgaatatcaatacttttaaaagaataaaggtattgtggactactgtgccccaraattcaaatagcaaacatagctctaatgaaaagatgaacagaagggcccccaaaaggtcttgcctttcggttttaatatcctaaggaggagacgaactgatacaagttatgtcccaggtcactctatacatctgccacagccacagggcccacttcagctctgcactatagaaccaaacaatatcaaatacccctgcatgctgaaactgatcaaaaccagctataaatactaacattgaaataaataaaatatcataggatatagattcattgaataaggtaatggaaggatttattttgctcatgggttaaaaagaggagaaaactcatcctgaaattctaataggagagaaggtgaatcatttgactaggggataaactgagtggaaatctgagaagccaaagtagaaatcagacaaaatt

SEQ ID NO: 132517 - DNA, 466 bp, Homo sapiens
acttagacaatccctaagactagccaagttctggcactctttagatattcattagcacacaccaacatgytgctaatatctcatctggaagttaatgaatataacttcccccacataggaaggagatatttcaaagcaagcaggagtgacttaatttttctgttcatcacagatgcttggaaattctagcaaaagctttgtggtagctgctaaaagtaactcttcccaatcatggaaattttaggtggtgaaatggaaggaaagtattctaaccatgggaacaattttagtgaagtgagaaaatgagctgagatagagcataggatccctgggatggcgtagaagctgacagggaaggtaggttaggccaaggctgctgtccttggatggcatactgtgatgtttagaacttgtcctggtttcaagcatcatagtggcatgataaagcagtattacaaaaaatgac

SEQ ID NO: 132518 - DNA, 466 bp, Homo sapiens
acttagacaatccctaagactagccaagttctggcactctttagatattcattagcacacaccaacatgctgytaatatctcatctggaagttaatgaatataacttcccccacataggaaggagatatttcaaagcaagcaggagtgacttaatttttctgttcatcacagatgcttggaaattctagcaaaagctttgtggtagctgctaaaagtaactcttcccaatcatggaaattttaggtggtgaaatggaaggaaagtattctaaccatgggaacaattttagtgaagtgagaaaatgagctgagatagagcataggatccctgggatggcgtagaagctgacagggaaggtaggttaggccaaggctgctgtccttggatggcatactgtgatgtttagaacttgtcctggtttcaagcatcatagtggcatgataaagcagtattacaaaaaatgac

SEQ ID NO: 132519 - DNA, 592 bp, Homo sapiens
attgaaactcgggttgaccgtaatttgtcatgcttaatatttcctgcttttaaaaaattgttaaaaatgttaatatatggagattttaarcgcatacagtttataaatccattggcgcttcatgccattaattatcttaaatacccaccaaaagcagaaatttgggtggtggtatggaggtgcaaaggttaataagacacagaccctgtccttaaaacttactctctgtttaagagaagatctatttgaatgtaattacaatacatggcagtggtataacaaagagacagtttaaatatatatatatatatgttgaaatatatatatatgtttaaatatatatatatgtatacacacgcacacatacacacacacacacaaaactgtgctaggtatgtccacatcttacttaatatttaccacaactatgtctttttacttaagaagaaagggaggttcagaaaggttaagtaacttatcttagttcagatagcaaagaaatagcaaaattagaattagaattcaggtattttgattttactttcatttcaattaacttcaacagagctttattgagaatctaccatgtacc

SEQ ID NO: 132520 - DNA, 592 bp, Homo sapiens
attgaaactcgggttgaccgtaatttgtcatgcttaatatttcctgcttttaaaaaattgttaaaaatgttaatatatggagattttaagcgcatwcagtttataaatccattggcgcttcatgccattaattatcttaaatacccaccaaaagcagaaatttgggtggtggtatggaggtgcaaaggttaataagacacagaccctgtccttaaaacttactctctgtttaagagaagatctatttgaatgtaattacaatacatggcagtggtataacaaagagacagtttaaatatatatatatatatgttgaaatatatatatatgtttaaatatatatatatgtatacacacgcacacatacacacacacacacaaaactgtgctaggtatgtccacatcttacttaatatttaccacaactatgtctttttacttaagaagaaagggaggttcagaaaggttaagtaacttatcttagttcagatagcaaagaaatagcaaaattagaattagaattcaggtattttgattttactttcatttcaattaacttcaacagagctttattgagaatctaccatgtacc

SEQ ID NO: 132521 - DNA, 592 bp, Homo sapiens
attgaaactcgggttgaccgtaatttgtcatgcttaatatttcctgcttttaaaaaattgttaaaaatgttaatatatggagattttaagcgcatacagtttataaatccrttggcgcttcatgccattaattatcttaaatacccaccaaaagcagaaatttgggtggtggtatggaggtgcaaaggttaataagacacagaccctgtccttaaaacttactctctgtttaagagaagatctatttgaatgtaattacaatacatggcagtggtataacaaagagacagtttaaatatatatatatatatgttgaaatatatatatatgtttaaatatatatatatgtatacacacgcacacatacacacacacacacaaaactgtgctaggtatgtccacatcttacttaatatttaccacaactatgtctttttacttaagaagaaagggaggttcagaaaggttaagtaacttatcttagttcagatagcaaagaaatagcaaaattagaattagaattcaggtattttgattttactttcatttcaattaacttcaacagagctttattgagaatctaccatgtacc

SEQ ID NO: 132522 - DNA, 430 bp, Homo sapiens
gaattcaggtattttgattttactttcatttcaattaacttcaacagagctttattgagaatctaccatgtaccaggcactatgctacatgctgaacatgcaaatataggaaataccactggcctcacggttatagtcttgtaggggactgggctatgcagaaacaagctgtattgtgatatatgcaataatgcaagtttgtacatattaccttctgagcaaagcagcaaagastgttctttttccataagttgttgactttctgtcttgtgaccctggtaagtaaccatgatcgaactgatcaagaatctgtaacttggccaaaggtaaccacaaaattgtgcaaaactacaggatacatagagtaaatatttttggggtttcattattacagatgacgttgaggagagaaaagttttacatttttaca

SEQ ID NO: 132523 - DNA, 406 bp, Homo sapiens
taccaggcactatgctacatgctgaacatgcaaatataggaaataccactggcctcacggttatagtcttgtaggggactgggctatgcagaaacaagctgtattgtgatatatgcaataatgcaagtttgtacatattaccttctgagcaaagcagcaaagagtgttctttttccataagttgttgactttctgtcwtgtgaccctggtaagtaaccatgatcgaactgatcaagaatctgtaacttggccaaaggtaaccacaaaattgtgcaaaactacaggatacatagagtaaatatttttggggtttcattattacagatgacgttgaggagagaaaagttttacatttttacaatcttaggtttaccaatgggctctgggaggcctaatagcagaattc

SEQ ID NO: 132524 - DNA, 431 bp, Homo sapiens
agaattcaggtattttgattttactttcatttcaattaacttcaacagagctttattgagaatctaccatgtaccaggcactatgctacatgctgaacatgcaaatataggaaataccactggcctcacggttatagtcttgtaggggactgggctatgcagaaacaagctgtattgtgatatatgcaataatgcaagtttgtacatattaccttctgagcaaagcagcaaagagtgttctttttccataagttgttgactttctgtcttgtgaccctggtaagtaaccatgatcgaactgatcaagaatctgtaacttggycaaaggtaaccacaaaattgtgcaaaactacaggatacatagagtaaatatttttggggtttcattattacagatgacgttgaggagagaaaagttttacatttttaca

SEQ ID NO: 132525 - DNA, 406 bp, Homo sapiens
taccaggcactatgctacatgctgaacatgcaaatataggaaataccactggcctcacggttatagtcttgtaggggactgggctatgcagaaacaagctgtattgtgatatatgcaataatgcaagtttgtacatattaccttctgagcaaagcagcaaagagtgttctttttccataagttgttgactttctgtcttgtgaccctggtaagtaaccatgatcgaactgatcaagaatctgtaacttggccaaaggtaaccacaaarttgtgcaaaactacaggatacatagagtaaatatttttggggtttcattattacagatgacgttgaggagagaaaagttttacatttttacaatcttaggtttaccaatgggctctgggaggcctaatagcagaattc

SEQ ID NO: 132526 - DNA, 406 bp, Homo sapiens
taccaggcactatgctacatgctgaacatgcaaatataggaaataccactggcctcacggttatagtcttgtaggggactgggctatgcagaaacaagctgtattgtgatatatgcaataatgcaagtttgtacatattaccttctgagcaaagcagcaaagagtgttctttttccataagttgttgactttctgtcttgtgaccctggtaagtaaccatgatcgaactgatcaagaatctgtaacttggccaaaggtaaccacaaaattgtgcaaaactacaggatacatagagtaaatattttkggggtttcattattacagatgacgttgaggagagaaaagttttacatttttacaatcttaggtttaccaatgggctctgggaggcctaatagcagaattc

SEQ ID NO: 132527 - DNA, 609 bp, Homo sapiens
attgtcaaataattctgcaagggaacaaagtcttctgagaagcatgaagcataatctttctcctttctgtttttttctattccctatgaaaaaaaaacctgttaattttgtattaaaaacaaaatacatttctttttcttgagtgctctataacttgtataggaatgtgtatcacttcytctccataattttgagaatatttctgaagacagtgacatattctgactctttaagaacaacacaattcaattttaaaatcactgagtgacagcaatcaaagttctgaagtgatgcagttcgcctcagcacttgttcgaaatgtcattagaaaaccaacatatagcgggttgttatggcaactggaataccagagtttataacatcactgtaattaatgttatccaaacgttattaatctttcaacatcactcacattctctgaaggaacggcagttctggttctcttaggatttttcaatagtgtaatccattgcagcttttcttcacattttatttttaaatagatcttactctgactttgctttagtgaaattagttattgtttctccatctttacttgttctattttggctgctattcttttttttg

SEQ ID NO: 132528 - DNA, 609 bp, Homo sapiens
attgtcaaataattctgcaagggaacaaagtcttctgagaagcatgaagcataatctttctcctttctgtttttttctattccctatgaaaaaaaaacctgttaattttgtattaaaaacaaaatacatttctttttcttgagtgctctataacttgtataggaatgtgtatcacttcttcyccataattttgagaatatttctgaagacagtgacatattctgactctttaagaacaacacaattcaattttaaaatcactgagtgacagcaatcaaagttctgaagtgatgcagttcgcctcagcacttgttcgaaatgtcattagaaaaccaacatatagcgggttgttatggcaactggaataccagagtttataacatcactgtaattaatgttatccaaacgttattaatctttcaacatcactcacattctctgaaggaacggcagttctggttctcttaggatttttcaatagtgtaatccattgcagcttttcttcacattttatttttaaatagatcttactctgactttgctttagtgaaattagttattgtttctccatctttacttgttctattttggctgctattcttttttttg

SEQ ID NO: 132529 - DNA, 609 bp, Homo sapiens
attgtcaaataattctgcaagggaacaaagtcttctgagaagcatgaagcataatctttctcctttctgtttttttctattccctatgaaaaaaaaacctgttaattttgtattaaaaacaaaatacatttctttttcttgagtgctctataacttgtataggaatgtgtatcacttcttctccataattttgagaatatttctgaagacagtgacatattctgactctttaagaacaacacaattcaattttaaaatcactgagtgacagcaatcaaagttctgaagtgatgcagttcgcctcarcacttgttcgaaatgtcattagaaaaccaacatatagcgggttgttatggcaactggaataccagagtttataacatcactgtaattaatgttatccaaacgttattaatctttcaacatcactcacattctctgaaggaacggcagttctggttctcttaggatttttcaatagtgtaatccattgcagcttttcttcacattttatttttaaatagatcttactctgactttgctttagtgaaattagttattgtttctccatctttacttgttctattttggctgctattcttttttttg

SEQ ID NO: 132530 - DNA, 609 bp, Homo sapiens
attgtcaaataattctgcaagggaacaaagtcttctgagaagcatgaagcataatctttctcctttctgtttttttctattccctatgaaaaaaaaacctgttaattttgtattaaaaacaaaatacatttctttttcttgagtgctctataacttgtataggaatgtgtatcacttcttctccataattttgagaatatttctgaagacagtgacatattctgactctttaagaacaacacaattcaattttaaaatcactgagtgacagcaatcaaagttctgaagtgatgcagttcgcctcagcacttgttcgaaatgtcattagaaaaccaacatatagcgggttgttatggcaactggaataccagagtttataacatcactgtaattaatgttatccaaaygttattaatctttcaacatcactcacattctctgaaggaacggcagttctggttctcttaggatttttcaatagtgtaatccattgcagcttttcttcacattttatttttaaatagatcttactctgactttgctttagtgaaattagttattgtttctccatctttacttgttctattttggctgctattcttttttttg

SEQ ID NO: 132531 - DNA, 562 bp, Homo sapiens
gcatctgttaacattttggtacattcccttctagtccttttctgtgcatctaagaatatgttactaagtacctccttatataaaaatctgtatgtattgtaagaaaaagaaaaaaacccagcattttaaccacccagagtacttgaaaatgaaatacaatttttacagtaggcttatggatcattaaagagcattccatttataatctgtagcacatgtcttgaaaatcccttttgtccatctccctctctctctctctctctctcwcacacacacacacacacacacacaagtacatacagagagagagaccagcagcagtagcagcaacaacagtgacagaactcaatattcttccgctttctctaaattccccaacctctcttttcctttgtagacaggtctctgctatctttttccatccctcctcctgcctcctaaaatatattctttaggaaatgttatgttggatatcctccagttatccttctagtcttattctctattctgctctgtggcctgcatgggtgacctagatggactgtcttgacaggcccctttg

SEQ ID NO: 132532 - DNA, 334 bp, Homo sapiens
aactttaaagaatatattaatttctgtagtttgggaagggggatcctaagataccttgatctggagcttcctacagctgagcrtagcacataggaagcattttttcatctcaatttgcaaatagaataataagaatctccagccttgaggcatagtaagtatgatccgctttcacagacatagagatttccagttccattgatatctagatggtagactggcactatccaaagtgatgggcagaggtgtatttagcccagagaagcactctgtggaagagtgactcctgaagttatggagttgcagcccacctagactgcatcatgcaacagcc

SEQ ID NO: 132533 - DNA, 577 bp, Homo sapiens
tttggtgtcccatatctgtaatttcagccacagttgtagtggacagtttcatgtgagctcatgacagaatctcgtttcaaaaataagccacatggctttttagtttctgcctcaggcctttctccaactctgagaggaacttcttartcttcatgcatgcactatgtgcagggaggtaaagtccccaggagcaaccaacagtcaaagagaagcaagtggactggcaattttagggggaattctgtatgtgtcttgggggtcctggtagaacctaatcccattagttacagcattgacctcaatgaatgcaccctgatattggcttttcctccctttctgcctcactctatttgctcacatttgcttctgggattacctcccaaataaactacctgaactcgaagttcttttctcaggctctgtttctgagggaacaggaaataaattgctactgaaattggccccagagaggcagagtttgaggactggaattcttgaactggatcgttcacaggtgtatagccacaggacccaatgctagtggtaagtggggtagaaataagctgtagcagagtgt

SEQ ID NO: 132534 - DNA, 551 bp, Homo sapiens
agtagaatggtgtttacctggtccaggggtttggtgygggggatgagttgtgagatcttggtcaaaagacacaaaatttcagctagacaagaagaaaaaactcaagagatctattgtatgacatggtgactatagtttataataatacattgcatacttgaaaatcactgagagtagatattaactgttctcatcacaaaaaatgttaattagctcaaagtagccattctacaatgtgtaaccatcctgctatacaccaaaaatatatatagttttatttgtccatttaaaaaataaattttaaaatatataaataaaaaacattttgaaggcaaaaagaacactgcaagttcaaaattaaattgtgtgactaggttacagtgatccttgtcatagattgtggatttcaataagtccatgggtgaaaatcactcttactccttttagaaaataagaccgtgttacaaacaaaggctcattcattaaaactgctggcatctaggtttaaaagagaaacttaatcttttgtaacctaggaatgcacaatacag

SEQ ID NO: 132535 - DNA, 551 bp, Homo sapiens
agtagaatggtgtttacctggtccaggggtttggtgtgggggatgagttgtgagatcttggtcaaaagacacaaaatttcagctagacaagaagaaaaaactcaagagatctattgtatgacatggtgactatagtttataataatacattgcatacttgaaaatcactgagagtagatattaactgttctcatcacaaaaaatgttaattagctcaaagtagccattctacaatgtgtaaccatcctgctatacaccaaaaatatatatagttttatttgtccatttaaaaaataaattttaaaatatataaataaaaaacattttgaaggcaaaaagaacactgcaagttcaaaattaaattgtgtgactaggttacagtgatccttgtcatagattgtggatttcaataagtccatgggtgaaaatcactcttactccttttagaaaataagaccgtgttacaaacaaagsctcattcattaaaactgctggcatctaggtttaaaagagaaacttaatcttttgtaacctaggaatgcacaatacag

SEQ ID NO: 132536 - DNA, 592 bp, Homo sapiens
cagtagctataaatccatataattgtttaaaataataaaattttctccaagtattataaaccaggcaggattagaggggcatgtgttgattaytgagggactccaatgtaccataaagtgtacattaaaatacaactattgtgtcataaattagaatctggaactaactttaatatagacattacacacttaattaacaatgggaaggcagtgcagtaccatggttaaaatgcagccttgggtaccaggagatcaaaactgcaggtttgccttctagactagtgagctctgtgagggcagaggctacacctgcccagggtagggacaatgcctgcacacagcatggttcaaaatagtttttacaatgaacagcccaggtttgagttgccactttgggcaagtaaatcaccttctctgggtctatgtctctttgttggtaaaacaaagaagctgaactgtgaagcctctgaggtccctcccaattccaaaattctaagactgccattttgttgtcttggaattcagaagttcctggatgtggttaactgtcactttggggaaactcagtgaataaagcctccagtattcacat

SEQ ID NO: 132537 - DNA, 604 bp, Homo sapiens
aaaacagggatgtattttatgtgctggatattctccactggcctctccagatgtccttcccacccttcttcagcctgctccacgctccaggaggctgacctttatggactacattaatgggctcccttgctctctggctttcagtggctttagtttgtgggaggaactggcagaagactgggcagcaggaggataaggaggtcagagtatttatttccttggttccttttctggtaggcagcaggttggcagtaactgggtttctctaatgatgccatagctcctatcatctctcatggttataacagtttctggttttggtaactcttcctcttcttggctcttaggtttttgggtggtacagtttgctgctttataaatccctggggtgttttaacatccctgcatgcytcccttaacctagccgtctttgtccttgcttccttggttaaattcttctgaattgccccctttatttgtgtcttctattttttttaatggaacattgatatcatttaaatattaactatagcaaattaatgctttcattatagaaatgatacagtgtggttatggaaggaatatcatcttttttgattcctat

SEQ ID NO: 132538 - DNA, 606 bp, Homo sapiens
gatttacatttagaacagatgagaatggaaacagactgtaattaaaaaagattcgactgtgaggactgcaaagattatggaagctccttttttcctccttagtcaagcataagtaaatagaaaaattggagtccatatacaggagccttcacaaaagtctgggtcacatccttcaaaaggaatgtggcagcaaatggatgattacaaattccatggactctgaaaagtagtctgatctcttagcttttgcagtgatttccataatgtattttacttcaccatgacatcttactgccatacattgcctgttttcacccatgaggtcaattctgagtcactttgtgcaattatgtaaagtacaagaaaataatgttactgtcagccatttttgaaaatcttcccatgatagagtctcactctagactagtaacactgtattgttctttcaattttgtactgtattttagratacattaaaaaagtttctaggcatcttttaaaaatgatttctaatatacctctttccaaggtttgtttatttttaagatagtggtctttaacaattttaataaaagtctatgagcattgctcactggctatttccag

SEQ ID NO: 132539 - DNA, 546 bp, Homo sapiens
cactcttcactcaatgtaaatctcgattgggtaactctaaaccctccctcctttccaaagtccagtcctggatacctctacctggacattcagtcacactaaatattccatatgcaaagtctactaaaaatatcagaggaactggaagacagaagacagacagctaattctagctctyctactaactggctgggtaaacttgtcaagtcatttaacttctctgcctaacataaggcagtagttgcaataatagtttccaaactgtttacagcgcagctttgtagcattctgaaacaacaaaaggcatcataagcatttaatattggctatgcattacttgtactaagttgtgaaaatatagaactcaaaggagattggtgaaaaatgcattgtaatttttcaaagcatttctcttaagcagtaaaatagaggctttttttcagaagacaatctgttagaattttgccaccacagctccactgctgatgaaatagaacctgggtatcacaggaatgctatggaagccaatgtaaaccacacagccaa

SEQ ID NO: 132540 - DNA, 552 bp, Homo sapiens
acattgaatagcagatctttgacttccaagtactactaccagataggtagtagtcattcagggaagctggagtgtagttatgarggactgacctctgggcattatcagcattggggttttggcaaaggaaaacaaaggaacaggaatatcaggtggcatctcagcctctggaggaggctccacttagtaaaatgcagagtcaagttcaaagctgaaggagtgagtgtcatactgccaagtccttgagggttaacagcaagtggcagaaatccagtctaatttagtttaagaaaaaatggaaagtgtagggccatataatttagaagtccaaaaggttgtgtagtggttttattttcttttattttagtttttattattattattattattattattattattattatactttaagttttagggtacatgtgcacaacatgcaggtttgttacatatgtatacatgtgccatgttggtgtgctgcacccattaacttgtcatttagcattaggtatatctcctaatgctatccttccccctccccccacctca

SEQ ID NO: 132541 - DNA, 535 bp, Homo sapiens
acatgctacagagacatctttcatggacaagtcaatcaatgtggcaaacttcattgttgtctgattttaagagattgccacagtcaccctagacttcagcaaccagcatactgatcagtcagcaaccatcaaaatcgaagcaagactctccagcagcaaaaagattataacttgctgaaggctctgatgttcgttagcatttttagcaataaggtattttttaattaaggtatatactttttaaagacacaatgctattgtacattcaatagactacagtacagtgtaaagataacttttatatgcacagataaaccaacaaatgyttgtgacccactttactgtgatatgcattttattgtggtggtctggcactgaacccacaatatctcccaggtatgcctgtgcatttatattcttaaaataaaaaaaaaatcctactttttccaaaatggtaaaaattattgtggaaacttcttgatttatatttcaaattcaactattggaaatcaaaatcacataaagacaaagtctg

SEQ ID NO: 132542 - DNA, 571 bp, Homo sapiens
ttgtccaggttttgggatgtggaaatatggacaccatagacattgggattaggaagtgaattttcttaccatgcatttcttgttatgcctaggaaatattttttcctcctgcctcaaaggcagatgagagctctaccttctctttgtcaatttttttttttttgctactaaccactacttgattacctttacttactgaatcagcctcttgtgtctctcagctccaacatcataaaccatcatgttattttgatattaaatagatcttcctttttaaagcgggggaagagattaagatgttaagtgaaaaggagaaccaaccatactcccttcttaggattagaccaaaattcttcttatgtcatgttatctaattccaatatccagcaagcagctggggaaaatttatttggatattgtgcatttttcctttttttggaagaatagattttgytcctctatttgataaaagacagaaactgtacatcttgaaaataaaggcattggcattttaaagtgatcaggagttcttgcagaattccaaacatgcatcttctggaaaaagaaaccc

SEQ ID NO: 132543 - DNA, 502 bp, Homo sapiens
tgggattaggaagtgaattttcttaccatgcatttcttgttatgcctaggaaatattttttcctcctgcctcaaaggcagatgagagctctaccttctctttgtcaatttttttttttttgctactaaccactacttgattacctttacttactgaatcagcctcttgtgtctctcagctccaacatcataaaccatcatgttattttgatattaaatagatcttcctttttaaagcgggggaagagattaagatgttaagtgaaaaggagaaccaaccatactcccttcttaggattagaccaaaattcttcttatgtcatgttatctaattccaatatccagcaagcagctggggaaaatttatttggatattgtgcatttttcctttttttggaagaatagattttgttcctctatttgataaaagacagaaactgtacatcttgaaaataaaggcattggsattttaaagtgatcaggagttcttgcagaattccaaa

SEQ ID NO: 132544 - DNA, 570 bp, Homo sapiens
tcggctacagggattgaaatgtgtggcctgaagtgcagggggaggcacatccaacagttagtagggttttgggctgagacctcatggagcccagtgagggtggtattaaataggcttaccaggcaagtatgggtatggagggtttcatgtagttttgagagatctagtcctttgtaggggctaggggtgctatgtacccgggtcagttgggagattacttcctttacgtgtttttctcttgcctgatcttgaactccacccccatcagacaacaatatgcrtgaagtaagcccaacagacagtggttcccagtcctccagaacaactaggattaatcattttccctgtccaataatgagtatttgcatgcatgcaaagagtggcagagttatagcaattgcgggacatatgggtgtgggcagtgaaggtgggggttcccttagataaactcctatacgatggggcatcaatatttctgggaagctgcatcctccatagaaactcttggtaaggggagctactggtcgtacagtggcatggagggggtgcagtgagtgaaagtcggtaaga

SEQ ID NO: 132545 - DNA, 570 bp, Homo sapiens
tcggctacagggattgaaatgtgtggcctgaagtgcagggggaggcacatccaacagttagtagggttttgggctgagacctcatggagcccagtgagggtggtattaaataggcttaccaggcaagtatgggtatggagggtttcatgtagttttgagagatctagtcctttgtaggggctaggggtgctatgtacccgggtcagttgggagattacttcctttacgtgtttttctcttgcctgatcttgaactccacccccatcagacaacaatatgcgtgaagtaagcccaacagacagtggttcccagtcctccagaacaactaggattaatcattttccctgtccaataatgagtatttgcatgcatgcaaagagtggcagagttatagcaattgcgggacatatgggtgtgggcagtgaaggtgggggttcccttagataaactcctataygatggggcatcaatatttctgggaagctgcatcctccatagaaactcttggtaaggggagctactggtcgtacagtggcatggagggggtgcagtgagtgaaagtcggtaaga

SEQ ID NO: 132546 - DNA, 607 bp, Homo sapiens
aatgtgaggacagatctctacaccagccatccagggctggcttttctacttacactgatgaagatatctggtgacctctattttatcttcccactttattactggtttggtgtgtgctccagtttcaattgtacggttttagtttaaaagtaatgtttcgtagatcaaagtgccagagaagaaaaaaagcagcaagtaaactttgatattgttagtaacgaaatctctttgttttagaagcatgctgctttttctatggaagtaaagaaggatgtgaaatcatctgattatatatgatagtatttgtgattatttcatctaggtggggaaacctggtagtagggttccctgtgttaaactaagaatggtcaagagaaagaggttatgaggactcttgctattgtgcaaatttccaagaagcagaraaatagatacgtttagtcctgaaagcaatttgcaaaaataataagacctactaaaatgatgctagatcaaataatggtatgagtctcttttgttttggtcctttgccaacattagtgtacacacagacatacgcttgcacatggcttctatgtccaaatgttcacaaaatccccactagtac

SEQ ID NO: 132547 - DNA, 391 bp, Homo sapiens
tgagatgtgaacgaacttcgaagtacaaacgatgacatgagtccatcctcattttgtgaggaagaggagttttagaagtaaaaatgtgctgggccactgacaggaaagtagtaaatacaccactgaggttgagaagatatgaaaaggaaagctgaaggtgtctttggtgggcttcaccattttgtgaaatggacactggatctggtccattttcgctccatgttccagcagacagaagcagggctgatgacttttatgtctcagctaccaasactgtgttctttgatctccttcaaccttcgcagagcaaatcactgcttcagaggctatctgaacctacaccttgtgccagggcacaggttggtacagttataaattgcttctaattgtc

SEQ ID NO: 132548 - DNA, 567 bp, Homo sapiens
actgctggcaacgtgcatcatgtccttacagctagcatcaaagaagacagaaattattctcttccccaaaactgtctgaaaaatcatggggaaaggaccctggcctggctgggattatgcatctgcccctgatatgaagccctgaggctggagttggggaggctgtgatkaactcagcccacctgtgttcaaaaggacagggtttgtatccaggcaaaggtgagatgtcaggaagccagctcagtttgcagagtgttacctacttctgcagagaaagctggggacttgctgtcatttcccttgtatcacttctgttactcctgtagtattttggccctgccttcctcagagaggtgaattctttgtaattttgtcccagcctttaaaaccagatacccatccattcccctggacaaggtccaatctcaatgagccttggcctttctaacctcacggcaaatgtctttgcccatttgcctgcctttctgacctaattttaacacccccattctattccagagcatcctgccttctaactcctttgaagtttactcaaaattctcatcc

SEQ ID NO: 132549 - DNA, 567 bp, Homo sapiens
actgctggcaacgtgcatcatgtccttacagctagcatcaaagaagacagaaattattctcttccccaaaactgtctgaaaaatcatggggaaaggaccctggcctggctgggattatgcatctgcccctgatatgaagccctgaggctggagttggggaggctgtgatgaactcagcccacctgtgttcaaaaggacagggtttgtatccaggcaaaggtgagatgtcaggaagccagctcagtttgcagagtgttacctacttctgcagagaaagctggggacttgctrtcatttcccttgtatcacttctgttactcctgtagtattttggccctgccttcctcagagaggtgaattctttgtaattttgtcccagcctttaaaaccagatacccatccattcccctggacaaggtccaatctcaatgagccttggcctttctaacctcacggcaaatgtctttgcccatttgcctgcctttctgacctaattttaacacccccattctattccagagcatcctgccttctaactcctttgaagtttactcaaaattctcatcc

SEQ ID NO: 132550 - DNA, 600 bp, Homo sapiens
tctcagtgcatagcaggtattgggaagggagtcattataaactgaggtgatagggtgtatwagtgtcttgtggctgctgtaacaaattgttgcaaacttagtggcttaacacaacacaagtttattctcttatagttctggaggccagaagtctacaattaaggttttggcagagctgcattccttctagtgactctcggaagaatcaatttatttatcttttccagcttctgtaggttttctgcattcctttttttttttctttttgctcatggcccccttccggctagcaattgcaacactctgccctctacttctagcagccatgcatccccatttctaactctcctgcctccctctttcacttataaggacccttgtgattacatttggcctacccagataatcgagcaaaatctcccagttaaggttccttaatttaataacatctgtaaattctcttttgccctgtaaggtaacatattcataggttctgaggattaagacttgagcatctttggtgatggggcattattttgcctactacagaaggctagtttgtcttgaagttttcttctaacttgaaaattccacgggttg

SEQ ID NO: 132551 - DNA, 428 bp, Homo sapiens
atcttttgtctcctgctcagtcacaactcaaaccctgagctgacaagcttactctttcctcttagatcgtggccagtctgtatcacacggggcttggaaagtagtcataagagaacacactttcattactgtggcctgaaaagtgcaggtagggtatgaaaaatcaaagggatggaacatagagatgggcaaagtatgtctgctggaaatggagtgggaactgagtgaggattatgggattcttcaccgtttgtgcaaataagcagaggcagtggaggtccagatagtactaaacaacagatatttagaaagtcactgacttgcagctttgaaataaagtctttgtttttataatgctttaactttcacaatgayctattgctttggctactaaaagttagatagttttccctgagccaaaccaaaga

SEQ ID NO: 132552 - DNA, 546 bp, Homo sapiens
gctcttctgcttctctgactgctccaacttggggctccccttttactgcccttcccttaaaggtgatgctccaatggttacatstttgatcttcctgtcttttgtactccatatattcaccatcaatactttcatccatccatggcttaattgtaatttacatacaaatatttcccaaatatgtatgttcagcccatattcatctcctgaccaaacccatataatacattgttcatgaatcaaccccttttagatatctgaagggtcaccatttgtaaaactgaagtcattacttttcctcctctaaactggactctctacttttgttttttgttttactaaacggtaccactaaccattcagttgaccagcctgaaacgggttgttgttctaaattaaatgcctctctgtctctcacctcccctatgtaataatcagcaagtccttctgattaaacttaactacaatctcttgattgagtcacatattcccctcattcccactgctaccattttgtcttttctcaattaacctctgactagttcc

SEQ ID NO: 132553 - DNA, 546 bp, Homo sapiens
gctcttctgcttctctgactgctccaacttggggctccccttttactgcccttcccttaaaggtgatgctccaatggttacatgtttgatcttcctgtcttttgtactccatatattcaccatcaatactttcatccatccatggcttaattgtaatttacatacaaatatttcccaaatatgtatgttcagcccrtattcatctcctgaccaaacccatataatacattgttcatgaatcaaccccttttagatatctgaagggtcaccatttgtaaaactgaagtcattacttttcctcctctaaactggactctctacttttgttttttgttttactaaacggtaccactaaccattcagttgaccagcctgaaacgggttgttgttctaaattaaatgcctctctgtctctcacctcccctatgtaataatcagcaagtccttctgattaaacttaactacaatctcttgattgagtcacatattcccctcattcccactgctaccattttgtcttttctcaattaacctctgactagttcc

SEQ ID NO: 132554 - DNA, 205 bp, Homo sapiens
gtgggccgagcttctagctactccgtcaggcccttcctgtcattctgtctctgcctcccttctcyctgcttctccgtgttcctcctcattcttttctgtgtgcagggagactacaccccccaccccgctctttctctggcgcctctgaggtcccccctctagcccctaaatcactctggaatcctggctctttgaagccagatct

SEQ ID NO: 132555 - DNA, 475 bp, Homo sapiens
cagagaggtggagatagaatttgagatctggaaaccagaatgagcaaaagacctatagctgagtgaatagaaggaacagaaaggagcctcgggagagtttgggatgagatagagatgaggtgatgagcagacactgagattctggatctaatgccataggcaagtcagaggtgctgaaacaatggaataatatgaaataaaccattaaygataattcgtctggtagattgggtaagatggaattgaagacaagaagtccaagaatgagagtctcaacatagacgtgatgttttaaaacttatggatagggtagaaagagaaggatagagagtttggaggagaaaagagacaaatatgttaactaaataaagactaggaaggagaaggaagaaataaagcaatcactgagatttgagcccttttgctattgacagaactgagacaatttggaaatacggcaaatttgtttgtttag

SEQ ID NO: 132556 - DNA, 475 bp, Homo sapiens
cagagaggtggagatagaatttgagatctggaaaccagaatgagcaaaagacctatagctgagtgaatagaaggaacagaaaggagcctcgggagagtttgggatgagatagagatgaggtgatgagcagacactgagattctggatctaatgccataggcaagtcagaggtgctgaaacaatggaataatatgaaataaaccattaacgataattcrtctggtagattgggtaagatggaattgaagacaagaagtccaagaatgagagtctcaacatagacgtgatgttttaaaacttatggatagggtagaaagagaaggatagagagtttggaggagaaaagagacaaatatgttaactaaataaagactaggaaggagaaggaagaaataaagcaatcactgagatttgagcccttttgctattgacagaactgagacaatttggaaatacggcaaatttgtttgtttag

SEQ ID NO: 132557 - DNA, 496 bp, Homo sapiens
tgcagagaggtggagatagaatttgagatctggaaaccagaatgagcaaaagacctatagctgagtgaatagaaggaacagaaaggagcctcgggagagtttgggatgagatagagatgaggtgatgagcagacactgagattctggatctaatgccataggcaagtcagaggtgctgaaacaatggaataatatgaaataaaccattaacgataattcgtctggtagattgggtaagatggaattgaagacaagaagtccaagaatgagagtctcmacatagacgtgatgttttaaaacttatggatagggtagaaagagaaggatagagagtttggaggagaaaagagacaaatatgttaactaaataaagactaggaaggagaaggaagaaataaagcaatcactgagatttgagcccttttgctattgacagaactgagacaatttggaaatacggcaaatttgtttgtttaggcagcaaggttcctctaga

SEQ ID NO: 132558 - DNA, 507 bp, Homo sapiens
ctccacccttctgtggcccagtggcctgggcaggrgtcttccacttggaccacatctgccaagagaaaacaactgagtctgtgctggggactgcatggccgggatgaggtgacgccctgaggacgccgtgatgccgctggtgtgggatctggcccagggcaagtgcaaggcgctcctacttgggcctggccctgcgaggcagccggccacacgtcttcagttaccaccacgctgaggcctggtcccagcctgcccttgccgggcctcagtttcctcacatatgaccggggaagcccctgcttcctgggactatgtgccccacagagggcagagctgcaggacccagggtggcccattttgctgcaaggtgatgtcctccagccacctccagccactgcctccttggagatgcagcaaagcaggctaagggagagccctgagtggtcagtgacagtgtgacccaggaaggtcagaaccacagccaaaagggagcccatgctgccaagt

SEQ ID NO: 132559 - DNA, 507 bp, Homo sapiens
ctccacccttctgtggcccagtggcctgggcaggagtcttccacttggaccacatctgccaagagaaaacaacygagtctgtgctggggactgcatggccgggatgaggtgacgccctgaggacgccgtgatgccgctggtgtgggatctggcccagggcaagtgcaaggcgctcctacttgggcctggccctgcgaggcagccggccacacgtcttcagttaccaccacgctgaggcctggtcccagcctgcccttgccgggcctcagtttcctcacatatgaccggggaagcccctgcttcctgggactatgtgccccacagagggcagagctgcaggacccagggtggcccattttgctgcaaggtgatgtcctccagccacctccagccactgcctccttggagatgcagcaaagcaggctaagggagagccctgagtggtcagtgacagtgtgacccaggaaggtcagaaccacagccaaaagggagcccatgctgccaagt

SEQ ID NO: 132560 - DNA, 507 bp, Homo sapiens
ctccacccttctgtggcccagtggcctgggcaggagtcttccacttggaccacatctgccaagagaaaacaactgagtctgtgctggggactgcatggccgggatgaggtgacgccctgaggacgccgtgatgccgctggtgtgggatctggcccagggcaagtgcaaggcgctcctacttgggcctggccctgcgaggcagccggccacacgtcttcagttaccaccacgctgaggcctggtcccagcctgcccttgccgggcctcagtttcctcacatatgaccggggaagcccctgcttcctgggactatgtgccccacagagggcagagctgcaggacccagggtggcccrttttgctgcaaggtgatgtcctccagccacctccagccactgcctccttggagatgcagcaaagcaggctaagggagagccctgagtggtcagtgacagtgtgacccaggaaggtcagaaccacagccaaaagggagcccatgctgccaagt

SEQ ID NO: 132561 - DNA, 573 bp, Homo sapiens
gctctatgtaggctgaaacacttgactgaaataaagtcaaatttagygggaataatttaaacattcaattaatgttgaatttatttaacattaataaatgttcatttatttaactcacaaatagaaaaaaatgtgtatgaggaagagactgcagctttctagaagaccgaaattaaccgagacaaggtaagaaaatatgatcttttgtttcaattagcctgacttgaaatgttcaaggtaagccattgctaaaatcttctctaaaataacacattctaatagatgattttaatatgtggctgattagactaagatatcttctacctttgatctcagattaaaagaaaataatgctaaaagtaattataagctagttcaatggtatataatataccataagttgcagaatgatgcaacagagagcatctctgagtgactactgtgtttctggacttcttgttagatatacttttgcaatggagctgacttttatgccttaatattctatcccatgatcatccagttctcatttatctgatttaacaagaaacctaagggaagaaaatgaactag

SEQ ID NO: 132562 - DNA, 585 bp, Homo sapiens
gatgtttattgtaaaactagttgcactatcaaaacaaatatgatgacaaattaaatgaccatcaattatgaaagagttaaacaaattttggaatatccaaactgtggtatattctgcagccaataaaaacatgatctaaatgtcatgacttgaaaagatgttctgagtatattcatacattaaataataaagcaagttgaaatcacaatgatcatgtaagagttgccttgcctcagtcagtcaagctatatatcatgaaaaatcccgtggaaataggaggaaaatatatgaatacgaatcccttgggaatcactcattatgtgactaaggtgaggaaaagcattgaaatgagcrgtcaggtgactggaaaaacatcagctgttttactttaaaacagctgccgttccagtgatgcttcgtaaaagagagctggtttcctctggaactgatcatgttagagtaacactaagaggttttcctatgtattcatactctcaaaactttgaagtgagcataagcccccatgattttatttgaattgaagtaatatgtacatacaacaggatgaatcttaaataaatatgt

SEQ ID NO: 132563 - DNA, 495 bp, Homo sapiens
ctttagcattgactttggacagtgtggtgatgatacaccttgataagtattgttttgtgtagtatctttcaggtgttctttggatttcttgtatccggatgtctgtctctaacaagattagggatgttttcttgaattatttcctcaaatatatgttttagattctttgctttttctccttctattttagaaatgccactaacttgtaggtttggtcactttacaaaatctcatatttcttgaagacgttgctcaytttttaaaaaattattttttctttatttctgaaattctttcttctgcttgggccaatctgttgataaagctttcaactgtattttgaaattccttcagttaggttttcaattccagaagctgtgactgatttctttttaagatgttatctcttccttcatttcttggattgctttagaagttattttctgttgactttcaaccctgtcttggatctcagtgagccaccttgcaatccat

SEQ ID NO: 132564 - DNA, 495 bp, Homo sapiens
ctttagcattgactttggacagtgtggtgatgatacaccttgataagtattgttttgtgtagtatctttcaggtgttctttggatttcttgtatccggatgtctgtctctaacaagattagggatgttttcttgaattatttcctcaaatatatgttttagattctttgctttttctccttctattttagaaatgccactaacttgtaggtttggtcactttacaaaatctcatatttcttgaagacgttgctcattttttaaaaaattattttttctttatttctgaaattctttcttctgcttgggccaatctgttgataaagctttcaactgtattttgaaattccttcagttaggttttcaattccagaagctgtgactgatttctttttaagatgttatctcttccttcatttcytggattgctttagaagttattttctgttgactttcaaccctgtcttggatctcagtgagccaccttgcaatccat

SEQ ID NO: 132565 - DNA, 420 bp, Homo sapiens
tccgctaatccccaatgtgagtttcacagcctttcctactcaaagacttcaaaaaagccacttgttttgcctcctttatgctttaaccattgctcaatcttcaaagtttattcttcctcagcacccttttctattgactcaaattgttttattcagggctttgaagtttcaaggaccagaaattcaattaaattagttcaagtaaaaggttttcttagaataatgacatgaaatttctcagaaataccaatcaaagttctcttgagccttgtatttgttgtgaatattttaggcttaaacatattattattatttttttctcacataagaagaaatctggaggcaaccagttgctggttatttttagtagagctcaacattataaagaycagtgacactgcatttcttggtctgtccctc

SEQ ID NO: 132566 - DNA, 647 bp, Homo sapiens
gtacctaaagatttacttctgtaattcatcgctttcagctaaattgatttgctaataatatttagtggctgcttttgaaattcagagaagctgggagttatttgcagagtgcattcactttggtgctagtttcttcataagaatcatttaaaaactcatatttataaaataatgtctttgccaaaactaaattgagaattctgtgcttcctgtcagttartggtgacttgttttgacctattcataccaaaagatctaaatgttagaatctgctaaaagtagaaattataactagaaaaatatgaaaatgtaagcaactccctagtaatgaatatttgaagttgtgtgaacaccttacctctactcgtatctacaaattctggatcagggaaatatcttttttaggttgttttaaagtagtctaggacctaaacaaacatgcattatttcattaaatcttagcaagtatgaatcaacaggccagactttgcctccagtttttttctgtgcctactaagcagcttccttctttatgttaaccagatctcctattagtcactgggcaagtatttgtttaaaagtcttgagaagccagacctggtggtgtgtgtctgtagccctagcaactcaggaggcataggtgggaa

SEQ ID NO: 132567 - DNA, 647 bp, Homo sapiens
gtacctaaagatttacttctgtaattcatcgctttcagctaaattgatttgctaataatatttagtggctgcttttgaaattcagagaagctgggagttatttgcagagtgcattcactttggtgctagtttcttcataagaatcatttaaaaactcatatttataaaataatgtctttgccaaaactaaattgagaattctgtgcttcctgtcagttaatggtgacttgttttgacctattcataccaaaagatctaaatgttagaatctgctaaaagtagaaattataactagaaaaatatgaaaatgtaagcaactccctagtaatgaatatttgaagttgtgtgaacaccttacctctactcrtatctacaaattctggatcagggaaatatcttttttaggttgttttaaagtagtctaggacctaaacaaacatgcattatttcattaaatcttagcaagtatgaatcaacaggccagactttgcctccagtttttttctgtgcctactaagcagcttccttctttatgttaaccagatctcctattagtcactgggcaagtatttgtttaaaagtcttgagaagccagacctggtggtgtgtgtctgtagccctagcaactcaggaggcataggtgggaa

SEQ ID NO: 132568 - DNA, 574 bp, Homo sapiens
aaattgtggttctttctaaatggtgagattatagatgttgtttrcattcttatttatacctttaagtaatgtctggattttttacaatgagcatagattaacagatgtgacttcgataatcacaaaaatttcattttgaataacaaaaatactgctctctatgaatatatgtgctacagaaacacacatatatgaaagtaagtataaactactttgtagttttgtatgtctttccaggatcgcctgaagatgacaatgtccttgtagcaagttaccaccaggaaaaatcaacaagttgtccaaaacttgttcaaaagaggccaggcatagtggctcatgcctgtaatcccagtactttgggaggacaaggaaggaggatcagttgaggccaggagttcaagaccagcctgggcaacatagcaagaccctaggaggctgaggcaggaggatcacttgagcccaggatttcaaggttagagtgagctatgattgtgccactgtactccagcctggacaacagagagagacactgtctcttaaaaatattcaaagaaaatgcaaacaaaaagtctca

SEQ ID NO: 132569 - DNA, 566 bp, Homo sapiens
ttaggtgttctcatcacataaacatccaaagacawctatgggaggtaatgaatagggtaattagctggttcatggtgatcatttcacaatttgtgtatacatatatctccaaagatcacattgtacactgtaaatgtattccatttttatttgtcaattttacccctctaaagctgggaaaatgaaataaaataagcatcctgggcaggactggctgcatagttttcagggcccagcacaaaacgaaaatgtggggattcttgttatgaaaattataggaattctggctgggtgcaggggctcacacctgtaatcccaatacttttggaggctgaggctggggagttgctttgagtccaggagtttgagaccagcctgggcaacatggcaaaactgcatctctacaaaaaaaaaaatgaataaattaaaaaaaaaataaataaataaatcagccgggaatggtggtatacatctgtggtcctagttactcgggaggctaaggcaggaggaccgcttgagcctaggaggttgaggctgcagtgagccatgttcatgccactgcattg

SEQ ID NO: 132570 - DNA, 566 bp, Homo sapiens
ttaggtgttctcatcacataaacatccaaagacaactatgggaggtaatgaatagggtaattagctggttcatggtgatcatttcacaatttgtgtatacatatatctccaaagatcacattgtacactgtaaatgtattccatttttatttgtcaattttacccctctaaagctgggaaaatgaaataaaataagcatcctgggcaggactggctgcatagttttcagggcccagcacaaaacgaaaatgtggggattcttgttatgaaaattataggaattctggctgggtgcaggggctcacacctgtaatcccaatacttttggaggctgaggctggggagttgctttgagtccaggagtttgagaccagcctgggcaacatkgcaaaactgcatctctacaaaaaaaaaaatgaataaattaaaaaaaaaataaataaataaatcagccgggaatggtggtatacatctgtggtcctagttactcgggaggctaaggcaggaggaccgcttgagcctaggaggttgaggctgcagtgagccatgttcatgccactgcattg

SEQ ID NO: 132571 - DNA, 563 bp, Homo sapiens
aaatagaaattattatcatcattatttataaccattgaaaggacaggagacaaagaagtcagtccccaccatacccctcccaaccccaagcccacaagggtatttgtgccattatgatggcattgatcattgacattgacagttattattaaacgatgtcaacttccaaatgcaaaatgtttaccagatgaactcaaatgggctggcagaaataatgtccaggtgccrtctaccttcaactcctcttctcatgaatttctgtggcatttctccagggcccagagtcaataagggagagagaaatgactcctctggtttactgaaggtgtgacttgtgattccagccaatgtcctgttggtcccattgtctcccctgccactacccatgtggagtcttagatcttggagactgtactatgtgggccaactctctcctcaagacacatttattaaaaggtgggtgaagtatcttctcctttgcctgtgtcttttgcccaaagggaagttgattgacgacaatgctcctttttcaagctctgattgccggtggaggttggataaag

SEQ ID NO: 132572 - DNA, 555 bp, Homo sapiens
tcaaattcctgactatctggtgcttcagagttatccagaggttcatcattcagtctctgggttgcctctgtcatatactgtactctgccgcttttgccarttgtttactctccttttccaagtggtcaatttcattgttctttcttcaatttctctgtgaagcttctcattttccttaagtgtttcatagagggtgttcctttgttctgctacttctctccaatattgaggggataaatttcatttaatcctaagatcaaatgcttcttgggtgactcctccaagattttaattgtcactctattctgggacaatgacaactctagagtgggaagtcctggctgtcaactggtcattccaatgcttcctcttggatatgctttgggccagtcactttttttttttttttttccgacaagagatctggcttggaaggatgaatcatcttcagagttcttcttggggagaaactgttctttacattctctttgattcctccttgtttctactttatcctaggattcattatacagctggtaaagcacaaaagatggg

SEQ ID NO: 132573 - DNA, 472 bp, Homo sapiens
aaaatccttctggtctcaagcattctggataagggatgttcaacctgcaccaagagggtttacattctccaactatgattgtgaatttttttttatttctcctttcagttctgtcagtttttcctttgtgagttttggaaatgtgttgttaggtacgtctatattcatgattgttttcttctcaattatcctttttttattattttgaggtattcttcttaatatccastcatactctttgtttaaatgctacattgtctgatattaacatagtcataccagatttcttatttttggtgttttcatactatatctttttctatccttttactttctattggcctgtatctttataataaaattgtgtttctcaaaaacaacctatagttgggtgttgcctttcatatccaatttactaagctctgactttttattagaggagttagtccatttacatttaaggtaattattg

SEQ ID NO: 132574 - DNA, 510 bp, Homo sapiens
ctctctcttccttctgctctggtgatgtaagacatgcctgcttctcctctgccttctgccatgattgtaagtttcctgagacctccccagccatgcttcctgtacagcctgcggaatcgtgagcctattaaacctcttttctttgtaaatttcccagcttcagatatttcttcatagcagtgcaagaactaatacaacacctttagcaactcagccacatgaggagttgagagtatgcaactctcaactctaactcaagtgtagatggggctgagtctkttttatttctgagcagacaaggtagggatcccaggctgtaattttcataaaaggaagtatgggaaggctttcttcgaattgaagttgagccttgcgcaagcatgagaggtaaaaaaaaaatccattctggagggatctaagatgaccagaaagaactcaaccatctgggggagagtggatgctgcgtgggagatgagaccaggaaatttgccactgcatcattggtttttg

SEQ ID NO: 132575 - DNA, 301 bp, Homo sapiens
cagagggctagccagggcatgctcttctcatggtgatgggagagattcaggaattcacatccagctgcacaaacacatctaaagctcctacttgtatcatgtctatcatcatttcattcaccaaaacaagtcatgtggccaagctcaaacttaagagatagaaagaaactatcaaattacatgggaaagagaaagagaatgagttctggaagaggaaaagaactcagaggaagttataacaactagttgtgaaagactcctggtgtattggtgctrttgaaagggttgtccagatgggtgc

SEQ ID NO: 132576 - DNA, 337 bp, Homo sapiens
gggtggcaattgatggccaaactctgactccaggtctctgcagggaagttgctgcttgycattttcaggtagctcaacagactggaagctttgcggggatctggaataatctgctttttagaagcagcaatgaagcttccctcagcttctttgtgaacgaatgtgtgccaagcagactggaaagtgctctgtgaactctgattgctaaatgcaggtgggtacatcacagagacccgttgtgttgaccagagaccactttgagggggctcattcctgcaaaccatccagataaatgggggcacatgtcaccatcatttttgtatgagagaaagtagga

SEQ ID NO: 132577 - DNA, 337 bp, Homo sapiens
gggtggcaattgatggccaaactctgactccaggtctctgcagggaagttgctgcttgtcatttkcaggtagctcaacagactggaagctttgcggggatctggaataatctgctttttagaagcagcaatgaagcttccctcagcttctttgtgaacgaatgtgtgccaagcagactggaaagtgctctgtgaactctgattgctaaatgcaggtgggtacatcacagagacccgttgtgttgaccagagaccactttgagggggctcattcctgcaaaccatccagataaatgggggcacatgtcaccatcatttttgtatgagagaaagtagga

SEQ ID NO: 132578 - DNA, 416 bp, Homo sapiens
ggtgcctgctgattcggttcttggggaggggctcttcctggattgcagatgatagttttctcctstgtcctcacttggtcaagagagagtgagcaagctgtctagtgccttcttacaagggtactaatcccgtcataaggatcatcctgatggcctaatcttaaacctgtgtacctcccaaaagccccgtctccaaataccatcacattctccaatgtgttagtgcttcaacatatgaatttttagagatacagtttagcccatggcatcaagctttggacagtttgagtttccagtatcttggccaccaaagtggagatgagctggatatgcagtgcccagctctgtgtacagagcacagtaattggtgatcaatagatgattaatacgtatttattgagggaatgattcgatgg

SEQ ID NO: 132579 - DNA, 421 bp, Homo sapiens
ctgattcggttcttggggaggggctcttcctggattgcagatgatagttttctcctgtgtcctcacttggtcaagagagagtgagcaagctgtctagtgccttcttacaagggtactaatcccrtcataaggatcatcctgatggcctaatcttaaacctgtgtacctcccaaaagccccgtctccaaataccatcacattctccaatgtgttagtgcttcaacatatgaatttttagagatacagtttagcccatggcatcaagctttggacagtttgagtttccagtatcttggccaccaaagtggagatgagctggatatgcagtgcccagctctgtgtacagagcacagtaattggtgatcaatagatgattaatacgtatttattgagggaatgattcgatggctaaaaccatgat

SEQ ID NO: 132580 - DNA, 441 bp, Homo sapiens
tgattcggttcttggggaggggctcttcctggattgcagatgatagttttctcctgtgtcctcacttggtcaagagagagtgagcaagctgtctagtgccttcttacaagggtactaatcccgtcataaggatcatcctgatggcctmatcttaaacctgtgtacctcccaaaagccccgtctccaaataccatcacattctccaatgtgttagtgcttcaacatatgaatttttagagatacagtttagcccatggcatcaagctttggacagtttgagtttccagtatcttggccaccaaagtggagatgagctggatatgcagtgcccagctctgtgtacagagcacagtaattggtgatcaatagatgattaatacgtatttattgagggaatgattcgatggctaaaaccatgatgtggatgagattttccaggct

SEQ ID NO: 132581 - DNA, 441 bp, Homo sapiens
tgattcggttcttggggaggggctcttcctggattgcagatgatagttttctcctgtgtcctcacttggtcaagagagagtgagcaagctgtctagtgccttcttacaagggtactaatcccgtcataaggatcatcctgatggcctaatcttaaacctrtgtacctcccaaaagccccgtctccaaataccatcacattctccaatgtgttagtgcttcaacatatgaatttttagagatacagtttagcccatggcatcaagctttggacagtttgagtttccagtatcttggccaccaaagtggagatgagctggatatgcagtgcccagctctgtgtacagagcacagtaattggtgatcaatagatgattaatacgtatttattgagggaatgattcgatggctaaaaccatgatgtggatgagattttccaggct

SEQ ID NO: 132582 - DNA, 441 bp, Homo sapiens
tgattcggttcttggggaggggctcttcctggattgcagatgatagttttctcctgtgtcctcacttggtcaagagagagtgagcaagctgtctagtgccttcttacaagggtactaatcccgtcataaggatcatcctgatggcctaatcttaaacctgygtacctcccaaaagccccgtctccaaataccatcacattctccaatgtgttagtgcttcaacatatgaatttttagagatacagtttagcccatggcatcaagctttggacagtttgagtttccagtatcttggccaccaaagtggagatgagctggatatgcagtgcccagctctgtgtacagagcacagtaattggtgatcaatagatgattaatacgtatttattgagggaatgattcgatggctaaaaccatgatgtggatgagattttccaggct

SEQ ID NO: 132583 - DNA, 525 bp, Homo sapiens
attttgcaaggaagccctggtgtccctggagagcagctgggaccagagtttcacacaagcggttttgcagatgatcccagcgaaacaaaagcagtggygatgagtggaacaaagatttattgttacagatatgtccaggactgacaaaggtctcatatgattatgtcaccatacaacatctctacgaagtagagattctttagtccccttttattaggtgtggaaactgagtcttggagaagttaagtctcttgtccaaggtcacatggccaggtggttgagagctgtaggcctgacaccagaaagtctgatctcaaccattctgctgccttagtgtcttcatgctgtgtgtccttgggcagctcacctaacctctctgagcatctcagtttctccttccactaaatgggaatgataatacctactaccaacctcacagttgtgctgatcagaaatgcttccagaggtggaagcacttagaaaaaataagtgaaagcagaacatcgtaattaacttggctttgag

SEQ ID NO: 132584 - DNA, 525 bp, Homo sapiens
attttgcaaggaagccctggtgtccctggagagcagctgggaccagagtttcacacaagcggttttgcagatgatcccagcgaaacaaaagcagtggcgatgagtggaacaaagatttattgttacagatatgtcmaggactgacaaaggtctcatatgattatgtcaccatacaacatctctacgaagtagagattctttagtccccttttattaggtgtggaaactgagtcttggagaagttaagtctcttgtccaaggtcacatggccaggtggttgagagctgtaggcctgacaccagaaagtctgatctcaaccattctgctgccttagtgtcttcatgctgtgtgtccttgggcagctcacctaacctctctgagcatctcagtttctccttccactaaatgggaatgataatacctactaccaacctcacagttgtgctgatcagaaatgcttccagaggtggaagcacttagaaaaaataagtgaaagcagaacatcgtaattaacttggctttgag

SEQ ID NO: 132585 - DNA, 525 bp, Homo sapiens
attttgcaaggaagccctggtgtccctggagagcagctgggaccagagtttcacacaagcggttttgcagatgatcccagcgaaacaaaagcagtggcgatgagtggaacaaagatttattgttacagatatgtccaggactgacaaaggtctcrtatgattatgtcaccatacaacatctctacgaagtagagattctttagtccccttttattaggtgtggaaactgagtcttggagaagttaagtctcttgtccaaggtcacatggccaggtggttgagagctgtaggcctgacaccagaaagtctgatctcaaccattctgctgccttagtgtcttcatgctgtgtgtccttgggcagctcacctaacctctctgagcatctcagtttctccttccactaaatgggaatgataatacctactaccaacctcacagttgtgctgatcagaaatgcttccagaggtggaagcacttagaaaaaataagtgaaagcagaacatcgtaattaacttggctttgag

SEQ ID NO: 132586 - DNA, 554 bp, Homo sapiens
ctggatgatctaactcttgcgagatgaagatgatgtaggttgaagcagagaggagagaggaaagggcattgcagacttgtgcaaaggcatggcacgttttgggatccacaagtatttgcgtaagatagggtgaatgtgggtggagtgttggtatggttcgttaaatattgaatgaatgcttttccctttgtttccttagctaacttagtctcaggagaacaaagactgtaccttaatttcatacccctcacagtgcccaatctagggatagacacagagccagccccaggaagtactcaggttattgatttattaacactctcatgcggatgggttggactttattgggtgaaataggcagcacaacaatgcagaaagsctgtagaacttggagtcagacagatcttatgcaagccacttagtctctctcagcctcagtttcttcatctgtgagatggggctaatacatacatacctcatagaattgttgtggaagtgaaatgagacatgatatatgtgaaaggatgaatcaagcagactcaacacatgctagt

SEQ ID NO: 132587 - DNA, 554 bp, Homo sapiens
ctggatgatctaactcttgcgagatgaagatgatgtaggttgaagcagagaggagagaggaaagggcattgcagacttgtgcaaaggcatggcacgttttgggatccacaagtatttgcgtaagatagggtgaatgtgggtggagtgttggtatggttcgttaaatattgaatgaatgcttttccctttgtttccttagctaacttagtctcaggagaacaaagactgtaccttaatttcatacccctcacagtgcccaatctagggatagacacagagccagccccaggaagtactcaggttattgatttattaacactctcatgcggatgggttggactttattgggtgaaataggcagcacaacaatgcagaaaggctgtagaacttggagtcagacagatcttrtgcaagccacttagtctctctcagcctcagtttcttcatctgtgagatggggctaatacatacatacctcatagaattgttgtggaagtgaaatgagacatgatatatgtgaaaggatgaatcaagcagactcaacacatgctagt

SEQ ID NO: 132588 - DNA, 554 bp, Homo sapiens
ctggatgatctaactcttgcgagatgaagatgatgtaggttgaagcagagaggagagaggaaagggcattgcagacttgtgcaaaggcatggcacgttttgggatccacaagtatttgcgtaagatagggtgaatgtgggtggagtgttggtatggttcgttaaatattgaatgaatgcttttccctttgtttccttagctaacttagtctcaggagaacaaagactgtaccttaatttcatacccctcacagtgcccaatctagggatagacacagagccagccccaggaagtactcaggttattgatttattaacactctcatgcggatgggttggactttattgggtgaaataggcagcacaacaatgcagaaaggctgtagaacttggagtcagacagatcttatgcaagccayttagtctctctcagcctcagtttcttcatctgtgagatggggctaatacatacatacctcatagaattgttgtggaagtgaaatgagacatgatatatgtgaaaggatgaatcaagcagactcaacacatgctagt

SEQ ID NO: 132589 - DNA, 548 bp, Homo sapiens
ctggcgcctgccgttggaatctcagggtttgctgtttcccagtttctacttgcccagggccctgggacttcttcttcatgaccttacagctccagcttctaatgcactctgatcaattgcgcctctatctgaatgtaagagtttcccaggtgtaggaatatgataggtccgggtagtaggaggtgtacactctggtccaatcagatgtrgccaggtgaaggtgtcaggtgggtgcctctgctgtgtgtgggctagagagcatctcagagaagtcatgcaggtagggaagcacctctctggttcttggtggagctctctggagtggtatggctaaacactgaagaagatgatgaggatgtcgctgctgtgctcaaaagggcccagccttcttgtcataatcgtatacttgttatcctatttaacactcatgatcatccagtgaagggttaacactattctacagaggagacaactgagatacagaaaggtggacaaacattgcttcaaaagttatttttatgaaatgttaattgtctcacatatctgga

SEQ ID NO: 132590 - DNA, 548 bp, Homo sapiens
ctggcgcctgccgttggaatctcagggtttgctgtttcccagtttctacttgcccagggccctgggacttcttcttcatgaccttacagctccagcttctaatgcactctgatcaattgcgcctctatctgaatgtaagagtttcccaggtgtaggaatatgataggtccgggtagtaggaggtgtacactctggtccaatcagatgtagccaggtgaaggtgtcaggtgggtgcctctgctgtgtgtgggctagagagcatctcagagaagtcatgcaggtagggaagcacctctctggttcttggtggagctctctggagtggtatggctaaacactgaagaagatgatgaggatgtcgctgctgtgctcaaaagggcccagccttcttgtcataatcgtatacttgttatcctatttaacactcatgatcatccagtgaagggttaacactattctacagargagacaactgagatacagaaaggtggacaaacattgcttcaaaagttatttttatgaaatgttaattgtctcacatatctgga

SEQ ID NO: 132591 - DNA, 332 bp, Homo sapiens
tttttgttttgttttttcctttgccaagactgtagttgaaataggataaaggatttatttttccataacaaggtaggagaaagggtgctaggttacaagcaccctgtcaatatcagagttggaagcttcttcctaccatcaggtgtgtgttgtgaaaggaacgaggggttcaggcaagtatttcccagcaggtgggaaggggtcttgatgggatggaaactaggaaaacaaaccagattccctgagggaaaatcaactgttcctgaactgttatcagtgtgggagtagggttcacrgatttcatattctaaacatgtttgtgtgtggtgtgt

SEQ ID NO: 132592 - DNA, 384 bp, Homo sapiens
gggtatgtaggacatgattgctatctcrttctattgcctctctgggcctaataatttaaaaggcttgtattcctcagatgaaagttctgttcttttctcagcaccttgaatggctggagagagcaccaccccatccttgaccatgctgagtgctggctggacttcaactgggccagtactcccttttcccttgtggaaggtcccctgattaatgcttacctgaacgcctgctcttccttcagtccccagttctctgcattccccagcactgggaacagagacagcatgtctgtgttatacaatagggaagagtatgggctctgggtttaaactttgactctgcccccttgttagcccagcgactgtgagcaagtcatttcactt

SEQ ID NO: 132593 - DNA, 487 bp, Homo sapiens
ataaatacagttggcccttgaacaacatggatttgaaccgcatgggtccacttatacatggatttttttctgtttttgccacctctgagacggcgaaaccaattcctcctcttcctcctcttcctcagtctcctcaatgtgaagacaatgaggatgaagacatttatgatgatccacttccacttaatgaataataaatacattttctcttccttatgattttcttaatcatatattgttttctctagcttattttattgtaaaaatacagtgtataatcatmtaaaatacaacatatgtgtatattgtttgtgttattggtaagacttctggtcaacaataggttattagtagctacgttttgggggagtcaaaagttataggtggatttccaactgtgagggggttggcatcacagtcattcatgggtcaaccattgtgtcaataacaatcataccacacatattttgagtgccacatgttgcac

SEQ ID NO: 132594 - DNA, 432 bp, Homo sapiens
ttaagagttgaaaaccactgctctgggcaaactgccctccggwgtcacacacaaaaaatcaatctcgttactaaagataaattttatttcaataaaaatgtaatgagcttgatcacctacccttttcacctgacttggctacaaatgactgccaactgtttaaaaaaaaaaatccaaccgaccctcagagctaatatgctattacttttaaagattacagacaggccaggcgtggtggctcacgcctgtaatcccagcactctgggaggccaagttcctatttcttagtgttagaaagaaagagagagaaatccctcagaacaatcagcagcctggagcatagtttgagactcccactaacagagccaagagtctcaaactaggccaacaggtacccttggggaactctgctgaggctgaggcaggagaatt

SEQ ID NO: 132595 - DNA, 561 bp, Homo sapiens
tcttacttctttggggctttgactgtgccattgagattttgtgctcagggataaactaccgtgtatttacagttacctcaacctgtgaggtttgatgcctctttctttctttctttctttctttctttctttctttctttctttctttctttctttttctttctgtctctttctttctttctttctttctttctttctttctttctttctttctttctttctttcttycttccttccttccttccttcctttctttctttcttctttcttttttccttcttctttctctttctttcctctttctctctctctttccctccctcccttccttccttcctccatccctcccttcctttcttgcttttttttatttcttgcttgttacccaggctggagtgcagtggcatgatcatagctcactgcagccttgaacttctgggctcaagcaatcttcctgccttggccacccctgggattacaggtgtgaaccgtggcgcccagcccttggccactttctttattctaaacttctttgttccatactttgcttcttttccctgg

SEQ ID NO: 132596 - DNA, 561 bp, Homo sapiens
tcttacttctttggggctttgactgtgccattgagattttgtgctcagggataaactaccgtgtatttacagttacctcaacctgtgaggtttgatgcctctttctttctttctttctttctttctttctttctttctttctttctttctttctttttctttctgtctctttctttctttctttctttctttctttctttctttctttctttctttctttctttctttcttccttccttccttccttcctttctttctttcttctttcttttttccttcttctttctctttctttcctctttctctctctctttccctccctcccttccttccttcctccatccctcccttcctttcttgcttttttttatttcttgcttgttacccaggctggagtgcagtggcatgatcatagctcactgcagccttgaacttctgggctcaarcaatcttcctgccttggccacccctgggattacaggtgtgaaccgtggcgcccagcccttggccactttctttattctaaacttctttgttccatactttgcttcttttccctgg

SEQ ID NO: 132597 - DNA, 591 bp, Homo sapiens
aagcagagtttattaaggagtattgactcacacgatcaccaggtgaggtctcacaataggccatctccaagctgaggagcaaggaagccagtccaaatcccaaagcctcaaaagtagggacgctaacagtgcagccttcagtctgtggtcaaaggtccaagagtcccaaagctgaagaactcagagtccgacgttcgagggcaggaagcatccagcacgagagaaagatgaaggctggaagactcagccagtcaagcccttcyatgctgctctgcctgcttatattctagctatgctggcagctgattagatggtgcccacccagattgagggtgggtctgcttttcctagtccactgactcaaatattaatcttttttggcaacaccctcacagacacatccagaaacaatactttgtatccttcaatccaattaagttgacactcagtattaaccatcacagggggtgtctcaggggtcctggcgactgttccacagtgccactcccctctctgcccaatgctgtttccttgctttccagcaggtgctcctcccagtaaaccccctgcacccagatctccatcccacag

SEQ ID NO: 132598 - DNA, 591 bp, Homo sapiens
aagcagagtttattaaggagtattgactcacacgatcaccaggtgaggtctcacaataggccatctccaagctgaggagcaaggaagccagtccaaatcccaaagcctcaaaagtagggacgctaacagtgcagccttcagtctgtggtcaaaggtccaagagtcccaaagctgaagaactcagagtccgacgttcgagggcaggaagcatccagcacgagagaaagatgaaggctggaagactcagccagtcaagcccttccatgctgctctgcctgcttatattctasctatgctggcagctgattagatggtgcccacccagattgagggtgggtctgcttttcctagtccactgactcaaatattaatcttttttggcaacaccctcacagacacatccagaaacaatactttgtatccttcaatccaattaagttgacactcagtattaaccatcacagggggtgtctcaggggtcctggcgactgttccacagtgccactcccctctctgcccaatgctgtttccttgctttccagcaggtgctcctcccagtaaaccccctgcacccagatctccatcccacag

SEQ ID NO: 132599 - DNA, 412 bp, Homo sapiens
ggtgtctttatttacctttgttctagttcttgttctaggtgctggtgatagaactgtgaaccaaaggtcattgccttcaaggagtttatattcaagtggagaagatggaaaaccctcccctcacgaacaaacagactctgaaacctgataaataaatattagcattcagtgaagtgttaatgagtttctgtgagcacatacaayccttagcagagtttatctcatcctgcctgagctagcccctgcctccctccccagcccacatattttgccacacccttttcattcctcccaacattccaattccttcaacacatggaactccttctcaccccagggcctttgcacatgttactatctctgtataaatgcattcctctcacttgacacctggataactcctcatgtccta

SEQ ID NO: 132600 - DNA, 412 bp, Homo sapiens
ggtgtctttatttacctttgttctagttcttgttctaggtgctggtgatagaactgtgaaccaaaggtcattgccttcaaggagtttatattcaagtggagaagatggaaaaccctcccctcacgaacaaacagactctgaaacctgataaataaatattagcattcagtgaagtgttaatgagtttctgtgagcacatacaatccttagcagagtttatctcatcctgcctgagctagcccctgcctccctccccagcccacatattttgccacacccttttcattcctcccracattccaattccttcaacacatggaactccttctcaccccagggcctttgcacatgttactatctctgtataaatgcattcctctcacttgacacctggataactcctcatgtccta

SEQ ID NO: 132601 - DNA, 327 bp, Homo sapiens
tatgagcgtttgctgtgtgaccacattgcggtattaatcataggtggcattataattctctaaaataacagccataaggcatcagggcaattgaggcttgtattaagggaatggtccttttttttcttgctgaagttaggcagcatgaggctggtgtgtttttccttaaggcaccaaggcatctgagggtttgcactgggaatccctgggctctctgggccctctgggtccctagggtcttctacttgccaacacagccttgggttctctgcttcctgttggrgtgacaggaacacattggtggtctctgatggatataccaggcgc

SEQ ID NO: 132602 - DNA, 410 bp, Homo sapiens
ggctaatacggtttggctctgtgttccaaatctcatcctgtggctcccataattcccacgtgttgtgggagggacctggtgggagatgattgaatcatggggacaggtttttcccgtgctgttctcgtgatagtgaattagtcttatgagatctgatggtttttaaaaatgggaatttcctgcacaagctctttttgcctgctgccatccacatcagatgtgacttgctcctccttgccttccaccatrtttgtgaggcctccacagccacgtggaactgtaagtccaataaacctctttcttttgtaaattgcccagtctcaggtatgtctttatcagcagcatgaaaatggactaatacagagatatatcctgcaaaatccgtccccagtactcctgaaaactgccaa

SEQ ID NO: 132603 - DNA, 596 bp, Homo sapiens
acatttgggcaaccccactaggctggcaagccctggtcgatttttagtgacctcttagaagtagatgggagggactgtcagccatgccggaagtgggagagagcagaaggggtcaaagacaagcctcggctgggaagagcatctytgtggtcctgtaattgatgattggggtggggagcattgaaacgtttcccttgaatcacagccttcagtgagaatggctttgccttctgtttggacggtgtgttgagagtagggtaaccatatgtcctcatttgctgcaacagtccctgttacgactgctttcctggttttgcctgtctcgaaagcattctggtttgggcgataacttataaggtcatcctaattctgggtttcacagtctcagcactgtggacattttgggctagataatcctttgggtgagggttgtcctgtgcactgtaaggtgtgtagcagcatccctacgctctgcccactagatgccagtagcacaaccccctgccccattgtcattgccaaatgtcccctgaggggaggaggaggaatcaccctggttgagaactatggcccttttttaagggcactgttgaatc

SEQ ID NO: 132604 - DNA, 596 bp, Homo sapiens
acatttgggcaaccccactaggctggcaagccctggtcgatttttagtgacctcttagaagtagatgggagggactgtcagccatgccggaagtgggagagagcagaaggggtcaaagacaagcctcggctgggaagagcatctctgtggtcctgtaattgatgattggggtggggagcattgaaacgtttcccttgaatcacagccttcagtgagaatggctttgccttctgtttggacggtgtgttgagagtagggtaaccatatgtcctcatttgctgcaacagtccctgttacgactgctttcctggttttgcctgtctcgaaagcattctggtttgggcrataacttataaggtcatcctaattctgggtttcacagtctcagcactgtggacattttgggctagataatcctttgggtgagggttgtcctgtgcactgtaaggtgtgtagcagcatccctacgctctgcccactagatgccagtagcacaaccccctgccccattgtcattgccaaatgtcccctgaggggaggaggaggaatcaccctggttgagaactatggcccttttttaagggcactgttgaatc

SEQ ID NO: 132605 - DNA, 596 bp, Homo sapiens
acatttgggcaaccccactaggctggcaagccctggtcgatttttagtgacctcttagaagtagatgggagggactgtcagccatgccggaagtgggagagagcagaaggggtcaaagacaagcctcggctgggaagagcatctctgtggtcctgtaattgatgattggggtggggagcattgaaacgtttcccttgaatcacagccttcagtgagaatggctttgccttctgtttggacggtgtgttgagagtagggtaaccatatgtcctcatttgctgcaacagtccctgttacgactgctttcctggttttgcctgtctcgaaagcattctggtttgggcgataacttataaggtcatcctaattctgggtttcacagtctcagcactgtggacattttgggctagataatcctttgggtgagggttgtcctgtgcactgtaaggtgtgtagcagcatccctacgctctgcccactagatgccagtagcacaaccccctgccccattgtcattgccaaatgtcccctgaggggaggaggaggaatcaccctggttgagaacyatggcccttttttaagggcactgttgaatc

SEQ ID NO: 132606 - DNA, 472 bp, Homo sapiens
gttttaaacgtggcagttttttcccgtgctctcacttctccctcctatcgccttgtgaagatgtctgcttctccttctgtcatgattgtaagtttcctgaggcctccccagccatgcagacctgttgtgagtcaattaaaccccttttstttatcaattacccattcttggccagttgtttatagcagtgtgaggatggactaatacaatagacttattgggagcttgtaatattctagctatgttactaaaaatttcacacattatttcatttagtccatccagtaacctagagattaggtattattataattcccccatttacaaaataggataataaggtacaaagacgttaagcatcttgcctaatgaccacagccagtaaatggtggatcttagatttgatgccaggcatctgacttcttcaagcattgtttactgttttagtatgacggagatgactagttggatg

SEQ ID NO: 132607 - DNA, 485 bp, Homo sapiens
gttttaaacgtggcagttttttcccgtgctctcacttctccctcctatcgccttgtgaagatgtctgcttctccttctgtcatgattgtaagtttcctgaggcctccccagccatgcagacctgttgtgagtcaattaaaccccttttgtttatcaattacccattcttggccagttgtttatagcagtgtgaggatggactaatacaatagacttattgggagcttgtaatattctagctatgttactaaaaatttcacacattatttcatttagtccatccagtaacctagagattaggtattattataattcccccatttacaaaataggataataaggwacaaagacgttaagcatcttgcctaatgaccacagccagtaaatggtggatcttagatttgatgccaggcatctgacttcttcaagcattgtttactgttttagtatgacggagatgactagttggatgtaattccacctga

SEQ ID NO: 132608 - DNA, 485 bp, Homo sapiens
gttttaaacgtggcagttttttcccgtgctctcacttctccctcctatcgccttgtgaagatgtctgcttctccttctgtcatgattgtaagtttcctgaggcctccccagccatgcagacctgttgtgagtcaattaaaccccttttgtttatcaattacccattcttggccagttgtttatagcagtgtgaggatggactaatacaatagacttattgggagcttgtaatattctagctatgttactaaaaatttcacacattatttcatttagtccatccagtaacctagagattaggtattattataattcccccatttacaaaataggataataaggtacaaagacgttaagcatcttgcctaatgaccacagccagtaaatggtggatcttagatttgatgccaggcatctgacttcttcaagcattgtttactgttttagtatgacrgagatgactagttggatgtaattccacctga

SEQ ID NO: 132609 - DNA, 575 bp, Homo sapiens
taatgaccacagccagtaaatggtggatcttagatttgatgccaggcatctgacttcttcaagcattgtttactgttttagtatgacggagatgactagttggatgtaattccacctgaatggctagctttactgtgtacagmtcaccaaagatctaccttgaggaaaaacattgctatacattgcaaataatagccagggctctggtattaatgtttcccagtctctccctcctaaggacattgtcaccctcccagccaggtgtgtggtagaaggaaacgactctctcctgatgctatgaattccaaagaattcccattaaccatatttctaagccagtttgctttctttcaatgtgcactttctgcaaaatgccatctgcacttgtttcctggggaaaccatctctctgaggtggctaagttctcattgtgaagatggggacttgcctaatgtttggcattccctttttgggggcacgtacagtgatttctgaactgacttgaaagaccattaacttggtttttactgccttttctggcttgcaaatttaatgcctggctcccaacatgtgtg

SEQ ID NO: 132610 - DNA, 505 bp, Homo sapiens
atttctaagccagtttgctttctttcaatgtgcactttctgcaaaatgccatctgcacttgtttcctggggaaaccatctctctgaggtggctaagttctcattgtgaagatggggacttgcctaatgtttggcattccctttttgggggcacgtacagtgatttctgaactgacttgaaagaccattaacttggtttttactgccttttctggcttgcaaatttaatgcctggctcccaacatgtgtgaatggacaaacagcatcagcatcatctgggaacttgctagaaataaaaattctcaggctttaccctagacttacagaaccagcaactctgagggtaggttccagaagtctgtgagtttacaaatcttccaggtgattctgatccrtgctaaagttggatctactgctctaaaccttagtttcttcctttataaaataatagtagtagtagctgtagcagtaataataatattggcttcatggttatagggggaatt

SEQ ID NO: 132611 - DNA, 452 bp, Homo sapiens
aacacagaacttatttacccaattgcgtggcattcacaagagatgagaaattcaacatgataaatgagatttttcccccccrcaggggcagggaggaggatgaagagggtgaatgaatgctaggaatgtattatttttatttagacagtgatttctatttttctttcaaagattatatttttgtttccaaatgggagaggtgttatggggcgatagagaaaggatccagggaaaattgcatggtaaaattgctcctgggaaagaccagcttagggtatccatgattgtcgcttctgtagccctgagcatgtttctccccttggagcatcctctgaagtcttggtcagagtcgttgaagagacatgaaccttttcagcattttctgctttgctttggcaggattgtttactgcctatcaagctgacttacaaaaaatactagttctgttgttt

SEQ ID NO: 132612 - DNA, 455 bp, Homo sapiens
aacacagaacttatttacccaattgcgtggcattcacaagagatgagaaattcaacatgataaatgagatttttcccccccgcaggggcagggaggaggatgaagagggtgaatgaatgctaggaatgtattatttttatttagacagtgatttctatttttctttcaaagattatatttttgtttccaaatgggagaggtgttatggggcgatagagaaaggatccagggaaaattgcatggtaaaattgctcctgggaaagmccagcttagggtatccatgattgtcgcttctgtagccctgagcatgtttctccccttggagcatcctctgaagtcttggtcagagtcgttgaagagacatgaaccttttcagcattttctgctttgctttggcaggattgtttactgcctatcaagctgacttacaaaaaatactagttctgttgtttttc

SEQ ID NO: 132613 - DNA, 452 bp, Homo sapiens
aacacagaacttatttacccaattgcgtggcattcacaagagatgagaaattcaacatgataaatgagatttttcccccccgcaggggcagggaggaggatgaagagggtgaatgaatgctaggaatgtattatttttatttagacagtgatttctatttttctttcaaagattatatttttgtttccaaatgggagaggtgttatggggcgatagagaaaggatccagggaaaattgcatggtaaaattgctcctgggaaagaccagcttagggtatccatgattstcgcttctgtagccctgagcatgtttctccccttggagcatcctctgaagtcttggtcagagtcgttgaagagacatgaaccttttcagcattttctgctttgctttggcaggattgtttactgcctatcaagctgacttacaaaaaatactagttctgttgttt

SEQ ID NO: 132614 - DNA, 616 bp, Homo sapiens
ttgtagacaaataatgctctgaattatatatttttatatatcatttctctcttttttctgtatgaatggtaacatactcttcacactgatctgcagctcctattttgtttgtttgtttttacttaacatttgcaatcattccattttgttgactaaagattatcctcacagcttttagggctgcataatattttgttaaatggatacattgtagtttatttagccagttgcatactgatgaacatgtaggttgtttccagccttttgatatatcaaagaatggtgaartgaatactttgcacatatgtcattttgtacatattggaacgtatatgaaggataagttcctagaaatggaattttctgggtttaaggatagatgcatttgtaattttgataaatattgcaaaattgcatcttaagggattgtaccaatttacattcccactggcaatattaagttatagttcacatcctatataatttaccattttaaagtatccaattcaatggttttttgtacattcacaaggttgtgtaaccaatattttcatcacctcagaaagaaaccactcaactattagcagtcactcttcatttcctcattccaccagcc

SEQ ID NO: 132615 - DNA, 635 bp, Homo sapiens
ggaatggtagatgtccactagggcaaataccattagtgtgtcattgaggcaaaaaatactcatctaagctaagagtaatttaggaagaaattagaggctctataaagaagagatatgcgagacaattatagggaacactgaaccttgggttggaaaagaaatggtgaagagaatctaaccattggtgatggcctgtgaatgtttgcattatacctggattgttgcaggtttatgtagggaaaaagatgaagatttataagaatggatggatgactacagttaagaatgtaccttaggactctcgcttacaggtaatgtaaactcaaattwaataaagaaaaaatgcaagcaagcaatctcttgctcaaataacagaacatttcattagtagagctgtttccaagcatgaatgattttatgtgattgaagattacatcagaaatctatttgtcactcagttctggtttcctctgtattgcttttatgtctctctgctcctggcaaagaaagggtgatttgattctattggtttggcaaacctacctgaaaaagagtgcttaatatcctgtaattttgacccaagtgtctggattgagttcatctggtttggcatctatctcgtaatcgacattaaa

SEQ ID NO: 132616 - DNA, 566 bp, Homo sapiens
  misc_feature (1)...(566): n = A,T,C or G
agtttgttccttctggtatgataaaatgttctgagctatgctatataggctgtgcacttaggaacatcaatacttatattgtgtaaaatgaacagccactgagctccaatgggcttcattttgtgttttaagattcctgagaatgacttcgagatcattagctctataagcactaatgcatgctgytgctcctaaaggagcataatgaagtaaaaacatgagagtagctaatcttaacattatgctaattctaaaaagaagagatgtgtatacgtatttttttgccatcaaatggaggaataaattttttaaaaatgtgaaatgttatctcttttttatatttaaaaacatcatttaaaaagaataagaatgcttaacaagtagaattttcctggctaagttaaaggcaattctccctgaggctttttcacctgaagatctatatttggaccacaaggtaagtcatcaattcaagatcaggtgaccatcatctcttgtggctggacaatagtttgttaatcctttctatacatcaatttatacatacttttggnccctaaaaaata

SEQ ID NO: 132617 - DNA, 566 bp, Homo sapiens
  misc_feature (1)...(566): n = A,T,C or G
agtttgttccttctggtatgataaaatgttctgagctatgctatataggctgtgcacttaggaacatcaatacttatattgtgtaaaatgaacagccactgagctccaatgggcttcattttgtgttttaagattcctgagaatgacttcgagatcattagctctataagcactaatgcatgctgctgctcctaaaggagcataatgaagtaaaaacatgagagtagctaatcttaacattrtgctaattctaaaaagaagagatgtgtatacgtatttttttgccatcaaatggaggaataaattttttaaaaatgtgaaatgttatctcttttttatatttaaaaacatcatttaaaaagaataagaatgcttaacaagtagaattttcctggctaagttaaaggcaattctccctgaggctttttcacctgaagatctatatttggaccacaaggtaagtcatcaattcaagatcaggtgaccatcatctcttgtggctggacaatagtttgttaatcctttctatacatcaatttatacatacttttggnccctaaaaaata

SEQ ID NO: 132618 - DNA, 566 bp, Homo sapiens
  misc_feature (1)...(566): n = A,T,C or G
agtttgttccttctggtatgataaaatgttctgagctatgctatataggctgtgcacttaggaacatcaatacttatattgtgtaaaatgaacagccactgagctccaatgggcttcattttgtgttttaagattcctgagaatgacttcgagatcattagctctataagcactaatgcatgctgctgctcctaaaggagcataatgaagtaaaaacatgagagtagctaatcttaacattatgytaattctaaaaagaagagatgtgtatacgtatttttttgccatcaaatggaggaataaattttttaaaaatgtgaaatgttatctcttttttatatttaaaaacatcatttaaaaagaataagaatgcttaacaagtagaattttcctggctaagttaaaggcaattctccctgaggctttttcacctgaagatctatatttggaccacaaggtaagtcatcaattcaagatcaggtgaccatcatctcttgtggctggacaatagtttgttaatcctttctatacatcaatttatacatacttttggnccctaaaaaata

SEQ ID NO: 132619 - DNA, 502 bp, Homo sapiens
agaaatagaagtttaaaatgtatatgaatatgtgcatatcctttcatgtaggtagtttttcatatcagttgtgaaaagatggttactgcaagatgctgaatctatgcattagctatttagtgacaaaamtgtttagctaattagctatatataaaaattaattattcataaagatgttaataaaaattgataccatagaatagtaatacatgttgattggaaattccttataagcagtatcatcatttccaataatcataaaactaaagagaaatattatctataaagggaaatacagatagaaccaccatcaaataaaagcaaatctggacttaagaagcaatcttattttaaaagacttgcaataagaagaattttccaatcctaagatttataaacatgtggtgctctttcccttaccctagggatggggcttcctgagagccaaactgcagagattgttattgctcttctggatttagccacccagagaggctactgg

SEQ ID NO: 132620 - DNA, 502 bp, Homo sapiens
agaaatagaagtttaaaatgtatatgaatatgtgcatatcctttcatgtaggtagtttttcatatcagttgtgaaaagatggttactgcaagatgctgaatctatgcattagctatttagtgacaaaaatgtttagctaattagctatatataaaaattaattattcataaagatgttaataaaaattgataccatagaatagtaatacatgttgattggaaattccttataagcagtatcatcatttccaataatcataaaactaaagagaaatattatctataaagggaaatacagatagaaccaccatcaaataaaagcaaatctggacttaagargcaatcttattttaaaagacttgcaataagaagaattttccaatcctaagatttataaacatgtggtgctctttcccttaccctagggatggggcttcctgagagccaaactgcagagattgttattgctcttctggatttagccacccagagaggctactgg

SEQ ID NO: 132621 - DNA, 566 bp, Homo sapiens
ttcattgaagtcatccttgtgtatcgaagtactgtctcatcatgtttttatttgcatttccctaatcaaaaatgttactacacatttttaaaatgtacttattggccaggcatcttttataaagaaatgcctagtaaagctttgcctaagttttaacacatttatcttttaattatttaattgtagtgttgctttctatattgtgaatataagaccattacccaatgtaccatttataaatattttctcccatctcgtagattgtcttatcacttytttatagtatcatttgtagtactttttttctaattttggtaaggtcagtttccatcatttgtgatttttgtgtcatatctaataaaacattacctaacctaaggtgtcaaatattcactgataaatattcctctaagtattttatcattatacctcttatatttacgtgtatgatccactggtgttattttttgtgtaagatgtaataaagaggtataatttcattctacatgacatggatggccacctgtcctagtaccatttgtaaaaataaataaataaataaatca

SEQ ID NO: 132622 - DNA, 457 bp, Homo sapiens
atttctatgtagataaccatgttaacagcaaagagaaacaggtttatttcatcctttccaatctatattcctcttattttctcgttttattctgctggctaaaatttctagcattatgttgaacagtgctgacagtgaacatctttgacttgtccctaatattagaaaagaaacattcagtatttcaccatggagtaaaatgaacaaaataaatttggtagatattctttaccttgttgagcaaatcccagctatttttgttttcctgagagttttttatgtttatcatcagtgctgatatttgttaaatgattttctcaatgattgataaaatcttttgatttttcttcttcagactgttaayatgttggattacactgattggtattaaaacattacattagtcttgcattcatttggtcatggtaaataattgattttttaaaaattgtgtagt

SEQ ID NO: 132623 - DNA, 397 bp, Homo sapiens
gggagcaataaactatggcttagctctcaaagagtttatttaggactgttatatattttaaaaaaaaaacaraagcagaaagatcaataaccaagctttcataatacctgtgaggagaaatgacagtggcttaagccaatgtggtagctgtgaaagtgcgggaagtttttaagtgaacagattttctgtcacattggatgtgtaatgtaagacaaagagaggcagcaagaatttttttgcttaaaaaactgagttcatggaatatcaatttattgcaatgaggaaaactagagaagaaactagtttaagatggtgttttcattaaaggtcagtcacaaaagctgaaaatattctaggatttgtggggattttttctctttttttccaattttttagc

SEQ ID NO: 132624 - DNA, 600 bp, Homo sapiens
ccagattagcaggtgcatccgcctctgatggtgtgaaccacacatttatggtagtccattggacctttcaccctgtcccccatgaccaagctcctcaacactgccatgcatgaaatactttgcttttataatgctgtcagataagagaattatctttttggaactaattgtaatagaagggcattgatgttgcacaatagcagaaaagctacttttaaaattgttaccaatttctgattcagttcattggtaaaaatatktataattatttgctagcatacatgggtagtggacaaatgatagtattatagttttcactatgctcatctttaaataacaatcttggggtagtgtaaaggacacaccattatcgtgacttctgtttgacccataagagaaatgcatattcgggttgtacttttctcaaatgactacaaccaccaatactttacataactcttgactttttagggcagggcatttagctttaaaatactcccattgagggaaaaataatatttaccctaatttcctccctctgtcccttttcgcttctatctaacccatctgcgtgcttttatgtatttttttttttttttt

SEQ ID NO: 132625 - DNA, 449 bp, Homo sapiens
gaatgaatcttattttcaattatctaaacagttttaaagtgctgtttagaataattaaagtaacactaagaaaggcttgaaaagtaatcaacaaaattgggaatatctcccataatgtggcttgtgtgacaatctgctaaaattttttaagctaataaaagtaaaagacaacaccaaatgaatgctttttaagaaagctaaggagacgtaatggcaactttccaaaagctgctaaagctctcagtctgctcctcccagctgttacttctcaaggtgctcatgggccttcggaaatctgacacaatgtcagacaaatacctttctccggacacttttattacctccttttcctgaaagtcatagtctaacgccaggaagagaacttatagtcatgtctcatttatcttcaaygttctgctttctaattgaaaattttccttcagcggttt

SEQ ID NO: 132626 - DNA, 460 bp, Homo sapiens
aaaaaagaattccatgatatgttcttggagttattaataaaaataactgctggttgacaggaaaggcatatggcaaatttaagatgcatggccacagtattttatttaaaaaaaaattctttcctacaccagggrtgagtgtgtgtgtgtgtgtgtgtgtgtgtgtgtgtatgttttacgcaccagaaaaaccttcaactctgacaagccattgacgaggtgtttcagtcttcactagcttcctatttcattgctctgccattgagcccttgtaatactacgatgaataaagtaatcaaagcaattggctgcctgagatcttttttaatgcactgcttcggacgcagtacatatgctgtgcaaataaatacagaattagtgttcctgttggaagcatttggtgagaatgagtgatttgtcttgcttatgaaaggtgcatacatttccgctcatagctgtt

SEQ ID NO: 132627 - DNA, 493 bp, Homo sapiens
gaattctaatccagctgtgtttgtgtccaaaatctatggtctttcttctgcatcatgattaccaaagctttttgcactataatgtccttctgtataaaataaggacagtgttaatgcttaacttccagggttgttgggaagagtagagagggtatgtagagttcaaggcatgcagtgggcaagcaggaagtggcagagttgatcagggccacagtgtgcttcrtgtggacaccatttatgcacttttgtctttatgggtcctttcctccattaaaaaaattaaaattttgtcttatgactgtgttggtgtaaatacaaatgtgatcaaggctggattttatttattttaaaagaaattaaaacactgctggggtcttaggcactgggcctaccatgtccagcgtagaagccagccccatatcatcgcaggctcccttttaatttcagacagcagtgtcatttccttttgcgaatcatgttgccatcatgtcct

SEQ ID NO: 132628 - DNA, 478 bp, Homo sapiens
tgtgtttgtgtccaaaatctatggtctttcttctgcatcatgattaccaaagctttttgcactataatgtccttctgtataaaataaggacagtgttaatgcttaacttccagggttgttgggaagagtagagagggtatgtagagttcaaggcatgcagtgggcaagcaggaagtggcagagttgatcagggccacagtgtgcttcatgtggacaccatttatgcacttttgtctttatgggtcctttcctccattaaaaaaattaaaattttgtcttatgactrtgttggtgtaaatacaaatgtgatcaaggctggattttatttattttaaaagaaattaaaacactgctggggtcttaggcactgggcctaccatgtccagcgtagaagccagccccatatcatcgcaggctcccttttaatttcagacagcagtgtcatttccttttgcgaatcatgttgccatcatgtcct

SEQ ID NO: 132629 - DNA, 392 bp, Homo sapiens
tattcatacacatgctggaattattggtgcagacatttaaatacattttctttgagaaagtccttttttttttttttttttgatggagtttccctcttgttgcccaggctggagtgcaatggtgcaatctcagctcacaacaacctctgcctcctgggttcaagcaattctcctgcctcagcctcccaagtagctgggattacaggcatgcaccaccacgcccagctaattttttttatttttagtagagacggggtttctccgtgttggtcaggctggtcttgaactcctgatctcaggtgatctgcccrccttggcctgccacagtgctgggattacagtcgtgagccaccacagctggcctgggaaagtccattcttttttttcttttt

SEQ ID NO: 132630 - DNA, 606 bp, Homo sapiens
ttgaatcagacttaagattgaatttttacactggagtgaaattagtttggctttgttttgtgtttttaataactaaaaatgatgagaaagttgtggaatgtgaccaagaaattgtcttgagagactctctacaaagcactattgagaattgtgattggaggaaaaacaaacattactgtattactatatactaagtagaatgtactcaataatactggttatactaaaatgttgactttctaaagcaggctggaaggggtgtgtttttggggaaaagttatacatagtcttcataatagtagacaatggaaaaaaacaacaacaacaaaaccaaagtgaaatatagggcttatgtaagcatatttcaaaataagtttaaaactatattcatatttgattgcattatataagttgaagacacaaacttatctatatmtttctcaaaaggagacatttttagtactataaagcttggctgtgtatatgatcttagttttcaaagcaccatttcatacttgtacttatgagcaagagaacaaactctcatttcatatccaccgtgtacgcgacggaatctagaccatagaaaatgttcagacagtgatt

SEQ ID NO: 132631 - DNA, 516 bp, Homo sapiens
tgtcacagttgaacatatgtatggtatggtacccatcttcaagtcatcatacagtaaaaaacaataatttccatgccaaatctatgtccaacacattttctactcagttcttgacaactatactacttactgggaaaatatctgcgctgtgagctttatggttatctaaagaactctttacagtgtcctcagtctgagcatagttatttgccttgtatttgaattttgtaaatttagcaaacatctctttgtactagttatctatgctgtgtaacaaattaccccaaaatttagtggcttaaaataacaatttattatcttatggtttctggkaatcaggaaatcaggagtggcttagctgggcagttatggctctggatttctcatgagatctcgccaggaccacagtcatcttaagattttactgtggctgcaaatcagcttccgagatgactcactcgtgttattagtttgctgtttatggctgtttttccaagaagtctcagtacttttcat

SEQ ID NO: 132632 - DNA, 431 bp, Homo sapiens
ggttatattttaaaatattctggtattgattgtaccaatccatacactgacctttttctcttaatttttttcttacagtcaccccaagcaggcacaaaagaaaagacactctgttgctggttctgtacctcaggcccaatatccttaagtgccaaaattgaaaggaagggctataccccaggtatgtaagaggtagattcccacaaaaaacttttcttcacttagcttttgtgtwtaaatttataatatgactactaaatataaacataatatagtattcttttgtgaaataacaaattgtgcttatccatttgtttttttcacaaagtagaatgtagtttcctttttcaaatagctactgattagttcatttctatgactcaagttatttgcagttcctgggacatcttttcatgtatgttagttgcact

SEQ ID NO: 132633 - DNA, 187 bp, Homo sapiens
ccacagctttgtttgtagggctcacaagctagaaatgctttctacatttttagtgggttgttaagaaaaagaagaagaaaaagaataygcaacaaaggccatttgtggcccacaaaacctaaaaacatggcaaaaagcttgccaactctttaccaaaagaagtgaacataccaaaaagtgttgccaa

SEQ ID NO: 132634 - DNA, 187 bp, Homo sapiens
ccacagctttgtttgtagggctcacaagctagaaatgctttctacatttttagtgggttgttaagaaaaagaagaagaaaaagaatacgcaacaaaggccatttgtggcccacaaaacctaaaaacatggcaaaaagcttgccaactctttaccaaaaraagtgaacataccaaaaagtgttgccaa

SEQ ID NO: 132635 - DNA, 565 bp, Homo sapiens
ctccaactgttgcttgttgctccactggggaaaatttatttattcattcattccttcgctcattcattcaacaaatgcttatttcacacccattaggtaccaggcacccacctaggttctaaagattcataactcaacagaatagacaaatgttctaccttcataaagcttacgatctggtgggatggagtcaacccttaattaataaataaataaaaatctaagtgtgctgaatagctacatgtgctacagagaaaaataatgcaggaatgaggatacagaaagtctgcacttgaggataggttttgattagttgtttttaaaaacagatggtcatgaaaggtcttattaagaaagtgatatttgagcaaaggcctgaaaaaaaatggagttccttactggggaaagtatgggtcctacaacagagaatagtaagtctcagctctgcagggtgcatggcaaattttccttacaggagttcacctagttacacaagagagaaactcccatgacrccccactagaacttttttctgctagctctctgagggaactgggcatatttg

SEQ ID NO: 132636 - DNA, 573 bp, Homo sapiens
aacatactatttgttccttaaaagtttggaaacattttctcagaaagtctctgtgcctgacatcttttgaaggactgtttatttaaagcaatttttctaattttttttctgacagatatcgctttgtcaaggttatatacttcactttgtatcaaatgtggaaatatatatatttttgcaagaaggcayaatttaatcaggattgtctctctccctttccgtatgtacatgtttctgactcatcctaggcccctcactttccctcactcccatagaactgtttcaccaactgttaggtatgactgctgtctcattctctctcaccacagaaagctgggaaaggcattttaggaggtgagaaataaagcatcctctctcaagtttttgccatcccccaagagttatatgtggggtctccatgccaacagtccactcctctgagatggttttccctaatcacccgcaagtaacttttcacttttaactttaaaagagtgagcagggctccccttcctcataacctagctgcgaagcaatttaataggtgttccatgaaatttaaaagcagtagta

SEQ ID NO: 132637 - DNA, 406 bp, Homo sapiens
tgcagttccaattttgtttttggagaaaacatggtagaaagagttttggtaagattttggtatatgtttctattactatatacagagctgtcactttaaatttctaaaggtaaattaattaaaagtaatattaaattgaattatactttttaactcctgagttcaaacgcacattttctttctttaactggaaagattctcctgggaagcatgtcctagttgttaaaataatagaaacccacagaggaagggaactgtataattataacmttattactgatgtgaaatattaaatagttctttgacttgtgttaaaccaaaagtacccaaggaaatcccagaatcatctgcaatagttagataagctcagttggtaatgatagtttaatagtttgtcgatgtcatc

SEQ ID NO: 132638 - DNA, 608 bp, Homo sapiens
gtttatatttctttcccacatctggatctttcactggtttactgaaagattttctgacatgaatcgaggctctgggtgcaaggttgagaaactgctgtargcaaagtgctgttggttttgtccaaatttggcttaaaatctttccctttgttcctccaagaaagaacagagagcctgtttaccgagttttggcagaaatagtaggtattaaaatgctgcttgctagacacattcaggacagagagacagactgtaaattgaagtgttagttttttaattataccatggggataaaaagtttttaatgtcattaacaatagcacacaccatttcattatatatgagataatatggatttggttttagctcatagactggtaccagatggcctgggttcaaatatccactctgccatttactgggtagacttgagcaagttgctaaacttgcctgttccttagttttctcagcagtaaaatggagataagtagaacccatctcttagagttacaggaaagaataaatgagttaagacatgtacagcatgtggaacatttcttgccacatggtaagagttcaattagtgttggctgttaatactgttcctt

SEQ ID NO: 132639 - DNA, 608 bp, Homo sapiens
gtttatatttctttcccacatctggatctttcactggtttactgaaagattttctgacatgaatcgaggctctgggtgcaaggttgagaaactgctgtaggcaaagtgctgttggttttgtccaaatttggcttaaaatctttccctttgttcctccaagaaagaacagagagcctgtttaccgagttttggcagaaatagtaggtattaaaatgctgcttgctagacacattcaggacagagagacagactrtaaattgaagtgttagttttttaattataccatggggataaaaagtttttaatgtcattaacaatagcacacaccatttcattatatatgagataatatggatttggttttagctcatagactggtaccagatggcctgggttcaaatatccactctgccatttactgggtagacttgagcaagttgctaaacttgcctgttccttagttttctcagcagtaaaatggagataagtagaacccatctcttagagttacaggaaagaataaatgagttaagacatgtacagcatgtggaacatttcttgccacatggtaagagttcaattagtgttggctgttaatactgttcctt

SEQ ID NO: 132640 - DNA, 608 bp, Homo sapiens
gtttatatttctttcccacatctggatctttcactggtttactgaaagattttctgacatgaatcgaggctctgggtgcaaggttgagaaactgctgtaggcaaagtgctgttggttttgtccaaatttggcttaaaatctttccctttgttcctccaagaaagaacagagagcctgtttaccgagttttggcagaaatagtaggtattaaaatgctgcttgctagacacattcaggacagagagacagactgtaaattgaagtgttagttttttaattataccatggggataaaaagtttttaatgtyattaacaatagcacacaccatttcattatatatgagataatatggatttggttttagctcatagactggtaccagatggcctgggttcaaatatccactctgccatttactgggtagacttgagcaagttgctaaacttgcctgttccttagttttctcagcagtaaaatggagataagtagaacccatctcttagagttacaggaaagaataaatgagttaagacatgtacagcatgtggaacatttcttgccacatggtaagagttcaattagtgttggctgttaatactgttcctt

SEQ ID NO: 132641 - DNA, 608 bp, Homo sapiens
gtttatatttctttcccacatctggatctttcactggtttactgaaagattttctgacatgaatcgaggctctgggtgcaaggttgagaaactgctgtaggcaaagtgctgttggttttgtccaaatttggcttaaaatctttccctttgttcctccaagaaagaacagagagcctgtttaccgagttttggcagaaatagtaggtattaaaatgctgcttgctagacacattcaggacagagagacagactgtaaattgaagtgttagttttttaattataccatggggataaaaagtttttaatgtcattaacaatagcacacaccatttcattatatatgagataatatggatttggttttagctcatagactggtaccagatggcctgggttcaaatatccactctgccatttactgggtagacttgagcaagttgctaaacttgcctgttccttakttttctcagcagtaaaatggagataagtagaacccatctcttagagttacaggaaagaataaatgagttaagacatgtacagcatgtggaacatttcttgccacatggtaagagttcaattagtgttggctgttaatactgttcctt

SEQ ID NO: 132642 - DNA, 416 bp, Homo sapiens
atatctctaaccatttttgagtttgatatccaaaactcaacaaataaccttattcttggatccagtgtctacctgtggtctcctccaaagtcctgacctctcaaaattgaccaataaatccattcatcctgcccagatctctccctgtgctctctttcagtttggacctctgaacaatgcccattgcrttattttgaatgctagctctcttgtatttttaggtttgactggctccagcttctgaacatcactgtgcctgcaggattcaataactacacaccttagaactaatctctttccttagagactaatccttcatcccgacccccatcccatgtctgggatgccaaggataaattatgggacaagtattttcttttagaagatcttttcacttcacaaaataatttgcatca

SEQ ID NO: 132643 - DNA, 416 bp, Homo sapiens
atatctctaaccatttttgagtttgatatccaaaactcaacaaataaccttattcttggatccagtgtctacctgtggtctcctccaaagtcctgacctctcaaaattgaccaataaatccattcatcctgcccagatctctccctgtgctctctttcagtttggacctctgaacaatgcccattgcattattttgaatgctagctctcttgtatttttaggtttgactggctccagcttctgaacatcactgtgcctgcaggattcaataactrcacaccttagaactaatctctttccttagagactaatccttcatcccgacccccatcccatgtctgggatgccaaggataaattatgggacaagtattttcttttagaagatcttttcacttcacaaaataatttgcatca

SEQ ID NO: 132644 - DNA, 620 bp, Homo sapiens
tccccagttagaatggccgttatcaaaaagacaaaaataacaaatactggcaaggatgtagagaaaagggaactcttgtacactgttggtggtaatgtaaataagtaaagccattatggaaaacagcatgaaggtttctcaaaaatctaaaatagaactcccatacaatctagcaatcccactactggctatttatccaaaggaaaggaaatcagtatagcaaagagatactggcgcctcatgtttgatgccgccctattcacaatagccaagtatggagtcaaagtgtccatcagtagataaatgaatatggaaaatgtgtatatatacacaatggagtactcttcacccataaaaagaatgaaatcctgagatttgcagcaacatgaatggaactrgaggtcactatgtgaagcgaaataagtcaagcatagaaagacaaatatcatatgctttcattcatatgtgagagctgaaaaagttgatctcatgaagatagagagtacagtgatagttaccaaagcctgggaagggtgaaaggtgggataaacagaggttggttaatgggtacaaatatgcacttagatggaaggaataagttctaacgttcaatagcatag

SEQ ID NO: 132645 - DNA, 479 bp, Homo sapiens
actttcaaaactgagattctgagatttgccaagaattattctttcgtggtaatgctgcctcagttgtgttgtacaagttatttgagacagaaaaatggattcataccctagaccataccacagtgctaacatgtcacttacaaacaaatcacatttatgaagtgtttgttatataccagacactgtttttcagtacttttgatgtattagctcatttctttgtgaaagccccaggaggtctcagagctggggtcttcagccaagcttgtaatccaagatcyggactccggagactgctttcactcatgctcactgcctcttaagctggtacaaaatagatgttcagctaagtacctgagaaggacttggatgatggctggcccttaaactcaatttgtggttcagttgtttagaataggttgctattaaatcactggttaatttctatatgaattaccaactacatccaactgtctccc

SEQ ID NO: 132646 - DNA, 633 bp, Homo sapiens
gcacatatttttttcctcaaaaattctttgtcaatcacctgttatctctatatacattgttgtgccaggttcctgcaaggactcattgagagcaagtgccaaataatcttttgaaatgttaataattaagagattatatatttatacacatatacatgattacatatattatatacaaggagataaggcaggaaagatcccatagactctttaatattatttttcattcaaatctgtcattacctgcttctttactgatgygacacattaaactaattttattctgactcaagtaatttaaatcaatgaacactacctcatgaagtgctgggaaagaaagagataataaaatgtgattattaagccagtggatcctgccactatctttgacagcaataattaacccttatcttatatgagcaggcgctcatctgaactccatacataagcaaagctatgaatagtactgtttaatacacatgaaaactgaggtacaaaggtcagtgaggtgattagggaagttaaaaatagggccttttttttctgacacttgcttttgaagctagggatctagatttagacttcttcttagaaccacaaatcacatgtcgtaaataacttaggacaccaaat

SEQ ID NO: 132647 - DNA, 521 bp, Homo sapiens
attacaacaaaaccatctataataaaattatgataaaagtggaaatatcaaagaagtattaaagcttatgtaagcttaggcaaaaattcaaagaccatgtaaaatgagaaggcaagaaattagagtataagaactaatgtaaacacaataataaaattgcaagtttggccctgttcattgtagctactaaagagaggtcaagtatataatgcacattgtttgttaaaaagaggaagggcatcgcttcttggtcttttggttaagatcaagtgaagaggaaggagaggggagggtgggaatattcccaatttgttagaaaaatagaaatatgtcctggcactaaatcttataaaaaatttacatgaaagtttataaaagcagtattgactgacatattggacaaygtctttgataagacttctacagctgcttgggtgaatggctgaacttgtgtgggtttggacttgagcacattagtatctttatttatatgtgaacacatgttcatgaacttatgactg

SEQ ID NO: 132648 - DNA, 480 bp, Homo sapiens
aaccacccccatgattcaattatctgaacctggccctgccattggcaagtggggattattacaattcaaggtaagatttgggtggggacacagcccaaccatatcactagctcgctcgcccaccattcacctcttgctgtgtggcccgattcctagcaggctgctgccccggggttggggactcctgctatataggactggtacatagccaaaaatcctctgatttttccactaatttttttaagcagaatattttctcttataattttttttttcattttcttcaaaacacaaacatctgactaagtaagcaaaagtcacaatacattttatctctcttttatgtkttagggctcaattatttccagattttctacttaataaagctattaaaatcatgtttgtcttactttttgttatttatgttcatttattctgattttgtcacattttatattttcttacctgaggtgatacatt

SEQ ID NO: 132649 - DNA, 542 bp, Homo sapiens
ttatgccctggactgcctttcaaatttacttggagacacagagcactgtagcccttcagtggtgaggtttgtgggaactcaagttctgacctgctgacatcctcaattaccctttggctagagctggtttatatgctccctctgtgggtgggtatcagctgagcttggtctgctttttctctctgctctaacaggacagaactgagttcaaagcctcacacttactctgctctctctcccccagcacccagagacaytctacataccatgctgccaatgccagaggttagggaggggtgatattggtgactcagaactgcttcttctatctcttcagtgcctctttcagtgatataaagttaaaactaggtactatttttggttcgtatgaaggtttttttggttgtgtgtgtgtgtgtgtgtgtgtgtgcgtgtagataatagttgttaacttggtgtccttgtggagggtggggactattggcggagccttctatttcaccatcgtgctccacctcctctcctcacccatttttttaaaa

SEQ ID NO: 132650 - DNA, 401 bp, Homo sapiens
cacggtgttagtcccaactttgacatcttggcttttaaagtttcagccactagatggtgatatttgactgtctagctaactggtctgatttttctgttagaatcagttgtatgtgtatgaagcaggaatataaattagaatttaccatgcattttgttcttgtctaggaaagtatacctactaatgtaaatttgagggtgatcttgctgtgtgacccacattctgcagattactcacatcagtatatttaatgacagtggttttgcctcatgctctgtggaaaaacatagatacagtcagtgtagaatgactttattttctcaccagcacatcttccaaccttaytgtatttgtgcctatatgatctgtcatcattccattgtaattatcaaaggcccacc

SEQ ID NO: 132651 - DNA, 473 bp, Homo sapiens
ttaataacaaatctttatgaatctgaagagaattgatgttcatgataatgatatagatgtttaatatactttctgaaataacactgtttactgttcaagttatattgactataatttacattattcttgtttgagaattgtatggcatagacactcattagtcagagtgtctagacatccagaccatgcctgataacacaagaatcatatatcattctctagaaaacaggctgtttggttatagagtatttatcttaaatatattawcagacactacataaacattgaaaagccatgcaagttatagctcacaggagccagatctactgcaactggggcctacatacaaaattttatggcagtggtttcagtatgacaatcttttgaattgatgccgtatggtaaaactataaagattttttaaaagctctgtctcagctagaatttttaagattataactgaacagtatagc

SEQ ID NO: 132652 - DNA, 228 bp, Homo sapiens
gaattctttcctaattttagaggttttttttaaataatggaaattctattgaaattgagtagtgttaattacaaggcaacaggtaaacatttgttcaggatatttaaaaggtctgctgagttggaattgtgacagaccacattgttgactctagattgaawtggaagggaagaatgtgaaatgaattaggatatcctctgttcacctctattaactttcttaaatgag

SEQ ID NO: 132653 - DNA, 438 bp, Homo sapiens
gaattctacgatgacgtgcaaggtttgattgctgattaaaagctttgtcacattcattacacttgtaaggtttttctccagtatgaattgccttatgaattacaagggctgaattttgaccaaagatcttgccacactcattacacttgtgagattttactgcagtgtgaagtctacgatggcatgtaagggatgatacctgactgaaggactttccacactcattacacttgtaaggtttctctccagtgtgacatctacratggcatgtaaggtattgcttgtgattaaagagcttgccacatacatcacatttatattgtttgtctcctaaatggggtatctggtgtttccttaagagtgagctacaattaaaggctttgccactctcattacattggaaagatttttctctcatgtatacttcctgtttttgtg

SEQ ID NO: 132654 - DNA, 606 bp, Homo sapiens
cctacacatgttagaaccattctgactcctcaagaatctcatttaactcttattatcagtgaatttatcatcatccccwattttacataaggaaatggggttagaaagaccaaataacattttttcaacatcaaaacactagcttgagatcaagcccagacttggatctgtcgtctgaattccaagctttttgttatttattgatatgttttgttgttttcatgcaataatgcaaatcttagcccaaacattttgttagtagtaccaactgtaagtcaccttatcttcatactttgtctttatgtaaacctaaattagatctgtttttgatactgagggaaaaacaagggaatctaacactaaccagcccgtagtgtgtggtcaacactttcgttactttagtatacatcaccccaattgtttgtcttcaccacacactttggagttaggtagtagtatctatttttacaaataagaaaacccaggcacaaaggggttgattagcaattatcttttgaaaagcctgtagttgctcatctgaagaagtgacggaccacctcttatttagtggacagacagtaactagttgagaagacaggggatttt

SEQ ID NO: 132655 - DNA, 560 bp, Homo sapiens
aatctcatttaactcttattatcagtgaatttatcatcatcccctattttacataaggaaatggggttagaaagaccaaataacattttttcaacatcaaaacactagcttgagatcaagcccagacttggatctgtygtctgaattccaagctttttgttatttattgatatgttttgttgttttcatgcaataatgcaaatcttagcccaaacattttgttagtagtaccaactgtaagtcaccttatcttcatactttgtctttatgtaaacctaaattagatctgtttttgatactgagggaaaaacaagggaatctaacactaaccagcccgtagtgtgtggtcaacactttcgttactttagtatacatcaccccaattgtttgtcttcaccacacactttggagttaggtagtagtatctatttttacaaataagaaaacccaggcacaaaggggttgattagcaattatcttttgaaaagcctgtagttgctcatctgaagaagtgacggaccacctcttatttagtggacagacagtaactagttgagaag

SEQ ID NO: 132656 - DNA, 560 bp, Homo sapiens
aatctcatttaactcttattatcagtgaatttatcatcatcccctattttacataaggaaatggggttagaaagaccaaataacattttttcaacatcaaaacactagcttgagatcaagcccagacttggatctgtcgtctgaattccaagctttttgttatttattgatatgttttgttgttttcatgcaataatgcaaatcttagcccaaacattttgttagtagtaccaactgtaagtcaccttatcttcataytttgtctttatgtaaacctaaattagatctgtttttgatactgagggaaaaacaagggaatctaacactaaccagcccgtagtgtgtggtcaacactttcgttactttagtatacatcaccccaattgtttgtcttcaccacacactttggagttaggtagtagtatctatttttacaaataagaaaacccaggcacaaaggggttgattagcaattatcttttgaaaagcctgtagttgctcatctgaagaagtgacggaccacctcttatttagtggacagacagtaactagttgagaag

SEQ ID NO: 132657 - DNA, 606 bp, Homo sapiens
cctacacatgttagaaccattctgactcctcaagaatctcatttaactcttattatcagtgaatttatcatcatcccctattttacataaggaaatggggttagaaagaccaaataacattttttcaacatcaaaacactagcttgagatcaagcccagacttggatctgtcgtctgaattccaagctttttgttatttattgatatgttttgttgttttcatgcaataatgcaaatcttagcccaaacattttgttagtagtaccaactgtaagtcaccttatcttcatactttgtctttatgtaaacctaaattagatctgtttttgatactgagggaaaaacaagggaatctaacactaaccagcccgtagtgtrtggtcaacactttcgttactttagtatacatcaccccaattgtttgtcttcaccacacactttggagttaggtagtagtatctatttttacaaataagaaaacccaggcacaaaggggttgattagcaattatcttttgaaaagcctgtagttgctcatctgaagaagtgacggaccacctcttatttagtggacagacagtaactagttgagaagacaggggatttt

SEQ ID NO: 132658 - DNA, 556 bp, Homo sapiens
gaggaaatgacatttatggtaaagtctgagggttgagtgggtaggttgggaagaacattccagaaagaagcacatgaactacagcctggaggtggaggacctaaaaggaagccagcatggctggagcacggagtggccattgagggaggcgagctggagggstgcagcttcttgtattggcagtgctgacctcgcacagtccttgggctccagtgacttcactcagtgtttatctaacatgagtgagtgaatggtgtttgctctttttttggtaaaggtcccaggggttgtctggtacacaagtcctgtctttggccataagcaaactgaaatgaggcttggtctccttcccaggatcccacaccatgcctcacatggtagaccccagtgggaagtatgtgactgcctgactcaggtgcctctcgtggtccaagccatccctgccctgtcccttccctggttgtcgccagacctggagcccctgctccttcactttgcagcctcctcttctgtcaccaactgggaacccacctcttcctgaaagtcctcccccact

SEQ ID NO: 132659 - DNA, 556 bp, Homo sapiens
gaggaaatgacatttatggtaaagtctgagggttgagtgggtaggttgggaagaacattccagaaagaagcacatgaactacagcctggaggtggaggacctaaaaggaagccagcatggctggagcacggagtggccattgagggaggcgagctggagggctgcagcttcttgtattggcagtgctgacctcgcacagtccttgggctccagtgacttcactcagtgtttatctaacatgagtgagtgaatggtgtttgctctttttttggtaaaggtcccaggggttgtctggtacacaagtcctgtctttggccataagcaamctgaaatgaggcttggtctccttcccaggatcccacaccatgcctcacatggtagaccccagtgggaagtatgtgactgcctgactcaggtgcctctcgtggtccaagccatccctgccctgtcccttccctggttgtcgccagacctggagcccctgctccttcactttgcagcctcctcttctgtcaccaactgggaacccacctcttcctgaaagtcctcccccact

SEQ ID NO: 132660 - DNA, 556 bp, Homo sapiens
gaggaaatgacatttatggtaaagtctgagggttgagtgggtaggttgggaagaacattccagaaagaagcacatgaactacagcctggaggtggaggacctaaaaggaagccagcatggctggagcacggagtggccattgagggaggcgagctggagggctgcagcttcttgtattggcagtgctgacctcgcacagtccttgggctccagtgacttcactcagtgtttatctaacatgagtgagtgaatggtgtttgctctttttttggtaaaggtcccaggggttgtctggtacacaagtcctgtctttggccataagcaaactgaaatgaggcttggtctccttcccaggatcccacaccatgcctcacatggtagaccccagtgggaagtatgtgactgcctgactcaggtgcctctcgtggtccaagycatccctgccctgtcccttccctggttgtcgccagacctggagcccctgctccttcactttgcagcctcctcttctgtcaccaactgggaacccacctcttcctgaaagtcctcccccact

SEQ ID NO: 132661 - DNA, 556 bp, Homo sapiens
gaggaaatgacatttatggtaaagtctgagggttgagtgggtaggttgggaagaacattccagaaagaagcacatgaactacagcctggaggtggaggacctaaaaggaagccagcatggctggagcacggagtggccattgagggaggcgagctggagggctgcagcttcttgtattggcagtgctgacctcgcacagtccttgggctccagtgacttcactcagtgtttatctaacatgagtgagtgaatggtgtttgctctttttttggtaaaggtcccaggggttgtctggtacacaagtcctgtctttggccataagcaaactgaaatgaggcttggtctccttcccaggatcccacaccatgcctcacatggtagaccccagtgggaagtatgtgactgcctgactcaggtgcctctcgtggtccaagccatcccygccctgtcccttccctggttgtcgccagacctggagcccctgctccttcactttgcagcctcctcttctgtcaccaactgggaacccacctcttcctgaaagtcctcccccact

SEQ ID NO: 132662 - DNA, 403 bp, Homo sapiens
aggtgcctctcgtggtccaagccatccctgccctgtcccttccctggttgtcgccagacctggagcccctgctccttcactttgcagcctcctcttctgtcaccaactgggaacccacctcttcctgaaagtcctcccccactgactcaccggcttgccccragtttgtcaagaatgtcccagtaaccaggggacacacacagaagtgactgaggggttaccttggagttgatgccttggctcagatccagctcccctgttttcttcctctgtaaccttgggcaacccaacccctctaagcctcggtgttctcatttgtgaagttgtggtaataatggtagcttcctggtagaattattttaaatattaaattaatcaaaacatgcaaaggaatggaacagtg

SEQ ID NO: 132663 - DNA, 403 bp, Homo sapiens
aggtgcctctcgtggtccaagccatccctgccctgtcccttccctggttgtcgccagacctggagcccctgctccttcactttgcagcctcctcttctgtcaccaactgggaacccacctcttcctgaaagtcctcccccactgactcaccggcttgccccgagyttgtcaagaatgtcccagtaaccaggggacacacacagaagtgactgaggggttaccttggagttgatgccttggctcagatccagctcccctgttttcttcctctgtaaccttgggcaacccaacccctctaagcctcggtgttctcatttgtgaagttgtggtaataatggtagcttcctggtagaattattttaaatattaaattaatcaaaacatgcaaaggaatggaacagtg

SEQ ID NO: 132664 - DNA, 403 bp, Homo sapiens
aggtgcctctcgtggtccaagccatccctgccctgtcccttccctggttgtcgccagacctggagcccctgctccttcactttgcagcctcctcttctgtcaccaactgggaacccacctcttcctgaaagtcctcccccactgactcaccggcttgccccgagtttgtcaagaatgtcccagtaaccaggggrcacacacagaagtgactgaggggttaccttggagttgatgccttggctcagatccagctcccctgttttcttcctctgtaaccttgggcaacccaacccctctaagcctcggtgttctcatttgtgaagttgtggtaataatggtagcttcctggtagaattattttaaatattaaattaatcaaaacatgcaaaggaatggaacagtg

SEQ ID NO: 132665 - DNA, 403 bp, Homo sapiens
aggtgcctctcgtggtccaagccatccctgccctgtcccttccctggttgtcgccagacctggagcccctgctccttcactttgcagcctcctcttctgtcaccaactgggaacccacctcttcctgaaagtcctcccccactgactcaccggcttgccccgagtttgtcaagaatgtcccagtaaccaggggacacacacagaagtgactgaggggttaccttggagttgatgccttggctcagatccagctcccctgttttcttcctctgtaaccttgggcaacccaacccctctaagcctcggtgttctcatttgtgaagttgtggtaataatggtagcttcctggtagaattattktaaatattaaattaatcaaaacatgcaaaggaatggaacagtg

SEQ ID NO: 132666 - DNA, 286 bp, Homo sapiens
aagccccgatctacaggaagaaaactggaaataagactgaggacttagtttaagatgttcctactcagcctctagcttttgtgctacagttctgggaacagactcctctctcctgaaaaccacttacctccgcagcattaratttcaccaagatgtcttgcttgtgggaaagacttccaaggatgcctggagagaggaggatggaaatgtcctgctctctaaacagatagacagatgcagccagacagaaaatagtttatcttgctgaggtttctaatgtatttga

SEQ ID NO: 132667 - DNA, 286 bp, Homo sapiens
aagccccgatctacaggaagaaaactggaaataagactgaggacttagtttaagatgttcctactcagcctctagcttttgtgctacagttctgggaacagactcctctctcctgaaaaccacttacctccgcagcattagatttcaccaagatgtcttgcttgtgggaaagacttccaaggatgcctggagagaggaggatggaaatgtccygctctctaaacagatagacagatgcagccagacagaaaatagtttatcttgctgaggtttctaatgtatttga

SEQ ID NO: 132668 - DNA, 426 bp, Homo sapiens
tccattcttcattactcccacaaaaacggaatgtacacatgagagaaaaatctttccaatgtawtgagagtggcaaagcctttaattgtagctcactcttaaggaaacaccagataccccatttaggagacaaacaatattaatgtgatgtatgtggcaagctctttaatcacgagcaataccttgcatgccatgatagatgtcacactgttgagaaaccttacaagtgtaaagagtgtggcaagaccttcagtcaggagtcatcccttacctgccatcgtagacttcatactggagtaaaacgttacaattgtaatgagtgtggcaagatctttggtcaaaattcagcccttctaattgataaggcaattgatactggagaaaatccttacaagtgtaatgaatgtgacaaggcttttaatcaac

SEQ ID NO: 132669 - DNA, 426 bp, Homo sapiens
tccattcttcattactcccacaaaaacggaatgtacacatgagagaaaaatctttccaatgtattragagtggcaaagcctttaattgtagctcactcttaaggaaacaccagataccccatttaggagacaaacaatattaatgtgatgtatgtggcaagctctttaatcacgagcaataccttgcatgccatgatagatgtcacactgttgagaaaccttacaagtgtaaagagtgtggcaagaccttcagtcaggagtcatcccttacctgccatcgtagacttcatactggagtaaaacgttacaattgtaatgagtgtggcaagatctttggtcaaaattcagcccttctaattgataaggcaattgatactggagaaaatccttacaagtgtaatgaatgtgacaaggcttttaatcaac

SEQ ID NO: 132670 - DNA, 426 bp, Homo sapiens
tccattcttcattactcccacaaaaacggaatgtacacatgagagaaaaatctttccaatgtattgagagtggcaaagcctttaattgtagctcactcttaaggaaacaccagatacyccatttaggagacaaacaatattaatgtgatgtatgtggcaagctctttaatcacgagcaataccttgcatgccatgatagatgtcacactgttgagaaaccttacaagtgtaaagagtgtggcaagaccttcagtcaggagtcatcccttacctgccatcgtagacttcatactggagtaaaacgttacaattgtaatgagtgtggcaagatctttggtcaaaattcagcccttctaattgataaggcaattgatactggagaaaatccttacaagtgtaatgaatgtgacaaggcttttaatcaac

SEQ ID NO: 132671 - DNA, 405 bp, Homo sapiens
aatctttccaatgtattgagagtggcaaagcctttaattgtagctcactcttaaggaaacaccagataccccatttaggagacaaacaatattaatgtgatgtatgtggcaagctctttaatcaygagcaataccttgcatgccatgatagatgtcacactgttgagaaaccttacaagtgtaaagagtgtggcaagaccttcagtcaggagtcatcccttacctgccatcgtagacttcatactggagtaaaacgttacaattgtaatgagtgtggcaagatctttggtcaaaattcagcccttctaattgataaggcaattgatactggagaaaatccttacaagtgtaatgaatgtgacaaggcttttaatcaacaatcacaactttcacatcatagaattc

SEQ ID NO: 132672 - DNA, 595 bp, Homo sapiens
aaataggtgtgactaaaaatgcatagctgcatctccataaggtacacagaaaaaccagtgttggtattttatggctattcaatgcatgagagaatcagtatatttctaaaccttgtaacaaactgttgtataaaaagaaacctgtagattccactttgtttttcctgacttgggagagactctggtctatatgtttagattcatgctttgttctagcccttcgttatgtcttattaactktactaatggaaggcatctctttgtttgaattgccacaatttaattatattagtgaactcaaattaaaacggtaaatttccatatgcagtgttagaaaataatatcatggttcatcaatgtctggaattcaactgaatagaataaatagattttgctctaggattagcctgataatatgtttatatgtaaaacaaaattgattttaatgattgcagtacaaaaacttcacttctaagttgagttaaattaacaaactcctgatctatctctgctatgaaatactaaatgattagatattttagcccagccatgcaagttggaacacattctctgttccaagcctataaaaaaatta

SEQ ID NO: 132673 - DNA, 475 bp, Homo sapiens
tgtgagggatccgtatctaggtctggaatctcctcacagttctccaagagagtgactatgtttggggcattttcagacatgctataaatcctaactggcattgtttgctcccagcsataaaagaaagggtagcaggtgtgcctcccaaccaaccctttattgcctgggcatgtgacagcattttgcggcacctcagtaatgagccagagaagaaggaaaggcagatgaatttgccagcattattgcaggtatcttgaaggagagttgagcccagcttttcaattcatacagatcctttctctgaagaaccccttcctgatattgtcactttaacacatctctgtggttttattttgaaatttttaaaggtatgttgtatttgtattttcctttattagcataaaatcagcatttctgcagatatcagaatagttgcatgcttgttccttggaaacatttaaaacatttttgttcc

SEQ ID NO: 132674 - DNA, 475 bp, Homo sapiens
tgtgagggatccgtatctaggtctggaatctcctcacagttctccaagagagtgactatgtttggggcattttcagacatgctataaatcctaactggcattgtttgctcccagcgayaaaagaaagggtagcaggtgtgcctcccaaccaaccctttattgcctgggcatgtgacagcattttgcggcacctcagtaatgagccagagaagaaggaaaggcagatgaatttgccagcattattgcaggtatcttgaaggagagttgagcccagcttttcaattcatacagatcctttctctgaagaaccccttcctgatattgtcactttaacacatctctgtggttttattttgaaatttttaaaggtatgttgtatttgtattttcctttattagcataaaatcagcatttctgcagatatcagaatagttgcatgcttgttccttggaaacatttaaaacatttttgttcc

SEQ ID NO: 132675 - DNA, 357 bp, Homo sapiens
ttctgtgtcaccttgtggtaattatagcaatatttcaaactttttaaacactcctatatctattatggtgatctgtgatttgtgatctttgatgttactattgtaactctttttgggcaccacaaatagtgcccatagaagatggcaaattwaatcaataaatgttgtgtgttctgactgttgtatcaacaggctgttccaccatctctcccttattcttgggcttctctattccctgagatactaaatattaaaattaggccaattaataactctacaatggcttctaagtgttcaagtgaaaggaagagttgcacatcttttactttaaataaaaaactagaaacaattaagctt

SEQ ID NO: 132676 - DNA, 559 bp, Homo sapiens
gactgtcaggttgttaccctaatgaaaagctgtcaagataattttattttactctgaagtatctccatcaattaactgtatctgattgctagaaaaytaaccttggttttcctttcagatctgctagtcccacaatgatgagcaaagtaaaatataatatcaaatattttactgtttaaagttgatttgttggattttttatatgctatataaataaaatctaatatcctaatcaggaaaatgcattaactattttcctgggattaaaaaaatatatctattagaaagggccaaatgaattcttgatcctatagcaggtacaagtcttatttaggttttttgatgtccatagaactgtatgatcacataaagctgtaaaataactgacccaacaaagtcacatccactgttatcattgctagaagtgacacctatacaagatctccttgacgatgttgggatggtaggctcctcatactaatcttttccatgcatgaagcaggttcagataacagaagagagcagactatatcagcattttaatagccccaagagaata

SEQ ID NO: 132677 - DNA, 559 bp, Homo sapiens
gactgtcaggttgttaccctaatgaaaagctgtcaagataattttattttactctgaagtatctccatcaattaactgtatctgattgctagaaaactaaccttggttttcctttcagatctgctagtcccacaatgatgagcaaagtaaaatataatatcaaatattttactgtttaaagttgatttgttggattttttatatgctatataaataaaatctaatatcctaatcaggaaaatgcattaactattttcctgggattaaaaaaatatatctattagaaagggccaaatgaattcttgatcctatagcaggtacaagtcttatttaggttttttgatgtccatagaactgtatgatcacataaagctgtaaaataactgacccaacaaartcacatccactgttatcattgctagaagtgacacctatacaagatctccttgacgatgttgggatggtaggctcctcatactaatcttttccatgcatgaagcaggttcagataacagaagagagcagactatatcagcattttaatagccccaagagaata

SEQ ID NO: 132678 - DNA, 566 bp, Homo sapiens
attaatgtatatttatcaccgcagtctgcaggcatcacctgaattcctagaatatagagactctatagatactggaaattgaccttaaggccctttagctcaactctcttattttactaatgtggaaaatcccattttactaatgggatcctaagcttgatgactgtattaatgttactgactatgacttgtgccctgatgtaagctttggtatgttagttcagcaaaaagtgtctatgatggttgatactgagtctcaacttgattgggttgaaggatacaaagtattgttcctgggtgtgtctgtgagggtgttgctgaaggagactaacatttgaatcagtgggctgggaaaggcagactcacccttaatctgggtgggaacaatctaatcagttgccagggcgrctagaatataagcaggcagaaaagtgtaaaaagggactggcttagcctcccagcctacatgtttctcccttgctcgatgcttcctgccctcaaacagcagacttcaagttcttcagttttggaacttggatttgctctcctggctcctcagactgcag

SEQ ID NO: 132679 - DNA, 572 bp, Homo sapiens
aaatcaaattcattgaaacttcatatccaagccataatatacttcttcaagctttgaacttcttactgccaaggattagctatatttcatgtaaaagtatactagagattcatttggaaaagaaaacaatgccatactccatgcaattataaattagtttctgtagaaactgtagcaccaactacattttataattataatttgtgatttatttaaaaaattaaattttccattcagcattagctgtagtgactcatactattggattagtcaatttccatctctctaccctatagattatagtttcttacattgtttggaatcacttttaaggatctgagagatgttccagtccattgttaaagcaattttccattgtctacagaaaggctgctctcagtggatggcaaaagtctatggtttcattgacagaagagaaaaacacggctcccaaaatttgcccacttgctcacagtcacaaaacagaaaaatggcagaactagaaaaagaactgtatgtcctcatcatatttgaactctttcctttacaccakgcagaccattctgctccca

SEQ ID NO: 132680 - DNA, 584 bp, Homo sapiens
gttttaccttcaaactttcaacatctatatattttgggtagttctcttgtaaaccttataacttgggtttatatattcacattcagaaaatcttttaatttgattatgtttttcatacttatgttattttgaggacatttggctttaaatagactacatttttttttctatttgttccacatgttctactttactttttactctgtttttggcattcttctgaattaatctagtatttccattgttggttttacattctttcamtattttatttttagtagttatactcattaatctttaatttactcaagtttaatgtaagaaagagattcacatttcctgttgttaatagcgtatttggggtaaatatgacattttaagatttaatttccatttattacaatgtttcatataactttctccctttattattttttaaacagatcaattttattattccattttttctctcttttagcttgttatccattattttactcttctttttgtgtgctagagattacaacatgcatgcttgacttgttaaagtaccatataaaattttcagacaatgcaagaatctt

SEQ ID NO: 132681 - DNA, 584 bp, Homo sapiens
gttttaccttcaaactttcaacatctatatattttgggtagttctcttgtaaaccttataacttgggtttatatattcacattcagaaaatcttttaatttgattatgtttttcatacttatgttattttgaggacatttggctttaaatagactacatttttttttctatttgttccacatgttctactttactttttactctgtttttggcattcttctgaattaatctagtatttccattgttggttttacattctttcactattttatttttagtagttatactcattaatctttaatttactcaagyttaatgtaagaaagagattcacatttcctgttgttaatagcgtatttggggtaaatatgacattttaagatttaatttccatttattacaatgtttcatataactttctccctttattattttttaaacagatcaattttattattccattttttctctcttttagcttgttatccattattttactcttctttttgtgtgctagagattacaacatgcatgcttgacttgttaaagtaccatataaaattttcagacaatgcaagaatctt

SEQ ID NO: 132682 - DNA, 584 bp, Homo sapiens
gttttaccttcaaactttcaacatctatatattttgggtagttctcttgtaaaccttataacttgggtttatatattcacattcagaaaatcttttaatttgattatgtttttcatacttatgttattttgaggacatttggctttaaatagactacatttttttttctatttgttccacatgttctactttactttttactctgtttttggcattcttctgaattaatctagtatttccattgttggttttacattctttcactattttatttttagtagttatactcattaatctttaatttactcaagtttaatgtaagaaagagattcacatttcctgttgttaatagcgtatttggggtaaatatgacattttaagatttaatttccatttattacaatgtttcatataactttctccctttattattttttaaacagatcaattttattattccattttttctctcttttagcttgttatccattattttactcttctttttgtgtgctagmgattacaacatgcatgcttgacttgttaaagtaccatataaaattttcagacaatgcaagaatctt

SEQ ID NO: 132683 - DNA, 537 bp, Homo sapiens
ccctaatgagtcataggcttggtctctttacataatctcatatttctttgaagttttcttcatttttaaaaattcttttttcattattgttgtctgactgagttcattcaaaaagccggttcgagctctgagattctttcctcatcttgtcctattctgcagttaatacttctgatggtgttatgaaattattgtagtaagttatttagctcaagatcaatttggttctttcttaaaataatcatttcatgttacatcccttgamttgttttgctgaattcctaagattccttgtatcagatttctactttttcatagactctatttgactttcattggtaaacagattctgatttatatgtctgttacttcattcatttcattctgtttaagaaccattgctggggagctagtgcagctgtttggaggtaataagacactctggcttttagagctgctagagttcttgcacttttttttctcatctgtgtgggctgatattcctttaactgttgctgtaatttgagtattgttagt

SEQ ID NO: 132684 - DNA, 578 bp, Homo sapiens
  misc_feature (1)...(578): n = A,T,C or G
gttctttctctctaattcactggctaccatcttagtctaagacattaccatctatcaactctctctacatggtctcctcatttgccttttgcccactccagtctgtcctccacgtggcaaacaaagagattttctcaaagcacgaccctaatcatgccacaaactcttgccacaaatcctttgtttcccattngttcttaaaataaagaacaaagtattttttaacatgccttgcaatcaattaatgaagaagctggtccctgccaaggtctacagactaccccacccactacacttcagataccctggtcattagtggtagaaggagctatgctatcactcctgccatgrccttttctcatgctgttacctttgtatccaaggcctttcctcatccaccattccctagttcatttctgttcttcattctgcaaatctcaattctcaactcaacttttaaatttcttagggaaagttttcttactagaacactggaaaaagttctcctacaatatattcttttagttcacaatattatctttggcacttgtcacagtaaataactgtaaacttaagca

SEQ ID NO: 132685 - DNA, 408 bp, Homo sapiens
aaaagttatctgagcattatgaactcgtgaatatacagggtcttggtcttgatcatttggccattgatgtattagtttggccactattagatcctgcaaccacagggcctggttgaagatgtcttgttaacgccatgggtcttgcaatcgccacaatgtccaaaggagaaagtggctgtgactatgtcaagctctccagtcttcatgatctaaatgggatggccacatgctctgcaaaggcaggaggaggagagggactggagacctgggagtctaagttaggwatgccactgccagggtaatctcagaaagatggaaactgtcctgaaagaggtcagaagtagctaacttcaaagctattagaaggaggatttctgaactctttgttaaacaagtgttttaaaaaca

SEQ ID NO: 132686 - DNA, 532 bp, Homo sapiens
attcatgggttccagagacatttttgagtggctgttattgtgactaccacagccctcaacactgtcaccaagccttcctttccttgaaagatacaggtgagccaggattgctgatttatccaatagtgctgctacacattttccttcagttcaaaaacaatcccccaaaatgacaactgagtgttrgcatcataatgttgtatgggaaagcagttttctcctacatgcctataattccaatggacactttttgccatctctctccccccaaaaaaacaccatcaacattttgaattgttagaaagaagggaggagaaaaaggagagcaaaaaagaatggcactagctacagtttcaggtgcaaatcctcttggggattctttaaaaagaagaaatactgaggagcatatcaaagaaacgtttatattgcctagggtactctaagccctcagcaaagctccgaagaataattcggtctgagagtaatcctgaactactgaagtcgcccatgaatattccaccatgttctgttc

SEQ ID NO: 132687 - DNA, 558 bp, Homo sapiens
catcgacatggatggaactggaggacactatgttaagtgaaataagtcaggaacagaaagacaaatatcacatgttctgattcatatgtgggagctaaaaaaaagttgatctcttggtatatttttaattcaacagtggtagtgcaagtaacaggtacatcccgggtggggcggggttggggggtgctgccagcctggtccatcagtgtactccatgtcgatacttttgtgttttgggggaragaatggacacggttggtgatttcagtgagatgattaagtgaagtttgcctaaaagcacttctactgtatattaagcaaaaaaaggtaagttacaatgccatatgaatagtcttatttttgtgaaaaaatatttaaacggctataaatccaggtgttatcagtgacacttattttattctttatatttttagctgttttctgaaatttttgcagttacttttataattaggaaaaaatggagctctgtccagtttttgaaaacgtagactgcaatgtcaaaacaagtcagtggcttactacacaaaatgtgactta

SEQ ID NO: 132688 - DNA, 472 bp, Homo sapiens
ggaaaagttttgcccttaatgtcttgaaaacatgagcttgtttttctgaaaaagctgagtacatcctcattcctcattgtcacaaacaatgtgacatggacctggaggcaggccaaggttttctatgaatagaacttagcaaagagagtgttagaaagactttggattcacatggcaatcctggatgcctgatccctagagaggaaatgatctacctgcccttcgaaggtggaaacttcgaggatcccctctcatcctcttacaagccatggcaaccactgtgttatggctggcataacatgccttccacatggctgagatgatgttggctttgctgggargcatttgcttttgagctgtttttgcagaactaagatggattttgaaggagagaatacatgttagagaaaagctggggcacagttgatggtgcggagcagggcagtgccatctggttggtccttcatcgtgc

SEQ ID NO: 132689 - DNA, 652 bp, Homo sapiens
gtgggcccctttcttttggtccctcagctgccatccttctyggcaccagtttagtcctttgcctcgtccaattcagccagcagcagacaaagcccctccccttcctccagctgcttgagtcagccctgcctcttccttggaatggctcttcccttctctttcccagaaaactgagaagtcccagttttcctcagaattccttctgtccaacggacttgagatttgtgtttcatttctccttaaaatttcctggacacttacgttgcgatttctttgttttgaattcgtaggtcaggatccccaaattccagctatggtttctctgagtggtgcttctgttgttggtcttggtattctctcagcatcgagcaggtttgtgttgaggctgttctgtgcttggtgtggagcttacaaatctaaagtcatggctctgggaggggaagaacatgctaatgtggacagcaccaaggcagcactggagggctgtccaaagctaaaaaggatgaatacggttgtgcaggtgtgtgcagtggcagttccggcacattgcccagagtccccttcaggaatgaacgacttactttcctatttgctgggagagcttccagcagagatgccctcggttgtcccttgtaggactgccactgctaaa

SEQ ID NO: 132690 - DNA, 652 bp, Homo sapiens
gtgggcccctttcttttggtccctcagctgccatccttcttggcascagtttagtcctttgcctcgtccaattcagccagcagcagacaaagcccctccccttcctccagctgcttgagtcagccctgcctcttccttggaatggctcttcccttctctttcccagaaaactgagaagtcccagttttcctcagaattccttctgtccaacggacttgagatttgtgtttcatttctccttaaaatttcctggacacttacgttgcgatttctttgttttgaattcgtaggtcaggatccccaaattccagctatggtttctctgagtggtgcttctgttgttggtcttggtattctctcagcatcgagcaggtttgtgttgaggctgttctgtgcttggtgtggagcttacaaatctaaagtcatggctctgggaggggaagaacatgctaatgtggacagcaccaaggcagcactggagggctgtccaaagctaaaaaggatgaatacggttgtgcaggtgtgtgcagtggcagttccggcacattgcccagagtccccttcaggaatgaacgacttactttcctatttgctgggagagcttccagcagagatgccctcggttgtcccttgtaggactgccactgctaaa

SEQ ID NO: 132691 - DNA, 652 bp, Homo sapiens
gtgggcccctttcttttggtccctcagctgccatccttcttggcaccagtttagtcctttgcctcgtccaattcagccagcagcagacaaagcccctccccttcctccagctgcttgagtcagccctgcctcttccttggaatggctcttcccttctctttcccagaaaactgagaagtcccagttttcctcagaattccttctgtccaacggacttgagatttgtgttycatttctccttaaaatttcctggacacttacgttgcgatttctttgttttgaattcgtaggtcaggatccccaaattccagctatggtttctctgagtggtgcttctgttgttggtcttggtattctctcagcatcgagcaggtttgtgttgaggctgttctgtgcttggtgtggagcttacaaatctaaagtcatggctctgggaggggaagaacatgctaatgtggacagcaccaaggcagcactggagggctgtccaaagctaaaaaggatgaatacggttgtgcaggtgtgtgcagtggcagttccggcacattgcccagagtccccttcaggaatgaacgacttactttcctatttgctgggagagcttccagcagagatgccctcggttgtcccttgtaggactgccactgctaaa

SEQ ID NO: 132692 - DNA, 578 bp, Homo sapiens
aaaatatattgagcacttactccagagcaggtgcctgggctgggagccatatggataaaactgattaaagtktattagtctgttctcatgctgctaataaggacatacccatgactgggtaatttataaaggaaagagatttgattgacttacagtttcacatggctggggaggcttcacaatcatggtggaaggtgaatgaggggcaaagttacatcttatccacggcggcaggcaagagagcatgtgcaggggaactcccttttataaaaccatcagatctcatgagacttgttcactatcatgagaacagcacaggaaagacccgcccttattattcaattacctcccaccgggtccctcccatgacacatgggaattatgggagctataattcaagatgagatttggggggagacacagccaaaccatatgacaaagcatgcaatttcacagtcaaattcaaaaactgaagctgaatgacatcctaaaaaggaaactgggagctgaggcagagaataacagaggtggactatatatcaagtgttttctggaaaggtgacatttgaactgagtcc

SEQ ID NO: 132693 - DNA, 591 bp, Homo sapiens
ttcttgttcgttttatctctgtttgaggaggacaaaatgtaagatattaatactgacttaaaaagagaagggacatcacaatggggtttcatatactaggcatctggacttgaagttctaaaacatatgtattgtgactaaagtcttgaaactatctgagttgcattttcttccaaagagacacccatatggaatataacttcttccctccctcctcttctgttccttccttgaagttttaaatacaatgtcaaagagagaaagaatcccaaagattatctgttccaatcttgttttatagatgacaagaaagctttcaaaaaatggaataattaattwaaaaaaagctaataaagaggtgctttgatttgctcatgtttgtcccagacatttctttgttctacaatactgcattcttcctgctctagcaagtagaatttgaagatctaagacttttccctttattacattttattctgaacattattttaatagcactgttacctttatgaacactttattggataatatttttattttttaatagtattacatttgttttgcccttaattttagttaaggattttcact

SEQ ID NO: 132694 - DNA, 591 bp, Homo sapiens
ttcttgttcgttttatctctgtttgaggaggacaaaatgtaagatattaatactgacttaaaaagagaagggacatcacaatggggtttcatatactaggcatctggacttgaagttctaaaacatatgtattgtgactaaagtcttgaaactatctgagttgcattttcttccaaagagacacccatatggaatataacttcttccctccctcctcttctgttccttccttgaagttttaaatacaatgtcaaagagagaaagaatcccaaagattatctgttccaatcttgttttatagatgacaagaaagctttcaaaaaatggaataattaatttaaaaaaagctaataaagaggtgctttgatttgctcatgtttgtcccagacatttctttgttctacaatactgcattcttcctgctctagcaagtagaatttgaagatctaagacttttccctttattacattttattctgaacattattttaatagcactrttacctttatgaacactttattggataatatttttattttttaatagtattacatttgttttgcccttaattttagttaaggattttcact

SEQ ID NO: 132695 - DNA, 590 bp, Homo sapiens
gtctgttcttgtaccagtaacatgctgtttttattactgtagtcttgtagtgtagtttgaagtgatgccttcacttcaaaacgtgatgcctctagtcttgttctttttgcttggtatttccttggctatttgggctcttttttggttccatatgaatttttaaatccttttttctaattctgtaaaagtgccattggtagtttgataaaaatcacattgaatctgtaaatagctttgggcagtgtggccattttattaatttaactcttcctatccacgaacatggaaggattttacatttgtttgtatcatctcagattttttgagttatgttttrtaattcttgttgtaatgatctttcacatctctggttagctgtattcctaggtattttattctttttgtggcaattgtgaatgggattgcattcctgatttggctctcagcttggatgttgctggtgtatagaaatgctgctgatatttgtacattgattttgtatcctggaagtttgcaaaagttgtttactagatcaaagagctttgggacagagactatgggtttttctacatatagaattagaaacattt

SEQ ID NO: 132696 - DNA, 522 bp, Homo sapiens
tatgagttgtgcagatgagtatatcaccaactaaaattcttaaactttgttggttggagtagaaaatgcttcaaataccttgggaaaagttccagtattcttatacaactagacatacttctccccctatatccatccctacaagcctgattctaggtagtcacaccaaatagaaattaaaatatatgcccacaaagacttgtacacgaatgtaaatagcagcttcttttatattagataaaaactggaagcagcccatgtgaccataaaaaacagaatagataaccaaactaccatgtgttcagacaacgaatgttgttcagcaataaaagagaatggaccactgatacacacatgtggatgcatacgaaaaattttggtgagtaaaggagccttacccagaaaatgcmtactatataatttcatttgtgtgaaattctacaatagttaaaactatctgggggaaaaaattgaaacagtagttgcttatgagagatgtatatagaggtcagttggaaaggg

SEQ ID NO: 132697 - DNA, 603 bp, Homo sapiens
cttgccctgtgtggctcctgggtgggccatcacactgcctagctttccttgctctctgtggttgcgccaactgcctatcagtctcattgacggaacctggatatcttagttactggtgcaggattcacttgctgtttttattcttcttgatgggcgcctttgaccagagctgtttctagttggccatcttggcccaaagagtgaaggattctacagcagggaatcacataatgaaagtgtgcattttgggaggtatggaaaaatgaagaggtaggctcacagttgatagtttatttaagaatcaataataatttatgtgaaaacaacaatgacagtgacagcagaaaaaaaaataaagwtgagagccaataaggtcaaattcaatgatacttttcaaactgtatattgctaccaattagtgagtggtaaaactagttttgtgggccttacctagtattttctgtttgtctgcatttgtgttgttcattttatgatctttttccatatctatatgtagtaataaaatatttgatatttatgcttttactttatcagacataaaataaatattcttttataaaaccttgttccatttatatgcat

SEQ ID NO: 132698 - DNA, 563 bp, Homo sapiens
ttaatttgtaaaaaaacacaatctctgtgaagcacaataaagtaaagcacaataaaacgaagtacacttgcatatcttgcatatttaaacagagttttcttttcagttcaagattatatcattggtcaaataagtttgaagattgaggtaaatgatggtgtctaygtaagtttgaacaatttctatatgttgccacattacttaaaatcaagttaattgacctaatttcaatattgttgagtctcagggaataggtaggcctacattacttaaagtttactaaaccaggcaaattttcacccctaaattctgaagattttgattttatgaaactatactattgaaattcaaattcaagtgcaagtaaaaatctcttagcctttcaaagtgtccctagttacatctctccaatatcaaaatataaattagttcaaatcacttcttccactaaccataaatttttatttcacagaccaagtatttaatcacttaaacaattttataattagcaacgtgttagtactataataagtaaaacctcttcttagttctaaaatttaata

SEQ ID NO: 132699 - DNA, 386 bp, Homo sapiens
aaagaaaacaaggcagggaaatgtcacatggcatacattccagacaatttagctatgctattttcgtctcgatttttcatttttaattcaagggacttcagcttcattgtggtgagacctaaagagaaattaaactgacatttggatcaaaaaaattgtaacaaacatgcacacagagatggtttctgtcccctaacacagtgctccatactggcttcagccatgaggccgctatggctctacagttgtttgcaaagagttgctggactactgccccacaaagacaatgggttttgattckttgtttttcagttgtttgtttctgtattttggctagccataaggctgattcgtatatttaccaacattaagatctggattgaatt

SEQ ID NO: 132700 - DNA, 343 bp, Homo sapiens
acacacacacacacaccctcaagcagaaattgaattatacttttctgtaacctgcttttcattttagctttatgatttattgttggacatcatcctgccatcattttatttttttctttttatttatttttattttttgagayggagtttcgctcttgttgcccaggctggagtactgggataacaagcgtgagccactgcgcccggcgcctgccctcattttaaacctgggctccctttgtctcaacttcagagtggtctatgatttaagtacaaaataattcttctttttgtagtgcttttttttggtggggggtatgtttgttaaattatttatagtgat

SEQ ID NO: 132701 - DNA, 535 bp, Homo sapiens
agcttctgcacagcagaagtaaatacacagagtaacagaaacctaaagaatggaagaaaatatttacaaactatgcatccaaccaaggcytaatatccagaatctgttaggaatttaaacagatttgcaagcaaaaaaacaagaaaccccattaaaaaatgggcaaaagccatgaacagacacttctcaaaaggagacctacagccaacaaacatatgaaaaaaacactccacatcactaattatcagagaaatacaaagcaaaaccaaaatgagataccatctcatatctgtcagaatagctagtattaaaaaatcaaaaaataacaaatgctgatgaggctgcagataaaagggaatacttattacactgttggtgggaatgtaaattagttcagcaaatgagaaaagcattttgaagttttctgaaagaacttaaaacagaaataccatttgaaccagcaatcccattacttggtatatacccaaaagaaaacaaatcattgtaccaaattgacacatgtaataacatgttc

SEQ ID NO: 132702 - DNA, 535 bp, Homo sapiens
agcttctgcacagcagaagtaaatacacagagtaacagaaacctaaagaatggaagaaaatatttacaaactatgcatccaaccaaggcctaatatccagaatctgttaggaatttaaacagatttgcaagcaaaaaaacaagaaaccccattaaaaaatgggcaaaagccatgaacagacacttctcaaaaggagacctacagccaacaaacatatgaaaaaaacactccacatcactaattatcagagaaatacaaagcaaaaccaaaatgagataccatctcatatctgtcagaatagctagtattaaaaaatcaaaaaataacaaatgctgatgaggctgcagataaaagggaatacttattacactgttggtgggaatgtaaattagttcagcaaatgagaaaagcattttgaagttttytgaaagaacttaaaacagaaataccatttgaaccagcaatcccattacttggtatatacccaaaagaaaacaaatcattgtaccaaattgacacatgtaataacatgttc

SEQ ID NO: 132703 - DNA, 573 bp, Homo sapiens
gagccaactcattgttattgtcaccatttcaatatcactgatatgtgcttgctgttcttggattccgtagccaatcattgtgatcaatcttgcacatacttttgactcccttggtgctctttcrttttgccttatacccattggcaaaaccataatcctggttaaaaccaactctctgttccgtctgtaccagtccaggtacggctgaatcttgtggagaaaaatacatagccatgctgaactggttccacttcatattcaaaagtataaacctcatagcaggtccttaacactctcagacagtcattttagtgttctctaatccattcagtctcttattctcttaaatgactatttgatagcttgtcatttctctggaaactcccaagaactcattcctattctcactctcagctgatgaccttagttcctatttgcctgagaaaattggagcaatcagataaaccacatttaccctctcattgtcatctgtactcagaatctcagccatccaattggcaaactacccataatcctgtctaaagccacttcttgaaatctccatttctgcca

SEQ ID NO: 132704 - DNA, 529 bp, Homo sapiens
gatgagaacacatggacacaagaaggtggggaatgcatactggggccagtcagagggttggggcagtgagggagagcatcacggagaatagctaacagatgctgggcttagtaactaggtgatgggatgatctatgcagcaaatcgccatggcacacattgaccttcgtaacaaacctgcacagcctgttcatgtacccctgagctgaaaatttagaaaaataaaataataaataaaccaggagttactaaaatggcaggatattaaaataactcaaataggcaagtaacccaaaataacactaatgcaagtagattcaccattcaacacatcaccattgtaaacactaacctttgttccaaaaaaaaaaaaaaagatatctctccatatgggcgactttggggatgagaaactggggccagtttggtcagacaagagcacaaccagccagcagatagaacaggcaatttggagctccctaacaatcaktggatagctttaggacaatggggcagaacaaaagagatgc

SEQ ID NO: 132705 - DNA, 567 bp, Homo sapiens
agcaatgagccatgaattcactggggtcacagtggtaaaatgctgttactcataaaaaaggatgaacctgggctgatagactagagtacttttagctctctgtcctacccttctcagcctgcacaaaatcatagataatcttatatatacagaaaactaaagactctaccacaaaactcttagaaccaataaacaaataagtaaagttgcagagtacaaaatcaatataaaaatccgtagagcttctatacacaaacaamaaactctgaaaaggaaatcaaaaaggcaatccaatttataataactaccaaaaaaacccacctaggaataaatttagccaaggaagtgaatgaaagatctcttggaaaactacagggaagttttagatctcaaagaaaacaacaaaacactgatgaaagaaattaaagaggatacaagcaaacagaagacaatccaggctcataaatcaaaagagttaatatttttactatgacaatactactcagagcaatctatagattcagtgcaatccgtatcaaaataccagttacattcttcacataaata

SEQ ID NO: 132706 - DNA, 510 bp, Homo sapiens
atccatatttggacaaataaaacttgatcttcacctcttaccctatgtaaaaatcaactcaagatggatcaagtacctaaatgtagacctgaaactaccaagctactagtagaaaacaggaaaaatgcttttaggacattggtttgggaaataactttataaataaaacttcaaaagcacaggcaacaaatgcaaaaataaacaaatggkattatatcaaactaaaatcttctgcacctcaaaggaaacaattaacaaagttgatcaaaagacaacctacagaatgggaaaaaaatatttgcatgctcaatctaatggaatttatatccagaatatacaaggaactcaaacaacaacaaaaatcaaataattcaattaaaaatgggcaaatgagctgaacagacacttatcaaaaggtatacaaacagccaacaaatatataaaaaaaggttcaatatcactaatcatcagggagatacaaatcaaaaccaccatgaggtatcatcatac

SEQ ID NO: 132707 - DNA, 476 bp, Homo sapiens
ttaaaaaacaactctcaaaaccagcactcatttctctaagataggttataagtattttacgatttcttgttatattaaattgagttaaaggtactgacaagtcaatatgcaaatgggtttaaacacyaatttgatttctcttctgactagctctggagagctgtgacatctggatgttggtgtcactcacacaggtaggtggtagagaactttcataacaaaactacacactccacaccaactgggcaccagcttccaaacccaactccacttcaggtcaaacaaccttaaggaactacctatagtctagttaaacattaaatagtattttcaagaaaatacctttttttgctttgcaacttaatatttttcaatttcctagattaaaagttactgattttgaactttaaatgctgtaattcatataggggtgcgaatatgctcatgaaaaacaaaaggctattattccattttag

SEQ ID NO: 132708 - DNA, 558 bp, Homo sapiens
ggaattctgtgaaaaaaatcgttctttacagattatcggctgaatgcaagaaggagtgtttcttgaagcattactttccatatgagaatgaactcattttgactgattgcaaaggggacaaaggcagtagctagaggtttcaaggtgaggtgtttggggcttgttttattgaatgctgggtgtacatgtacctgctctactggttttacctttctgagactgggacagaaagctgacagtggtagtggcagtaggaggctctgatatgattgcttaattctcaagttggggatcagatgattctgccaggtgcaatggtggagatgtgtcatttcaactcctgcttgcctcattcaactgaccaacctggctggtttttcttactgtaattaaatggttggtacaatgtgagcatttgtagatggacartaagaacttcacgtctgtctaggactataaatgtagaagtgtgctccctgcagatgagcccacataattggccagcatgtttgagttctacagctggggcttctagaagcatgctgactgcccttccat

SEQ ID NO: 132709 - DNA, 616 bp, Homo sapiens
atttctgatagtttattgtgaatatataaaataatgaatcaaataggtagaacatatcttagtagctaactctgcttttcaaaattctatggaaaactcaccaaaaaacaggaatcatacttctcttttacaaatttctagattaaaaaggggggagggtcaattcacgtctcttataaacatataagcataaaaacatgggttataaacctcaatcatactgccttatttttagcctggtacttgcataaattctgatctaaatttcagagtaacaaaattactaccaatacatctaataatgtgatacgttacactgaggcttaaagttaatgccttttacttgaaaaacatttatgtttctaacatacaaaatattacttaaaatatttaaaatttcaaaagtaaggacaatctaagttttgtgatgaaactcattcaagaccaagataaactttcaatctttactcacaacaaattcttagatttaaaccatgctgatttcatttacttgtcagtgaaaaggtcacagtrccggcatactggtatacatatgtcaaaatgatgatggctcagattttttttaaatggagcaactaaattttgaaagaagaaa

SEQ ID NO: 132710 - DNA, 492 bp, Homo sapiens
tgaattcagcacaatcaggatataagatcatacactcacaaaactgtgtttctatatactggcaataatgatccaaaaatgaaattaaaaaacaatttcattcacaatggtatcaccaaaaacaaagtattggaaatacagttttaagaagttgtgtcaggyttgtacattgtaaactgtaaagcattactgagaaaaattaaagatctaaataaaatgagagatattccatgttcatggattggcaggctccatattgttcagatagaaattcttctcaaatttgtctacagactcagtgaaatttctagcaaaattctggttttttttttaacagaaatttacaagctgattctaaaatttatataaaattgaaatgactcagaataacaacaataagcaaagttgaaggactcacattttccaattacaaaatactataaagctacaataattaagagagtgcgataccaaagtatggttagacatacg

SEQ ID NO: 132711 - DNA, 244 bp, Homo sapiens
aattgaatagaagctctctaatggtcagtcatatcaaactgttgtttatgttatttatttgcacaaatgattctctgttcctagaaaattcttatttaggtgtttgaatctgagttaccaaaaaaaaaaatttcaccctcctcttgggccacatgagatgttcttyacttttctctaaacattctagatcaccagagtactagaacattccacagaacaagcaatatatggtattgtaattgtg

SEQ ID NO: 132712 - DNA, 400 bp, Homo sapiens
gagatgtaaagacttttagtagaaattaagtaggtgaaaaggagagatatggtgttccagacaatgaaaatcacaggtttaaaggtcattagcgagcatgtcctggtttgtttgtatctgaaaaaggccagtgtggctggagcacatgtgagatgaagctagctaggagatgacagagcttaatgtcctttgtaagctgtgacaaagaatttttatctgtatcctaagagcaaatttttaagcaatgtgaggagtggtgtggtatgacagacgctcagtttgaaaatrtaatactaggtacagattggagaaaacacttgggggagccaacagaggtacagaacagtgaagaaacccactgaggtggtctagataaaggataatcacacagcaggctaag

SEQ ID NO: 132713 - DNA, 427 bp, Homo sapiens
aattagtattttttcccattacaatattctttctcacaattcttataacataatagtactgtagtaaatgtttgttgaataaataratgattacattaataataataactgaatattttctctaaagctgtctgcctatattttccttcaacatctctagaatcgttctcctatagtattttatagcctatccttctaaatcgtaattattcggatatcaagtgaattaatttgtcatccaagttttttcttaatagtcataaaaatcaacactttatttcagaattcttccacagttacccataagggaaataagaaagaaactgtatggcatggatgcttgataataaagatggaactgagactgataaagtattctttgagaacaaatttctcactcctgcttcacactctctcctacaactaa

SEQ ID NO: 132714 - DNA, 470 bp, Homo sapiens
ttcagatactgttctatttgctggtttcccaaagcagggtgatctcaacacccagtctttgttatattttcaaatatagcttccagcctgctttactccttgaatacaaaccggtgtatccaactaccaactggagatctttcctagaagtcccacactctctccaaattaaacttatcatcttgttccctaaaacatgcttcttatcatgtgggtttttaattccatgaaaawgtaggataacacagtatataatattttacttggagccaacaggtcatagagtgccacactgccactacgtgagttggtataagtcacaccactacatctctgtttcttctctgtaatattagaataacaaaatacacaaaaatatttatattttgttttacataaattattttttcagatactttaatgttactgctttataaaaatggtgcttgacttgcttaaaaaaagctaac

SEQ ID NO: 132715 - DNA, 411 bp, Homo sapiens
aaaataatatgctgtcctttaaaaatgaaagctaatataccagtatatgattgaaaaaaagagttactttgaaaaattgaatatgagcatttaataaaagtattttataaaaattctctaaccttcaattataagcagtttaagaagatgaatggtcctaaaatatgtatcttggtactttttcagctgtggtgtttgggagaaaacctaccaattaaaggagggtatagacactgtagtatattttacaaattgcacaaaaaattaagcaagcagaggctctgtgtaagggacaaatctgtttcygaccaaatccttattaaggtgaagtctagctacatgatttttgaaaaggaatactgatagtgttctcaagaggtttgtttcacttttgggtcaatgtgtttccca

SEQ ID NO: 132716 - DNA, 490 bp, Homo sapiens
agttcctccttcccacttgctctcccttgcctgttaccatgtaagatatgcctgcttccccttctgccatgattgtaagtttcctgaggcctccccagccatatggaactgtgagtcaattaaatctctttcctttataaattacccagtctcaggaaagttctttatagcagtgtcagaacaaactaatacagtcaggctcccttcaagtataaagtccatttagatagaaagtattcagcattaaagagtttaagaaatgcagaatcagtgatcccacccatggaaaggaaccattagaaaataacacatcaacaacaaattatgaattagaaaatgaaaaatttgaatcagtgaatctgcattattttgtaacggtgtaagcatgtcattatacatttgacaatacycatagcctgtacaaagcaaagagtgaacactaatgtgaacttctattgatagtatttcaatattgactcataaattataa

SEQ ID NO: 132717 - DNA, 431 bp, Homo sapiens
ttgttatggttttggattttagccactctaacagatatgtaatggtattttgytgtcttaatctacaattccctaatggcttatgatgagcatatttgcatatgcttatttggcatccatgtatctttgctgaagtatctgttcagatcttttgtctattttctaattggattatttgttttcttattgtggagtcttaagacttatttgtatattccagatacaactcctttatcaggtttgtcttatataaatatgtgcttccagtcagtggtctgtgttttcattttcttaatagtgtctttcatagagcagaaatttttgcttttaatatagtttaatataaaatttgtttttctcatgaatcatgtttttgatgttgtatgtaacactttactgggaaactcataatcacctgtatttaatccctt

SEQ ID NO: 132718 - DNA, 654 bp, Homo sapiens
gtgactgaagccatgtttcatgggattgtaaaacaaaatacagagctgtgtagagcttaaagatgtgacaaatcaaggctgcaatacatggctcaaaataaaattaatattggaatctggaattatacacagaatatattgaaataaggcaatctatatgtgacaccagactaaatgaatctcttgaaaaaattgttgtctggaaaaaacagagtttcactaatggaaaggattatatcaccaataagttccttaaaaaaattagatgcttcttgcagaaaacttaaygattatatgtcatagcgtttgccaaggaaggaagtgtagaacactgtcaaacattttatccttagatgactttactcagatgatttgcccttttatttatttatttatttatttatttttacttaggttttattgaagcatgattttaatgtaatcttattaatcagttttaaacaaatagtttggtacattttttaaatgtttgctattatttaatcactaccacaattatgatatagaacattttcatcactcaaatagtttcctcatgctcctttgcagtcagtctcttccccatatcctctggctattagcaatcaataaactgcttcctaacactacattaaataaaattgtataatttgt

SEQ ID NO: 132719 - DNA, 487 bp, Homo sapiens
tgagccaagaaaatgagtcttgttagttttccactctttgacttctaacattacacttgttcctacagttaacattaaaagcactacattaaatttacatgaaacatagctttgtcttctgatctattggaagttgactaaactcttataataataatcttacctggctctatgtcattatttataggaaaataataaagattaaaaaataaatgaatctggaaactacaagccacaaggatggctgtggaaatgagtgagagtataatcttgagtttcaaaaacatgggctctatgatttgtaaagttatttcaatcttgtagmtatttttggaactaagcaatatgactcacccttcctaataccagtagaaatataaagcataaagttggaactctggctacttcatgaaaatatttatcttggaattgacacttagatgctctgacctgttggattttgaacagaaaaatatactacagacaa

SEQ ID NO: 132720 - DNA, 601 bp, Homo sapiens
gagtatgcaaaaaaacacagactcataaaaagaatctactacaaccaaaatcccaatttttttcaatagaaaaacaaggttccaaaaaaatgtgtttccaaataaattatccagtaacaactgtggaatttttatttgacaaaacatattttatgtttgataaatgtaaaatgaagctactaatccaaggcatttaaacatttatcaataacaaaagaatcaacatacatggcaccaaaatgtagtaaaatgaaaaacattttatgcagaagcataatgtgcatatatatgaaaatgtgtagtataggtaactgtactcattaatatcaagtttargttcatctaaggtccctcaagtatcatctaggtaaaaggcattcaagtcataagatatatttaggtgatgatcaacaaatccattatggtggtcaatagtaaggtgaggacagatgctggaggtgaaaatgggtatttaaaaaaccaacagaaaaatgggtatatttataagcaattgactattggaagatagtagaagttgtaagaattatttagaatattatgtgagtgactggggagctatctatgctactcatagatagct

SEQ ID NO: 132721 - DNA, 551 bp, Homo sapiens
aagcattatcccctctataaaaatatctctttcctccccaaactaaatatagtttttgcactaaaattaatttctgcctctatattcaaaaagcatgtcttattaaaattatcaatgtttttattattttattttttcctagtagagagatagcgcttatcaattgtgtattattttaaaaaaaatctgtacgtcgacataattaatatgacttgccttcactgatccttacgtacataactaatattttgaaatttgtgcatcattcaggaaaacatactgtttaatgttattatttacttttgaaaacaatatgcagtctctagtaaaaaattttatttactgtttcttaactttaatgtgaaataagatcaagactaaaaaacaaaatattaacatacctatatacctacccatttaataacttaaatataattcaatatattrtaactaatttttaagagattaaaaaacattttattttatcagacactcaagtattaaattttcatattcattctactgtttctagtaagctctagcattttagg

SEQ ID NO: 132722 - DNA, 518 bp, Homo sapiens
cttgtccttttctactgtaagcattttgtgctttagcttttcctctcagcattgctttttctgtgtcttacagttttgatatgttacattttgatttcatctagttcactgaagtttttaatttgtttgagactttttctttgacccatggattatttagaagtgtctagtttgcaagtgcttggaggttttcctgttatctttctgttattgaattccattttaatttcattgtagtcagaggacacagttwatattatttcaattcttttaagtttcttgaaatttatagttccatcttgaaaagaatgtgtgtcttgctgttgttggagagagtgtttcataaatgttttattagatactgttggctgatggtcttgttgaattcttttactttaccctagctgattttctgtctagttgttctgtcattttttgagagatagaagtattgaagtctccaaccataattgtgaatttgtctattcatcctttcagttctatcagattttcttcac

SEQ ID NO: 132723 - DNA, 343 bp, Homo sapiens
cagtctctcctttgattcaaggtgaagaataagtctgtgtctatttctcgaaatcattcaggttttgcttctatctccagtgaagaactgtttgtgctggaatacaagttgggaggccttctcaagaagacacaattatgctgggtacagtggctcatgctggtaatcccagcactttgggaggctgaggcaggaggattgtttgaatccaggagttggagacaarcctacacaacgtagtgaggcatcatcgctacaaacaaacaaacaaacaaaatagctgggtgtggtggcgcttgcctatagtcccaactacgtcggaggttgaggtgggagaattgct

SEQ ID NO: 132724 - DNA, 343 bp, Homo sapiens
cagtctctcctttgattcaaggtgaagaataagtctgtgtctatttctcgaaatcattcaggttttgcttctatctccagtgaagaactgtttgtgctggaatacaagttgggaggccttctcaagaagacacaattatgctgggtacagtggctcatgctggtaatcccagcactttgggaggctgaggcaggaggattgtttgaatccaggagttggagacaaacctacacaacgtagtgaggcatcatcgctacaaacaaacaaacaaacaaaatagctgggtgtggtggcrcttgcctatagtcccaactacgtcggaggttgaggtgggagaattgct

SEQ ID NO: 132725 - DNA, 602 bp, Homo sapiens
cagcaggatgggaaaaaactctctctttgacctttgaatctgaaaaactaaacagtcaaaaaatatgaaggtgagaaataatatcctagcccaggtcatccagagtagatatttacactgtaacattttctgtgctgtggacatggatggtggcagcatgatgctggtatcagactgttcctgtgaggaaaaggctgctgcaatgagagaggcctatggtgtcgagagcctgttgggctttccaggtaggcagatttcagtcattagctctgtaactttgggcatgttagctctgagattgtaaaaggggctgacagcacctgttttggttgggaggatgggtgtgtagcacttagcatagtgccacaccaagaactctcttgtgaaagggaacaagaaggcctcccagaggtcgccgtggccagcttcccctgaggtctgattaatcctctcttttwgtgaaactttctgctgagtcattgtgtctgaaacccagaggcatgtgagaccatgccacatcctgggtcaggaagtcccctttcacctgcttaaccgatgtgcaggtgacggaccattagacgctcgtggtaagggtgggtcac

SEQ ID NO: 132726 - DNA, 520 bp, Homo sapiens
tgatctttaccctctcccagaaatgtaatgtgccacaccctgtctagctggcatttgcatgtcagaggagggtgtttggagaaggctcgtccagcstgatgagccttcaggtccggggctgcctgggacctttcaagtcattccaaattggcccggccccctccttcaggctgaggaagtcttttgtggctggtgaacatcctgcatccctgcttctccctccacccagccaaccacagtgggcatggccgtgtgattttcagattctgtgctcacacgcattgggctttttcacttgagggaatgctttgtgataacttaacctgctgaggatgtgggcttcatgaaaacaaaaacaaacccagtaacatccatacatttgctgagcttctggagcatatgttgcctatttcccttatttgggtcttagcataaactgcccagatggacacacacacacacacagagagagagagagagagagagagagagagagagagagagagagatggatattatc

SEQ ID NO: 132727 - DNA, 399 bp, Homo sapiens
tataatctcggacaagatattcaatctctatatgcctcactgacctcatctttaataggggatataaattgtagcagttcataggatgtggcttcaatgagttaatayctgtagcatgcttaaaagaatgtcatagtaaatatgccttacatagtaaatattctctattgtttttgcctattgttatttcaattgttttaaccattcttctggtgtatcatatggagctatgtgtgtgtgttttcgtgtgtgttctccataaattaagagtctgtttgtagcatagccatgaaggagatcattttgaaaatggaattaaatcaggaaccaaaagcatcaaatcatgctactgttttagtatgggcttcttttgcagaaactgaaaataagaaataattc

SEQ ID NO: 132728 - DNA, 329 bp, Homo sapiens
cgtaacttaactctatatcaagatctcagaatgcaatgcaggcaccattctcaccagcacagctctgccccacagctctctaataagtggtggtggtcagagtagctcagtaatgatctaaagatgacagttgctattcttctttagagaaagtgaggtttttctctcactttaatttttttttgaattaggtttgttatttgtttttaaatatttaaatgacaaaatttatatatacttatattgtccaacctgatgttataaaayatatacatcatggactagctaagtcaagctaattaacattgacttatttcttatttctcttt

SEQ ID NO: 132729 - DNA, 615 bp, Homo sapiens
tgttggctttgggactgcacaaatcacaagacaaattagtttcttctgcagatccacctgcttattctgaaatgtgcagctggatattaaaataaatgaacattcacagcttcttttgtagtcctgtcacacccatatattttattactttagtgcaaatatcactgggtaagcttttcagaacaagtgctttcactattaagaacatctgtcttgtgaccwtgtcatttttactgattcaactttaaacctcattgttttggccaccctgctttgccagtttaatatttggtgttatgaatattttcttgcttaattataaacagaagattttttgctcctcttattgttgtctatttaaagagaggcaagtgaataaaaatatttggtgaaatatattactaagaggatattaaacactggcataacactgagacataagaggaaattctagaccctaccttgtaggttttagtattaagaaattggtctctctgaaggcgctaaagccttttgatatacccaactatatgacgctttctacttattccttatttgtatctaaatgaacacatataacagaagagtgttgaaggaaactctgctatgcagaaa

SEQ ID NO: 132730 - DNA, 584 bp, Homo sapiens
tgttgatgtggaggtagaattggagtaggcaggggaaagacaggtaccaggaaaaccagttcagagcctactacaataatcatatgagaaacaaagagggcttgaactaagggagttcagatgaaagaagaatctaatagttatttatagagtaaaatagacagaacttggtgacttccaggattttaggcttgagagagggaggactcaagaattgtacatgggtttctggtttcagtgattagatttctggcatctgctgtccataagatagtaaaaactgcagatagggtaaatgccagtattggaaatatgaagtttgaggtgtctgtgcacatccagatagaaatttatggaatgtggaagagcaatgtaagctggggttttcagcacaatggtaggtaggtattgtagttttgggggtgaaggtactcacacaggcaatgagtagactaaaaaaasaaaaatatagagaaagaagaatccaacaaagagattgagaagtagtggctgagaagtaggcagaaatttaggagagtggtgttctcaactccaaggtaggagagaattccaagattggaatt

SEQ ID NO: 132731 - DNA, 579 bp, Homo sapiens
ttttcctgagacaatttatcttctgctttccagaagaaacagagacaatgaaaagtgtgggaaaaatttgtcaatattaaattttcagagatattcagggggagaatataaccattaagtatgatctgatttccataaataggagcagaatactgaatatatatgtatatataaagattggataaaatgcaattcaagtaatattcattcttgaatattgaattaagcaaatatcttagaatatagagcaaaaagccaaggatataaaataygatggaaaagtaaaaaagatatgaagaatgtggtagaagtggaggaatgggaaaggatgtgggaaaataacagaaaaaaaatccttgacctgaagagtaattcaagtcctcagattgaaaagtttcatccaacaccgaacaaggaaaaaaggatacatatctagatgtgtatacacatgctgatgaaaattttggaattctaagtataagaaattaatccttccagagaacaaaaaaaaaggatctttcaaaggtatcaaacttctcatcagcaagattagaagtgaatgcagactaggcaaggttt

SEQ ID NO: 132732 - DNA, 541 bp, Homo sapiens
taccacttagtgctgctgggctcctcacaaagcacaacaggaaatgaactgactaaaactgggaagtcgtttttcttgcccaagcatagcaaaccaaggtgggaacatggcatagggatggagggatgagggcagtagcaggggaaggttcccctttctgagcccattttgaaaaagtgggcccttaaaacctcagtgctagtaataataatgatggttgagattttgacattagtaagatttgagacactcagaaaaggcagtgcttgtgcctttcctccctctgcagctgaccactcaggccccaccctctaggctcactccccctgaagttggaacctggctgtacygtggcagtagtcctgggaagggcaaagaagtattaaaaagagtcagtgaggcacccttaagatgaatgggtccctgttgataggggtcagacctagtgcctggagcagcatgaggaccagcttccatgtggcttctctcactagaggccccaggtacaggttcgcaaatgtatgcctgtctatccctcaac

SEQ ID NO: 132733 - DNA, 451 bp, Homo sapiens
aagcaacttaaaatgtgtgtgctctttagggagatgtgctattcccactctatattattagatctcagagacagctggggcaagaacatctgggacttcctgcactatcattttgccaagttgctataaaattgtcctttctcaytacaaaattgagaaggaaaagagaaaaagcagtgcaaaggccaaccacacttgttagaaggttgctcctcagctgtctttcagaagtcccagcagtggctcccttttttgtcaggttacttcaataagggagggaatctacttcatttgatgtgtacttttgataatcaaggaatgtatcttggcatgtaaactgtgcaggacagaatgtcaaatctcaaagcatatttttccaccttgaattttaaaaataaaatacgtaacatgcatttagcaaattttctcagggaacttgctaaattttatt

SEQ ID NO: 132734 - DNA, 623 bp, Homo sapiens
cctcaggggcacccatgcaaacaagcccaagaaaaaatatgcctccctctgtgaaagaggacaacaaaccaatttgttgaaaatgtgacagtctgcatcccatctcctgcttccttgtgccctgaatgaattgtgaaacctcgggaagacaaatggaatgttctcaaatcttaaaaaatcagcaattccctttacaaagaactatgttcttctatttttttcctgcctggaccccttctctccatcatctgggaaatttcaacagttttccaagggtagagggagaaatttaagatcacagagaaagaaagtcaagttgactgaaaatatagcctaatttgaagagtttgcattttcagtagccaatccctcagctaggatattatcaactctttgatttgcctcattatcaaaatggtctgggcttttgcatagaaacagcctcgactgttttaatgagaaaaagaacaaagaaaaarcacatggacagactaatttatactagaggcttttaagccaaatggcaataagtgatattcctcttttgacattttattgaaaaacggggaaagaaaaagcagcccctgacaactgagagctcaccagacactcacaaccaggcc

SEQ ID NO: 132735 - DNA, 546 bp, Homo sapiens
gatgctctatatctcaaatcaccagcacatcaataggctttaactggtttctctgtctccagtattttctgatccaagtcatttttacttagttcctccagtctaatcattccagtggactaaatcagaggccttcctatcaattaaaaaaaaatcaagcaagtaactgtgatagaagtatatttatccataaattttatgagtgtgcttgtatatatgtataaatattataaatacatttatatataaattatacaagcattactatactaatgaaatataaaatatatgttwttttaaaacatatttcctactgtagtgttattattctattatgaactggtattacaaaacatggtacatacatagggtgaagttcatagttaatagtaaaagtgaatccacatatcaggtagtcttcttggtaatttaatattattttggttgtctttctattagctaaaattataatacagtaatatgactaatgaaaagctcataataaaagtataggtgtcagttttagttttcttatttacttaattg

SEQ ID NO: 132736 - DNA, 594 bp, Homo sapiens
tcaaatgtgttttatgtttcctttcatcataatacattaacaagagctttaagtcaacatttagataataccaagactatgttattatagaataataagaaaaattaaagcaatttaatttttgcttgtgaagaccatgcctggtgggttttttctttgttgttgtttttaagtcataaaaagtaaagttttatgattgggtagaaaaaaatgagttaattatgtaaaaagatttttttctatgtgaaattttaaatttgatttaaaaaatttatgctgatggttgttaagcttatttctttcttttaagtaaataatatcaaatacatacatgtaggtgggaacaatccagaaaagcaagaaaatttgataattagccaaaaaaataaaaagggaatatgtcrgtggaatcttcctaattcagcatgagggggctgggaggtagtatatatgtcagccttagatgggagaatagactgttaacaacagggagggcagagtatgtgcctacaaaagcaggtaggtgagtagatgtgatatggttgtttgtggctttctattccgatggcttctactttcatagtggtaaccctt

SEQ ID NO: 132737 - DNA, 412 bp, Homo sapiens
cccatcacccataagtagcatgaaatacctgctttttctgatgtatgattgttaagttatgggatagggttcagcaaaagcattaatagcaacagaaagcaaactatttattcctctttcataacatgaaccagaatcaaatagttggaagccaatttttgaatctgaagcagataatgtttcctgtatcctgctattatttttctccccagcatgtgttcaatgaagataagtcccgtgaatagttatctgactccataaaaaccattaggccagagtccaatgagatatcacagctgtgctacggatgagataatagaaaaagaacarcattcaaagcttttcatagtatccatgtataccttgaagagggtagtggacagaagacaggacccagagtgacgtggtcctg

SEQ ID NO: 132738 - DNA, 583 bp, Homo sapiens
ttcatgatgtatgaggcagatattatgcacatgcatctgctctagaaggttaatgataaaaattggttataaagttttaaaatagtcactatattagctatataacttttataatttgaactggttacattgtggcaagttgtatcacttacagttaacactgacttgccaaatttcttaacagtgacagcaggaataattgccccaaactagaaattgagcaaagctttcccttaataaacagtagagaaataactaagaacagaaacggggaagaaataggaagataaaggacagtctaagctaagcttataccgtgaacatacttaattagccttccctccttgatttatgttgcatatttataaaccctctgtaaactgcaagtgtaacaaaggtattttattttattgatttttattattatatttctgatcactgtccccagccaggcaacatcagtaagamaaagaatcattgtgacaggtcctagattttagttgcattggccaatgtttacttttccagggctgaatatagcagccctatgatgctgagatccaatagcattcagtacactgag

SEQ ID NO: 132739 - DNA, 621 bp, Homo sapiens
accttgggaaagtcagaaaccaacctataagtatggatgattaattaaaatatattatttaggatttgaggtagggatatatgcaatcaaagtcgagttacagttgccaaataaaatagatgaatgaaaatatagtttgacactcttggaataagttcccaagaatataaggtgctatttatcacyatttaaattgatttacattcacatttaatacccaattaaggctgatatcctttttattgtagattttaattattgaagccctataaggcagttaggtatattaattcctcccaaagcaattgttactgtttttaagcaagagctcttctacacctttcctgttaagatatttcttctcctttttgatatctatgccaactgtgatttcagctgaagcacagaaacactgatgctttggaaattataaatgcacctttcacttctcagtatcatgtctccattagtgatacttctatgcacaccaaccctaaatatttcacaatatgtcccccttttaggatcatgccatgttcatactcagttttagaacttgacttcaggggtgtttttttgtttgtttgtttggggttcttacaaaaataagaaatctaacaa

SEQ ID NO: 132740 - DNA, 620 bp, Homo sapiens
cgatggatgcttaggttgttttattatatatgatggcattgacattgtagtgcattgcaatgaacatggtagtgcaaatatctctttcacatactggtttcattttatttgaatatagacttagtactaggattcctgtattgtatgatagttctatttttgttttacttatttatttatttttgagataaggtatcagtttgtcacccaggctggagggtagtggcaccatgacggctcaccatagcttcaacttcctaagctcaggtgatcctcccacttcagcctcccaagtagctgagactacaagcacaggctgccatgsctagctaattttgtattttttgtagagctggggtttcaccatgttgcccaggatggtctcgacgtcctgggctcaagaaatctgcccacctcagtctcccaaattgttgggattacaggtgtgagccactgtacctggcctctataattttttgagaaatctccatatttttcataatggctgtactaatttacattcccatcaacagtgtgcaagtgttcccttccttccacatctttaccaacactcatcttttgtctttctgatgataacaattctaacaggtgggaggtaa

SEQ ID NO: 132741 - DNA, 603 bp, Homo sapiens
cactaatcaagaaatttttcttcagtacaatctcctagagactttctccagtgttttcctttagtagtttcacagtttgaggtcttagatgtaagtctttaattcattttgatttkattttttgaatgtggtgagagacagggatccagtttcattcttttgcatatggatatccagttttcccagcaccatttattgaagagactgtcctttctccaatatatgtttttggcacttttgtcaaaaatgagtttacttaagtgtatggatttatttctggtttctttattctgtaccattggtatatgtgtctgtttttatgccagtatccgtcacgttttggctactatagctctataatataatttgaaatcagataatgtgatttctctagttctgttctttttgcttaagatgactttaactattcttgctcttttgtggtccatgtacattttaggattattttttctatttctgtgatgaatgtcattggtactttcatagggattgcattgaatctgtagcttgctttggatagtatgaacatttttaataatattgataattccaatcctaaacttggaatgtattttcatattt

SEQ ID NO: 132742 - DNA, 519 bp, Homo sapiens
tatgaattaacttgtttaagcattttctttcttaatagattattttaatagaagagtattaattgctgagtcaaattcacaatacaggactattyttataataaattttaaagttatcatttgtagctaaaatagttttaataaaaagatttacattgaaggcctgcttatatttgagtgaggccacatgagagataatggaatggacaaatacaatggaaaggaacggcaagaggtataaatgagccataagatgccatggtcaaagtaggtagagagataaggaaacagagaagggggaaggaaatgtagaccacacacatataatactgaagaacatggaagacaattttaaatttttggttaagaaaaataaattttaagatttttgaaatctacctattcctaaagatttagttttataccttatagttctttaactggactcagtttgacagagggacaaatgaacacaaattgtagtcatgaaatgttgcataagccccaatttactgtctg

SEQ ID NO: 132743 - DNA, 360 bp, Homo sapiens
tccagtgaaatctaatactatagttccagtctcatacccaatcaaaacttctctcacacctcagacgccattgctagaaaacctgtaacaaaaagtgggaagtgggggcctttttactctccatgttccaacactcctacatttgctctggtgcttctaggtcrtcattcctatattttcaagggtggaaggaggttggtgagaagaagaggaggtaaaaggagagaaagttcttacttgactggtactgttttaaagtgaaaattgtagctctctggaaggccggtgcctaaatatcaatattctctcttgaaatttcttcaaatatctcccacattctcctctccagctgctctcttc

SEQ ID NO: 132744 - DNA, 391 bp, Homo sapiens
ggactgtgccccaaaaaacttgtcatccctactatcttctgtctagtcatactcctattcaccattctcaactactcatacatgccctgctcttgtttacactgccagtttacactgttyctccaagccatcacagctgatatctcctggtgctatccccaaaccgccactcttaactcttaaataaataatctttgctggcaaggctatgctggttagaatttagtcaatggattggacatgaagaaggtcaaaggctagaagtgaaatttcttcaggaggcgggacaaagtacttgatgaattaaaggtcagactcatgagaaaagtagaagtcagaactgatttgagatggctatcatgttaggctggatgaattataatgtccttat

SEQ ID NO: 132745 - DNA, 374 bp, Homo sapiens
gaatatatttatagaataaacaaacaggaaagacagacatataatcaagtgattatcatgtggcataacgttgcacatttaaagtatgaaaaaatgtttttacagttccaatgaaacaattcattaaattttgatagagtttatcaaagcacaatttaaaaacactcaagtaatctaggtccatactctccaatatagtagccataggctcatgagactatttacatttaaatgaattaaaattaaataaaatgtccaattcagttcctcagttgcattagtcatgtttcaagcattcagtagtcatgtgtggctagtggctactgaattaaacagggaagatatasaacagaatgcattgatcatcacagaaa

SEQ ID NO: 132746 - DNA, 522 bp, Homo sapiens
catccttaacacatgatgtatagtggaaaaaaaataaggtctgacttttttaatgaccactgtacctgaaatgatttttaaatcagtgacgacatggatatgccacaaatgtataactaacatactcttttaaactgttgtaattrctgttgaaaattatgaaacatttgtggtttaaaaaattatcagaaatactccacccaaacaaaatagctaatattttaaaaacataacgttacccacaaacattttaatgaacccctattttaaaacattaaaacccaaatatactttttattataaattgttacatatatatttcaaatgattaaaacatttaaaaatatatgtgtatttattgcgatttcaagctgctactttcatatatattttgtcatgcttcattatgtttcattatattgattcagacacctgagtaactatagtcgctaaatttttagaataacttcattagtctcttaaagaattagtatgtatttcatgcacttgaaaattttactt

SEQ ID NO: 132747 - DNA, 522 bp, Homo sapiens
catccttaacacatgatgtatagtggaaaaaaaataaggtctgacttttttaatgaccactgtacctgaaatgatttttaaatcagtgacgacatggatatgccacaaatgtataactaacatactcttttaaactgttgtaattgctgttgaaaattatgaaacatttgtggtttaaaaaattatcagaaatactccacccaaacaaaatagctaatattttaaaaacataacgttacccacaaacattttaatgaacccctattttaaaacattaaaacccaaatatactttttattataaattgttacatatatatttcaaatgattaaaacatttaaaaatatatrtgtatttattgcgatttcaagctgctactttcatatatattttgtcatgcttcattatgtttcattatattgattcagacacctgagtaactatagtcgctaaatttttagaataacttcattagtctcttaaagaattagtatgtatttcatgcacttgaaaattttactt

SEQ ID NO: 132748 - DNA, 617 bp, Homo sapiens
tgctttttagctctttaagaggataatcccatttcctcagaatttttaaagtagaatgaagcacagtgttatcccaattagcctcttagaaaaggcattatatgaatcyatgacactaccaataatacatttttagtttgggagatagtattattccccatgctcctcattctttgttaaatggaatttcttcctggaggaatacttagcagtattttttcttgtaaaagggtactcttgcctaaaattttcagtcaagttgactttctgtaagatgaatttgcctagaaagatgtccttgtctggcacaaagtatactggaccctgttaggggaccttatcttctttccaaatttatgacataactttgggggcatcacttaacttctctgggcctgatttctcttgcctataaaaaaattaggtgtctgggtgaagtgttccccaaggtctctttcagcaggaagatactgaaagtctgactttaaagcttctcacactagtgccaagtaacagaaactccaagagtgtcctaaaatgtggctggtatcagtcataaagtaatttctttctttctttctttttttaaccagcattcattttgaactctatagcag

SEQ ID NO: 132749 - DNA, 416 bp, Homo sapiens
cccccgccccttcagctccgtcggccgggagaaaagkggggggggaaggggggggaagcagagacgggcagagagaagagtatataggtgatgagagcagtgttggaggggaggatcggcaataattggatggcgttgcagctgttgcgcctctgctgaacgcccagccagagcggattcacttttcacacaaatcaaccggagggattgttgctgcctgcaatcaataactcagcggagtgagttgctcaaactagaggcgtccctcgtctgggtctttgagggccgtccggattgagtcccagcgctctgctttccaaacaaagaagtgggcaccaaaacgcaggacgagatttttaatccccacttccaccacaaccccgggtaaagattttttaaaatgaaaaagcacacac

SEQ ID NO: 132750 - DNA, 581 bp, Homo sapiens
tgaaaaaccggcaaacaaaatacattgtaaatactaatctgcaagaaatactactatttcagatggtttttgctttgtgacagtttgtgatgcattcctataataaaagggagggaatggtcttagttttgctgatagtcacaatgatgagctggaacttgaagattgttcagatctagttgtacttgcctataaaataaaccttcccctttcaagtgaagccttgggacmgttgcctaaatgttgaggccactcttctgagagaagctactcacatcaaatacctcctacattgaagcaggaggctttttgaaccatactgtcctcatatattaaaatagtcatctggaggcatattgctgaacttaacaggaaatacaactagtcattgggttaaacgtagtgctaaaaggaattttctaaagtgaggaaatctttagttagctagatatttcaatatactattgtctaatctcatatattccatgttctattaattttcccttcttgctttcacaatattttttaaaaaatagtttggtttaaacattttatgtaatctataattctactggcatgca

SEQ ID NO: 132751 - DNA, 590 bp, Homo sapiens
cagcacacctttctaaaactagccttcttctttagaaatgtattaaatgggagccttcaggagaaagtgttaccacttaataaatatttgttctaattttatttttaaactaaattattgatttaacagtatatgaatagtgtataaatgttagcttagttgttaacccactacactaattattaattgcctatatgaaatttaccaaattagaccaacagttaagtgtaatttaattttatttctcttgaaacttaaatagataagaatgataattttaattatgtttaaatatcaagcatttatttttctgtgaatgcaaatgttcccgataaattgttaagaaattaatacaacatagatcttaaaaaatgtataaggcagcttataagaatatgataacaatggcatattcctacacctggcactttttcaagrcccattagcaagggaggaaaaagatgttaaactttgttttgtaaatgctaatatatatatgagtcaatactttctgacatttatttgttagaaaattacacacatttaaaaattcaaattaaaactatgcttctatttaggctattgtaaga

SEQ ID NO: 132752 - DNA, 629 bp, Homo sapiens
gaatcatttaattatttgatttagcaatactaggtttgcagcaactgggcttatgatcatttttgccccttacgatgtatccagcttgtatttatttaacagtattatttagtgttgtgtgatagagtgtgctcagttttcagctttgagtttttacaaaacattatttgaggatactagtgttagtgaaaatgtaagtcaatcaaaaagatctgctaatatgaatcaaagaaaaccggaatttttttttgaaaattgacatcacatatttcaatgttttaccattattcataggctgtttttatttaagtgactgcattgtacttattgcagmaaaatacatgctttgcaaagataagtttagcagaagagaattaatttcttcccacatcttttaatgtggcatggcagtttcactctaagatcaaaacacataactgaaggttatgtttaacttctaaatcaaagtgttgtgggaagatgattgaaatctgatgatgactcagatacgcttgatatgtggttttcttcctacagaaaccttatgtagaatgccatttccatgttagaaagaacctaatagtgaggagattaaatagtttcactatagatgcagagtttgtgttatt

SEQ ID NO: 132753 - DNA, 619 bp, Homo sapiens
aaagcagggtcatattacttctgtaatgaggaaagtataattctaatagcatcatttactacagcctttcatttttcttcttcaagacagactgtgctactatgtgcctatgatttaaatctttaaaatagaaaaacttcaactgcagaggaatgttaatccaaggatctgtctgcatgcaatgccaggtgggtgctgtatataataataataatgatgtactaataataactataaatataattgctacttttatttaatacctactgtatgccaggtattttacggaggccacaatttacagatgtgctctgcawaaaggtgtctggctgcaaggcacgtgaggactgaaatccacatgcaaattctttgtctttgtggcgtctgtagcatcccaaagcaaggggtgtctttttgtgatctgttatgatatgcgcaagtgcatgccttgctaatttacataccatttctggtcactaggacatcaatgcattatcccaataaggaaagccacgtttccctgattcaaaatgtatatgctttctctcatgcaacattgcctttctacagaacgagaatccacagatagaattatttttttaattctaagggaacatca

SEQ ID NO: 132754 - DNA, 615 bp, Homo sapiens
ctctttatataaaaaacttaagtgagagagaacctttatgcaattactaatttatctcaaaaattgaaggacttgcacaactggcgaatatactaaaaaccattgaattggtacgttttaaattggtgaattgtatggtatatgaattatgtctcaacaaagcgtgttcctaaaaaaactaaaggccaagtgttattattatacacattatcagatctacttagaagatttcttgagttctcaatggactctgcattaggctgtgcttctctgatggtaagtacaatcagttggagagtcaggaaggtgccaaactgttgtcctgttgtttgatattgtatttctttaggctagcaaacttatggcatcttactaaaattatggcatcttattttatgcaaggwaacagcagcaccttgcttaaatctgtttggtatactaggtaggttcagatacctgttcccagtgccagattttacttctgtggttgtcaaagcatgaatgcctacttgttggatgtaatcttgaatcacaaagtgtacttggtttagataagagagatactttgaaggagaactggaaaaaaagtttctactggacatatgaaacacgatt

SEQ ID NO: 132755 - DNA, 545 bp, Homo sapiens
agcccaaccacagttcactttccttgtattgaggtgcccatgaccagttctccggccaaggcagcttgggctaaattgatttggaagaatttcagccccacattgcctcttccccagaagtgacgatataacaggagaatgtggggctcacagggagactaagtccatccaggaacaaagacaagcttgagatgaggcccaggaattccactggtgagagggcacaaccagcctgcctttgagggctgctgatgtcccagggatgcagagtctccctgggcgttccctgtctaagcagctgtgaaacaggactcttcctgccagtactgcctggggtcccaaactgagagcaatagatgctcaaagcccatgctccaaagtgagctgtggatgtctagcaaatagccttctyttacctgtagcgtggaggtggtgatgggcattgctggagaactggtcggagtgagggttcaggagcatgaagaggctggtaggagggtcttcttcagagagggccggaccatgtcaggagctgtctcctgggg

SEQ ID NO: 132756 - DNA, 592 bp, Homo sapiens
gtaaaatgtgacacagagacataaagtgagcacattctgttgggaaaatggtgctgatagactcactcaatgcagggttgccacaaaccttcaatttgtaaaaactgcaatgtctgcaaaatgcaaaaaggtgaagcacaataaaacaaagtaagcctgtagttagaagcatttctgtttccttgattacaccctgaataataagtagataaaaattaattacaaattatataagcttctattaagttagatgaatattcataatgatataacaatgatgttgccaatgaaatgggttatagcaattacatatggatgaatagatcacatgaacttttgaagtttcatctattcaggggaattgggatgtattagaatgacatgtaggaaacaaacagtaattgctaatacaaatgaatactcattktagtattttagcatgaagattatttatgtttgtgtatttataaatcttttctcctgtctcccattccatatgtctttctgtatatctatcagtcattataatttattgttcctggaagtgtcctatttcagttactttggattcaaacattaataactatatttt

SEQ ID NO: 132757 - DNA, 622 bp, Homo sapiens
ggcagcagaacacataagtaaagtgaagactaatgttaataaccaagacagtggggaaaatgcctcggagacctttgcagtagcccctcccatcacaggcctggaggcctaggagggaaacatgatttcatgggccagacccaggagggtcctgctgctctttgcagcctcgggatatagtgcgctgggtcccagccactccaacttcagccgtgaccaaaaggaggcaatgtacagctctggctgttgctttagagggtkcaaaccccaagccttgtcagcttccacgtggtgttgggcctgcaggagcacagggatggaaagttgaggtatgggaacttccacctagatttcagaggatatatgaaaatgcctggatgtccaggcagaagtctgctgctagggcagagtcctcatggagaacctctacaagggcaatgtagaggggaaatttggggttggagtccccacgtggaatccccactgcctagtggagctgtgagaagagggcaattatcttgcagacactagagtgctagatccaccagtagcttgcactgttcacctggaaaagatgcaggcactcaatgccagcctgagaaatcagctgcagggggtgtac

SEQ ID NO: 132758 - DNA, 539 bp, Homo sapiens
tggtttaaatgtgtgtggcaatttcccctttactttctctctctcctgccaccatggtaagttttgcctggttgcctttcaccttccactatgattgtaagtttcctgggacccccccagtcatgtttyctgttaggcctacataactgtgaataaattgagcctctttatcaaatatatagtttgcaaatatatatgtatatatgcctagactcttgtaaatacaatactcttgtaaacacaaccaatatatttctggtatggttcttgtttacaggtaccaagacagacctgatcataaaaccaataacaaagaatgtcagaagtcttttacatggaagaagaaaaaaatgcgagcaagaaggcctaagaaaggagaggtttcaatagacggtacactcggttgttcccttagaccacctttgttagtcttcgcctcaaagaaaaacatttccactgaaaaccacataatctggtttaacagattaaatatataaactatgatgtgctgggagaacttcagctttttttcctagcac

SEQ ID NO: 132759 - DNA, 540 bp, Homo sapiens
catcttaacttaagaagttatcgctatttacacagctctctaaaaataattaatttaaaaatcaatctgttggaaaataaagtactaaaattatgaatatgattgaaaaaagacaaaactcatgttcagaagaaaataataaaattaatcataatttccttttgtttttaccttaaaattcatctacatcaacggttatttgagtgtcagagaaatgtatgtttttataccattatttgtcctgtgtattctaatgcacattaaagaaaatgaaaacaaaactaatattttgaaacataaaggatggagactttcatatatactatatagttaagtscttaacagggcttgttattcaaatggaattttaaaaacttgaatgtgtgcaagtgtacattaaatcccacaaattatttgctattagaatggctaggattcttagatgatagtagttttgacttatttgactttgtcaataatgtaataactatatcaatttataaattctcaatgacttttaaaaatgtgtttatttttaaa

SEQ ID NO: 132760 - DNA, 289 bp, Homo sapiens
tctaacaatattttatttctatatctggatgctccagtgttgggtgcatatatatttaaaatagtyatattctctttctgaattgacccatttttcattatagagtgaccttctttgtctcttctcatagtttcatcctgaaatcaattctgtgtaagcatactgatgcctgtttgtttttggtttccattggcatgtaatacctttttccataccttaatttttattctatgtgtctttacaggtgatgtgtttcttgtaggcaacatatcaatagttctcatttttt

SEQ ID NO: 132761 - DNA, 533 bp, Homo sapiens
agtgcatgcagatggaaagaatgggctgataatcagactttgagccctgctaacatgctaattgtatatgatgtgtgtgtgtgtgtgtgtgtgtgtgtgtgtgtgtgtgtgtgtgtgtgagagagagagagagagagagagacattcgtggtaagcagsttttccttcttagttcctttttgttatgacctttgtgagcttggtgatcttggtcaagtcccttaatctttctgtattgaagcatccttagctttaaattagaggggaaaaaatggtgtcttattaggtggctgtgtgctttcagtgagccaatgtatgagaaagtgactagcagagtgtctgacacattttattactctgagttccagcaggtcaccaagcgggtgaagatctttgcctgttttctgctcctactgatcactgcttttggaacctttatactactttacagggccctcctcacttagaaggaaatcagataccatctgcttgacaacctcatagatctatttccataaaagagattattgcta

SEQ ID NO: 132762 - DNA, 583 bp, Homo sapiens
atatcctcctggagcctttaagagacactacagcatagcagttattggcatggattctgagtcagactgattcttgaatctcagctgaaatcgcagctctaccacctactaagatgtgaccttgacctctgcatgcctctgtttccttmcccataaagtaaggataatagtatttacttcctatgctgttaagagaattatacgagttaataaacatgaagcagttgggatagtccctggcacatagtaaacactcaataaatgtaaactgaggttgttatgatgattaccataaagtctgccatctaggtcaacccaatgaatgcttgaaatatgtaatatttagaaaaggatgaaattagttccagacatacaggatgtgaatttatatatgcagcagaactatggttacacacacacacacacacacacacacagagtacatataggtagatgtacaagtttgtagatttgtaggtaaggggcatggaagaaggaattcgaagaggttcatatagcgttggatcaggatgagcatgatagtgatgagtaggagcctgagaaaagcccagaaatgtttaat

SEQ ID NO: 132763 - DNA, 543 bp, Homo sapiens
tctgattggatcgggcatcagagccctgtatgtgtggaggacacaggagttggaaacctaggctctagttagaaggtgttaggctattaggtttgctagattctttaatttctttcagatggagaagatagaacccacacaatctcttttyttctccaaatatcatgaaccctactcatttcacaaaagaaaatttatttccaacatccagtaaggtaattaactatctggggtagattgagatagtatttgaagcacttgtcttagtgcctctgtaagtctagattcctaatgacattcatctaagagctaactaacctcctactgaggtctgattaaagttaacttacatacacctatgaatcatactgcttattctgaagaattttaaagcatgggactacttagtcgttgaacaattgtcacttatccttatttctgctccgttctcacttgcagctatatccactctcagctgccttctgtccccattgccccaaagaattgttctttctaaggtcattaataatctccgaaagaatt

SEQ ID NO: 132764 - DNA, 556 bp, Homo sapiens
attctgtgggacttctgattggatcgggcatcagagccctgtatgtgtggaggacacaggagttggaaacctaggctctagttagaaggtgttaggctattaggtttgctagattctttaatttctttcagatggagaagatagaacccacacaatctcttttcttctccaaatatcatgaaccctactcatttcacaaaagaaaatttatttccaacatccagtaaggtaattaactatctggggtagattgagatagtatttgaagcacttgtcttagtgcctctgtaagtctagattcctaatgacattcatctaagagctaactaacctcctactgaggtctgattaaagttaacttacatacacctatgaatcatactgcttattctgaagaattttaaagcatgggactacttagtcgttgaacaattgtcacttatccttatttctgctccgttctcacttgcagctatatccactctcagctgccttctstccccattgccccaaagaattgttctttctaaggtcattaataatctccgaaagaatt

SEQ ID NO: 132765 - DNA, 542 bp, Homo sapiens
tgtgtgtggagatatcagtcctgaaagcagaaattggcaatgctcggaggacgaaaatggctgcagatgttgagggcgggggagttcaaaagcagctctgttttgtggaatcccacacttgagacctttttttgcgggggggtgattgggaaactaatagccctccacatttgagttaaaacattatgctgctttcagaggaaatataaaagagcccttgccttccctgcttaggctgaggcggccctcccctttgcggctcatcaaccttgtgcttcagccttgggcctggattcacacctcctccttgtgactggcactggttgaaagggaggatcatggccaagatgtgatctggctgaacagaagggtgtggtkccagcatggagccccactctcatgtctaacccccatcacttcatcagaccatttctttggcttccaatacttccattattattttttttgaacttggcatttttagactcaatagtatacatattgcttaataagtacaattcctcaaatattaaaacatcaat

SEQ ID NO: 132766 - DNA, 399 bp, Homo sapiens
ctgccctcaccaatgcttacttcctctccagctgttaaggaaccaacacgtttttcaaaaactggtatatgaatattcacaatttggggactagtaatagcccactgaattactttacatgtccttactgtactttatgctacatcttatttagggataaaacatctaatagagtaaatatgaaatggtggcatttcagccactaaaataggaaaaaaatattgtttgggttggaagcccttcctgtgtgttccccagtgaccttgaggttggaggacatgtgatatctgttctgttaacactggtaaaataaaattttttaaatgtgctgatgagagaaastgcaaatacataaaccaaataaaaatttaaaatacaagggaaataactttaaaaaag

SEQ ID NO: 132767 - DNA, 623 bp, Homo sapiens
atgtggaactttgcataagaaatttttccaagtatattctacacattttttagaatggcgtgatactttcctatagtcctaattcagtttttttaatattgctgtttaaatgtgaaatcttacacaacgataatttgtatcttttcaggcactaaactttcttctgttattaaatgtaacatttagctgaaacatacgtaactccaatatcagtaaagaatcaaagattttcaaataagaytaaaggaaaacattcaaacataatgttattgtatgctgaaaatatttatatgtgtcagaaagtaagttcctttctcccttaatcaaacactcaagaatcggactataatttatccacttcactactattttgttcaattattacaaattttaattttttaaaagttttccaaacaacattagtaatgttatttctgatttatgagtcactaagacaaatggctaacacataaagagtatttgcattattaaaattaagttttcagagatcaattaatagtgctataaatgagtcatttaaaattaactcccagtccctgtcttttcctccgctttccagaggaactatttctgaactgtcccagtgaaaagtatttttgcct

SEQ ID NO: 132768 - DNA, 484 bp, Homo sapiens
gtggcaactgcaataattctttggaagcaggctcagtctcttaccttatcaggacagtgcccagtgggacacaattaatcactgtcttattgtagtaaaaacactgctagcttgggagatttaaccaggttcccacaggaatctgcttctccaagaggactttgtaaacctttggtaaggagaaaataaactaatcmatagttgctctaacaaaaaatctaccattttttgtaataaaaatattttttatcatattgttttaataatattttaactaaaacatctatactggtagcatacagtatattagtattgagcttcattcccactcacttaaatccaaatctgtagtattctgatcttggctagacaaagagaaagcatcctcagtttaggaagaaaataatattaagctagttgtcaagaaaatcatttatatactagatccccccaacaggtctataatttatttcatgaaaatagt

SEQ ID NO: 132769 - DNA, 559 bp, Homo sapiens
taagtattaggtcagcttttacttgacctaatactaaataacagaatttattatatagaacaaatttaagaaaatatccacaataacattaatttagtcatttaatgtatcagtttggatattccagattatgttatagtaattaattctcatcaggagggttctcagtgtaacctaaactgtttttgtagtttcagatagatttccataagcttaaacttttgggctttttacacacagcaccaatggcctgcatggcctggtgcgatgctcacactatgtcttcttctcttatccacacaaacatacttggtattctgtttattggtctcccttttctacaacaggttctgagctgctatacagggattctgaaacaaaactgtttctgatcccaaatactccgaaaggtttttgttactgttgtttttttgtttggttgtctatttaccagtaarttaaaggaattaaacaatcttctaagtattttgaaactatcaaaaatgtgaaagaggacttgtacagatttgtttttcatatttacaatacatgaattctt

SEQ ID NO: 132770 - DNA, 544 bp, Homo sapiens
tgtattgcaggcgtaaatgtgaactgtaaaataaaaacttgtagaactgtatttatttatttagagacagagtttcgctcttgtcacccagactggagtgcagtggcatgatctcggctcactgcaacctccgcctcccgagttcaagctattctcctgcctcggcctcccaagtagctgggactagaggctcgcgccactacgcctggctaatttttgtatttttagtagagacggggttttaccatgttggccaggatggtctcactctcctgaccttgtgatgtgcccaccttggcctcccaaagtgctgggattacaggcgtgagccaccatgcctggccagcctgtagaatattttgtacctttgaggaagcaaagatttgttaaactaaacaagttgtaaagaaaaatctgagaaaaacaggagcacctgttcaccaaaagactccagacatagkataaaaagcaagccacagacaatctgacaaaaagatcatatcaaggttatataaagagtttctgaaatagaaaaaacagagaa

SEQ ID NO: 132771 - DNA, 621 bp, Homo sapiens
ctgtatgggggagtgtggaagtgaaaaaaaaaaatggaaaatgaaacccaaatgttttagggcttagagacagggaaatatcatgtctagctcaaccagatcagaataagtctccctgattgagaagcatttagtttaaaaatagagagaaagaaattagagaaagtaggttaagagaacgttcccataggataagggagggtggtgctgatgtgaacttggttagaggtagtgggatggagatggaggtaggaggtccaaagatgccagtaatatagagtgaaatactagacaaccractggcatgtggagggtcagagagaggtaaaagataaagattctacgcaggcctgtggtcagagtggctggaacaattgataatgcttttaaaataaagagcaaaatccctttttttgagacaaaaagtattggacttgttatctttcaggcactagtcagatatgcttatagggctatatggtaagcaaccacatgtaagggacgaaatggtcaaagccaataacagcaatgcccagcttttatgaaatacattatattcttccaagtcttaacttgatttgatgttcacactaaccctattagtcaatcaagaaacttata

SEQ ID NO: 132772 - DNA, 686 bp, Homo sapiens
gtttgtcctctccaaatctcatgtttaaatgtgatctccagtatcgagggtgggcctggtggatgaacaacttggtgctttcctcatggtaatgagtgagttctctctcatggttcactcaagagctgcttatttaaaggagcctggtgcctcttcctctctttcttgctccctctcttgacttgtgactcactagctcccccttcaccttctgccatgagtggaagattcctgaggtctcaccagaagccaagcagacactagtgccatgcttatacagcctacagtaccatgagacaagtaaaatttttgtctttataaattattcagtcttacgaatttctttatagtaatgtgaaatggactaacacaattagtgatattgagcatgtttttatatattttttgaccatttatatgttttattttgaaaaatatctgttcatgtactttgcccactttttaatgggcttatttrtgtcctttgtgttgagttatttgagtttcttataaattctgaataccagtcccctggcagatgcataatttgcaaatattttctcctattctgcaggttgtctgtagttttattgatagtgaatacatgacagaaatgccttagtttgggtaacttggccagtcatctttctttcccatgggtggagaaggaaagtatttgaagcact

SEQ ID NO: 132773 - DNA, 527 bp, Homo sapiens
caaactgccaaactcatgtaaaaatcatttatcaggttttatgagatttatgaagtatctcmtaaatcatttgggctgtagatagttctttatgtgcatctcacattgtgtgtgtatgagagagagtttgagtgattatctgtcaatggagagaagtaagctaatgacagatgagcaagtaaccacttagatgacctctccacaatcatttccacctcctgctttttatgcccttgagtgtgggccagactgaatggctagctactaatgaattaaatacagcacacctggtggaaattgccatggttaggttacaaaaagactgcagcttctgtctcgggcattctcttgttctctccaggagtgctctctctgtccctttggatggttcactgtggaggaagccaattgccatttcctgaagcctccctgtggacaggtcaatgtgaggaagtttggaagaagacctactctcaatgtaactttgagatgactatgggtctggccaaccacttgactgcaacctc

SEQ ID NO: 132774 - DNA, 310 bp, Homo sapiens
atgtgtaaccctttctgagactatatttattttgacagggatcccagagaaataatacatgayagttgttctcagaggcagatgttttgctgttaataatgagaactaatgaacaatgcttactctgagccaggtgccatggcacatgcattatctgtattacctcatgcaaacctcacaacatcctatgagcagaccttatcatagtctttattttggagatgaagtatctgagatttagagaggtgaagtaacttggcagaggacaatcaactcctagaagaggcagagccagaattcacccccaggc

SEQ ID NO: 132775 - DNA, 310 bp, Homo sapiens
atgtgtaaccctttctgagactatatttattttgacagggatcccagagaaataatacatgatagttgttctcagaggcagatgttttgctgttaataatgagaactaatgaacaatgcttactctgagccaggtgccatggcacatgcattatctgtattacctcatgcaaacctcacaacatcctatgagcagaccttatcatagtctttattttggagatgaagwatctgagatttagagaggtgaagtaacttggcagaggacaatcaactcctagaagaggcagagccagaattcacccccaggc

SEQ ID NO: 132776 - DNA, 509 bp, Homo sapiens
ggcgttagcgaagctcccgtccacgtacagctcacagtctactgatgttcaaggatggtctcggaggttgagcctgctagaataaactgagtccaacacctctacacagttatgttcaactgggctctctgataccgggagcaaggtggtggggtttagggtgttgcaaacttcagtggttatgcggggattttcatatagcaagcttkggtacttggttaatctggcatttgttaaccaatgatgtcctttgatagtcattaaagttaccacagtatggggggcctttatattcaggttttgcccaagggttagtttatctgcttcttgtgctaacaggaccattgctgccagggcccttagacatggggccaggctttggaaaccccatctagttgttttgagagataggccactggccttggccagggccccacagtttgggttaaaactccagctgccatttttttctctttctgacacatagggtgtaaagggttttgacagtt

SEQ ID NO: 132777 - DNA, 560 bp, Homo sapiens
tgtgataacagaattacaagtggggacctaaagtggtttctaagagttaatggcaagaggaggaaaaggaaggtcagaaacattctaggatggaagatgtctcaatggcagttagcaacctaacacagcgtagggagctctcatctcccctgaaataccttgtcgtaaatcatgcagcctatccctgcctgatagtctaatgcaccatttccagacrtgccagacagatggcctagttgacctatttcaacataactggaacagaatgatttccatgttggctctaggatacattataaggaagaaaggtgagtttctttctgtttcaatcacagcaagaccatcagggcttgaaaagttgggccatcaggttgccgccagcaagcacattctttgaccttctgtggtgggtccacagagtggaaccaggtgttctttcagcccatgccagaatgtattggccgcccaactggctgcctgcctccaccccaccaacggggctttggctggccctctaccaaacagctgtttggggagacacaggtggccacccacgcttg

SEQ ID NO: 132778 - DNA, 560 bp, Homo sapiens
tgtgataacagaattacaagtggggacctaaagtggtttctaagagttaatggcaagaggaggaaaaggaaggtcagaaacattctaggatggaagatgtctcaatggcagttagcaacctaacacagcgtagggagctctcatctcccctgaaataccttgtcgtaaatcatgcagcctatccctgcctgatagtctaatgcaccatttccagacgtgccagacagatggcctagttgacctatttcaacataactggaacagaatgatttccatgttggctctaggatacattataaggaagaaaggtgagtttctttctgtttcaatcacagcaagaccatcagggcttgaaaagttgggccatcaggttgccgccagcaagcacattctttgaccttctgtggtgggtccacagagtggaaccaggtgttctttcagcccatgccagaatgtattggccrcccaactggctgcctgcctccaccccaccaacggggctttggctggccctctaccaaacagctgtttggggagacacaggtggccacccacgcttg

SEQ ID NO: 132779 - DNA, 459 bp, Homo sapiens
atggattaaagtgagaggcagttcatcaaggtaacaagtttggaggctagcacttctataccaacaggattggcatagatggagactagaagtgtaactgacaaatgttattgatcgaacggatattggaggagagaaaggaggcatcaaaaagtaactctagggttgggcgtggtggctcacacctctaaacctagcactttgggaggctgaggcaggaggatcatttgaggtcagaagtttgagaccagcctatccaacatggggaagccccatctctaataaaaatacaaaaattagctgggtgtggtggcacacgcctstaatcccagctactcaggaggctgaggcaggagaattgcttgaacccaggaggtggaggttgcagtgagctgagatggcaccactgcacttcagcctgggcaacagaacaagactgtctaaaaaaaaaaaaaaagt

SEQ ID NO: 132780 - DNA, 457 bp, Homo sapiens
atggattaaagtgagaggcagttcatcaaggtaacaagtttggaggctagcacttctataccaacaggattggcatagatggagactagaagtgtaactgacaaatgttattgatcgaacggatattggaggagagaaaggaggcatcaaaaagtaactctagggttgggcgtggtggctcacacctctaaacctagcactttgggaggctgaggcaggaggatcatttgaggtcagaagtttgagaccagcctatccaacatggggaagccccatctctaataaaaatacaaaaattagctgggtgtggtggcacacgcctctaatcccagctactcaggaggctgaggcaggagaattgcttgaacccaggaggtggaggttgcagtgagctgagatggcaccactrcacttcagcctgggcaacagaacaagactgtctaaaaaaaaaaaaaaa

SEQ ID NO: 132781 - DNA, 607 bp, Homo sapiens
accataccaatagacctctaggaagctgaagggtgttgttcctcagctatcttaggaggaaccaaaagttgagaagagataatctctaaaatatctatggatgtgtcttttatctagtgaagtaaatcttcataaaacccatggaagactcacaaacatttgagggaccttgaagtgggagaaaatatatttttttggagagagggacatgaattcatggaagccagaaggtgaactatggaagtgagcccaggcaatccatactcttgcataattccctyttcttaaatgtgactgagaaccatgacttgtctctaaccaacagatgatagcaaaggagatgggatgtcatttccacaattatgttgttatataagactctcttagcatattagggaacactccatttctggttttgaaggagtaagctgccgtgtttgatgaggacttatggaaaatggccacatagtaagaaattctggattctgggtagtttctgggtgctaagagccatctcctgtcaacagtccactaggtaacatgaacctctattctacaacaacaaaagatggactctgccaacactctgccccaacaatctgaggac

SEQ ID NO: 132782 - DNA, 378 bp, Homo sapiens
aaagcccactataaacaacaccaccaggctckccagcttccaactctagcaatcttacatcaatgctttgactcctcaagaccgcaagtcccttgactttcataagttttcattatccatcactatgttcatcttcacttgccatcatgactagtttaaattccatagttaactattaaaatcatccttttaaaaacatcctttactcctatgcatgtgtcttcttccacacacaaatccaaacttgtgtgggcctaattatcttcttacttttctaaggctagttctgaacagttgaatgttcctggataaaatacacatataaggtgattattgccatttcaatacaactattcatttagcaaatatttactgaga

SEQ ID NO: 132783 - DNA, 574 bp, Homo sapiens
gaagctgaagggtgttgttcctcagctatcttaggaggaaccaaaagttgagaagagataatctctaaaatatctatggatgtgtcttttatctagtgaagtaaatcttcataaaacccatggaagactcacaaacatttgagggaccttgaagtgggagaaaatatatttttttggagagagggacatgaattcatggaagccagaaggtgaactatggaagtgagcccaggcaatccatactcttgcataattcccttttcttaaatgtgactgagaaccatgacttgtctctaaccaacagatgatagcaaaggagatgggatgtcatttccacaattatgttgttatataagactctcttagcatattagggaacactccatttctggttttgaaggagtaagctgccgtgtttgatgaggacttatgraaaatggccacatagtaagaaattctggattctgggtagtttctgggtgctaagagccatctcctgtcaacagtccactaggtaacatgaacctctattctacaacaacaaaagatggactctgccaacactctgccccaa

SEQ ID NO: 132784 - DNA, 558 bp, Homo sapiens
cttaggaggaaccaaaagttgagaagagataatctctaaaatatctatggatgtgtcttttatctagtgaagtaaatcttcataaaacccatggaagactcacaaacatttgagggaccttgaagtgggagaaaatatatttttttggagagagggacatgaattcatggaagccagaaggtgaactatggaagtgagcccaggcaatccatactcttgcataattcccttttcttaaatgtgactgagaaccatgacttgtctctaaccaacagatgatagcaaaggagatgggatgtcatttccacaattatgttgttatataagactctcttagcatattagggaacactccatttctggttttgaaggagtaagctgccgtgtttgatgaggacttatggaaaatggccacatagtaagaaattctggattctgggtagtttctgggtgctaagagccatctcctgycaacagtccactaggtaacatgaacctctattctacaacaacaaaagatggactctgccaacactctgccccaacaatctgaggaca

SEQ ID NO: 132785 - DNA, 378 bp, Homo sapiens
aaagcccactataaacaacaccaccaggctctccagcttccaactctagcaatcttacatcaatgctttgactcctcaagaccgcaagtcccttgactttcataagttttcattatycatcactatgttcatcttcacttgccatcatgactagtttaaattccatagttaactattaaaatcatccttttaaaaacatcctttactcctatgcatgtgtcttcttccacacacaaatccaaacttgtgtgggcctaattatcttcttacttttctaaggctagttctgaacagttgaatgttcctggataaaatacacatataaggtgattattgccatttcaatacaactattcatttagcaaatatttactgaga

SEQ ID NO: 132786 - DNA, 378 bp, Homo sapiens
aaagcccactataaacaacaccaccaggctctccagcttccaactctagcaatcttacatcaatgctttgactcctcaagaccgcaagtcccttgactttcataagttttcattatccatcactatgttcatcttcacttgccatcatgactagtttaaattccatarttaactattaaaatcatccttttaaaaacatcctttactcctatgcatgtgtcttcttccacacacaaatccaaacttgtgtgggcctaattatcttcttacttttctaaggctagttctgaacagttgaatgttcctggataaaatacacatataaggtgattattgccatttcaatacaactattcatttagcaaatatttactgaga

SEQ ID NO: 132787 - DNA, 619 bp, Homo sapiens
gcacacacaaaaatcttacagaatgcatctacatgaaacagtactctggattttaaacaaacagagtagaggccaacaaatttgaacataggttttggaaacataaaggtctgcatttgacttccagctacaaattatcaactacatgatcttgggctgaatgctcacctcttagagcctagatttccacaactgtaaataggatatggatattcctaaataacaaggttgtgctgagaattaaatgtttgtaaaaccaagtacatggcaagacctacgtgytaggtattattgttcttaaagtagaagaattctaagagtaatttttgttctaacttccttcccctggcccttcactcatttatcaacaaggaaaaatgtctccagttacttgctatagagctgtaaacataaaagctccagaacattctccagcacacacaacacagagctgtccataacctgtcctagcagcagaatgctttcctgtattttctgtttcacttaatacgaagtccttggaaagaattggcacatttttcccagtctaaaaactgaaagttaagtttaccttctaaaattgtagctaaagcaaagccaaacttaaatttattttttt

SEQ ID NO: 132788 - DNA, 619 bp, Homo sapiens
gcacacacaaaaatcttacagaatgcatctacatgaaacagtactctggattttaaacaaacagagtagaggccaacaaatttgaacataggttttggaaacataaaggtctgcatttgacttccagctacaaattatcaactacatgatcttgggctgaatgctcacctcttagagcctagatttccacaactgtaaataggatatggatattcctaaataacaaggttgtgctgagaattaaatgtttgtaaaaccaagtacatggcaagacctacgtgttaggtattattgttcttaaagtagaagaattctaagagtaatttttgttctaacttccttcccctggcccttcactcatttatcaacaaggaaaaatgtctccagttacttgctatagagctgtaaasataaaagctccagaacattctccagcacacacaacacagagctgtccataacctgtcctagcagcagaatgctttcctgtattttctgtttcacttaatacgaagtccttggaaagaattggcacatttttcccagtctaaaaactgaaagttaagtttaccttctaaaattgtagctaaagcaaagccaaacttaaatttattttttt

SEQ ID NO: 132789 - DNA, 619 bp, Homo sapiens
gcacacacaaaaatcttacagaatgcatctacatgaaacagtactctggattttaaacaaacagagtagaggccaacaaatttgaacataggttttggaaacataaaggtctgcatttgacttccagctacaaattatcaactacatgatcttgggctgaatgctcacctcttagagcctagatttccacaactgtaaataggatatggatattcctaaataacaaggttgtgctgagaattaaatgtttgtaaaaccaagtacatggcaagacctacgtgttaggtattattgttcttaaagtagaagaattctaagagtaatttttgttctaacttccttcccctggcccttcactcatttatcaacaaggaaaaatgtctccagttacttgctatagagctgtaaacataaaagctccagaacattctccagcacacacaacacagagctgtccataacctgtcctagcagcagaatgctttcctgtattttctgtttcacttaatacgawgtccttggaaagaattggcacatttttcccagtctaaaaactgaaagttaagtttaccttctaaaattgtagctaaagcaaagccaaacttaaatttattttttt

SEQ ID NO: 132790 - DNA, 378 bp, Homo sapiens
aaagcccactataaacaacaccaccaggctctccagcttccaactctagcaatcttacatcaatgctttgactcctcaagaccgcaagtcccttgactttcataagttttcattatccatcactatgttcatcttcacttgccatcatgactagtttaaattccatagttaactattaaaatcatccttttaaaaacatcctttactcctatgcatgtgtcttcttccacacacaaatccaaacttgtgtgggcctaattatcttcttacttttctaaggctagttctgaacagttgaatgttcctggataaaayacacatataaggtgattattgccatttcaatacaactattcatttagcaaatatttactgaga

SEQ ID NO: 132791 - DNA, 505 bp, Homo sapiens
  misc_feature (1)...(505): n = A,T,C or G
nnnnnnnnnnnngatcaccttgttattgaacttcattttttttaacatccaatttttactgcatagcaagctaccccacatttagtggattaaaacgataatatgttgttatttttcatgtttctatgagttaagtggactcaggtggatggttcttgccaggaatctcaggcagttgcagtaacatgttggtttggactgctaggatctgaaggctcaaatgsataggacatcaaagatggctcatttgcatggctggcaggtcatgttagctgttagctgggagtccagctggggccgtagacctaaatgccatctccatgtggcttgatattttcaccacatgacatctagatttggaaaggaagcattgctactgtgaacaatttaagaggtacaggcagaagctacatggctttttttaaaatgtttttgccttggaagtccagaatatcacttatgccatattctattcatgaagcaggtcaaaaaggccagcagagaa

SEQ ID NO: 132792 - DNA, 611 bp, Homo sapiens
atattatcaacaaatacaaagttctattgagcgtctccaatatacaacactctgtgctgaagaatttaagacaacgacgcaaagctagatgcagaagacacaactaataatagatacgatcacaaatgagctcatgcaaagggtctactgattggcatagtgataccctcaggcaaggatgtrgtagctgaaatcaagacacaggagtggttctctacgagatgatgttaaataaattaagaaagtaagctcaaacttctctctttgagagacagcaaaaaaaacaagaggaaacaaaataaaagtggttggaaatgttccctgagttccatgagccataaagctgtccaggtacacaccctctgaggttagtcactgtgagagtggacagcaatcactgtggtcacactggaagactccctccaggaaagttaaaaggagaaataaagacctaaacagtgccatacatcaaacccatgaatctgagaacagggtggtaaaagatgcatttatagtacaaattaatccaaatgaccaagaagggcaaatgttttccacatgtacactgtgtgtcataacgtactctgtgactgtgcataaaataatagcac

SEQ ID NO: 132793 - DNA, 575 bp, Homo sapiens
gtgctctgtctgctttctgctcatagaaatgcggaatctgtgtccttaaaaacagatacatctaaacttattttaaagacatatatcatttaaatgcattgtttcctttctaatttggggattctccaccaaacgaaattgcgtataagaaaatctataaatcaccttcatataagatatataatttagaatagaccttcgaaaaagtgtgaaactgacttatacactatcatttgagcatggatacattttctattattacataaacattttctcaaccatattgtcctttctgaaacattcctttaaaaggaatttcatgatgagaatgccatataattaatttaatgcctatagttttctcacgtacatgtaattacatacatatttcaaataaatacttggttgtttattttccttccacttaagcatatttaaaacaaagytgaatattcacctaatttcccctaaacaaaatgagcattggtatacaagggtaaaatgatgaaagtcatatttttaacaatatttccttatatgtgtcatcgaggaaattatctaatcttttttagtct

SEQ ID NO: 132794 - DNA, 602 bp, Homo sapiens
taagcaaataatgcaaaatagaaaaatctataagtaggctatggtcagacttctgtaaaccaatgttgttgcaataaatagaacagagtagtgtgtaaaaatgtaagattaggaattttcttgaaatctttgggcagaattttcttagtttcttttaagatcaaaatttcctaaatgttcttaatttcccttcagtgtggatgtgttcttccatccacccctcccaatgatagaagagcagggacctcagctctgacctaccctattgggctgcttccttcctccatgtgagtgtactgactctaaaacgtcagtttcctccaggagtaacatggagagcctgactgtgttgtgtccttgtcacttgtgtcttcttccctctgtttgtgaaaacaatcttgaaatagattcccgyaacgattcttgctaagttttaaagttgaaataaatctttatgttttagcttaataaatctttacttattttcaaagcactttcctataaattatctcatttgatcatcaataacgttctgaatagtataactcagttgggatgctatcaggaagaagtggttgtattgaacggtctgcatataagat

SEQ ID NO: 132795 - DNA, 470 bp, Homo sapiens
aagcatgtgcactaagaggcaaaatggcatacaacaagtatatggccttcctctaggattgctcaactggtaaggcgaaaacacctcaagtgaacatgtgtacaacttcagtaaggtgatcgctccctagtgctggcaggtcacagcacatgcagacagcccaccacaagggataaagcaagggaggagacacagaaatcctggcaccatgccaatgtgtaaaacccccaagtcaagggccaaacagtgcacttggatctctcaggtacacttggccctcttgcaagtgtactttacttcctttcattcctgctctataactttttgataaactttcactcctgctctaaaagttgcctcagtctctctgccttatgcccctcagcagaattmtttcctccaagaaggcaaaaatagagtttctgcagacccgacggatttgccattgctaacactagtaaactaataca

SEQ ID NO: 132796 - DNA, 565 bp, Homo sapiens
atcatttaacttctttagccacattgtggtcacttgtaagatgaggatttataatttttgtcttactttacctattgtttgaaaataaagtgaacaattatgcagaaaagtagaaaataaccttttagaggttggcagagaaatgcctatacctgtgtgtatgtaatttgcaagctcttttgaaaatttttggaagacraagtggttttattgtttctttatttttgaaactgcctcgctctgtcagccaggctggagtgcagtggcaccatcttggctcattgtaacctccacctgctgggttcaagcaatcctcccgcctcagccttccaagtagctgggactacaggcatgcaccatcatgtccgactaatttttgttgttgttgttgttattttttgtagagtcaggggttctggcatgttgcctaggctcgtattgaactcctgagctcaattgatctgcccaccttggcctcccgaagtgctgggattacaggtgtgaaccaccacactcggccaagacaaagtgttagtaatttttttcttcaatattttacaggtga

SEQ ID NO: 132797 - DNA, 565 bp, Homo sapiens
atcatttaacttctttagccacattgtggtcacttgtaagatgaggatttataatttttgtcttactttacctattgtttgaaaataaagtgaacaattatgcagaaaagtagaaaataaccttttagaggttggcagagaaatgcctatacctgtgtgtatgtaatttgcaagctcttttgaaaatttttggaagacgaagtggttttattgtttctttatttttgaaactgcctcgctctgtcagccaggctggagtgcagtggcaccatcttggctcattgtaacctccacctgctgggttcaagcaatcctcccgcctcagccttccaagtagctgggactacaggcatgcaccatcatgtccgactaatttttgttgttgttgttgttrttttttgtagagtcaggggttctggcatgttgcctaggctcgtattgaactcctgagctcaattgatctgcccaccttggcctcccgaagtgctgggattacaggtgtgaaccaccacactcggccaagacaaagtgttagtaatttttttcttcaatattttacaggtga

SEQ ID NO: 132798 - DNA, 565 bp, Homo sapiens
atcatttaacttctttagccacattgtggtcacttgtaagatgaggatttataatttttgtcttactttacctattgtttgaaaataaagtgaacaattatgcagaaaagtagaaaataaccttttagaggttggcagagaaatgcctatacctgtgtgtatgtaatttgcaagctcttttgaaaatttttggaagacgaagtggttttattgtttctttatttttgaaactgcctcgctctgtcagccaggctggagtgcagtggcaccatcttggctcattgtaacctccacctgctgggttcaagcaatcctcccgcctcagccttccaagtagctgggactacaggcatgcaccatcatgtccgactaatttttgttgttgttgttgttattttttgtagagtcaggggttctggcatgttgcctaggctcgtattgaactcctgagctcaattgatctgcccaccttggcctcccgaagtgctgggattacaggygtgaaccaccacactcggccaagacaaagtgttagtaatttttttcttcaatattttacaggtga

SEQ ID NO: 132799 - DNA, 522 bp, Homo sapiens
tgtcttttactcttgattttgaagcatattttcactgtatgtgcaaagttgagtttagaattttctttgtcttccaactctttaaaaatgctctatcatcttcaggcctccaccgttgacatgagaagttagtgtatgtactgttgttcatctgtatgtagcattgtttccaggttctcttaaaggttttctttttatctttagttttaagcagttttgaccatgatgtgcttaagacattattatttgtgtgtgtgtgtgtgtgtgtgtgtgtgtgtgtgtgtgtatttatctttttgggggtttgctgaacattttggatctggtaagtggtgtttttcatcaaacttaataawattttaactattatttcttcagatattttcttctgctgcattctcacactccttctgtggctcctgttagatacatgttagactgtctgatactgtcccccagatccctgatgctgtgtttatttttcttcaatcctttgtctcattgttcttcaaattggtaatt

SEQ ID NO: 132800 - DNA, 624 bp, Homo sapiens
taaagctctttctgacttcatttgtttatatatgccatctttttttttttgtttttaaagaaacaagatctcactctgtcacccaggctggaatgcagtggcatgatcatagctcactgcaattttgaactcttaggctcaactgatcctcccgcctcatcctcccgagtagctaggmccacaggcatacatcaccatgcctggcttaatttttttgtagagacagagtctctctatgttgcccatgctggcttgaactcctggccttaagcaatcctcctgccttgccctcctaaagcactgggattacaggtgtaagccacgatgcccagcctgtatatgtcaacttagtcttaaggaatgttgtttgaattctgttttgaatcatgcatatactgtcttcaatttgggcaactgaggagaaacaaagtataggctttctgattacaggaaaatctctcacatagagactttttagttgtcatgggtggttgtagatacaatggaaaataatcttactaacttgatattagaaggtagaaaaatgtcattatcttggaaatctcactttatgaggtggccgaaaaaagtttttatttccctatattcatgctatattgcatg

SEQ ID NO: 132801 - DNA, 624 bp, Homo sapiens
taaagctctttctgacttcatttgtttatatatgccatctttttttttttgtttttaaagaaacaagatctcactctgtcacccaggctggaatgcagtggcatgatcatagctcactgcaattttgaactcttaggctcaactgatcctcccgcctcatcctcccgagtagctaggacmacaggcatacatcaccatgcctggcttaatttttttgtagagacagagtctctctatgttgcccatgctggcttgaactcctggccttaagcaatcctcctgccttgccctcctaaagcactgggattacaggtgtaagccacgatgcccagcctgtatatgtcaacttagtcttaaggaatgttgtttgaattctgttttgaatcatgcatatactgtcttcaatttgggcaactgaggagaaacaaagtataggctttctgattacaggaaaatctctcacatagagactttttagttgtcatgggtggttgtagatacaatggaaaataatcttactaacttgatattagaaggtagaaaaatgtcattatcttggaaatctcactttatgaggtggccgaaaaaagtttttatttccctatattcatgctatattgcatg

SEQ ID NO: 132802 - DNA, 499 bp, Homo sapiens
tacacccaaactcttatgcttggtgacacagaaatatcccacagaatgcaaactccccccattagccatggtagatctgcctgcattgatttatctagaccttttgggaagtaattatatgtcccgcctgcactaccttccacttccagagataattggttccattagtatattctttgttaggtgaaagaatatcctttttcatttgtcttaaatgtatctctttctacttcaagagaytatttccttgaagaaattgtttaattaagccagtatttatcaaatcaatatgtttcggagtatatagacatagaatgtatctttttgtcattcttcattttccaaaaagagaagtaactacccattcatagaacttcatgcccttcctttatcctctgagttacactcagccctgtttacgtgttcataatatttgagtctatttctgaaacacagtccacactttaagctccgtgagagggaagatacacgttttatg

SEQ ID NO: 132803 - DNA, 556 bp, Homo sapiens
tgtgtgtgtgtgtgtgtgtgtgtgtgcacgcatgcccgcatgcgtgcagaggaagaagtcacaagacttcatttgctttactcttagttgaaaatcaaatggaagtttttctcatgattagggacgctgtcacgagtctggtcagtttactgttgggaactgtgtctttatttcactgttattaawaactgagatcattggcctataaagaaattgaaatgttgtttttaaggtccttgcaattttcctaagtcattaatattacctgactggggctatttaacaataatcttcgtttacacatttaaataagcaagtatctacccaggactgctttttccactgatccttcccaattctgtgaatattcaacatcattgaacagattgagacatatctactgaatgccagttatgcaacaagcattttaaccaagaagggtatgagtagctatggaattccaaggtccaagcccccttatttttcaatgacttgccttccccaacccccataatgcacaccaccaccaccatcactttctggaaccatcaccaac

SEQ ID NO: 132804 - DNA, 577 bp, Homo sapiens
tgtgacagggttctccctcaggtacaagcaataagaatgtgcattggacatacagaattttagaacaataatawaacactctaaatatttttctattattgccatgtgctagcaaacatgagaatcaaaacaatgtcaatgataaaatactcctgccctcaaaaaatcttttcttagtgtaaattctaacaattactaacaattaattacatatataatgattatatatatataaatcttttattaaactttgtgtgtgtgtatatatacacaaggttttatatatacacatacacacacacacacaaagttcagtaaaagaagatttttactgtgtttgtttcaggctattattattcattccacatcacaattattaacgaaaatagcttggccatctataggaagggttgttgggaaacattctgctctggagtcgaatctagtaggtatactatcactccccttcatctcccccctccctcaccaaaatcaatgtttccatgtgtggttcacagcttccgcctctggctctaatttccactgcactgtactagtcccttgcatttgcatctgt

SEQ ID NO: 132805 - DNA, 610 bp, Homo sapiens
cctgtgggatacacaccagacacatggataagccataaggagacaatgctttgactgtgtgggtgagatagataatgctgtgctttcctttagagctgaggtctgctcttagacctgcatctcacacagcctatggaagtatgctaatgatcctgaaaagctcattgactcttttcaagcatggtgatgaggtcgtgggaagaagagcaaaggtagatgatttctctttctttacacttaccctttagtctttttgactcctccctcccttccagcattccctacttaggaaacatatttggtaataagagcaagtcatttattggttattagttggcttgtaacmcatttttttctttaatgaaaaagcagcaatacatgtaaaccgagtgatatggcttggctgtgttcccaaatctcatcttgatttgtagcttccacaatttccacgtgtcataggagggacccataggaggtaaagatccatgggcgtggatctttcccatgttgttcttgtgataatgaatatgtctcacaagatctgatggttttacaaaggggagttctgactttgcttctcattcgtcttccgccatgattgtgaggcctt

SEQ ID NO: 132806 - DNA, 388 bp, Homo sapiens
agatctacctatattatgttgattttgccaactgtctcatatttartgaatacgtaactctcattattgtgatattaataattttactccatatagtttcaaaccactttcacatgatcctcataaaatattataatatacacaatagaatatattatcatccctacttcatagaggatgcagttgtggctcaagaagtaaaatagcttatccagttttactcagccaacaagctgtacattggtacgttggtgaatgtttaaagcagacactgggtgtcgggagacagttcaatgatatattagcatttgtcaatttctgtggaaattctaagtggttcctaaaagcattcccagcaagtatcatactaatagcatttgggaaggtt

SEQ ID NO: 132807 - DNA, 635 bp, Homo sapiens
agtaataatgatgtccagaatatacttttccccatagtatccaaattcatgtgataactagcttcattaggagtttagattacttttaatatttgtgtagagcacatcttaggamtttaaaatgatcaagtccttgatcttccttgagttccacaagaaggtgttcactttgacaagtattcgcatgcagcaaatctttttctgggtagtcctgtttgtaatattcttaccataatgagaatgaataatatctaataataattagtggtatgaatcatgagtagaaacaaatacatactctgtcatataatatagtggatgtaattaaagatacccaaattgaaaagataataatctttatactttctaaataatattattgtgttaatatttttccctcagtagctaaccctaaataacagagaatttgagatgaaatatatttgttgttgtagctaaatattgtcggagatctaggaagtaacaagatatattaattaagagagataaggaacgatatataagacagtatttttagtatcagaacacatactttactttttaattaaaatgtttaataattcaattaatgtgacaaaatacacaaggaagagaaatgtaaggaactttcataa

SEQ ID NO: 132808 - DNA, 641 bp, Homo sapiens
aggcataagccaccatgcccggcctattgtaagctttacattaaatttatattatatgagttactattagtttataaaatcagctaaccagaattgtatatttactttcctttccctacctctcatttttcctataatttaaaatatttttaataacaaaataaaattatatacaacaagaacaaatgagaagtactacaaatgtccatcaaacaagattggttaaatacattatagaaaagtatataatggaatatactttcctattaaaaaaaacaagctgtatttatgtgttgttgagaaaatgtcatgttaatttaaaaaataaagtgcaaaagagtacatatgattcgagttgtagagctactacaataaawacatatttaggtttgtgcatataaaacataattttaaaatatgcttctctatctatctgtctatctataggttttttggaaggattcttaagaaattctcgtcatagtttgatattgaaactgaggatacactttctgtaatgtttgtttttttcccatattaaaagtaagaaaattaagtataatcatcccaccaaagtaaaaacaacacttggttattactagtcaaattaaagtaactgtaaaataagaatttttacctaa

SEQ ID NO: 132809 - DNA, 555 bp, Homo sapiens
gaattctctttttccacaaaagaagctatttaaagctactgcagaagttgcactatsaagcagatgagtgtcaatataaattatgatctctacattacttgggactcaacaatgctaagaaattctactcagctttctctgacgttctcttcagagattgtttcaataatctttttataaactgtaatcctcttccatctgaatattatgtagtgtctccatttatgtgaatttatatatgttaagtgctagtgtttgtaagtttacgtatgatttgtatttatgtgaatgtctgtgtgttggtctgtatgtttgtagctcagtttatgtatttgtgagtttactttagtgtatatgttgctaggacataatcttaaaattaagagataaatagaatttatcaacttattgccatcaagcttataaaccaggtagcatcgaactcttttatcctgtcacactgggacaatttatcctacttttaaaatgaatcctcctatgtgagcacagaatcccattactgcctctccctaagctaggaaccctgtcttacca

SEQ ID NO: 132810 - DNA, 605 bp, Homo sapiens
ctctggtggatgggacatgtaatttgtcaccgattagagattcacagaagagattccaaacagtattaaagatcagctaaaagtataggctaagaatttacagtaatgcctatccacaaattgtgtcagaactatgttaccagtggagggtgtctaggtttttggtgtcttgaacaaataattggacaaaacacacaaacaaagcaaggaaggaatgaagcaacaaaagcagtgaattattgaaaatgaaagtgcactccacaggatgggagggggcccaagcataggagctcaataactgcgctacagaattttctagtgtttaaataccctctagaggtttccattggttacttggtgtatgccctatgtaaatggagaggatatttcttgtcatagctgaagtgtttccatttgatttagttctaagaagtcagmgtgaattggccttatgttccctgcctccagaccctatcctcctgcctcagcaatatactgcataattgacctctttttaaagaaataagcataatgactccaatacctatggcttgaataaaaatttgtgttgatcccaatttacaaaagtcccagtttacaaaaag

SEQ ID NO: 132811 - DNA, 473 bp, Homo sapiens
aaatgaaaagatttatcaaagcrtttaggtaatagttgggaggagtgaagggaaaaaatagatcaaataatatataggtgcttgtatttgaaaacaggtttgagtttaaatttctaatccatgagagaccaaaagacaaagaatctttagtgatcaaaccgatagataactatttggaggggagagagagacagtgctggggaagactgcatagctcacaccgctttgtaggggctcactgggtactgttcgctgggattctcttggcaattagcccaagagagcagagcatggccagtgaggtgagagcaagcgtgaatacacactgatgctcctatgcgcagaatattcgcagtttataggtaaagatatgtgacttgcgaatattcctacacctacaaatgactattcccacactgtttttataggtcactgggctgtgttttgagctcaaatattgcctgcatcagaat

SEQ ID NO: 132812 - DNA, 569 bp, Homo sapiens
gcatctaaaggaaagctccggacgggcttttgtctcatgcctgtaatcccagcactttgggaggctgaggtgggtgggtcccttgaggccaggagttcaagaccagcctggccaacatggtgaaaccccatctctactaaaaatacaaaaattacctaggcatggtggtgcatgcctgtaatcccaactaactcagggggctgaagcatgagattcgtttgagcccaggaggcagaggttgcagtgagccaagattgatggtgccactgcactccagcctgggtgacagaaygagactgccttaaaataaataaataaaggaaagctccacccttgaaaccatgacccaagaaacgacctgggactttgccgcccacttcacaatgctccttcaagggtaggggactgaggcctgggatgtcaggcagacccaaggctgaggtctctataagaggctaagaacttgaataacccatgctttgtccctaggggcaaactactattgggttcccaggcttttctgtaggctcttcagagcactttctgcagctcctctttggggtagtttt

SEQ ID NO: 132813 - DNA, 686 bp, Homo sapiens
tgtgattagaacatcaacaacaattaaaaacaaaattatccagcattttaagagttaatgaatcaattagtttttcatctattgactcatgtatttatttgctaattcattcagtgattatatgtatatatgtatgtatgtatgtattgctgacctattgtgagccaaggaatatttcaagcactaggaatataacagtgatcaacaaccatagaatttgtgcactcatgtagtaaaaatttctaaagagaaaaagaaaataagcaaatacacgaagtagatatttataaattatcattgtatgaaattttccatggattcctcaggtttctgcacaggctggcccttctaagcaaaatccatgtttcaatagcaaagagccttagaagctagagagagtgtttccctctggacaaatttagagatatattttgtagatgtccaaggtagtaaaggtaaaaccctctctgttcctttcccagagacatatgcttacgttccaggataataaacctatggagttttctctgttcctccaggaggattttttttttttatattccagaaaaatragtaatctcgctctctacagaggagggtaggtggatttgccagcagtctcataaactctaagaggctcctaatttcaggcttcctctcctgtggtgcaacccactgcatgtgca

SEQ ID NO: 132814 - DNA, 485 bp, Homo sapiens
tgttggttagtttgataggttcatcttgtagtctttccattcaatatatgattagtttacataccacaattatagtgttataatgttctgtgtttctctgtgtaattactctcactagtaagttttgtaccttgagatgatttttctattacttattattgtccttttatttcagattaaataactctctttagcatttcttgtaggaaagctctggtgttgatgawatcgcttggcttctgtttatctgggaaagtcttaatttctctttcatgtttgagaaaaactttcattggatatactattctaagataagtttatttcttcagcactttaaatatgccatgccactcactctctcctggcctgtggggattccactaaaaagtttcctgctagacgtattggagttctatttgttatttcttttctattgctttttaaaggatactttatttttgaccttcaggagtttgactattaaa

SEQ ID NO: 132815 - DNA, 533 bp, Homo sapiens
agtggaaacaagaccagaggtgtcttgggtccagccaagtggttgagacacagagcctcactctgtggttcccaggcrgctcctgactttctttcctctatacgtaactgagggaacctccctgtaaccccctccacagaatgcctctgtccctcaccacaatcatagcagcatgattttcatgcttccaataaccaaaatgttaactcttgtgactctggggttttgttttattttaataacaatctttctaaaaaatacacatacctttccaacttctaaaatgctgagcccacagttaaggggtgaatgctcttccagggcccaacttgggtttaattcccttggttttccttggtctgagccatgccctaccattaccttctcccacccctccgcctctgctgagagatgttctcttaactcctctccttgcctgccttccttgtttttccatctaccacctcttgtgacctccttttctatagagaaagctgaacttctatacttctgatcaagagaaagaaagtctc

SEQ ID NO: 132816 - DNA, 591 bp, Homo sapiens
tcttgtgaactgcagaacgatcctggcttagttattcaccgtaataggggacacaggagacgggactggggaaaattcagggctccttcgtgacatcaatagagaagctatcagtctgttgtatgacgctatattctaggccccatgttgggagggtgggcgtattctatatttcttgtttttttgtttttgttttgtttttgtttttgttttgttttgttttgggtttttttgttttttttagatggagtttcactcctgttgcccaagctggagtgcaatggcgtgatctcggctcaccacaacctccgcctcctrggttcaagcaattctcctgccttagcctcctgagtagctggattacaggcatgcaccaccatgccaggctaattctgtatttttagaagaaacagggtttctccatgtggcccaggctggtctcgaactcctgacagcaggtaatccgcccttcttggcctcccaaagtgctgggattacaggcgtgagccactgcaccccgccagagtatcctgtatttctaaacctcaaaacaatcctaatgtaggatagatattgtttagagttttttgg

SEQ ID NO: 132817 - DNA, 380 bp, Homo sapiens
ctacaaattattatttttttgctmtgttgtctatcagacaatctaagatagtaggtacataaagaaataagtcatatagaagccaagaaaattggtttctagttatgttactagttgtcaatagacagctgtgttactttgaaaaaaacatatctctaatggtgaacttcctcatctaaaaggaggttggataaaatcacctttaaaatcattcttatctttgcctcagtttcctcatctgtgaaggagtaaatatcaggcattataacgatatccaagttaccacaaagaacaaatacaagtgatttgtggtcctggcaacagtgtagaagagcttactgatgtccacatgggtgcagttgggtcacataaagaccctt

SEQ ID NO: 132818 - DNA, 424 bp, Homo sapiens
aaaatatctagcattttacttcccagataagtgttcgatgaagggcagttatttcttttattttataaaaggttgttgaaatgtgaaaagccttcaattcttaggtaaacttctagctgtraaatagcattatagatgagcagggaagagcttttgggatttttgtaacaaccctcaaattataaaagaaacagtctcatccacatgtttgtaagtctgacatacacctttcaacatctgcctgtataaagttataaaaaggaactttttttttgctattttctagacatagatgctgtgattcttgaaatgccaaatatcattgcttaaacattacaatgactttcattacaactgcatttactgaaaaatctaatgccatgtaacaagccagagaaaaatgagaaagttgagacaaagaaaa

SEQ ID NO: 132819 - DNA, 581 bp, Homo sapiens
gcttttaaaatcctttaaaagcaccatatagaaaggaaaatagcataaaatgatgttttataaacaaaaaatatttatttctcacagttcaagatgcggggaagtccaagattgtctaatgagtgcctgcttcctaacagatggtgctttctcactgtgtccttacctagtggaaggractagctagctctccagggtctccttcatgagggcatgaattccaaacactagggactttctcttatgacctaatcaccttccaaagaccacatctactaataccgtcaccttgggtgttcagatttcaacatatgaattttgggaaaacacaaacactcagatcacacaattgaggtcagctttcttttgataaataggctgaaaaatacaagcttatgatctctgtgattttagcaaattagtcacaactgaaataacagttcactccacaaagaagcatgctttgaaaaatttgccctgaagaaaatggcaaaggcctgagaaagagaggggatatctgcagttgaaggagcctcacaatttctgtttctctcttttagcaagcgttgtgttttccaact

SEQ ID NO: 132820 - DNA, 583 bp, Homo sapiens
tacatctctcaaagtttatgtgttggaaatttaatcccaatgcaacagtgttgtgagatgggacttttaagacgtgattagctaggtcatgaggtctctgacctcatgaatggattaatgtggttaccaagggagtgggttcctaagaaaaggatgagtttgttccccttttcccaacccctctcatctttcttgaatgtgtgtgctcttttgatcttttatttcctgccatgggatgatacagcaagaaggctcaccagattctcgtactttggtattaaactaggcgtccaggatattaagaagtaagtatatattgtttataaattacccagtctgtggcattctgttatagcatcacaaaatggactaaaacaaatcttatgtgaataaggaatttcttacacctttccccatataaacccagtatgaagattwccttttcccttgcaatgacagcagcagccagtgatgtagggacaggaggttagagaactctctaaggactgaatgcacagcagccattgctgtggacaataaggtaaggcaggataatacacctcaaagcttaatacaatgacca

SEQ ID NO: 132821 - DNA, 511 bp, Homo sapiens
gactgtgatgatttgttaaaagattatccaatgcagaaatcaaaggaattggaacaatggtaaaaagggaaaaataagtggggcttttaaacgcccctgaaattgatgagctccttctcttctatccttcaggtaatatctatgcctgccagtttaggggagttacgtggggctggtgcaatagggcttttgaagatactgcctgagataattcacccaaaattggtagacctatggaaaacacgtttacctgagcttctgcagcctctggaaggtacaagggattggggccaggtctttacccagggggcmagaacataaagaaataatgcaccgtttctctgtgtaaagccattaatgctcattttaggcaataaaaatgatgaacttgatatgcaaggtagatagctatttttttcttcttaactccttatgttctgtttcttgccaatattcatactacaagaagacctagtaggtaacattcttagcaggaatttttacttttgct

SEQ ID NO: 132822 - DNA, 459 bp, Homo sapiens
cctgggacttagcaggtagtcagtgagtgtttgtgaatgaatgaatgatgtatatgaggttcacaagtttcgctgaaagctgccaaacctcctcatgtggtcaagttcagaccagggaaatctctactatataagccatcaatgtgtccatacaagcagaattaactatctacctttctcacctatgtagaagagaaaaagttttaaaatgacttttcatacacaactataaaaaattgcatgccagttgaaraaaatcttgaaatacagaagatatataaataaaagtcactccaaattccaagagtagatactgttttcccaatcattgtttttaaagccatttatatacacacacaattttcttagctgtaataatgtacagttttgtagtctggcctttcagtatttttttttaattattatccttaagttttagggtacatgtgcacaatgtgc

SEQ ID NO: 132823 - DNA, 599 bp, Homo sapiens
ttaaggttactggagcttcattttattcctttggtgatataatgtttccctgattatttctgatctttgtggccatgcattggtgtctgcacatttgaagaagctggtacttattctggtctttacagattggctttggtcagcaaagcccttcttcagtcagctcattcagagatcatgagtaggcttgctgttggagccttcaggcaggcaggactggtgcctaagtctgcaagggataatgatgtgcctggatttgtgaggcccagtctggagtctgagtctgtaggtgtggcctggagcctgaggccgctgggtctggtctagcattggagaagrcctggaagctcaattcacaagtgccaatctaaaacctgaagccttgagcacaaggctggcactcagttttattggggcaggcctggtggtcaggtccacaacaaagtctggtgctcacttcactctcctactcagaagcagagtatatctttctctgtgctgtgctagctaggctgtgggaaagggtgccatgtgtaatttgaaactgtcattcctaatctcttcaatgatttttttgttcttatttctgtattataccc

SEQ ID NO: 132824 - DNA, 625 bp, Homo sapiens
aacccttaccatttcataggaagttccaactttcacaactgacttcaggtgtttcaaggtaaaatgccattttttttgggtagcatttgtgtatttttaatttttaaaaaaagattcctattcactggcaaaatgagttaatacagaggaaaccctaaaaactccaccaaaagcctgctggaactgattaatgatttcagtaaggtttcagggtacaaagtcaatgtacaaaaatcactagcattttcatacaccagtaatgtccaggctgagagtcaaatcaagaacataatctcatttacaatagccacaaagaaaatgaaatacctagggatacagttaactaaggtcatgaaagatctttatgagaactacaaaacactgctgaaagaaatcagagatgacacaaataaatggaaaaacattccatgctcacagataggaagaatcaatattgttagaatgatcatactgcccaaagcagtttacagattcaatggtattcctatcaaattaccaatgtcattcttcacagaattagaaaaaaactattataaaattcatatggaacaaygaaaaaaagcctgcatagccaaagcaatactaagatggaagtatcatacta

SEQ ID NO: 132825 - DNA, 547 bp, Homo sapiens
tttatcagcttgggaactattttttgttggtttatttgtttgttttaaaaatacacatcttcagcggggtgcggtggctcacacctgtaatcccagcgctttggaaggctgaggtgggtggatcacctgaggtcaggagttcgagaccagcctggccaacatggcgaaaccctatctactaaaaatataaaattagccgggcatggtagcagacacctgtaatcccagctactcggkagaatgaggcaggagaatcacttgaacctgggaggcagagtttgcagtgaaccaagatcgtgtcactgcactccaccccgggtgacagagcgacactctgtctcaacaacaacaacaacaacaacaaaatacacatcttctccttcctccacatttatatatgctctatagccacaggctatggtaggaagtaagtagagctttgcagaagcactttaggttatctttacattctctctagattagtctagattagtctataagtaatttcagcttgtaaattcaatcattttgatgctcacaatcatgc

SEQ ID NO: 132826 - DNA, 298 bp, Homo sapiens
tagactgtcaactttgaggacgggatccctgtatgatttgtctttttcccttccacagcattttgcatataataggcactcactcagtgggttgaatgaatcaatatattaacaaagaamcaaataaatgaatgaagagaagaatgaaaactcataaagagccagtttcctttattcatctgaaaatttggtaagttggcactgtccgaaatgttactttattatagtcacatgatctattagtattctactacttgattcaaccaatatttactgagtacttaatataaataaggga

SEQ ID NO: 132827 - DNA, 426 bp, Homo sapiens
gtatcatatgttcagaccttcttctcattaagagataacacatgattgtgtaagacatatagtctgcaccccatggggagtcctcaaagtctactcccatacccaggccaccccatgggctccttctcctactaatgctgaaccctctctggcctctatggcctaaaagggaacaaataaaagagcctccaaagagccaaragaccccattggcccacagctatgtcctcttcaagctgtaggaggggaatttggcctaacctgagtacatgttcccttttccctctctgatttaaagcaaattaaggcagacttaggaaagttctcagatgaccccgatagatacacagatgtcccacagggtctgggacaatcttttgacctttcttggagagatgtcatgttattgtttgatcagaccctaaa

SEQ ID NO: 132828 - DNA, 285 bp, Homo sapiens
ttgccttggtttggaatgctcttctattttatctcatgtgggktgagttaatcgttcaagatagagtccaagtactgccaccgagtgctgacactggggaagactatatggcaacacagagagttcagtgtccagaaagccaaaagccaataccagatgtacccttgaggctgcccagggttaacacttagaaagccaaggttgccactagcttctcctatttctggccatgagcaagaacatggccagaaataggagaaaaggacaagaacattagagcaagag

SEQ ID NO: 132829 - DNA, 608 bp, Homo sapiens
tctggggacaaaaattttttgactgtcatagagccaaacaaaatggctaaaagttgttgaaagccctctcagaatatcatggtgctgtgcattccctgggccatcttrgaaaagaaggaatatattctttcatcaacattagcatggagcttctgtcagaagaggctgtgcagcacatctgtgaaccatttctttggactactaaaagtataactctaactccatgatattatttgctcccagaactttttctttcattttttttgtagttgtctatagaaccaaaaaagaataaaaccaagaataggggtggaaaggttataaatacattatgtttgaaagtgtttggcttacatagatgaggtcaaagttctttttagccaaaagtttgtctttttcatttgtttgcatcccatatttgtgtaaacaaaaggaaattacgtgatgaaactagaatccagtgaaaaagttacctgtttggggttttgtaaacaaagaagcaaacaaacaaacaaagacacagtaggccaaatttgtcaggtactgttgaaggtagaaaatctacagtggttgaaatttggctgtttcctgaacctgaacttggttat

SEQ ID NO: 132830 - DNA, 416 bp, Homo sapiens
taattcaatcatctctcaccaggtccttcccacaacacatggaaattatgggagctacaaaataaatttgggtggggrcatagagccaaaccatatcaaagttctttttgtatctttattattatcttccctgtgtctcctcatgatgttcatactttcttttaaatctatcatctttgataatttcattttctctgagatttctgggtctattttgccttattgatttttgtcctgacaatttcacatgtattggcttctttgcctatctactaatttttggttggatgctggacatttgtgtgtgtgtgtctgacatgttgagcatctggattttttttttcctttaaagatagatggagtttattttaataggcagctaaattacttgtatatcaactggattattttgaggc

SEQ ID NO: 132831 - DNA, 563 bp, Homo sapiens
aagaaaagaatatgattgaaatattgaaaaggtttgttacagaaaagaaatcaaagtatgttacttaaaaattgtggttctgaactagataggaactatttttaatggaataatttgaaggacaatgtctctctctctctttrtgtttatttaacaattatttattgattctgttctttgtatagtcttaagtactggggaccaaagagaatatatgactaagatgggctttcagccattcattcattcactgtatataggagattggatgactgatcttgactttgctgagaaattgcattaattattgtcatttacaataaaaaagaaaattgttcttatattcactagatgcttaagtgtctcactagaccagtgtttccctgaacctggctaatcatcaaatcattagagacacctgctaaccataaatattcccaagcctcactgatggacccttaatccaatgggcatgttgttgggtagtgatgggattctccagttttatcaggtagtcaggtgattctcatacttcgcaaagtgtaaattacatggtacaggag

SEQ ID NO: 132832 - DNA, 563 bp, Homo sapiens
aagaaaagaatatgattgaaatattgaaaaggtttgttacagaaaagaaatcaaagtatgttacttaaaaattgtggttctgaactagataggaactatttttaatggaataatttgaaggacaatgtctctctctctctttatgtttatttaacaattatttattgattctgttctttgtakagtcttaagtactggggaccaaagagaatatatgactaagatgggctttcagccattcattcattcactgtatataggagattggatgactgatcttgactttgctgagaaattgcattaattattgtcatttacaataaaaaagaaaattgttcttatattcactagatgcttaagtgtctcactagaccagtgtttccctgaacctggctaatcatcaaatcattagagacacctgctaaccataaatattcccaagcctcactgatggacccttaatccaatgggcatgttgttgggtagtgatgggattctccagttttatcaggtagtcaggtgattctcatacttcgcaaagtgtaaattacatggtacaggag

SEQ ID NO: 132833 - DNA, 600 bp, Homo sapiens
gacagctgaaattgctctatattttatgaagatgcatgttttccttacatttgtcttttattaattttcttctagaatgttatattagacagtgtggtatttcacactcaagaattgactatatcagtaatctattccaaatcttcctacaacactgtactatcttcctccaacagcatacaaagctccttccaactattactcccacacttggcaggtttacagatttttttttctttttaagtcagtagcaacaggataactctataaaccaaggcatctaaatgaatggatttttaaacacatacttttgaattaaggaaaatgcagcttttaactttagaaagtagaaaatacagatcaactggaaataatctaaaytaagtccacaagagaaatgattgagtttagattctttttatatgatcaagcctcttgtacataacttcttttaaagtagtctgtaaaacattgctaagatgttgattttaaacccggttgggaataattacatccagttacacgaaaccacgatgctttcaaatctaaagacttatagtttataaccaaaacataaaatgtccacatgaccagtcagtg

SEQ ID NO: 132834 - DNA, 610 bp, Homo sapiens
gaattcttcaattaatttaaatttaaatagccacaagtgactcttgaggcttttacattacaaagaagtaatttgataagtaaacagggcaatttaaagtagtggtaagtggtaagagggaactaaagcagtaggacagaatyactgttacatggtctgggagcaggaaagggtattgaggtatcattttagaatgaggatggtcaaggaaagatctctctgttgaaatgacacttgacctgagactgaaagatgagaagacagcagtagaaggaattgggaacaaagcattactagaaggaccagtaaattcagatgctctaaggaggaacaagattagtgtatgaaggtggaaatccaatgtgtctggagtaatctgtgtaagagagagaatggggctgaggaaggaggcaggggctagatcactaaatctactgttgatcagtgttatggaaataggaaaccactgagtttttttaagcaaaaaggtggcataatgtgatagcatgtttttaaaagatctttctaaatgctctctggaaaatagattctaggagaaaaaagtagaagcacaatgatcaggtaagaagctactccatttgccagtttg

SEQ ID NO: 132835 - DNA, 581 bp, Homo sapiens
ccatacacatggctagtcagtgtatacaagggtttttttgtacccagtccctaatgtcttggcattacttttattatgtctgcagtgctcatgtagatgaaatgccacaacacattcttttactattgtagcctcaaccggcttttttttttttttttttaagaaagagcaattaccatcataaaaattccttactggggaaccttccatattgcgttatcattccatgagtctaataatagtgaaatataaagaaacaattttaaamtaaaatactaaaatatctaaaaaagactttgaggtctatagctagctctataatgagaaacactaaaagtcaagaggaatagaaacaagggaaaagaagcaatgtgacttttttttagaactcccaactacaggttagaggcttataaatcatggtctagctaagataattcgcaagtcacatgcacattcaccagtgtctaaacacagttagagaactatctgtctgttatcaattgggagaatgctaatgcctatagttggtcagtacctgacccttatgtatttctatcctgatagctctatctgcctaa

SEQ ID NO: 132836 - DNA, 571 bp, Homo sapiens
aataatagaagaaaatagtaattttaaaaatatatgtaggcttgatcaaactgatcatactaatgagaaacttaagattcaaaatcacgaagagttctgcaaggtgccattctgatgtgcactcatgatgagtgcactactgaaattaaagctgtcattcttttgtatcttttccctcccgtacttcatctaggggatctgaactcccaagagaatcacacagccacatgtcaatttcaagctattcatactgagtttgaaatgagaatatttttaaagtattgccagtaaaggtaagtaatattcttgggggataaaatcaccaaaggaggatgcaaactgtttttgcatcagccagcccagaaataagcagtttcttcaaatcacacaaataatttcactccatttgttcccattgcaaaaagcttcatgtttgttttkttttgttttgttttgttttgttttgttttgtttgtttgttttttacgggatggctactaaacatactggcttgtcccacccattgtctggaaaataattcttccgaattcttaaaaactaattgagtgga

SEQ ID NO: 132837 - DNA, 526 bp, Homo sapiens
gaatagaactgacagggagccagctgccccttctaaactgacacaagaacttccagcatttcagcacttggacttgcacgctctactccctcagcacagccccatgtccctgcacagtcagtacctttagtctggggtggccactgccaacactatacagcaggagagcatgggggaaggaagtggcttcagcaatcactgttgggacacaccagattttgtatgctgccacctaggtgttgggggcaagccccttctcctgccttctgcacttccctctcaggcggtcctgggagatttcttcatttgatgtttactctttgcaaagcagtcttgaaattgttggcagtttaaaaagagaacasagagagtacattcaagagtgatctctctctactcaaaatccttaaaaatctgaactctttagtaaggcctctaaatatttgcattctccaatgtctatttttaaaagaacaatctgaatcttaaatagatgtctcagcttaatggaaagactccaatatga

SEQ ID NO: 132838 - DNA, 583 bp, Homo sapiens
tgcacctgggctagttaatagtattatactaatgttagttttatagttttgataattaattgtactaagattatgtaaagtgttaaattaggaggaagttgggtgagtagtatatrtgtactctctgtactatttctgcaactttcctaaaaatctaaaattaaatttaaaaagtttaaaaatttagaaactgaaaattctggccaggtggagtggctcatgcctgtaatccgagcactttgggagtctgaggtgggaggactgcttgagaccagaagttcaagaccagcctgggcaacagagtgagacactgtctctacaaaaaattaaaacattagttgggtgtggcagtgcatgcttgtcgtgctagctacccaggaggctgaggaaggagaatcctttgagcccaggagtttgaggttacggtgagctatgatcatgccactgtactccagcatgggcaacagatcaagatcctgactctaaataaataaataaaaataaaaacggaaaattctataatagtacctatctttaatgtaaatgtagctggtttgatagctttagggaaccactccctatt

SEQ ID NO: 132839 - DNA, 537 bp, Homo sapiens
gaattcaattttttttttaaataaaaatgagcctagaaactgctcaagtaatggtaggrgaaagaggaagggccagtctgatttgaaaaggattggcagaccaagagacaggaaggacaggctttgagtgttgcaaatgcttctgtgggtacagaatgagaatgctacacaataccttacagatcttgtattgcaaactttgcattttatatgaggaaactgaggtccagagagtgtaagtgacctacctgagatcacacagctagtcaatagcagaatcagaattgatttctcttttcaatctttttagttacaggaaatgaccatgaacgccatctgtaatgacagggcagtataaagagcttggtgctatagctacacacacatcagagggaagggtctcagatcttcctgcctccactctgggcccaagctcagcacattcacatcagtaacatttcccattgcacattagctttcaaaagtggagaatctattgtttagagaaaggtttctaaacctcagaactgttgacat

SEQ ID NO: 132840 - DNA, 509 bp, Homo sapiens
gcaggaggatggagcatcttttatttaacactttgccagcttgatttatcacttttaaatatttaggtatggtatatgagcctctgtttttacacttgcagggccccacaaaagttagggaaggacctggggaaggaaaaacatttaagggagggatgggggatcatcaggatcaaaaaggaccaaaattgtttctttgctatgtggtgcttaaaatagtgccyagtacatagtaagttttcaaatatttgttgaaagggaaaagttggaggggggagggagagagagaaagagcggggaaggaatttgtgttaaacctttcacactttcaggagtttgtgacacggagtcagagaggtcagaattcaaatcctgtctttaccattccacttgtgcatccttgggcaagtttttcaacatctctgatcctcaatgtcctcatctggaaaaaggagaagccacgcttatcacataggagaacaaattagtattaactgcttacactgttc

SEQ ID NO: 132841 - DNA, 526 bp, Homo sapiens
aatgcaaataaaggtttatgtaaaagcatattgtcttcctcttttttttttaagacagcgtctcgctctgtaggccaagctggagtgccagtgccattgaggcctcgacagcctcaacctcctagggtcaaacatagcccacttcagcctctcaagtagctggggctatgggtgsccaccaccacacctggctaatttttgtattttttttgtagagatggggttttgccatgttgacccaggatagtcccaaactcctgggctccaataatcctcctgcctcagcctcccaaagtacagggattacaggtgtgagccaccatctccagcctaaagtgtttttatgttttatagatgttttctgtagcattattattaatactacaaactgaaagtaacataaatgtctaataaaagggaatgggtcaaataaatatggctacattcatacaacagaatattgcatattggtttggtgaaatggctcagcaggctggtgtgataatgcaatgaactactctattgc

SEQ ID NO: 132842 - DNA, 526 bp, Homo sapiens
aatgcaaataaaggtttatgtaaaagcatattgtcttcctcttttttttttaagacagcgtctcgctctgtaggccaagctggagtgccagtgccattgaggcctcgacagcctcaacctcctagggtcaaacatagcccacttcagcctctcaagtagctggggctatgggtgcccaccaccacacctggctaatttttgtattttttttgtagagrtggggttttgccatgttgacccaggatagtcccaaactcctgggctccaataatcctcctgcctcagcctcccaaagtacagggattacaggtgtgagccaccatctccagcctaaagtgtttttatgttttatagatgttttctgtagcattattattaatactacaaactgaaagtaacataaatgtctaataaaagggaatgggtcaaataaatatggctacattcatacaacagaatattgcatattggtttggtgaaatggctcagcaggctggtgtgataatgcaatgaactactctattgc

SEQ ID NO: 132843 - DNA, 526 bp, Homo sapiens
aatgcaaataaaggtttatgtaaaagcatattgtcttcctcttttttttttaagacagcgtctcgctctgtaggccaagctggagtgccagtgccattgaggcctcgacagcctcaacctcctagggtcaaacatagcccacttcagcctctcaagtagctggggctatgggtgcccaccaccacacctggctaatttttgtattttttttgtagagatggggttttgccatgttgacccaggatagtcccaaactcctgggctccaataatcctcctgcctcagcctcccaaagtacagggattacaggtgtgagccaccatctccagcctaaagtgtttttatgttttatagatgttttctgtagcattattattaatactacaaactgaaagtaacayaaatgtctaataaaagggaatgggtcaaataaatatggctacattcatacaacagaatattgcatattggtttggtgaaatggctcagcaggctggtgtgataatgcaatgaactactctattgc

SEQ ID NO: 132844 - DNA, 513 bp, Homo sapiens
tatcattttatacagagtgaaaacttttacccaattttcttttattttccaattttccaatctggtgtatttttcagccacttttaaatgggatttgcttttcttttcagttttctattgctgctgtttacatgtcctctggccttgtttttctttctccttcgtatattagcattcttaataattctgtacgtacttcatttcctaaaagctacttataaagacaattcttgtttcacattcattcatttgtcactcacctgtcactatattgagtaacttgactggctgttgttctcattcctattaactggagtaacttctctttgaaagttttttgatcaccaggaactttaatatggttgtcttctataacatgtatgacagtayattgaatacaagaatatttctatggttggcagcagaaacgtcgtctttacctttcagtactctcagtctaactatatacagacagtttaaactgaattacctagtctcatgggaaataacaag

SEQ ID NO: 132845 - DNA, 473 bp, Homo sapiens
cacattgtggggtgtcctctgctccagtcttatgtctgtcagcatagtattctcttagcttctgtatactgcctacatttatgygcagtgtgtgtgtagacattgcgtgaaagggcttatgtatgccatctcctcttcatttatgtatatcagcctcttacaggttggtcctattatggaccccatattgcagctggggaaaatgagaagagatttaaggtcatagtaagtgttgtatccagaattcagacccaaaatttttgctctaaaccagtgctctgtatcacccctctcagagaagcctttatctggagcagtggttcccaaccaggggtgattttacctcccaagggacatttggcaatgtcctcagacatttttaattgtcagcactggcatctagtaggtcgaggtcagcaatgttgctaaacatcctccaatgctcaagaaagctcctcagacaaagaattatc

SEQ ID NO: 132846 - DNA, 473 bp, Homo sapiens
cacattgtggggtgtcctctgctccagtcttatgtctgtcagcatagtattctcttagcttctgtatactgcctacatttatgcgcagtgtgtgtgtagacattgcgtgaaagggcttatgtatgccatctcctcttcatttatgtatatcagcctcttacaggttggtcctattatggaccccatattgcagctggggaaaatgagaagagatttaaggtcatagtaagtgttgtatccagaattcagacccaaaatttttgctctaaaccagtgctcygtatcacccctctcagagaagcctttatctggagcagtggttcccaaccaggggtgattttacctcccaagggacatttggcaatgtcctcagacatttttaattgtcagcactggcatctagtaggtcgaggtcagcaatgttgctaaacatcctccaatgctcaagaaagctcctcagacaaagaattatc

SEQ ID NO: 132847 - DNA, 577 bp, Homo sapiens
aaattacctggctttccaaaaggtctgatctttagcttcagtaagacgttcattgtatttggtccagtggtgtgtgtatatgattgtgaatgagaagaacaaaggtaaaggatttgaacagattggaagtatatcaatgaggagtatatgaggaagaattaggaagtttaaaattttttatgtctcaaggaataaaaacttccctgacaatatatatttgaccctttgacatgctttcaggaatgtgtgaagcaggaaagtaaagagctgcctttataccattctatctgggttcactgtctttcagcaactgagcgattctctgacagaacatcgtggattgagaggaaataagaatgggtgtgcctgctttaggattacacagtgctggacctttgaggaaggagaagcagagatggatagaattgttgtggcagaactgagcttgtatacttggtcctgtggagggtatcyactcttcttccagctgcgtagggtaaataaaggtttttgtaaagcttctttatctgtcttgaattattcatgtttctctgcatctttggatttacagcccacc

SEQ ID NO: 132848 - DNA, 577 bp, Homo sapiens
aaattacctggctttccaaaaggtctgatctttagcttcagtaagacgttcattgtatttggtccagtggtgtgtgtatatgattgtgaatgagaagaacaaaggtaaaggatttgaacagattggaagtatatcaatgaggagtatatgaggaagaattaggaagtttaaaattttttatgtctcaaggaataaaaacttccctgacaatatatatttgaccctttgacatgctttcaggaatgtgtgaagcaggaaagtaaagagctgcctttataccattctatctgggttcactgtctttcagcaactgagcgattctctgacagaacatcgtggattgagaggaaataagaatgggtgtgcctgctttaggattacacagtgctggacctttgaggaaggagaagcagagatggatagaattgttgtggcagaactgagcttgtatacttggtcctgtggagggtatctactcttcttccagctgcgtagggtaaataaaggtttttgtaaagcttctttatctgycttgaattattcatgtttctctgcatctttggatttacagcccacc

SEQ ID NO: 132849 - DNA, 608 bp, Homo sapiens
caggcgggctaagtccgaaaagagagtcagggaagggagataggggtggggccattttataagatttgggtaggtaaaggaaaattacagtcaaagggggttgttctctgacgggcaggagtacgggtcacaaggtactcagtgggggagcttttgagccaggatgagccaggagaaggaatttcacaagacaatgtcatcagttaaggcaggaacagtccatctggatgtgtacatgcaggtcacaggggatatgatggcttagcttaggctcagaggcctgacaatcatgggttgttacaaagattaaatgaagtaatatttgtaaatgmaccttaaacaatacctgacgaatattaccctttatgtgggtatgttaaataacaatacaaatgacttcaaattataaatcaatgaaaaactctttttaaaatttcttttcccagcatcatctttttcttagataaccttcagcactgaactccttattactcagccctttctcctggatgccctctctcctcctcactacagtgcggctttaattatatctcccactgctttctttctctttaatcactctgcaaaggacaaattccagtaagctt

SEQ ID NO: 132850 - DNA, 564 bp, Homo sapiens
tgatgatgtgaggaggcagcatgacactgaaattggtraagatacattaatacttatttaataatctcacattgcctggagactttttaaaaaatctaatctctttcccctgcaaaatacaaaggaaaatagagtgtctggatgacagtattctcatataaagtggactgtctctcttatgcacaagccaagtgtcacaggttccattccatcctgcataccctgcatataaagaaggagtgggtgatgaaggaggctggcagcttaaagacttaaacaggctgagggactaagttcccaagttggctgagcagttagaaaaggaaaggcaagacgagaacccgtgccacattccgaattggattacctgttacggagccaaagaccgagttccaaaggaccaaagttggagtgtgaggatgataagatacgtgtgcaatctgattccagattttagattatctagagagggggaaggcattactagcgttcatatataaagtctctgtgtagtatcatcagagattgctcttcagtagctctctgcttgtttggttaccgaat

SEQ ID NO: 132851 - DNA, 460 bp, Homo sapiens
tattgcattggggagatctgtcccttgaatttcatctgagaaatcaaaactcgtacgtttaaatcctgtcygcccaggtgcctcagacacatacaactggctttactcttatgtcagcctatttaactgtgccctcaaaataagcagtggtgaagcttattttgtatgtagtttggatcatattgcttttaagaattccatatctaggttgctgttcctgtatggcatggagaccctgataattaggtttctgtaacttagagacagtctgaggctctgtctataaaaagccattcctcctgaaaacgggacagaagtatatacatacactaaagtaatattccccgagaagaaatgtggcatgagaagcaaaacagttcgagtgctcctcccttgccccatttaagtgcaatgaaatcagaatcgacatgttaaaactagtcagtgatgccgagggtcc

SEQ ID NO: 132852 - DNA, 460 bp, Homo sapiens
tattgcattggggagatctgtcccttgaatttcatctgagaaatcaaaactcgtacgtttaaatcctgtctgcccaggtgcctcagacacatacaactggctttactcttatgtcakcctatttaactgtgccctcaaaataagcagtggtgaagcttattttgtatgtagtttggatcatattgcttttaagaattccatatctaggttgctgttcctgtatggcatggagaccctgataattaggtttctgtaacttagagacagtctgaggctctgtctataaaaagccattcctcctgaaaacgggacagaagtatatacatacactaaagtaatattccccgagaagaaatgtggcatgagaagcaaaacagttcgagtgctcctcccttgccccatttaagtgcaatgaaatcagaatcgacatgttaaaactagtcagtgatgccgagggtcc

SEQ ID NO: 132853 - DNA, 409 bp, Homo sapiens
tgggtaatagcaaactcctctgagctaaaggagcacattctaacccaatgcaagaaagctaagaaccttgaaaaaaggttagaggaattgctaactagaataaccagtttagagaacataaatgacctgatggagctgaaaaacacatcatgagaactttgtgaaacatacacaagtatcaataactaaattgatcaagcagaagaaaggatgtcagagactgaatgttaactcaataaaataaagtgtgaagacaagattagataaaaagraatgtaaaagaatgaacaaagcctccaagaaatatgggactatgtgaaaagaccaaacctacatttgattggtgtacctgaaaatgatggggagaatggaaccaaattggaaaatactcttcaggatattatccaga

SEQ ID NO: 132854 - DNA, 565 bp, Homo sapiens
aatattcatggtcatcagtctcattgcttatcacacctcatctgggtaatcctattgtattttttattcttttcaataataatttacactgtcttagactttggacacctagtctgccccttcatcctaactggatgacataaatgcccatttcaaaaggaaaatagaaggtatcatacaaaaattttctctacttgccaccaaatttagaaacttaaacatttctgtatttactttccttctaatttagtggaagaaatgcatctcttcctatatgaggtctaataacaacctttcttctggatcctaatctctacctgtcttcttagaggtctcattccatctattctgtatcatcagtcttaatgctctctgtcagcctctttatgtgtctccttactctcaatattcatacatgcttaagatttacttctttatattaacacraaataagtaacatgtaacatgggagtctaatatccatcctttatacattttcagataaatatattaaaatagatatttagactatgactcccagtttaactttttcactttcagttca

SEQ ID NO: 132855 - DNA, 562 bp, Homo sapiens
atatatctagaatgttgaaatgccagtgggttattctagctgaatatgctaaaataattcaagcaagagctaagaagatacttggagtacaagcaaaatttccaggaaatacagaataatatagattgttcaaaatatataaatataatctaaataatatagattattctatacagtaatatagagtatccaaaacttcaaaaatttctcaaagaaatacactaaggtaaaaaatcaaagctttggttgtaacaaaatttgttcagaaataagaatggctggatgcattgcttatgcactcttacttggacaaaaggggtcaggagaatcttaaaacatgtcctacacagcaggccaccacacccaakgtagagagagataaatctcagtaaggatgcagatgttaattttgggacatagagatttatttccaaaaataacatttttaagaggcttgtcctggccaaagcactaccaacttggcctcttcagggcccaagacagttcaaaatgaaaaataggcctgaaatgccaacttcctacagccagaaagcaggctgag

SEQ ID NO: 132856 - DNA, 306 bp, Homo sapiens
ctgaaataaaaattgaaacccaaagcaaagccaaacgaagctaaacaaaccaccacatggtcattgagccacatatcaacattaggtttaaaaatatagctctgaagacctaaagcacagcctcatgagaatatccagtcccatacaccataaccacttactgtaagaagacacgtcatatcccatcctgaacacttgttaaaaatctcaagraaaggggatgtaaccatgctctttgttgctctgcctactctttgatttctactcctttttctcctcctgtgatcactcccctttgtctccttc

SEQ ID NO: 132857 - DNA, 519 bp, Homo sapiens
ttaaaggcaggtagacatttttttttccaatatttttctgtaaatgtggagaaggataagcaagaaatattaaaataaatatgaaagtgaataaggtaacattctcttatgggtgtagtaatatgaggtagacctgaataggcatttatgattcctcaatttgtgtatcatttatagggttttagaaacatgatcaggccaggcgcagtggctcacacctgtaatcccaaaactttgtgaggcacaggcaggtggatcacttgagcccaggagttccagaccagccagggcaacatggcaagaccacatctctacagaaaatacaaaaattatcagggcacagyggcacatgcctgtagcctagctattcggggagctgaggtgggaggatcacttgaccccaacgaggtcaatgctgcagtgagccatgatcatgccactgcactccagcctgggtgacagagtgagaccttgtttcaaaaaataataagaaaaataaaaacatgattatgtgttttt

SEQ ID NO: 132858 - DNA, 519 bp, Homo sapiens
ttaaaggcaggtagacatttttttttccaatatttttctgtaaatgtggagaaggataagcaagaaatattaaaataaatatgaaagtgaataaggtaacattctcttatgggtgtagtaatatgaggtagacctgaataggcatttatgattcctcaatttgtgtatcatttatagggttttagaaacatgatcaggccaggcgcagtggctcacacctgtaatcccaaaactttgtgaggcacaggcaggtggatcacttgagcccaggagttccagaccagccagggcaacatggcaagaccacatctctacagaaaatacaaaaattatcagggcacagtrgcacatgcctgtagcctagctattcggggagctgaggtgggaggatcacttgaccccaacgaggtcaatgctgcagtgagccatgatcatgccactgcactccagcctgggtgacagagtgagaccttgtttcaaaaaataataagaaaaataaaaacatgattatgtgttttt

SEQ ID NO: 132859 - DNA, 529 bp, Homo sapiens
tcttcggtctggaacactccttaccctcccttacccctcaaccctccattcttgggatgataagctcctattcatttttcacccttcagctcttctgtagtgattactccgtccaagagccctaactctggattcactgctcttctaaaattctccctgaatttcccccaggtagtgcttatcccatactgcagttgagactccagtagacaataggctggacaagggcaaacccaggcttgtttcatgcttaacaaatataagttgagagaattatgtgttatacatgttttggagatgttagatttgcactgcctcaagtttcagcargcatttgttaatctggctagcccttgtatccttgtagatgcttactaaataccagttgaatgaatgaaaaacaagttaatgcaatatgttttatcagaggtggggtgcaggtgggaggatagtgcagcatattctagctgcctcacacttcaccaataatttgttaacctgacccattttgcccatcctcatccaaaaa

SEQ ID NO: 132860 - DNA, 565 bp, Homo sapiens
gcagtgattcagggaagtgggtccattctgtgtggggtgtgtagaaggtagagggacagaaaaacttyagaggatgataataataatggacaccagcagcctatttaatcaaatcctcaatactgacactgctttctgaactggctaccatcattagtccccttttgcagatgacaaaacctaagtcctagccaggcatggtggcacacacctgtggacccacccacttgggaggctgaggcgagaggatcgcttgagcccaggacttcaagtccagcctgggcaacatagcgagagcttacctcaaaaacaaaaccaaccgaacaaaaccccagaggctccaaaaagtcaattacttgcctgggttcctggagctctaaggaggcagtattcgcaccaagcctgcctgctaattttcctcccggctgcccctagaggtgctgagtggtcattgtgacagtatcattacacaaaggaagctcttggggtcacaatgcgcagggctggaccacccttggatgcagcctgggaaggaacatgaggatcctctgagagaccagggaca

SEQ ID NO: 132861 - DNA, 605 bp, Homo sapiens
cagccactaagagagaagctgtagaagaaaaagctgagtgttggagaatgttgcctatggggtatgaagatgaaggggagctggtgactgagactgggtaggagcagtcagagaggtaggagacagaacaggagggggtggagtgaaggaaaggaagaaaagtaagggcttaagaaggacttggccattctttacacaaacaaggcagacaaattcagagcagagacctgggatagtgatgagtgggtttcttagtgaccatagtgagaatggttcattggcttggtgaggacagatgcttatttatggggctcaggaagaatgggaagaaagacrtggattttataaatgtgtgctattcccttaagcagattggcaataaaaggaaggaaaactttgaaagaaacagggtaaagaaatgatctgtctccaaaagaggcaattgtcttggtcatccaggaggtaaaggcaaaggcttgaagatgcaggaaatggtggggacgatggagagagctggcagggatagaatcaggagcatggctggagggattggtctcaggaagaaatagagacactgcttcaagattggagggaaggctgggcac

SEQ ID NO: 132862 - DNA, 583 bp, Homo sapiens
tgaaaaactccaggcaaataaaatgtatctccaaattcttaggtatgattattgggtaagaatagattgactataaagaatccccaaatgagaaatactgggaaatagtagccttgtattcagaaattgagaagactaaagtgtattttgatttcctactactattcgaaaattctcataataccagcattataaaatatatgtatcagtgttcattgctagaataatgctagagggccaacatatatatttgtacatagttatgacaaggtagttttatgttggaaaaatctaatgtatgaagaaatatgctccttycccaaattaaaatttaactttcagatggcatggatagagttatcgctgaagctctattatccataaaattgtcaaactatacttttgcttttatatgctgagtttacacataatttgaatataatcatgcagaaggagcatacttatttgttgatgtcttagtatctttcacaaagagatataaactatatagaggatattcatagttgcagaaagacagagttttggatttagaagaatctacttttgttatctaaagagctga

SEQ ID NO: 132863 - DNA, 551 bp, Homo sapiens
agacttaaactacgctccagaccaaagggacctaacagacatttatagaacattccatccaacagcttcagaatacacattcttctaaactgcacatgraacattctccaggatagatcatatgtggccacaaacaagtcttaacaaatttaagaagacagagtcaacatcaagtatcttttctgacaaaaatgctattgaattagaaatcaacaagaaaaactttggaaactttacaaatacatggaaattaacatgctcctgaaccaatcaatcaacaatttaatgaaattaaacggcaaattaaaaatttccttgtgacaaatgaggatggaaacacatcctaccaaaacctatgggacacaacaaaagcagttataagaaggagtttatagcaataaacacctatatccaaaaagaagaaagatttctaataaacaacctaaaggtgtacttcaaggaactacaaaaacaaaaacaacctaaactcaaaattggtagaaagaagaaaacaataaaggtgtgtttattttttcaaaattctcaacaag

SEQ ID NO: 132864 - DNA, 663 bp, Homo sapiens
cacataacagcctatactgaccctgcagggaactgcccctccgccagacctcgtacttcagaagaggcctagccacccctgagcttgcagtgcttgtgtgagggtgcttgtggaatattcttctcactgccttctataagcaggacagcctagtacccagaaacctccaaaggcacccaagtcttttcagaataaatgccaaatattgacatttgggttccccagtttatcawctgggaccatctccgattacagtcctctcctcttccttcttgaagacacctcctttgctccaggcatttcagaatattgtctctgtcccaaacttactctttgggttcacactcatgtctgccttcaaccccaaatgctctttcccttattatgcccaattcaagctcaaaccacatccctatcccttatttactcccctcagtcttcacagtttagttctcacatcatctctccgttggcatttcttccatttcctcccttacacaaaatcgttcccaacactctttctgatagtgtcaaatcttagactttgtgcccgcttgctggattctcatgcatctggaaggcaggaacactgttatcttttcccctccaattcctggcaccgtggtgggcacagattaggcacataaagatgatgacagatca

SEQ ID NO: 132865 - DNA, 663 bp, Homo sapiens
cacataacagcctatactgaccctgcagggaactgcccctccgccagacctcgtacttcagaagaggcctagccacccctgagcttgcagtgcttgtgtgagggtgcttgtggaatattcttctcactgccttctataagcaggacagcctagtacccagaaacctccaaaggcacccaagtcttttcagaataaatgccaaatattgacatttgggttccccagtttatcaactgggaccatctccgattrcagtcctctcctcttccttcttgaagacacctcctttgctccaggcatttcagaatattgtctctgtcccaaacttactctttgggttcacactcatgtctgccttcaaccccaaatgctctttcccttattatgcccaattcaagctcaaaccacatccctatcccttatttactcccctcagtcttcacagtttagttctcacatcatctctccgttggcatttcttccatttcctcccttacacaaaatcgttcccaacactctttctgatagtgtcaaatcttagactttgtgcccgcttgctggattctcatgcatctggaaggcaggaacactgttatcttttcccctccaattcctggcaccgtggtgggcacagattaggcacataaagatgatgacagatca

SEQ ID NO: 132866 - DNA, 663 bp, Homo sapiens
cacataacagcctatactgaccctgcagggaactgcccctccgccagacctcgtacttcagaagaggcctagccacccctgagcttgcagtgcttgtgtgagggtgcttgtggaatattcttctcactgccttctataagcaggacagcctagtacccagaaacctccaaaggcacccaagtcttttcagaataaatgccaaatattgacatttgggttccccagtttatcaactgggaccatctccgattacagtcctctcctcttccttcttgaagacacctcctttgctccaggcatttcagaatattgtctctgtcccaaacttactctttgggttcacactcatgtctgccttcaaccccaaatgctctttcccttattatgcccaattcaagctcaaaccacatccctatcccttatttactcccctcagtcttcacagtttagttctcacrtcatctctccgttggcatttcttccatttcctcccttacacaaaatcgttcccaacactctttctgatagtgtcaaatcttagactttgtgcccgcttgctggattctcatgcatctggaaggcaggaacactgttatcttttcccctccaattcctggcaccgtggtgggcacagattaggcacataaagatgatgacagatca

SEQ ID NO: 132867 - DNA, 593 bp, Homo sapiens
cgtcgtgaacagttaaaaaaagaaaaagcagcatttggaaaacattctttaccaaggtttacctagtartaaaatatttataagtaatattcattaatgagatttaacaataaagtgtccaacaataagataaatgttgttactatttcgaaacagcacacaaaatatagtggaaatgtatacataattccttaaaagtgcatattgtcatactcttagtcaaattttgcggtttgaaacggaacaaatccacggagtgagtttgatagagccgactgaaagtgcagctgctataatttgggcccagcatcagcattaaaaatgtgccattgtatgtattcctgttatgatgaataacaaaatagaagatagtgttctattgcaaatcacattcataaaaagtgagattctttaagcatgtttgaaaaactgctttcgagatagtgtacaccaaggattacaacatctcaaaaagggattaatcaaacacgattaaaagttgctattactgctacaatttacacattatgtcagtaatatatcttaaccatgacttttattatttgatagacaagacagttataataccctta

SEQ ID NO: 132868 - DNA, 593 bp, Homo sapiens
cgtcgtgaacagttaaaaaaagaaaaagcagcatttggaaaacattctttaccaaggtttacctagtagtaaaatatttataagtaatattcattaatgagatttaacaataaagtgtccaacaataagataaatgttgttactatttcgaaacagcacacaaaatatagtggaaatgtatacataattccttaaaagtgcatattgtcatactcttagtcaaattttgcggtttgaaacggaacaaatccayggagtgagtttgatagagccgactgaaagtgcagctgctataatttgggcccagcatcagcattaaaaatgtgccattgtatgtattcctgttatgatgaataacaaaatagaagatagtgttctattgcaaatcacattcataaaaagtgagattctttaagcatgtttgaaaaactgctttcgagatagtgtacaccaaggattacaacatctcaaaaagggattaatcaaacacgattaaaagttgctattactgctacaatttacacattatgtcagtaatatatcttaaccatgacttttattatttgatagacaagacagttataataccctta

SEQ ID NO: 132869 - DNA, 593 bp, Homo sapiens
cgtcgtgaacagttaaaaaaagaaaaagcagcatttggaaaacattctttaccaaggtttacctagtagtaaaatatttataagtaatattcattaatgagatttaacaataaagtgtccaacaataagataaatgttgttactatttcgaaacagcacacaaaatatagtggaaatgtatacataattccttaaaagtgcatattgtcatactcttagtcaaattttgcggtttgaaacggaacaaatccacggagtgagtttgatagagcygactgaaagtgcagctgctataatttgggcccagcatcagcattaaaaatgtgccattgtatgtattcctgttatgatgaataacaaaatagaagatagtgttctattgcaaatcacattcataaaaagtgagattctttaagcatgtttgaaaaactgctttcgagatagtgtacaccaaggattacaacatctcaaaaagggattaatcaaacacgattaaaagttgctattactgctacaatttacacattatgtcagtaatatatcttaaccatgacttttattatttgatagacaagacagttataataccctta

SEQ ID NO: 132870 - DNA, 551 bp, Homo sapiens
caacccctcaatacagtacacaggaacttgcgtgctccatcagtgaaaattccttgagatgaattttaagtacaagaccagagtcaagccacctgccctgccataaagaaatatcagcaatctgacatatcaacagtattcacagatgcagatatatatatttatgggactctatcagcataaatccaatggctatgaataaaacatcctttaactctacagggactcaaatccaactttacaagcagagcattgctaaaccccttgccactgatggaaaaaagaaagaaagaaaraaaaaacagcaacaacaaccacaaaaaaaaacctccataacaacaatttctctaatatattatgctcacatttttatcagtctttaaacaacttcatcctaatgtttattttcagacatagagaaatgaaggccatgtaaaatttctaaattttcaattttactatagcttggaaggtgtacccctttgcaatctgataaatagaaatacgcatgatgacaaagcatacttccactgagacaataaaatatgtag

SEQ ID NO: 132871 - DNA, 583 bp, Homo sapiens
tgaaaaactccaggcaaataaaatgtatctccaaattcttaggtatgattattgggtaagaatagattgactataaagaatccccaaatgagaaatactgggaaatagtagccttgtattcagaaattgagaagactaaagtgtattttgatttcctactactattygaaaattctcataataccagcattataaaatatatgtatcagtgttcattgctagaataatgctagagggccaacatatatatttgtacatagttatgacaaggtagttttatgttggaaaaatctaatgtatgaagaaatatgctcctttcccaaattaaaatttaactttcagatggcatggatagagttatcgctgaagctctattatccataaaattgtcaaactatacttttgcttttatatgctgagtttacacataatttgaatataatcatgcagaaggagcatacttatttgttgatgtcttagtatctttcacaaagagatataaactatatagaggatattcatagttgcagaaagacagagttttggatttagaagaatctacttttgttatctaaagagctga

SEQ ID NO: 132872 - DNA, 570 bp, Homo sapiens
gggcagctagtcaaacaatgattattgatataggaggagccaaagaagtaaaagggaagagaggcccaagaaagggtaccaacactggtgagattcaactgagaccggaatgtcatatttaatgactaagtcatttcttggtgaactttacaaataatttaaatattgcagcgccaatgttttggaagataaatctggcatcattttgatgtctcaccaaaaccttaacttttaaatttaacttattttccatgctttgtctctgcctcccccgtcctctaacactcttacttttgacccctacttctgtcagagacactaaggaatgagtgtgctgagaaagcaggaaaggaaggtatctttccgaagtgatagtaggttttcatagagaaagtccagctgattagaagaatctacatgagaggcaaagtaaacattgtcttccaaatttcacactgattttgcatttgatagtttaatacttaagcgctatttaagattaattttaaaaatccaaaacttgaagccttaacataatgcaagaaccastgtgactcacatcgcatatcc

SEQ ID NO: 132873 - DNA, 559 bp, Homo sapiens
tactgatttctttcctctgggtagatacccaatagtgggattgctggattgaataattctatttttaattttttgagaaatctccatatacttttccacagtggctgtactaatttacattctcatcaacagtgtataagagttctcttttctcygcatcttcaccaacatccattattttttgtctttttaacagtagccatttggactggggtaagataatatctcattatggctttgattttcatttcttatatacttagtgatgttgagcaatttttcatgtacctgttggccatttgtatgcaaataactaacttctagagcaagaatggaatgggaaacaagccatttatgtttctactccgaatccagcactttagcaaatgttcctaatctattatggtgtaattcttacattatttctcaacattgcctcagacagccaccattaactgagtggaattgactagaattgctattggtgttctgaagtatgccttacggttaatcacattaagtccaaatctcttatatttggaatattacttttaaaata

SEQ ID NO: 132874 - DNA, 600 bp, Homo sapiens
attaggtaaatcttcaataactagcactaatctttgcccaaatgaggtaaggcctccatttctgattggaataattaattccttggcccacaagaaatcttaggctattaaaggttaaaaatcatgtttgtcttgagtttcttaatagtaatgggctttttatgtagtagatactcaaaagtcaactgagtcaactaggtaaagctgagcaggataaggctttattcccaatttgctttcatagctctgaatataagaaaatgactccaaaataaacattctgtggttctattaagctgttttcaactttacattataaaaatgcttaaaagttgagagattatacaaaatgaatacctgaattcaaagatatatctaaaatgcaaagcaagggtatttaaatatttgaatgtcaggtaacttttgagggaasaggaattggcattttctagcttctatatatttaagccaatttattagataattacaggtcttgcaaatagctagtagagttaatttggcaaaggtgaaagggaatctgctgtctttatcaatcttggaaaagtctgtactatattccctctggtagaacataattag

SEQ ID NO: 132875 - DNA, 573 bp, Homo sapiens
agtgctctcccccttcccctagggatggagcttcctgagagccgaactgccgtgattgttatttctcttctgcatctagctaccagtggatctacgagctaccaggctcaaggctggtactggggcatgtctgcaaagagtcctgtgatgttatttatcttcaggtctctcagctatggataccagcatttgctctggtggaggtagcaggggagtgaattggactctatgagggttcttggttgcagttttgtttagtgcactggttttgtgttggttggcctccagccaggaggtggtgctttcgagagagcatcagctgtggtagtatagggaggatacaagcttgccttagggttgcctgcataaatattcaggtttttcaggtggtagttgggcccatagagctcccaagaaatwatgttctttgtatttggctatcaggttggttagagtaagaccatcaatttgggccagggttatatgtgtctgagctgagattttctttatgtgtggcttgctgcagctgctgtgggggtcagggtatggttcttaggcttgctaacggagtta

SEQ ID NO: 132876 - DNA, 620 bp, Homo sapiens
agtgttaattaccatttatcattgtacatgcactatgacttttttcttgtatttgctcagcagtcatgaatttgcatctgctactgtagagggaaagctctccctggaaagccttttcctgtaaccctcttctcagggccagtgttaggccctctcttcctaatgcccccacagcatctagtccatacctcccttcaaaacttatcattttaaataagtgttcactttgtaatcttatttsctagacatgaatattttgaggtaaagctcttgtattttgttgtatcctctggaaactcaaaggtgtctgacatttaaaaagtgctgaatttatgtttgtttttaaatgagaggaattaaattttttttaaaacagattctaggatacaagacaatttccaggaataattatttctttatgatattctaatatttgtcagcaaaactcattaaaagggatactctgatgattgctgcagaacgaagccagactagggtgaggcaagagagtttctacagtgaaatttaaggagacactctttctcagggtaaggcaagtgcctccttaaattttgtgccatagagctacttaggaggctgaggcaggaggattgaggagg

SEQ ID NO: 132877 - DNA, 620 bp, Homo sapiens
agtgttaattaccatttatcattgtacatgcactatgacttttttcttgtatttgctcagcagtcatgaatttgcatctgctactgtagagggaaagctctccctggaaagccttttcctgtaaccctcttctcagggccagtgttaggccctctcttcctaatgcccccacagcatctagtccatacctcccttcaaaacttatcattttaaataagtgttcactttgtaatcttatttcctagacatgaatattttgaggtaaagctcttgtattttgttgtatcctctggaaactcaaaggtgtctgacatttaaaaagtgctgaatttatgtttgtttttaaatgagaggaattaaattttttttaaaacagattctaggatacaagacaatttccaggaataattatttctttatgatattctaatatttgtcagcaaaactcattaaaagggrtactctgatgattgctgcagaacgaagccagactagggtgaggcaagagagtttctacagtgaaatttaaggagacactctttctcagggtaaggcaagtgcctccttaaattttgtgccatagagctacttaggaggctgaggcaggaggattgaggagg

SEQ ID NO: 132878 - DNA, 591 bp, Homo sapiens
tgatagcggaatggccgactctagttaacaacaatgtattgtatatttcaaaatagctagatgagaggacttgaaatgttcccaaygtatagaaatgataagtacttgaggtgatggatatcctaaataccctgacttgatttttacacattctatacatgtaacaaaatatcacatgtaccccataaatatgtgcaaatattatgtattaatttaagaaaagattataaggcatgcaaaacagcaggtaaaaaatacctaaaaggagttcaattaaacaaatccagaactgatatagatgttataactaccagacaaggacattaaaacgatgattataactgtattttatatgttcaaaaagttacgtagatgaaaggtatagaaaataactgaatggaaattctcagagatgaaagcaacagtgtctgagatgaaaaatacaatggatagtgtacgagtcaggattcttcagaaaaacaacgtcaataggatacacacacacacacacacacaaatgtatgtatgtaatatgtgtgtatatataggatgcatagatgtgatgtacatttatgtgtgtgtgtgtatgta

SEQ ID NO: 132879 - DNA, 587 bp, Homo sapiens
atctccaattttaaaggctttattaaagtagctctagagttccatttccggaaacactgaacagcaaaatctttttgacaatttgctatcatgttacttagagactgagactcattccatttgcaaagtgtctaaaaagagggtattagacatttgaggaggatgaactgctttgatcaaactggttagtacattcagtcatataaccaktgaattctggtagcaagcttgatgattggggaattgttttttgttcctttagtatattgagtggttgccttaatgaatttacgaaaacactggggttttttttggttgcttgttttttgttattgcctcattgtagtccataaccataaaaataacctcttattgaacacaaaaatgaagcttaacattgaacagtaatggcaactcaataataaagcaaattaaaatggaaaaaatctactctgatatgtaccaaataaaatattattctttatctaatgtcttcttagctgtgcaattacaattatgattcaagttctatactgtgatatttcagcattataatagttttgtgttttattgtttttttttcaaga

SEQ ID NO: 132880 - DNA, 587 bp, Homo sapiens
atctccaattttaaaggctttattaaagtagctctagagttccatttccggaaacactgaacagcaaaatctttttgacaatttgctatcatgttacttagagactgagactcattccatttgcaaagtgtctaaaaagagggtattagacatttgaggaggatgaactgctttgatcaaactggttagtacattcagtcatataaccattgaattctggtagcaagcttgatgattggggaattgttttttgttcctttagtatattgagtggttgccttaatgaatttacgaaaacactggggttttttttggttgcttgttttttgttattgcctcattgtagtccataaccataaaaataacctcttattgaacacaaaaatgaagcttaacaytgaacagtaatggcaactcaataataaagcaaattaaaatggaaaaaatctactctgatatgtaccaaataaaatattattctttatctaatgtcttcttagctgtgcaattacaattatgattcaagttctatactgtgatatttcagcattataatagttttgtgttttattgtttttttttcaaga

SEQ ID NO: 132881 - DNA, 514 bp, Homo sapiens
ctcacttaatttgtttttcatatctcagacatccttctccctgtgatgtccaatgtcttgagagttgttgttttatatattttgtctggtattttagttgtttcagtcataagggtaaatacaatatctattcctccagcagaaatgggttttccagagttgtttgtgaaacataaataattttacattagtatcttgctgcaaaccttctaatagcttcctttcgaagacttcttactaacttatccacatccacagattctacatattctaatctgtgcttacctttcagagcttatctaccattctcaccccactttgttctcaaagggtgtcttgtttttycccaatatgccaagcttgttcctgcctcaaggcctttgctatagcacagcagtccccaacctttttggcaccagggaccagtttcgtggaagacaatttttccacagaccagggacgggggatggtttcagaatgaacctagcacattatatttattgtgtaatttatt

SEQ ID NO: 132882 - DNA, 248 bp, Homo sapiens
ttattaataattgaataaactaacatggtaattcagagcacacttccctgaccatcaggaaaggggtgaggaatggatttttcacataaacttttcaagtttactcttacctgtgggttgattagtcattacttccaacgagtaaaatrcatgtatataccaccatcagagttgtctgtaaaagcagtgagaactgccttgtgttaaatagtaagactaaagcattgaccgtcttaaagataaaaaca

SEQ ID NO: 132883 - DNA, 584 bp, Homo sapiens
gtaggctgggaagctaggtcggtctctgctttcacatttttctgcccactttatatcctagctgtgctggcagmtgattagattgtgcccacccaggttaagcgtgagtctgcctttcccagcccactgactcaaatgttaatctttggcaacacccttgaagacacacccaggatcaatactttgtatccttcaatccaatcaagttgacactcagtattaaccatcatatgtatcacaaatattttctcccattctatgatttctctttttattttcttagtggtatttttcagggaacataaaattttaattttgaaaaaatctaatttattaaagttttttttacaactttttttttttttgcattctaagaaatcttcgccacctccaagattgcaagtatttactcttgtgttttatcctagttttataggttaacttcttatatttaaatgtgtgatctattttgagttaatttttgtgtatcacgtgacgtaagggttgaggtccatttttttgcctagtaatatccaattatttcaacaccatttgttggaaagttatccttttctcattgaatt

SEQ ID NO: 132884 - DNA, 584 bp, Homo sapiens
gtaggctgggaagctaggtcggtctctgctttcacatttttctgcccactttatatcctagctgtgctggcagatgattagattgtgcccacccaggttaagcgtgagtctgcctttcccagcccactgactcaaatgttaatctttggcaacacccttgaagacacacccaggatcaatactttgtatccttcaatccaatcaagttgacactcagtattaaccatcatatgtatcacaaatattttctcccattctatgatttctctttttattttcttagtggtatttttcagggaacataaaattttaattttgaaaaaatctaatttatyaaagttttttttacaactttttttttttttgcattctaagaaatcttcgccacctccaagattgcaagtatttactcttgtgttttatcctagttttataggttaacttcttatatttaaatgtgtgatctattttgagttaatttttgtgtatcacgtgacgtaagggttgaggtccatttttttgcctagtaatatccaattatttcaacaccatttgttggaaagttatccttttctcattgaatt

SEQ ID NO: 132885 - DNA, 368 bp, Homo sapiens
tgcttttagtatatggtgtgcttacagttcagtttctttggtttcctatggtttcactataawgtttctggcagtgctgttctttaaatttatattgtgtaagctctattaggcttcttgaatctattcattgatgtcttctattagtccttaatattcttggctatcatatcttaaaacattgcctttagtttattctgtctgttttcttcttcaaacacagcagagttattttatagtttgtgactaataattccaacagacattatttccagtcattatgggtctatttgtgttgtctgttgtttctgctggtgttgttcagtgaactctgtttccatgtatgactggttgtttttgacaatgtg

SEQ ID NO: 132886 - DNA, 523 bp, Homo sapiens
  misc_feature (1)...(523): n = A,T,C or G
tgcaagtaacaggaagccctgactcaactccacttaagcaataagggattttcttatcacacacaaaagaaaacattagaaggaaaatatctctggagttgattaagttttgcagctcaacaatannnnnnnnnnnnnnnnnnnnnaatatttgtgctttgccatcatgaggatgatagatgatgagttgtccttaattttgacccttacagtcataatatgactgcaactatcccagctgaagtggaagaagaggtcgactcacatctcttaagagtaagagaccttccccagtctcccagcaacaccggmtcacacgcctacttctaaaccaatcactgtcaagggaatgggatagccatgtggatttagaccaatcaggattcactcctggactggggatttaggagctcattccccaagagtggacaggtaaacagaaccaaattccttctggaggaaggagagtagggtggacagatattagggagacagctcacagtaattgtcttgttcccacttc

SEQ ID NO: 132887 - DNA, 428 bp, Homo sapiens
ctggtcaaatagccatgggctggtcaatgattttgagttactctttgagagggaagcttggcttcagagaaggaaaggccagtgcaagacatgtgagcagcagttaggtgcatcctattcctagacacatacataggataaggaagtcaggtattgggactgtagctttggaatggactatacttgcttcagaatattatcagggggagtttgagaagcaagggctttccttcgttgattctcctttcaccagtcttcctggaaagaatattctgcagttacaaaataggttccttggctgcmagtctgatacttgtgctaaaaccaaatagatgaaaaagtatcaacatgaattttaaaaaatatattgtgtgagcttgtatagctaagaattcccagccccctacataggatctgaagaaagatct

SEQ ID NO: 132888 - DNA, 512 bp, Homo sapiens
atcttcacatgattaaggagggctattatgcccattgcacagatgcagaactgaggctcagagaggctgagcaactcaccttaggacacacagcaggtgagtgagaagcagggctccacgtgtctcctgcttagaccttgttgaccacagagggcagacgaggygctgctgttgccgaggaggagcaggggggtgagagaggcacccagggtgagcctggggttatctagcccagctgggccagggcaataggcccttggggaggcccccagtaggatctgggccctttctgcctgaaaggagaggaggaagtagttttgtttgtctgcctggggtacgagcacacggccagagctggccaatctgttaggcacacagggcctgcacccaggacccaagtgctgtgtgggacttcccaaagggcttcagcttatttaaaatcagaagaaaaaaaactgaacatcctaataataaatatacaataaggaatccagcctggaccacatcggtct

SEQ ID NO: 132889 - DNA, 503 bp, Homo sapiens
tccttatctgtagaacaggggttgcgatagcatgcaccacgccatccatgctacctgatagtgggattttcacatctttccctcgtcctgaggaccagctgttttgggcttattggggtccccagtactctagggagatcartggcagcttttgggaaactgaagactccaaatgttttccagaaatacacacattccagtttcagaggtgcagcctcaccatgatctggagttaagcaatctcattctctgcgcgtggatccctccgcccatccctgtccccagcctttctccctctggttctgaccccaacacggggtcagagaaactttctaacaaatacgcctgccctctttctgcctagaacctgctatggctccctatggcccaaggcagtggttcttagactgtcttaccaaaatactctgaagggctgaagggctcagacctagtccctcatttctgggctttggggagcttggctagaagagactcgcccctac

SEQ ID NO: 132890 - DNA, 531 bp, Homo sapiens
aacatccatgtatatagccagggaacaactttatctgctaggaagagagtgacttgcttctgggctcacgtgacaaaaaactcacacttgaatgatagacacatctttttctttctgtttgttggcagattgtccactatagtagtttgcatgctaagcagaattggagggtgtgaaggaaacgagaagataacaacgtgcctaaacaatttttcttctttcccccagcatgaggagtatacatcagaagtttatttcccctatagtcagtacctaactatctttatggagatgctaatcaacttctttaataatgcttctggaataaaatactaccactgttcggggtcaaagacacacaccktatttttttgtctttgcatatatgttagagcctaattcattctatagtgtctatgtatgtcattgtacatagtatttatctatctatatcattgtacatagttgtctgcattttatgatgttggaatagagatttggatttgcaattgagatacatctatattgact

SEQ ID NO: 132891 - DNA, 628 bp, Homo sapiens
gaattcaacatttcttcataatgaaaactctgaacaaactaggaatagaagaaacatacctcaaaataataaaggacatatatgacaaactcacagctaatgtctttatgaatggrgaagaggtgaaaacctttcctttaggaactgaggctgggcacggtggctcatgcctgtaatcccagcactttgggaggctgaggagggtggatcacaacgtcaggagtttgagaccagcctgaccaacatggtaaatcccatctctactaaaaatacaaaattatctgtgtgtggtggtacatgcctgtaatcccagctactcgggaggctgaagtgggagaattgcttgaacccaggaggcaggggttgcagtgagccaagattgcaccattgcactcccgcctgggcaacaggagcaaaaactctgtctcaaaaaaaaaaaagaactgaaacaagacaaagatgcccactttcaccattcctattcaacattgcactggaagttctgccagagtaataaggcaagagaaagaaataacaggcgtccaaattggaaaagaggaagtcaaattgttcctctttgtgatatgatcttctacctaaaaaaaaaaaactaaagactccatcaaaa

SEQ ID NO: 132892 - DNA, 406 bp, Homo sapiens
tgtattatatcattaaaaattctagagagatctgcatttgcctcaattacctactgagaatggagaggtctagggttaaactttcaccttgccaatgacttcgaccatgagaaaaactgatttgtcataaaatgagaaaaaaatttgctgggagttgcttttctctttgctctccagaacktgcagcattgtcacagacaatgaataagaatgctaactcatatagcaagggagaaatgtaaaaaacaaaacaaacaaacaaaaaaccaatgctaacatacttccttgtcttaggataacatccctagggtaagacacataaaataaaaatcccaaatatgaaattaaaattaaaagactaattttctaacatgttttttgaatttttttttttgttttgggaatt

SEQ ID NO: 132893 - DNA, 598 bp, Homo sapiens
ccagcaagttctggttatcattattctcattttatcttctttcttttttctctctcatcagctttttgctttcttccctccttcttttattcactggattccgaggatcatagatttcaaatgtatctgagtcttgcatgcttgcatctttcacttttctgcttttatcctcaaactgaagtacatgtgacatcctaaatagggagagagatggttcagtgatttcttgcatgggaacttacagtagaaattctatactctactatcatcgacataatgaaacataagcatayagaacactaagatgggtttgttgtttactggtgcttacaccacatggaaaccaacttctcagaaaacccttaaatttgaaaaacatgtctggagtttgttctgctggtttgtatttctagtagagagtctctttgcctcagtcttcacttgaggtttctcccctgttgggaggttaaaagagttctatacagaagtgttcctcaaagtaaactcagaggacactgtctgcttcctttaaagaacacattcctttagccagagtgagtcaggttgcagagcaaaactcaagacaataagccagccc

SEQ ID NO: 132894 - DNA, 379 bp, Homo sapiens
gaattcaaatttaatatttaacttttcctccacagcaacatagtgagttctcacctccacaaaaagtaaaaaaaatattaggccaggcacggtggttcatgcctgtaatcccaataattttggaggctgaggcaggaggatcacttgagcccaggggttcaagaccagcctgggcaacatagtgagaccacgtctcaaaagaaagaaagaaaagaaggaaagaaggaaagaaggaaagaaagaaagaaagaaagaaagaaagaaagaaagaaagaargaaggaaggaaggaaggaaggaaggaaggaaggaaggaaggaaggaaagaaagaaagaaagaaagaaagaaacaaacaaacaaacaaccaggcatcgtggtg

SEQ ID NO: 132895 - DNA, 379 bp, Homo sapiens
gaattcaaatttaatatttaacttttcctccacagcaacatagtgagttctcacctccacaaaaagtaaaaaaaatattaggccaggcacggtggttcatgcctgtaatcccaataattttggaggctgaggcaggaggatcacttgagcccaggggttcaagaccagcctgggcaacatagtgagaccacgtctcaaaagaaagaaagaaaagaaggaaagaaggaaagaaggaaagaaagaaagaaagaaagaaagaaagaaagaaagaaagaaagaaggaaggaaggaaggaaggaaggaaggaaggaaggaaggaargaaagaaagaaagaaagaaagaaagaaacaaacaaacaaacaaccaggcatcgtggtg

SEQ ID NO: 132896 - DNA, 379 bp, Homo sapiens
gaattcaaatttaatatttaacttttcctccacagcaacatagtgagttctcacctccacaaaaagtaaaaaaaatattaggccaggcacggtggttcatgcctgtaatcccaataattttggaggctgaggcaggaggatcacttgagcccaggggttcaagaccagcctgggcaacatagtgagaccacgtctcaaaagaaagaaagaaaagaaggaaagaaggaaagaaggaaagaaagaaagaaagaaagaaagaaagaaagaaagaaagaaagaaggaaggaaggaaggaaggaaggaaggaaggaaggaaggaaggaaagaaagaaagaaagaaagaaagaaasaaacaaacaaacaaccaggcatcgtggtg

SEQ ID NO: 132897 - DNA, 574 bp, Homo sapiens
aagcttttccgggaaaacaactaccttacccatccatctttgtatctccggcgcctagtacagtgcccagtgcctcgcaggcgttcaattaatgattgtagaagaaatggagaatgaatgaccttagttaagcaaagaatatatcaaactcaaaaatgtctgtttaaaaacctaagaccccagaaatcggctgcatgagttgggttaaagcattaaataggaccggaatgctggtaggtagagaaatctccacttgacttcttcaagtacatcctgaaaagtaccaacatcagtgtttcgatgcaacattgtccacatgcaggagtaaagacaacacttctcgtggtctcttcctaccacgagatcctgaaacccactccccaccccaaatccgggaaatctcactttggggatcccaggaccccaagttccctagatgaggctctcaccttcccattcgtgggaggctcctggatgtagatgttgctcatcttggtcagtacaaaggactctgctccttaygggggatgagagcggccggccggccactaaagctgtccgcctacgagtacac

SEQ ID NO: 132898 - DNA, 473 bp, Homo sapiens
tcctgtaacaactggccatggtgcagttgcattcggtgttcagctgaaaaatccagaaagtttaagaaacgcaagacatgaaggtaaagaaagtgagaactttctagagagggaggcagccagaggaaaaaaaaaaggcaaaggaaatagggagaaagagaccttcagtcagttttgatgtgctgtaggaacttcttttgtctcctttttgtttgatattcccattttcttgattggtttgttcacaaagcctttttaaaataaygatgataatgcatgcttattgtgataagccaaacaatgcttgggtgtataaacaaaaaggtaataatagtcttacgatgggagaggaggcgattataacattcataaaatgtacaagatagagcattgtttctccctcttcatttctgcttccttcccttggccaggggcttgattggatcccagacgtcgaattttaccttgttggg

SEQ ID NO: 132899 - DNA, 582 bp, Homo sapiens
aagaatatgcatttgcccttaatcagcagctsagaatgtttgcactgcaagttctagccagagaacacaattttgaattctttgctgttcaattcctatcaaaatcttgcttttgagaaattataatgaaggaggattgactgaggctataaaagccattgaatgtattttatagtctttgtattacaccatcagaatgttgcatacttacactatgtagcctcttctaaaattgatttaaatcaattgtatcgcacatgtgacattagcttgcatggaataaacaaaggaaccctacttaaagttcttaaaggggtatcactaaggaagtgggttgttacatctcatagtatgattttaatgaaaatttatggaagaagttcttttcagatctctggtatcaagaaagctatctgtacctaagtttaaaaagaactcttatgagtaccacgaatgttttcactggttttatttcattctttgcttttactgctaggaagcactgagatgaatctgcagcccacctctatcatatatattaataggtgcatttataaaatgcatttttaaaaaatgtgctaa

SEQ ID NO: 132900 - DNA, 569 bp, Homo sapiens
gccttggaatcctgaaaatcagcagtctagcagccactggaggtgatggaacagtagtctgtctagcagccattggaggtgacaaagcagccacttttggagctcctgtaaaaccccatcctgagaaaagtattgctatttgacctgtattgcaggcaatttcttgaaaagctccattctcaagagttatctttatttggactgtcttagagctagctctataaaagcagctatatttcaagtaaaaaaaaaaaaaatccgtggcaactgtataaccccacagcaatctgaggcagcaataccagtcaaggtattggtgaccaagtaatctgaaagatgtccatagggaactttagaaaggttgtacatgttccagaaatcwagaagtacatgtacatgtgtgggtctgtgcatacggcctggaaagacctgagatcccaatctctcacctctggctgaacttaaggctttgtgccatcaggaagcaatagctaaggtagagttgtgaaatgcccactggcacattgaagatgtacttgcaacacagagagagagcccttcagcaaagg

SEQ ID NO: 132901 - DNA, 569 bp, Homo sapiens
gccttggaatcctgaaaatcagcagtctagcagccactggaggtgatggaacagtagtctgtctagcagccattggaggtgacaaagcagccacttttggagctcctgtaaaaccccatcctgagaaaagtattgctatttgacctgtattgcaggcaatttcttgaaaagctccattctcaagagttatctttatttggactgtcttagagctagctctataaaagcagctatatttcaagtaaaaaaaaaaaaaatccgtggcaactgtataaccccacagcaatctgaggcagcaataccagtcaaggtattggtgaccaagtaatctgaaagatgtccatagggaactttagaaaggttgtacatgttccagaaatcaagaagkacatgtacatgtgtgggtctgtgcatacggcctggaaagacctgagatcccaatctctcacctctggctgaacttaaggctttgtgccatcaggaagcaatagctaaggtagagttgtgaaatgcccactggcacattgaagatgtacttgcaacacagagagagagcccttcagcaaagg

SEQ ID NO: 132902 - DNA, 614 bp, Homo sapiens
ataggtatcattgtagccacctggctcaggctcatataggaactttttttcagtaactcttatgtaggtcctatggacaacatgacttctattttattgtttaaaatgtaggcaaataactatgatgcaggagcacaaaatgaactgttacttctttttttaaattgagatataattcacatcataagttcataattttaaagtacacaatctagtagttattagtatgttcactatattgtgctgctatctttctatccagttccaaacactaatttccattctactccaaaaacatcacttatccttcagcagccagtcctaattttccccttctctcatctcttttggcaaccactaacstattttctttatggatttttctattttggaatttccatgtaagtgatattatacaatatgtggctttctgcgtctgacttcatttgtttagtgtaatgcttttaagattcctccatgctgtagcatgaaacagtactttattcctttttatggctgaataatattacattgtttggttataccacaccttgtttatccattcatcagttgatggacatttgggttgtttctcctttttggctgtagtgagc

SEQ ID NO: 132903 - DNA, 427 bp, Homo sapiens
caaacactaatttccattctactccaaaaacatcacttatccttcagcagccagtcctaattttccccttctctcatctcttttggcaaccactaacctattttctttatggatttttctattttggaatttccatgtaagtgatattatacaatatgtggctttctgcgtctgacttcatttgtttagtgtaatgcttttaagattcctccatgctgtagcatgaaacagtactttattcctttttatggctgaataatattacattgtttggttataccacaccttgtttatccattcatcagttgatggacatttgggttgtttctcctttttggctstagtgagcaatgctgccatgaacgtttatgcacatgtttttctgtgaaaatatgtttttaattttcttgagtacatacataagagt

SEQ ID NO: 132904 - DNA, 561 bp, Homo sapiens
tccaggctcttttggttcttttgtcttaggagagcttttagtttgttctctgacagcagaaggaggggttgtttcacagcacatatgtggtgagtgggttttgagtatttataatcccactctttgcgaagattcctgtgcatatttttcctatataacatttccaagatctacatgttcttgtggtcagtattagtattagagaatactgtgaaagraccctccagaaataactaatattggttgtcatacaagcccatgttggtaagtattctgttagatttaattaaatttaaagaaagcaaagtaatgtgacacttctggcctatttaagtactttgtaggatgagagtcactcctcgaacactggttctgatataaattccaaactaggagcactgcaactatgttgaactattgtgaaataaaataacttctttgcagggtgactttgaagtgcaacatccatttggatataagttttcatggcatgtacttaggaatgttctcatgtttgcattatctttgaaaggtcattaaagtcacataagtttgtaataa

SEQ ID NO: 132905 - DNA, 561 bp, Homo sapiens
tccaggctcttttggttcttttgtcttaggagagcttttagtttgttctctgacagcagaaggaggggttgtttcacagcacatatgtggtgagtgggttttgagtatttataatcccactctttgcgaagattcctgtgcatatttttcctatataacatttccaagatctacatgttcttgtggtcagtattagtattagagaatactgtgaaagaaccctccagaaataactaatattggttgtcatacaagcccatgttggtaagtattctgttagatttaattaaatttaaagaaagcaaagtaatgtgacacttctggcctatttaagtactttgtaggatgagagtcactcctcgaacactggttctgatataaattccaaactaggagcactgcaactatgttgaactattgtgaaataaaataacttctttgcagggtgactttgaagtgcaacatccatttggatataagttttcatggcatgtacttaggaatgttctcatgtttgcattatctttkaaaggtcattaaagtcacataagtttgtaataa

SEQ ID NO: 132906 - DNA, 609 bp, Homo sapiens
tgggtattggtgcttgggggtgttttccaacacttccctctaaagttaggttccccatttcccagagttrattgaccaggatgagtcaaagtcaggacagtaatcatcttgaaggagagatcctgggggttcttatacagaactaggtatcaattcactttcatggagaccagttattctcccagaatgacctttaactcatgtgggccacagtcctctccagtaacttcgattagataaggactttggttatcatattggttcatacctcgcagctagtagaaactccccagaggtgctaaggtactctgtgctcaaaacatcagtgtatgtattccaatgagacaaaaattcaccaggctagtaaggcccttgtccaaagctccaaaatattatgtttctataaaatgaaaaattttttatatcaaactcattattcgatcttggttaacactagaggttcagagcgtatacactcttcgatgtatatatatgaaataaacttttctgtattacttttgtgtattgctctgtttctcattttaagaaagaaactgttttgcttcaagatgctggaatagtccttaaaaatatgatctgtttggtatc

SEQ ID NO: 132907 - DNA, 609 bp, Homo sapiens
tgggtattggtgcttgggggtgttttccaacacttccctctaaagttaggttccccatttcccagagttaattgaccaggatgagtcaaagtcaggacagtaatcatcttgaaggagagatcctgggggttcttatacagaactaggtatcaattcactttcatggagaccagttattctcccagaatgacctttaactcatgtgggccacagtcctctccagtaacttcgattagataaggactttggttatcatattggttcatacctcgcagctagtagaaactccccagagktgctaaggtactctgtgctcaaaacatcagtgtatgtattccaatgagacaaaaattcaccaggctagtaaggcccttgtccaaagctccaaaatattatgtttctataaaatgaaaaattttttatatcaaactcattattcgatcttggttaacactagaggttcagagcgtatacactcttcgatgtatatatatgaaataaacttttctgtattacttttgtgtattgctctgtttctcattttaagaaagaaactgttttgcttcaagatgctggaatagtccttaaaaatatgatctgtttggtatc

SEQ ID NO: 132908 - DNA, 609 bp, Homo sapiens
tgggtattggtgcttgggggtgttttccaacacttccctctaaagttaggttccccatttcccagagttaattgaccaggatgagtcaaagtcaggacagtaatcatcttgaaggagagatcctgggggttcttatacagaactaggtatcaattcactttcatggagaccagttattctcccagaatgacctttaactcatgtgggccacagtcctctccagtaacttcgattagataaggactttggttatcatattggttcatacctcgcagctagtagaaactccccagaggtgctaaggtactctgtgctcaaaacatcagtgtatgtattccaatgagacaaaaattcaccaggctagtaaggcccttgtccaaagctccaaaatattatgtttctataaaatgaaaaattttttatatcaaactcattattcgatyttggttaacactagaggttcagagcgtatacactcttcgatgtatatatatgaaataaacttttctgtattacttttgtgtattgctctgtttctcattttaagaaagaaactgttttgcttcaagatgctggaatagtccttaaaaatatgatctgtttggtatc

SEQ ID NO: 132909 - DNA, 609 bp, Homo sapiens
tgggtattggtgcttgggggtgttttccaacacttccctctaaagttaggttccccatttcccagagttaattgaccaggatgagtcaaagtcaggacagtaatcatcttgaaggagagatcctgggggttcttatacagaactaggtatcaattcactttcatggagaccagttattctcccagaatgacctttaactcatgtgggccacagtcctctccagtaacttcgattagataaggactttggttatcatattggttcatacctcgcagctagtagaaactccccagaggtgctaaggtactctgtgctcaaaacatcagtgtatgtattccaatgagacaaaaattcaccaggctagtaaggcccttgtccaaagctccaaaatattatgtttctataaaatgaaaaattttttatatcaaactcattattcgatcttggttaacactagaggttcagagygtatacactcttcgatgtatatatatgaaataaacttttctgtattacttttgtgtattgctctgtttctcattttaagaaagaaactgttttgcttcaagatgctggaatagtccttaaaaatatgatctgtttggtatc

SEQ ID NO: 132910 - DNA, 602 bp, Homo sapiens
ctatggaggcagagggtgtatggtctgcacttcacccagccacatttagcccagtacttaggattcagtaaggccaaagcaaacacacattaagtaaagaacaaaaacttgaagtgcaaacaactctagtcactgaattgataaatagtgtctcttgctgtactataagctctatcagtggaggaaccgtgtctgtttttctcaccattttatcctctgtgtttatcacagtgctttacacataggagctgctcagtaaagaggggtttaatgagtgaattaattgaccatagttatatcagtgtctttaagataaatactaggaaagaatagttatttaaaatttaawcgaagtcaccttgagtccattttgcccaggtgtgacagactggttattttactacaaactttcttttacatttgatttgttacatgacttcagttagatcagattttctcaagcttgggactgatgacatatggactggatgattttttggtgtgcatgtgtattatgtatgtttggggggtgtaggctgttgagcagcatccctcgcttctactaattagataccaatagcacatccttcatacacagctgt

SEQ ID NO: 132911 - DNA, 602 bp, Homo sapiens
ctatggaggcagagggtgtatggtctgcacttcacccagccacatttagcccagtacttaggattcagtaaggccaaagcaaacacacattaagtaaagaacaaaaacttgaagtgcaaacaactctagtcactgaattgataaatagtgtctcttgctgtactataagctctatcagtggaggaaccgtgtctgtttttctcaccattttatcctctgtgtttatcacagtgctttacacataggagctgctcagtaaagaggggtttaatgagtgaattaattgaccatagttatatcagtgtctttaagataaatactaggaaagaatagttatttaaaatttaatcgaagtcaccttgwgtccattttgcccaggtgtgacagactggttattttactacaaactttcttttacatttgatttgttacatgacttcagttagatcagattttctcaagcttgggactgatgacatatggactggatgattttttggtgtgcatgtgtattatgtatgtttggggggtgtaggctgttgagcagcatccctcgcttctactaattagataccaatagcacatccttcatacacagctgt

SEQ ID NO: 132912 - DNA, 602 bp, Homo sapiens
ctatggaggcagagggtgtatggtctgcacttcacccagccacatttagcccagtacttaggattcagtaaggccaaagcaaacacacattaagtaaagaacaaaaacttgaagtgcaaacaactctagtcactgaattgataaatagtgtctcttgctgtactataagctctatcagtggaggaaccgtgtctgtttttctcaccattttatcctctgtgtttatcacagtgctttacacataggagctgctcagtaaagaggggtttaatgagtgaattaattgaccatagttatatcagtgtctttaagataaatactaggaaagaatagttatttaaaatttaatcgaagtcaccttgagtccattttkcccaggtgtgacagactggttattttactacaaactttcttttacatttgatttgttacatgacttcagttagatcagattttctcaagcttgggactgatgacatatggactggatgattttttggtgtgcatgtgtattatgtatgtttggggggtgtaggctgttgagcagcatccctcgcttctactaattagataccaatagcacatccttcatacacagctgt

SEQ ID NO: 132913 - DNA, 653 bp, Homo sapiens
aacaagtcaaaaaggaactttgaggggaagaacagagatgtttaacagagatttttaaattaagatttactatgtggtgtgtgtgatgtcattttcctcttcacctccccaagaagtatttggtaaaatctacaacattaattatttcttagataatttagacttaaagtttggtacctaaaacaaaaagctgtgtcctggttcagacaaaacatgaagacaatgacaagattttccactgatccctgtcatgtctgcatttacatttcacaggtatttatgaggcaccaactatgagtcagggacaatgtacatagaattcagaaataaacaagatagacacagtctctgccctcatggagaaaratagacaataataaatacataataaatcatatttctatttaacttgctattggtctgagtaattttatttaaacaagtaatatgtgtaaagacaaagtataggatactgtaataacatataacctaacctagactggagagccactgaagttcagacttggaggttgaggaagaaccaatcagacaacagtggcctgggtcagactgggggtagtgatgaagattttctcagacatacagaaaaaccttgtgataatactgtgagggatcaaagagttcagtttatt

SEQ ID NO: 132914 - DNA, 399 bp, Homo sapiens
gaaatctggaagaaggcagagaggcatgcgtagagctaggagaccagttaggtgtctaatagccaggcaaaagaaggtggtagctaggggtagagrtgtaggaaagtagacagaccatgggggtatatttggtaagtaaagtagagggaatttgatgaggaattatgcaggaaaggggaatgtcgaggatgaagcctacattcctaggctcgcatgaccaaatggatggtgttgacttttgctgagtcatggagcactggaagacaagaaatgcggtggagggcaagcaatggcgctcatgaggtcaatcctcaatagactaaacggtctttcaaacagctaactagagattctgaataggagctcagaacagcctcataggctggaaatgtaagcaca

SEQ ID NO: 132915 - DNA, 424 bp, Homo sapiens
gaaagagagaataagagagaaatctggaagaaggcagagaggcatgcgtagagctaggagaccagttaggtgtctaatagccaggcaaaagaaggtggtagctaggggtagagatgtaggaaagtagacagaccatgggggtatatttggtaagtaaagtagagggaatttgatgaggaattatgcaggaaaggggaatgtcgaggatgaagcctacattcctaggctcgcatgaccaaatggatggtgttgacttttgctgagtcatggagcactggaagacaagaaatgcggtggagggcaagcaatggcgctcatgaggtcaatcctcaatagactaaacggtctttcaaacagctaactagagattctgaataggagctcagaacagcctcayaggctggaaatgtaagcacagaaatca

SEQ ID NO: 132916 - DNA, 620 bp, Homo sapiens
agatgattcacagatggagaaactgcaccagggagtttgttgatgattaaacaatttgttgataatggctcaggttttaacaaataactcttgatggaaagtatgtgacgctgaaggtatctaactcaatggtggaatgttgaccagagaaggatatttgaaaggcagaagattatctctggtgctctctcattcaatgtcatttatcctaaaagaagaaaataagtctttctgtgtcgcaaacaaaaatattttgcatcattcctctgattgtacagttttaaatgcaaccaatgtagtcatcaaaaatcatgtttttgatatatatttaatcacagagaaagctgtttacagcatgttagagtgaaagtagaattacaaaaccttttttaaaaaatcattcatcctataaacaaatagggctcaaatcaaactctgtaagagacagttactcaccagttcataaggttgacccttagagcttccttccctgcccctacctgcagctctcatggtgcgaagacatctttctgccttgattgccaagacaaatccacagcatcatctgaatatttccraactatccacaaaattatatagcaaacaaaatttatttagtt

SEQ ID NO: 132917 - DNA, 520 bp, Homo sapiens
ggggaaactgaacagcaaatcctagtttgccctcctcacaccttctatgcagttgaaagtgtaaatggaatcagggttaaaagtgctaaaggtcacacacagatattttcagtcatatccaaatatatgaatcatttatrttgtcaaagcgacctaaaatactttagaattttctattaatccaatgtaacatccccattctaaggcataatttgaattatttactaagatttattttaactacttaattatgttgaacttgaatatattaatatggctagtttaagtgactatgtgacaactagcttagctgacttctggaaacccaaaaatatttctaaaattaaaggggaaagcaaggcaataaaaatgttacacagaaacaagtagtatcaaaaaggaagagctatccatgattgatcagctctgtataacaccaaagcaacactgaaaagagaaaagttcaagtaatccgttgttttctcagttatatatatatatatatatatatattacataa

SEQ ID NO: 132918 - DNA, 459 bp, Homo sapiens
aactactgatggtaatattaaataggcaaatacctagagaagaactagttattaagtgtgcaaaccactgctactctatggaaagctaaaataagggaccagaaaataaaacataccaaagtaactacagcatgctactcaccttcagccaatgaataatccaggaaggtggctcttactttgattgacacgttgtttccaacataaagtaggggaaactgaacagcaaatcctagtttgccctcctcacaccttctatgcagttgaaagtgtaaatggaatcagggttaaaagtgctaaaggtcacacacagatattttcagtcatatccaaatatatgaatcatttatgytgtcaaagcgacctaaaatactttagaattttctattaatccaatgtaacatccccattctaaggcataatttgaattatttactaagatttattttaactacttaa

SEQ ID NO: 132919 - DNA, 550 bp, Homo sapiens
ttatgggtcacttggttcagcccccttattatcagccgagtgaagagagctcctctatgggacacagctggtcagtagccaacccaggattagcgtgcaagtctgctaatttcccatccaattttttcctctttacacacactatctctggacacctgctttttacaaatgactgcattactcccaagtgactgttctttttcttaagacaaaaaggaaccatttccctggctgattgattgttcatcatttgctctcaactttctgcaaaactatctcagttaaaacatttatggtcatccttcctagagacactgagggcaggggaggtattgtcggtcagaagagcacttccatggtgttcatatcayatttcatgatttactactgctgactcaactaatgcctaaggccatatctcttccacataactacgctcagtttaggatggtgatttgcaagccaggggatatttgctgccccccaggggacatttgtcaaaatgtaaagacatttttggtttttacaactagagcatcctactggcatc

SEQ ID NO: 132920 - DNA, 564 bp, Homo sapiens
gggtggagtaaagagttaactatgtgttttctcccgaacacaatctttcacaatatcctccaatcttatccatattcttattgtttaaaattgaatgtgcactttattttcagattttaatttgttaatttagttcctctgggatgaaaagaagttgaaaatttatgcaaacactttgttgtctgtctagaatattaattacatatctatagatataatatgccacatactatagcaatgatgcatatgcatatataacaaacagatatccagagataatctttccttgaaaccctacatcagttcatatagggctcctctgtcacccaaagccagctggggttcagacagaccaaggttactagcagcttacatgacagagaaacacatacacattgcaycacattgggatttgcccagaggattttaatacatgtagtacaatgctgtgtgcactgattattattatcattattttttgcacttccactccccatccgttctccatccttctctctcctcctccatgccctggaagggtgagccctggagacatcatctccc

SEQ ID NO: 132921 - DNA, 611 bp, Homo sapiens
gggaggcctcagaaaactaacaatcatggtggaaggtaaaggggatgcaagtatgtcttcacagggcagcagaggagaaagagcaaaaggggaagtgctacacacttttaaacaaccagatctcatgataagtcatccactattatgagaacagcaggggtggagccacmcccatgatttaattacctcccaccagacccacttctaacactgggaattacaatttgacatgagatttgggtaggaacacagcaccaagctatatcattccaccccgggcacctcccaattatcatgtttcaaaacaaaatcatgccttcccaacagtcccacaaagtcttaattcattccatcactaactcaaaactccaagcccaaagtcttatctaagtcacggcaagtcccttctgcttatgaacctgtaaagtcaaaaacaagttagttactttcaaggtacaataacagtataggcattgagtaaatgctccccttccaaaagggcgaaatcagccaaaacgaaggagctacaagccacatgcaagtctgaaacccagcagagtcatcattaaatcttaaagctccaaattaatcttctttgacttcatgtctca

SEQ ID NO: 132922 - DNA, 653 bp, Homo sapiens
aacaagtcaaaaaggaactttgaggggaagaacagagatgtttaacagagatttttaaattaagatttactatgtggtgtgtgtgatgtcattttcctcttcacctccccaagaagtatttggtaaaatctacaacattaattatttcttagataatttagacttaaagtttggtacmtaaaacaaaaagctgtgtcctggttcagacaaaacatgaagacaatgacaagattttccactgatccctgtcatgtctgcatttacatttcacaggtatttatgaggcaccaactatgagtcagggacaatgtacatagaattcagaaataaacaagatagacacagtctctgccctcatggagaaagatagacaataataaatacataataaatcatatttctatttaacttgctattggtctgagtaattttatttaaacaagtaatatgtgtaaagacaaagtataggatactgtaataacatataacctaacctagactggagagccactgaagttcagacttggaggttgaggaagaaccaatcagacaacagtggcctgggtcagactgggggtagtgatgaagattttctcagacatacagaaaaaccttgtgataatactgtgagggatcaaagagttcagtttatt

SEQ ID NO: 132923 - DNA, 611 bp, Homo sapiens
tactatagctttatgtctagcttaccaaataaggggtgaagtgtgccccagagaacgctgttactgtagaaacgtgtcttagccccaatttccactcattggtaagttctttttcctttctctcttttgcaaggtttcaaataaaattgcctttctagagcacttccccaatccatattcagtttataatctaaaatgtattttacaaagaagtaaatggattgttcrggctccagagatgtcttttttcatgcacaggattttttacttttaacaggatacaatgagtgatcaagcactcgaggctctgtcggcttcactgggcacccggcaagcagaacctgagctcgacctccgctcaattaaggaagtcgatgaggtactgaccttagagttgatttacaaagcttgttagtctgcacattacaaaaccgaatgcactctgcatgtttagaattctcgcacaacttttattggagagtaaaagtgagcattcttcattgtgccttatttattgctgagtggttagcaactaagggggatagttacatgactgacttgtgaaacagctagaattttaacatttgaaatgaacacgaatctcccttgct

SEQ ID NO: 132924 - DNA, 442 bp, Homo sapiens
cgcagcaaactaaaattccagcaaaaagaactcctcttttccactcttatgacataatagttgtattagtctgttctcatgctgctaataaagacataccagagactgggtaatgtataaaggaaagaagtttaattgactcacagttcctcatggctagggaggcctcataattacggtggaaagtgaatgaggagcaaagtcacgtcttacatggaggaaagtaaaagagcatgtgcaggggaactcccctttataaaaccatcagatctagtgagaattattcactatcatgagaacagtacaggagagctccgcccccatgattcaattacctsccactgggtccctcccacgacacgtgggaattatgggagctacaattcaagatgagatttgggtggggacacagccaaagcatatcactagttttcctttttaa

SEQ ID NO: 132925 - DNA, 563 bp, Homo sapiens
ttttattattagttattgttgttaatctcttactgtgcctattttagaaattaaactttattataggtatgtatgtataggaaaaaccatagtgaatacagggctcagtactatttgcagtttcaggcacccactggggaatcttagaatatatccactgcagataagagagactactgtaattctgacattagacattcactaatcatctgcctcacaattttcttttgytgacatttacccttgcactctaggagagtttctgaagtttgccccccacatattttatttctaaattctgctctttgaaacttctaatacaggtttaaattttggttttggtttttggtttctttgtgtccccttcttatcctctcttacctctttgtctcactccattatcattccatctcaatctatagctctttactccatttcatgaaggtaataccatcttgtttcctatcaaggatgtacacttttgtctgaattttcttcttattctgtatcattttatgagatctgtctttttcagtcttcggggtaatgatgccctctgcctt

SEQ ID NO: 132926 - DNA, 563 bp, Homo sapiens
ttttattattagttattgttgttaatctcttactgtgcctattttagaaattaaactttattataggtatgtatgtataggaaaaaccatagtgaatacagggctcagtactatttgcagtttcaggcacccactggggaatcttagaatatatccactgcagataagagagactactgtaattctgacattagacattcactaatcatctgcctcacaattttcttttgttgacatttacccttgcactctaggagagtttctgaagtttgccccccacatattttatttctaaattctgctctttgaaacttctaatacaggtttaaattttggttttsgtttttggtttctttgtgtccccttcttatcctctcttacctctttgtctcactccattatcattccatctcaatctatagctctttactccatttcatgaaggtaataccatcttgtttcctatcaaggatgtacacttttgtctgaattttcttcttattctgtatcattttatgagatctgtctttttcagtcttcggggtaatgatgccctctgcctt

SEQ ID NO: 132927 - DNA, 538 bp, Homo sapiens
ttctctccagaacttccagaaggaatacagcactgttgctatcttgattttagcccagtgagacccattgtagacttctgacctccagaatcttaagataatttgtgttgttttaagccgtcaagcttgaggttaatttgttatagcagcaatagaaactaatagactttgctatattggtttgagtctgttctgcacatatgtagctcagtgattattctgtaacttttgcaggttcatgcacagatttaagggatcctcttttctgattctctcccctctgggatttcccccatgctgtatagcctacagggtctacttctggtttctctggatagaaatatgggactcattggaattttacctgttggcatttccacaccactctgtgaccaaagcctgccttcagggcaaagtagagaarggaaatggaacaatattaaaacagaaactcacccctgtgtgttttgcttcagcaagtttttgaccctataacctattataaagtgaaatgaaaatgtggacacctgtgaagcgg

SEQ ID NO: 132928 - DNA, 567 bp, Homo sapiens
gtctgctaaacgtatttccctgctggtgcttaccttcttgcacacaatactgataagttatctagtatcccacttctcttaattacacagaatatttttgccaaattcccaattctgaaacaagtagttaccatgttgacaggggttgacaatgatatggaaactacatattcagaagacactgaattctgggtttagagggtttgggtcagtggcagacagaactctgttatgactctgttctgttattatataatraacttagagcattttaagcaggttttcaaatcctgaaataactgctctaagtttggtataataacagaacctcaagttttaaattttctttattgacaggtccactatggtcttcaaaaatcacaccagtagctctaattggaatagatttaatatagctaactgaactcctgattttcttgtttgttaatagtacctgtacaataattcttcttgtcagtcaggtttgaacctgaaaaacatttctgcctctttctttactggccttaccctgtcactaatactttaagtactttccctgcccagtat

SEQ ID NO: 132929 - DNA, 590 bp, Homo sapiens
tctgcatggaagaacaaacattggatgaaaatgaataccaactttttcagaagatgggtccaattttctcttacaaaatcccatgctaattgctgcccctttggacgtctggcaatcgcatgaaggagagctgccaagttctgtgtcttgataacctttccttccattcctagttcaattaacctgaagaaagaaaaataatttgtttctaaatagtaggtattatgtacatggacattaactcaagccaccaatatattaaaagaatagaacagaaagaggcatgataaaagtataattaccaattttttaatgttycaattaaacttttacttttttagaaataatttttattttgttcctatcaaaaacatttacttattatttcaaataagtttgattagcatcgtttacacatcttatatgcaagaatgtatttttacaacaataatttttcttcaagtttctgaagataaaacataaccgcttgtctagtatcaatcatatgattaataactagggaatacctgttttcactatttgcattttgtcaatatattcttttctgaaagtaaagttaaagccataca

SEQ ID NO: 132930 - DNA, 590 bp, Homo sapiens
tctgcatggaagaacaaacattggatgaaaatgaataccaactttttcagaagatgggtccaattttctcttacaaaatcccatgctaattgctgcccctttggacgtctggcaatcgcatgaaggagagctgccaagttctgtgtcttgataacctttccttccattcctagttcaattaacctgaagaaagaaaaataatttgtttctaaatagtaggtattatgtacatggacattaactcaagccaccaatatattaaaagaatagaacagaaagaggcatgataaaagtataattaccaattttttaatgttccaattaaacttttacttttttagaaataatttttattttgttcctatcaaaaacatttacttattatttcaaataagtttgattagcatcrtttacacatcttatatgcaagaatgtatttttacaacaataatttttcttcaagtttctgaagataaaacataaccgcttgtctagtatcaatcatatgattaataactagggaatacctgttttcactatttgcattttgtcaatatattcttttctgaaagtaaagttaaagccataca

SEQ ID NO: 132931 - DNA, 590 bp, Homo sapiens
tctgcatggaagaacaaacattggatgaaaatgaataccaactttttcagaagatgggtccaattttctcttacaaaatcccatgctaattgctgcccctttggacgtctggcaatcgcatgaaggagagctgccaagttctgtgtcttgataacctttccttccattcctagttcaattaacctgaagaaagaaaaataatttgtttctaaatagtaggtattatgtacatggacattaactcaagccaccaatatattaaaagaatagaacagaaagaggcatgataaaagtataattaccaattttttaatgttccaattaaacttttacttttttagaaataatttttattttgttcctatcaaaaacatttacttattatttcaaataagtttgattagcatcgtttacacatcttatatgcaagaatgtatttttacaacaataatttttcttcaagtttctgaagataaaacataaccgcttgtctagtmtcaatcatatgattaataactagggaatacctgttttcactatttgcattttgtcaatatattcttttctgaaagtaaagttaaagccataca

SEQ ID NO: 132932 - DNA, 452 bp, Homo sapiens
accatggtactgttatattcaagtcaagctgttaaaatacattcatataaacatagaaaagattatgcatacactctgtagagttctgtggtttgattcttgaaatccaaacaaaagttatattgccttttgagtaaaattctagaatagagcagtcttttataagactaagagcttcatctaagagcttgaaatgtcaattacaccattgggttgctctgttcctatgaaatagagcacatctccatttcggaatgagatacctcctctcacagtagcacaggtgtaccccccaacccccttactatacaccrcaaagaaacttttctggtttgcaataatctctgttgagattctctaataacgtgtgtggtgggtggaggtggtgacaggaaatggggatgaagaggtaatttcagaggaagaataaactaagagggggcaagtaggat

SEQ ID NO: 132933 - DNA, 414 bp, Homo sapiens
gatcttaggagttagaggacctccattttcctaaggcaggaaaaggttgagatgcccaagagaataagatggacttattggacataatcatcrccatttaaaatgatttggataggtgccatggctcacacctgcaatcccagcactttgggagactgaggtgggtggatcacttaaggccaggagtttgagaccagcctggtcaacagagcaaaaccccatctctactaaaaaatacaaaaattagctgggcatggtggcgcaagcctataatcccagctactcgggaggctgaggcaggagaattgcttgaacccgggaggcggaggttgcagtgagccaatatcgtaccactgcactccagcctgggcaacagagcaaaactctgtctaaaaattaaaataaaataaaatg

SEQ ID NO: 132934 - DNA, 528 bp, Homo sapiens
gaattctgataatgtaaattcagggcacaaaataattaaaacttgcttgaattaactcagggatgctatagctataagaattttcttataatcactttaaaattcattaagagtgagtgagmttttctgtatttttccatatgcttccatatcctctttttccatcaaatgcagtatgcactttggttccttgtgagtgaggacaatttgaagtttctaatgttgactccaaaggcatgaagtcacactcaccgagctgcatctaagtacctaactgggaaaatgttttgtgtggcatcaagtacctcatattagatcacagtttactctgtatgacagcagcatgggaagtgggttaaatgcattaagaaaataatttcaaagcccaggagagcttttgggaagttttactatgaatctttaaaccagaagcaatgactacagtgaggggacagtaggaatttcatgggattcaaaaagaggcagggaaataattgaggcacaccctgcccctaacctcctaacctc

SEQ ID NO: 132935 - DNA, 547 bp, Homo sapiens
gatgaagacctttaggattatcaacttccacttaaaaagagtaaatatattttctcttccttatgattttattaataacattttcttttcttgagcttacttgattataagaatatagtatatatgtttaacatagaaaatatgcattgactgtttatgttaatggcaaggcttccaagcaattgtaggctattagtagctaaggttttcaggagtcaaaagttatacctggattttcaactacatgcagggccagtgaccttaacctcccacattgttcaaggataaacttcatattatatgtactctattatggcaagaatacattgtacacatttatgaaaatttggtggtagactggttcagaatcaatgtcatatatattataaaagggtaattttagttaatttaggaaaataaawttcagcatggcaactagtcctttgcaatcatctcaaataccaaaaatgaattatgtactttatggtagttcttgataaaccagaggccacctggagcattggataaaaagcacgtatctagggct

SEQ ID NO: 132936 - DNA, 429 bp, Homo sapiens
aaatggaataaactgtctcactgccactgggaagtgttcacactcagactgtccagcttggagattatatgactttatgagcattgtatttcagcagtaacacaattttatgatgaaatttctgagggctcagagaagaatttcctcaccagctaaaaacaaaggagttttgtacgcttttccaccatgattttagactgagaaagttgtatgcataacagttcctgtttcacacatcgttgtgtcttgggaaatactgttcgactgatggggaaagacacattagttaaaacagataagcaaaacttttgtgagatgagaattgaagcagacagtgtggtgtttgtggtgggaggtgtgtgtattcasgtgtgtacatttttaactaggatgaattagccgtggttttggctattttcatttggcttg

SEQ ID NO: 132937 - DNA, 545 bp, Homo sapiens
ttcctctagagacacatggattttctaatagaatttttcacctaagatgagaagtgtcttaaaacagttgtcacatcatccaaatccacacccatttactcagtttactgcttaaagagtaagttggagtcaagaagctgggagttgggatatggggacaatcaaaacaagcacaatgtaccattccattatcttaatagcgactttatatatcaatccatagagtcccttcccctgaatgagctgcagcgtaccaatcacaaccttctaacacataatgaaatacaagctggagactctctggttctctgtgtttcgagtactctgctaataaggccatgagggccccttacttttactctgttccatgacctcagacaggggctctaacttgagccttcccaaaaatcttggtctcctggggctcaggtgagcatgactcakcacttagccaacttggtatagaaaatgacgatattcagtgcccccaaatcagtacttctaaaagttatatttagcaatgcaaatatatgtaacattcatac

SEQ ID NO: 132938 - DNA, 459 bp, Homo sapiens
aattccctaaaatatttctgtttactaacatatattgaccaagtacatcaagcaggagagatcttccttcattctgttatagtccacatcattctaattttgctcagttgttattaagagcatattcctaaaccayacacttttgtttcaataaagttttattttgttgagatgaataaaataacaaagttataagctgcataagacaaaagttcaattgttcaaaaaaaatttactgggatagctttctattacaggtattgttagattatattgtgctgataagattactttctaaaaaatttgtacttttctgtaaattaaaagaatatggagtcataaaatggcaagtgttttaggattagcctaaaattggacattgtcattgatttcaaagaaggtatgaactagcagtcttacagcctaattcttctttggactggtccttggcagcagttc

SEQ ID NO: 132939 - DNA, 529 bp, Homo sapiens
cccctggtttaggcaattaggaatgctaaaattaatttagaggtagatgtaaaactggtcattattcaaatgcaataatcacatttcaggggaaaactttatttgcatttttactgagaatcattggcattgctatccattgcaacagttatgaaaaagaatatagaaggcacaaagagtgtgctagacagtaatcttttttgcttacttcaaattcttccataattttttctgacagcctgtgtctacctcatgaccataataatctcagagatagtcttgatgacaagaagtttggtcttatgtttggcttgcttattggcatgggtgcagcaagattgttcattaacaataaatrggcctccttaagtttgctgaacagtattgacttactaaagtcacaaaattaacttttgtctggaagttttcataaggaatgtcagattgaactttaaaaatcctttattatttgctatctaagggataggaaactaagtctcagaaactctctctactaggtttcacctgc

SEQ ID NO: 132940 - DNA, 457 bp, Homo sapiens
tcagtgtttgtggcgattttattgaacataattgccaggaataatgaaggaataatgagaattgactatacctctgaaacaaaaatcataagattggttgaaaatctgaaaaagaaatagactacctaatcctaaccccacaaagccaaattcattaaatttctcccatcccaacagcagatggggggaaaaaayttgaaagaaaggcaatgcagaaagcagaatattttttaaaagaaatattagttaaaccttcatagaaaataagaaaaaatgttgtacccacaaaatatgaataggatgctatgataaaggcataattagagaacaagaactcttggagattcaaaatatgagagctgaagtctaaagactagaaaataaagttgaggaaatcttccagaagatagaagaaaagacaaagagatgaagaatagccaacatctgactaccagca

SEQ ID NO: 132941 - DNA, 457 bp, Homo sapiens
tcagtgtttgtggcgattttattgaacataattgccaggaataatgaaggaataatgagaattgactatacctctgaaacaaaaatcataagattggttgaaaatctgaaaaagaaatagactacctaatcctaaccccacaaagccaaattcattaaatttctcccatcccaacagcagatggggggaaaaaacttgaaagaaaggcaatgcagaaagcagaatattttttaaaagaaatattasttaaaccttcatagaaaataagaaaaaatgttgtacccacaaaatatgaataggatgctatgataaaggcataattagagaacaagaactcttggagattcaaaatatgagagctgaagtctaaagactagaaaataaagttgaggaaatcttccagaagatagaagaaaagacaaagagatgaagaatagccaacatctgactaccagca

SEQ ID NO: 132942 - DNA, 534 bp, Homo sapiens
actgttcccaggcgagtggctgccatgagacctgaggaccacacttgggggaccaatcatgtccttcaccactgtgccttagaatcgcccctggacagagttcctgggcagaggggaaagcagctcccaggccttactcaggcctcaggtccatgggttgggcagccagtctgggcccttctcaggatcctcatctccatcctcatcctcttccttcacagcatttacttggagctctttgtgacacaccatgtcagtcatgatgaatcggccaamagccagcccttgccagctgacgtcacagtctaagatgggaaactgtggtacagatagacatgaagagagcttagcagtgattgaggtggtgactaaatatacagtcattgaataaataccatgtagcaagtgtactttgtggagtgttgagtaagtggaaaatggaaagccagttgcatttagagatgataggcctaaagggaactgtcttctgtcgagaagtaaaggaaacttcatgaaggatgtagaagcttagct

SEQ ID NO: 132943 - DNA, 466 bp, Homo sapiens
gccttagctacctgatcagactcccatggctagcactgctgaccctggaaacttcaaatctgtgctttgagctgtttatgttgccattttgctttttgagacctgtcctatatacaggttagcactctccaccttcttctacttctcagtgcctcctcttcttatcygtatggtacttctccaggcaagtgcatgtagccaatagcttggaaagcctcatagcaataacagtacttccacaggctgtaggaactattagttcaattagtaagtcatgtagattcaaacaacatctttgcactttagaattcacaaaatactgccaagaatactaccaccaaatcacatatagtctatgggtatttcaactatgagtggcctatggaaaatctataggtaatgtagcttaaatggtgggtcaaaatatgagaaagttgtgagccatctatatagtacaatgcttcct

SEQ ID NO: 132944 - DNA, 466 bp, Homo sapiens
gccttagctacctgatcagactcccatggctagcactgctgaccctggaaacttcaaatctgtgctttgagctgtttatgttgccattttgctttttgagacctgtcctatatacaggttagcactctccaccttcttctacttctcagtgcctcctcttcttatccgtatggtacttctccaggcaagtgcatgtagccaatagcttrgaaagcctcatagcaataacagtacttccacaggctgtaggaactattagttcaattagtaagtcatgtagattcaaacaacatctttgcactttagaattcacaaaatactgccaagaatactaccaccaaatcacatatagtctatgggtatttcaactatgagtggcctatggaaaatctataggtaatgtagcttaaatggtgggtcaaaatatgagaaagttgtgagccatctatatagtacaatgcttcct

SEQ ID NO: 132945 - DNA, 466 bp, Homo sapiens
gccttagctacctgatcagactcccatggctagcactgctgaccctggaaacttcaaatctgtgctttgagctgtttatgttgccattttgctttttgagacctgtcctatatacaggttagcactctccaccttcttctacttctcagtgcctcctcttcttatccgtatggtacttctccaggcaagtgcatgtagccaatagcttggaaagcctcatagcaataacagtacttccacaggctgtaggaactattagttcaattagtaagtcatgtagattcaaacaacatctttgcactttagaattcacaaaatactgccaagaatactaccaccaaatcacatatagtctatgggtatttcaactatgagtggcctatggaaaatctataggtaatgtagcttaaatggtgggtcaaaatatgagaaagttgygagccatctatatagtacaatgcttcct

SEQ ID NO: 132946 - DNA, 454 bp, Homo sapiens
acttaacctgatctatactatagtgtgcttatttttctgagttttatctaacagattaatagctacttaaggtaccaatgacatttcaattctactccatgcaagacctaacacattgctggagttcagtaaatgtttgctgaatagatgaataaaggacagtgctgttattaaaatttcttagtggggttgagaggcacgataaaggcctcagaataaatagcaatgaaatataggtagagctagtgccaaataggagtgtaagcaatggttcaaaatttcagaggagaaataatgaaattgacagggagatttagtcttggccactgaaagttttagtggtctctcacaggacattaacatctgagagcaattccaagaccttctcattccccacaaagtaaattaaagccaaataggraaatgatcttgttccatatactaaaatgttttg

SEQ ID NO: 132947 - DNA, 471 bp, Homo sapiens
attccagatccaaaagaaggcctcccaatagttagcctacctgcttgaaattgtgcttatgattattwaaaaaaaaaaaactctaaaaagctgctgcagattgagtacaagatgaacaaaattggcagaaatgcacaagtattcttgagctaaagttcacatctgtcattattctctcatctgttgggaaatagtattggaacaaatatgttttgtgggaataaataaatgcacttttaaactgagggatgtaaaaattccaaatgacagtattctactttatactgaagtaaacagattagttgttgcacaattggagcatttacattgaacaacaaagtgttctaatgtattgaaatatctgatactacagttcagtaactgcagaaatagatgagcatagaaaggttcacttattaatacaataaaacaccgacttaatatcagaattttgcttataaagtctgtaag

SEQ ID NO: 132948 - DNA, 567 bp, Homo sapiens
accagtgagcaaaataaagatttgttcccttatatgktttactatctaacagggagcaaaacataagtggagtatagactttcagaagatgaaaaatgctctggggagaaaggagagtagaggaaaatagatttgggaatccaggactgagaatgtcctggacatgttccttagaaacacagaatattagatttttaaaagttaaatttacctaatgtttattgtataccagatgtgatgctaagacattatcatttaatcctggacagtatcatccctatttgacaggagaggaggctgaagcacaggagtgaagcaacaacctgcaagtcacaccagcctaatacatatgctttaatgtctttgctttacaacaaaagagataattaatttagttcttcaaagactggggcaacgtgcatagccagaaagtactttcaggaaagaggaactaatagcaatgcgtaaaagatattcatgtctgcttggctataatatagggcctgtgctgggttataccaggggaaaagttaaaaggtgggtcaaactggattagggtgggcgata

SEQ ID NO: 132949 - DNA, 569 bp, Homo sapiens
ataccagtgagcaaaataaagatttgttcccttatatggtttactatctaacagggagcaaaacataagtggagtatagactttcagaagatgaaaaatgctctggggwgaaaggagagtagaggaaaatagatttgggaatccaggactgagaatgtcctggacatgttccttagaaacacagaatattagatttttaaaagttaaatttacctaatgtttattgtataccagatgtgatgctaagacattatcatttaatcctggacagtatcatccctatttgacaggagaggaggctgaagcacaggagtgaagcaacaacctgcaagtcacaccagcctaatacatatgctttaatgtctttgctttacaacaaaagagataattaatttagttcttcaaagactggggcaacgtgcatagccagaaagtactttcaggaaagaggaactaatagcaatgcgtaaaagatattcatgtctgcttggctataatatagggcctgtgctgggttataccaggggaaaagttaaaaggtgggtcaaactggattagggtgggcgata

SEQ ID NO: 132950 - DNA, 562 bp, Homo sapiens
agcaaaataaagatttgttcccttatatggtttactatctaacagggagcaaaacataagtggagtatagactttcagaagatgaaaaatgctctggggagaaaggagagtagaggaaaatagatttgggaatccaggactgagaatgtcctggacatgttccttagaaacacagaatattagatttttaaaagttaaatttacctaatgtttattrtataccagatgtgatgctaagacattatcatttaatcctggacagtatcatccctatttgacaggagaggaggctgaagcacaggagtgaagcaacaacctgcaagtcacaccagcctaatacatatgctttaatgtctttgctttacaacaaaagagataattaatttagttcttcaaagactggggcaacgtgcatagccagaaagtactttcaggaaagaggaactaatagcaatgcgtaaaagatattcatgtctgcttggctataatatagggcctgtgctgggttataccaggggaaaagttaaaaggtgggtcaaactggattagggtgggcgatagc

SEQ ID NO: 132951 - DNA, 567 bp, Homo sapiens
gaagcacaggagtgaagcaacaacctgcaagtcacaccagcctaatacatatgctttaatgtctttgctttacaacaaaagagataattaatttagttcttcaaagactggggcaacgtgcatagccagaaagtactttcaggaaagaggaactaatagcaatgcgtaaaagatattcatgtctgcttggctataatatagggcctgtgctgggttataccaggggaaaagttaaaaggtgggtcaaactggattagggtgggcgatagcactctgttttgtctagatgggactgggaggactttcaggttttgagtgatggtgtggaggttggggtggtgacaaatccgagtacagggacayggcatcaaagagtcagagagctctgcagtatgacagttgcacagacttgccctttggagtgattcaacattgccggtttctttcaaatatttggctaatcttctggaaacaaaggcttttaattgaaaggttaaggactaacaatctcaaacattagattcaaggttatcccatcttgccaagctctgatgcttagtgaccctc

SEQ ID NO: 132952 - DNA, 514 bp, Homo sapiens
gtccctacagcttgctttagttatttaaagagcactaccaagtcacaagagcattatcaaggggctaccaggcagcacttggtcaatgtcagtcttcaaggaaatggacttcatgatcaatacaagtagtgagccctccacaaatgttggcygcatgaagtgtaagagtccagatcctaacacagaacatggttgtgcccactgtttctatgaaagagttcttgtgcagaaaactgaacatttgcatcactatacactaagtgggaacagcattacagaatgtacttcgtatgcagatatacctaaaagatccacaacagtactgtctgcagcttagaatgaagctaagattttatcctaaactgttcatgtttaatgaatgagtcaaacctctgaaagtctacttttcataattaccctttattttcacacctctcctccctccccatcatatttttttttttacttagttccagcatttttcctcaaccttgcctcaccgccatcctgagtt

SEQ ID NO: 132953 - DNA, 472 bp, Homo sapiens
gcattcttcatatgattatgtcagccctctgacatatgttcaaacacatttggtttatttctgttgyactaaatggtaacaaaaagcacgttagcatctgtattacatattacagaaaactagaccaggtcttggccccctaataggacacttaaaatataaaaaaataagtgagatcatttggatgcaatatttagaaccgagagggcagctgtgttcaatatggacacaattagggatgaagttattcactttccagttctttgggtatggattaactatagaccttaagaggacttaactgccctgctcagatgaggtttaagtggtaccttaaagttagtatttgtgtgcctctactgatttatgaagcattgccacattctcctccttgattattcacatttaatagtttaaagatatataggaaagacagtcttctaattttcagcctgaatgtgtgcatctctag

SEQ ID NO: 132954 - DNA, 599 bp, Homo sapiens
gtatttgtgtgcctctactgatttatgaagcattgccacattctcctccttgattattcacatttaatagtttaaagatatataggaaagacagtcttctaattttcagcctgaatgtgtgcatctctagaatttagcttgcctgatactcaaaaacaatgagaamaagaccatttaaaaaatatcagcttagttattgcattgagaattgcatttctaggacaggtaaatttcagaagcagccgcaggagttctgaagagtttttaattttaaaatcgaggcaactcattttcctgatggagaaatgaagctcaggccttatatagcttgtcttacatggcaaagctaggctgtgggcacagtcatttgcagcttagaacccaagctcttaaccatgaatctatgttggcttttcaaaatcagagttccaattatatacttgtacatcacacccttgtatttttcagtttgagatgtgatctctgtttgacatcaggcattcttaggactgtttttgcaaggtaagtgagacaactaagggccagagacattgaatagcatgcccaagaaatggtagcactgccattcacatgtaagt

SEQ ID NO: 132955 - DNA, 539 bp, Homo sapiens
gggtggtccctcccttcccacttccttctgtgacaatgctgacttcagggggaaggattgctccttctctgtcaggagtctgagagggtgtggggaggacttaattgagaccagcgaggtcagcctgaccaaaccaaagtgcaggcttccaggacgaaaacagagagtaactccctgtctgttctagcatgagcacaagcaaacrcactggctttattaaaatcaagtgcttgaataattaacctttttcaagtaggtgaagggtattcaattttcatgaagaaattttccatttgctttcagttttcacaaagacacttaattcagttgttcaggggggagtaataacaaacaaacaaaaccttcaaaatcagatgggaaaaagtattccaagtatattagattagctgtcttcccagcaatcctggggtaggtactattattctccccagataagcaagctgaagtacagagaggttatggaatgtgcccaaggccatgtaacctgcaaccctgtagctaagatttgaacccaggaa

SEQ ID NO: 132956 - DNA, 522 bp, Homo sapiens
gaattctgtacttgtgactaatatagtgacagtcactctactgtcattctctagtccatttttgtatctactcccaaaatgggagcttccccagcataaagtctttctcttatttactgtttgtccctggcaggtaccacagggcctgcacgtaggaggcatcacgtatttttttggaatgaaaaaattaagggaaggaagaagtaggcagggctatagataaccagcagatcagaatgggggaaagtcagtggttctgcgaatgcctttgtaaaaatatttaaagtattatattttcttttttgcctcaaatcacatagttcatcaattctaagataactcttttttctattttaatatcttaaataagaatgtatcacacatttgatggcatgcatagattttcaaatggcagctttcttggtggtaggaaaataatgatatgtcttaccatcaagagagtcttgagtcaattaactmtagtacataaaaatatagctataacatgtctgtgaagaaata

SEQ ID NO: 132957 - DNA, 417 bp, Homo sapiens
atgttacacttaattttcctttttgtccaactagaaagctcttatttcttcttacctggtgagcatccagtgcactctatggatgttgtaaatatgtccttggttttatctgatgcttggtttgagatctcttgttggctttttcctgctcttttccagttctcaaaactgacatttctttttcaraaataaagttgccttatgatctttgggaaggcttgtatttatttcttctctatgcttactgagctttactttttttttttctttttttgcacgatcagaaaagtagaggaaataaatcctcttctctactttgctaaagtcatcttccaaccctgaggtgcacccccccttttttgacaataaggggaaagcagctaataaacacagactaactcatttggtttactttcc

SEQ ID NO: 132958 - DNA, 587 bp, Homo sapiens
ctacaaattgaactatcgtatgatccagcaatctcactactggatatatacatctccaaaagaaaggaaatcattgtattgaaaagatacctgctccctcatgtttattacagcactgttcagaatagccaagatatggaattaacctaggcacccatctacagatgaatggatacagaaaatatcacacacacacacacacamacacacacacacacacacacactcacacgaatactattcgacctcaaaaaagaatgaattcctgtcattcatggcaacatgagtgaggctagagagccttatgttaagtgaaataagccaggaacagaaagagaaatactgcgtgttctcacttacatgtagaagctaaaaaagatgacctcaaagaagcagaaagtagaatagtggttactagactgggaaaggtaaggggaaagtgaggagagagagagatattggttaaaagataaaaaaatcacacatagataggaggaataagttctagtgttctatatagcactgcaggataactacagttaacagtaatatatagtttcaaatagttagaaggaggctgttgtatg

SEQ ID NO: 132959 - DNA, 517 bp, Homo sapiens
cagatctcaagagaactcactcactattatgagaacagcagcatcgggttaaccgcctccatgattaaattacctcccaccgggtccctcctatgacacgtggagattatgggaactgcattcaagatgagatttggttgcggacacagccaaaccatttcacaaaccaatttttatttcttaaaaagagctgatgtgattcaactgaatgtattatgtgctaatatgaaccagtacattagttgatggaatatttattgaaaaccagagattattgagatatttttgttatattttaagtgatttcctttgaaaataattttatactttttgaataagattaagttgttttgttaataatgatcaaaggtgagggttaatagatgaagaaattactgcataaacttaggcatattaatcagaagacaaggaagtartgtgcaagggcagattacccagtgaagtttggctcacatggggcagtaactttacaccgttgactgcatgttcaggaata

SEQ ID NO: 132960 - DNA, 444 bp, Homo sapiens
taagcattgtgcatgtacataaaaatgttgaaacttgctcagtaaatgaagagatgtccgttttgttcatctgtatttgtgaaagataaaatttctcaagatcttggctctttgggtgactctattgcagtttttgtgcaaacggtagtgacccattgcagtttttgatcgatcttgtcagaagattcaggttgtctggtatttcagatgaccgcagttatgaatctgggtgcacctgattaccaaccatagtgataygtgtttatccattttgctttttaatctatttcttcatgaatacattttctctgttcctattatacccatgcaatggttgttagtatacctgagtatttatgcttgcaaaaatatgttattagtgcctattttattgtgtaaaggggcctatgaactgttccgttgtgtttttatgtttctcaaata

SEQ ID NO: 132961 - DNA, 541 bp, Homo sapiens
ctggggtaccatagagattctgaagattctggctgagctcacattgagtcccaggctcttgaattggcattagagcctggcttttagatgagctttttagctgactgtgtctttgctgaccctcaccttcagctgtcccagccatgttttctccagaggaaacttgaattctctgagtgttttcaaagtcttcatctacctgaatccccagctccctggccagggcggccatatcctccacagacacacatctgaggcaagaagagaacatcacttcctggagggcagcttgaaggccctccatgttcttccttctatccccagcatctcccctctcccaaaacagtagctgtgctggcttcaagttcagtatcctctgaaaaatttgagcctcttcactctccctggcttgggaactgagaacaaagtagcatctttcaayggcagcctctcctaaaaacattagcaagtcccattccttctcacctaaacagtcagtgaaaaaaaacacagctgaagaaacttccatcaaaaaaccaaa

SEQ ID NO: 132962 - DNA, 546 bp, Homo sapiens
aactgattcagcccaagaagacaacttccactccctatgatttcacgtctgaccaatgagcactcctggctcactggcttccccgcactcaccaagttatccttaaaaactctgctccgggccaggtgcggtggctcacaccagtaatcccagcactttgggagaccaagacgggcagattacttgaggtcagaagttctagaccagcctggccaacacggtgaaacccggtctctactaaaaatacaaaaattagctgggagtggtggtgggcgcctgtaagcccagctactcaggaggctgaggcagagaatcgcttgaacatgggaggcaaaggttgcagtgagccgagatagcactactgcactccagcctgagcgatagagcaagactcggtctcaaaaataaaataaaaataaaaataaataaactctrctcactgaatgctcagggagactggtttgagtaataataaaactctggtctccgaaaaaaaaaaagtggctgttgaattactagtaaagtttaactgtacacgtttttctc

SEQ ID NO: 132963 - DNA, 641 bp, Homo sapiens
acactagaaagcctccagaatagagggtgggtctgggatacaggaacaatagcctgtacaatatccagcagtgatgttgagggggaagaacaccagattatcccttcaatgttgctaggtgsttaaaaagtatcataatatgtcaataaaactggaaatgaccagataggatcagacacctcatgggataaagagcaaaagtagcaagccctcctgagtatatttcctctcaccctctcagttttgcatgagtagtatgttgagagaatgatgaaattggtgggaggagactagagaagtcattgcaatttggcaattggtctgaaaacgtggcctgactcttagatataaatgataataaaatcttctaagattatgtaggccacatgtctctgccttcccgatcttcatttctattatcctaagacccagaggcctgactacggagggaaatgagtcctcattagtggtaagaatattgtatttgtgtgttacatgtcttttaaatgtctttttcccctttccatatgaacattttgatgcccatacttagtattttcatttcggtatcttcagcgtcccttagaacataatgcctaggtctgcattaaataaatgcatgcgaatgaatgaatggtgtt

SEQ ID NO: 132964 - DNA, 641 bp, Homo sapiens
acactagaaagcctccagaatagagggtgggtctgggatacaggaacaatagcctgtacaatatccagcagtgatgttgagggggaagaacaccagattatcccttcaatgttgctaggtgcttaaaaagtatcataatatgtcaataaaactggaaatgaccagataggatcagacacctcatgggataaagagcaaaagtagcaagccctcctgagtatatttcctctcaccctctcagttttgcatgagtagtatgttgagagaatgatgaaattggtgggaggagactagagaagtcattgcaatttggcaattggtctgaaaacgtggcctgactcttagatataaatgataataaaatctyctaagattatgtaggccacatgtctctgccttcccgatcttcatttctattatcctaagacccagaggcctgactacggagggaaatgagtcctcattagtggtaagaatattgtatttgtgtgttacatgtcttttaaatgtctttttcccctttccatatgaacattttgatgcccatacttagtattttcatttcggtatcttcagcgtcccttagaacataatgcctaggtctgcattaaataaatgcatgcgaatgaatgaatggtgtt

SEQ ID NO: 132965 - DNA, 606 bp, Homo sapiens
aactgaatcatgggggcagtttccctcatgctattcttgtgatagtgaataagttctcacaagatccaatggttttataaggggctttccccttagctcagctctcattcttcttgctgccaccatgtgaagaaggacatgttcgcttcctcttttgccatgattgtaagtttcctgaggtctccccagccctgtggaactgtgagtcaattaaacatctttcctttttaaattacccagtctcgggtgtgtctttattagcggcatgagtacagactaatacagtaccttatagatattgttaataattttgatatgaacattgatatacatgtatttgttttagtccctgcttatgggtatatacagaaatgtggaatttctggatcatatagtaattctaattttagccttttgagcactgacaaactgtttttcatggtagctactccaytttacatttttaccagcagtgcgtgagggctccaatttctcaatatctttgccaacacttgatatttcctattttttgataataaccctcttagtggatgttaatcttgagcttttgttaaaccaaatagatactttaagtaatcacataca

SEQ ID NO: 132966 - DNA, 606 bp, Homo sapiens
aactgaatcatgggggcagtttccctcatgctattcttgtgatagtgaataagttctcacaagatccaatggttttataaggggctttccccttagctcagctctcattcttcttgctgccaccatgtgaagaaggacatgttcgcttcctcttttgccatgattgtaagtttcctgaggtctccccagccctgtggaactgtgagtcaattaaacatctttcctttttaaattacccagtctcgggtgtgtctttattagcggcatgagtacagactaatacagtaccttatagatattgttaataattttgatatgaacattgatatacatgtatttgttttagtccctgcttatgggtatatacagaaatgtggaatttctggatcatatagtaattctaattttagccttttgagcactgacaaactgtttttcatggtagctactccattttacatttttaccagcagtgcrtgagggctccaatttctcaatatctttgccaacacttgatatttcctattttttgataataaccctcttagtggatgttaatcttgagcttttgttaaaccaaatagatactttaagtaatcacataca

SEQ ID NO: 132967 - DNA, 580 bp, Homo sapiens
tgggttaacagataggagtaggtctacttgcacattctaattatggttatttcctttccaaaccaggacctaaatgtgcctcttgatttgattagagtttgtgtcttttaaaagatcgttctgtgttaagtgtatacttctggttggtggaaatgtggagacagtattgaggggagagctccactcagaggagaatggggcctcccattttgggaaaaaaatcaatgagtattgagttttgattgaagatggctacaaaccatcctttagacacattttaaggttcagtatttcattttttgcactaagcaccaacattttatcaccatataattctaggtttatatggctttggagcttcaactttgggttcatgtctgarataaaagtccttaaattatttatttgcagttttaagatgaaataacttagttgtattttcttcagaatcaagttcagcatgtttatagaactattatgtacaaaaactctctttaaaaagtatatataaaaatgaaataattcttctttaagatctacaatgttgataagcatcttcatagaagccatacaatgttta

SEQ ID NO: 132968 - DNA, 565 bp, Homo sapiens
agatcttcttcatttggattcattgctggagaaccagtgttatcttctggggttgttatagaatcttgttttgtcatattaccagaattacttttttagtttcttcttatttggrtagcccatttcagtgcaaaggtctggaactgaagggctcctattcagatacttttgtcctatggggcgatcgcttggtgtggtgctctcccctcttctcctatgtatgggacttcttgagaggcagactgcagtgattgttattgcccttctgggtccagccatccagtggggctaccaggctctgtgatggtgctggggaacatctacaaagagtcctgtgatgtgatctgtcttcaggtctcccagctgtggataccagcacctggctcggtaatttataaataaaggaggtttaattagctcatgcttctgcaggctgcacaaatatggcatcaacatctgcttggcttctgttaaggacctcaggaaacttacaatcaaggcagaaggcaaaggaggagcaggtatctcatatggtgagagtagaagcaaggtggtggggaggtgc

SEQ ID NO: 132969 - DNA, 378 bp, Homo sapiens
gatacttttgtcctatggggcgatcgcttggtgtggtgctctcccctcttctcctatgtatgggacttcttgagaggcagactgcagtgattgttattgcccttctgggtccagccatccagtggggctaccaggctctgtgatggtgctggggaacatctacaaagagtcctgtgatgtgatctgtcttcaggtctcccagctgtggataccagcacctggctcggtaatttataaataaaggaggtktaattagctcatgcttctgcaggctgcacaaatatggcatcaacatctgcttggcttctgttaaggacctcaggaaacttacaatcaaggcagaaggcaaaggaggagcaggtatctcatatggtgaga

SEQ ID NO: 132970 - DNA, 495 bp, Homo sapiens
ggaaagattacactcataatgaggaacaaaagtasaatttttctttttttaaaaaatcatcacaaaacaaaataaactaaaatatgcctagtatatcagtaaattggcattaaattcaggcaagttccaacatattcataaaaccttttatgtgaccaaatatcaatggaggataaagaacacattttgaacccatctttgattgaaattttaaaatccaaaaaattaaatcaattatatatgcctttgattctcctccatatgaaatcaatatagaggagaataagattctattatctctccattttgcttccacaaacacataatgtttgtgtattggccattacactataacagcttattggaaagtcaaaaatagcccaatgtaggatctcttctcagaaaatgtggcttcctggggacaggggtaaggaatccaacattgtcctctttagtaattctggaatccatgtattggaacatgaagaaactaag

SEQ ID NO: 132971 - DNA, 624 bp, Homo sapiens
gcatcacaatgctccataaagacagagatgatgtctaacttttgtcagacatataagtaggtacaccaaaattttttaaatgaatggatactttcagacactgaaaatgttagtgaagaaattgaaatcgaggaagaacaggacaggacaatagaatacagattttgaaggcagacagatctggtttttaacacagattcaaacgtttacttataacaaatgtttaatagagcaagttgcttgactgttcaaagcctccatttctaactctgtaaaatggtgataataatctaacatacctcctggaattgttgagagkaataaatgacaaactatgtaaagcactcggcacacataagactcagttaatggcaactatcgttattattttatctatctgagacaaaaaaattatctatttcatttaagaattctcaatagcaaaacaaaatcctgtcccagtgtagagcgaggattttacgtgctaaggtcagctatgcttcccacttccacagttaagccttccagcaagacaactactagccaaaggacaccaagagtcgcaatctcccaggaagtggtcaagaacctcgtgaatgagatccagggatcatcaccctggcc

SEQ ID NO: 132972 - DNA, 605 bp, Homo sapiens
ttgggaaaagaaagggttttatgttactttaaacagcctgatatggatgataatacttagatatgataattatacattaccatatacaaaggacttttaatcatcctcgtaattgcgaaaaaagggatagatattatgtccttttccaaacatagatactaaggcttaagtctataccttcttagacacagtttacttatagtgccatgtatgtgaaagtgaactgtaatgttttcaaaagtgaaataatttacctctggaatatttgctataatttttaattctcctttcaggaaatgcaggtaattctttattcattcacaaatagttgagtgtccactgtgttctgaacattatgttaaacaatgtaaacataaaaaattaataaactctttccattcctcatttataatctaaattattgattacaaaaatcactttataatttgtgtaacagaggcctgaaccaagtattataaaagctaaggataacaagtaattgacttactggtatagcaggggggaaaagcgtgaaatttgaagtaagagacaccaagttaaaagtgtcagygcatgtactcactttattaccttgagtaaattgg

SEQ ID NO: 132973 - DNA, 575 bp, Homo sapiens
ttttgtagacctgagttggctaatgtctgtataggatggtgtgtgtgtgtgtgtgtgtgtgtgtgtgtgtgtgtgtgtgtttatgaattgcagaaggtaagtttgagggtgaggggtactgacttgttttttttagcttttcccaagaaagaaatcataggccaaggctgatatacaaatgtaattttcttacctcattggaaacactgtctgctgaagaaatctctcttggttctttcatagaaacatcaaaaaaagcgagaatcaagatctctagccatgtccttgctgatatttagcagctttctgggaagaagccagaggtcttggtataccttgattaagtttgtgcatcaattgtttgacatcttagacttcaatttcccatagaattgtcttcagagaatcatgaaatattatgacatcacattgtaattgcataattacttgtctgcctattcacttagtcttaaagtccttgagtacaggattgtatcttctcttgtctatgggtkcccagactctaacacaggtgtggcacatagtatgtcttaaaaaataagaattggaaggga

SEQ ID NO: 132974 - DNA, 565 bp, Homo sapiens
tatttgataatattaaataattattgttacttattaaaagtaaagtttatattttagatatatagtgaaatatttacaaatgaaatactcgaatacttaggagctacctcaaagtaatctgatgtgagtggggaagtggtaaggagtttagaagaaacgaaaaattatattaaaacatttgaagctttgtgatggttacatggggactcatgatagattaaagatacattcgtctgctttaatatgtgtgatgaggaatccaacttcattttttgaygtttgactgctgaaagcttttaagcctcacccttccctcatccccttggacctcacatctgggcaaactgataagaaagcctggtgttcccttccttgtcacagatgggagagccaaatcttgcaggccccttcccaaacaggcaaaccctcctcgtctccccacccaggccaatctcctttcctggcttcaccaagccatttcaaacctgctttagaggcctgccctgctctccccagagaactcaattatgtagccagttggtcaaacatgtgggtggccagggga

SEQ ID NO: 132975 - DNA, 543 bp, Homo sapiens
ttgaataatcaagaatattgagaaataattgataaaacgtaatttactcaatttgggggccagactgagtatttcagtttcaaaatgcttcactgtgtagtatcatttcacatgtcatagagagctgtttgactgtcttcagatgtcaaaaagctctggttatttaatttacctttgcagatgcctgcaatgaaattagtgrcagcaggtgtgtgtgtgggtggggagctagagggatgagggagtaatagctaaaagtatgtgaggattgctgagttttatgaattagttgaaggagaccttatgaacttttattgtgaacacctctgaactgtccttgtatctctttttttctcatttataccatgatatttagaacagaatctaattccctaatattctgtaaacaccatgctgtaaaataactattcccagctgcttcaccatagagactcttatctttactgtttccaaagcctccacttgctaggtgtttaattattctttttgcatattgttctgaacctcctattaaccattatt

SEQ ID NO: 132976 - DNA, 617 bp, Homo sapiens
aaatccttgtaacatgaagaactcatagattaatatcaaaaatactaacaccttggtaaagcaaacagaggtaacttgaaaaagagtatcgcacatactagttgtgtgtacacgtgggttgtgtgtgaatataaaagcataaacaagaagaatatgcagaacagaaatactctctggggagaaagagaaaggaaaatacaaggcattttaagatagctataacattctatyacaaaagcaaatcagtcaataaatgaagttaatattgtgaaattgccagtatttgtcaaatttttctgataagttcagaaggacatattttctgtgcttttgttccacatgtttaaaataatttgtaatttgaaaataatcctcaaagaatttacaaaagaaatgtttaaaaagaccaataaaaaataaaataaccattaagaagtttatcacactaaaataattgaaaatataataaaaagaatgataaaaattggcaaaaagctatcagagatcttttaaatgcaggatactcaatgttagcatgggtaggatgacgaagtcacattcatacaatgctgtgggagtgtaaattggcataacctttatgaaaatccatttggcag

SEQ ID NO: 132977 - DNA, 653 bp, Homo sapiens
gatgaagaaaaattgctaatagttattgaatgtttattttgtgggaggaactgtgctaagtacttgatatgtattatgtaattaaaccctcacaatgaccttaaggaggttctataatcgtctccatttctatctatgtgcatcttctacttgtgcaagtccacacagcttgtaagtgcaggagcagagattggaacccaggctttctaacttggaggtcgaactgtgaactaccctgtaccacactaaaccatctctattacagatggagtggtcatgagccttttcatcccactcagaaatatactaagcaatctcatacyttttaattatatttttctatagagcaccattaagcaattttatttgttgcagaaagacacccagttttaggcttctgaataagtgcctagcttagcaaaggtaatatattaacagtaatgtatgtcattcatacaagccaacaaatatttattgagcacttgagtacctgctttgtggcaggttctgggatgcaaaaatggtttctgtcttcatactatttttggtctaatggagacaaaagacactaaataactcatcttccccgtcaaattcactgagcgggtgtaaccaatactctgttatgctaatggcacagaattaataattgc

SEQ ID NO: 132978 - DNA, 653 bp, Homo sapiens
gatgaagaaaaattgctaatagttattgaatgtttattttgtgggaggaactgtgctaagtacttgatatgtattatgtaattaaaccctcacaatgaccttaaggaggttctataatcgtctccatttctatctatgtgcatcttctacttgtgcaagtccacacagcttgtaagtgcaggagcagagattggaacccaggctttctaacttggaggtcgaactgtgaactaccctgtaccacactaaaccatctctattacagatggagtggtcatgagccttttcatcccactcagaaatatactaagcaatctcatactttttaattatatttttctatagagcaccattaagcaattttatttgttgcagaaagacacccagttttaggcttctgaataagtgcctagcttagcaaaggtaatatattaacagtaatgtatgtcattcatacaagccaacaaatatttattgagcacttgagtacctgctttgtggcaggttctgggatgcaaaaatggtttctgtcttcatactatttttggtctaatggagacaaaagacactaaataactcatcttccccgtcaaattcactgagygggtgtaaccaatactctgttatgctaatggcacagaattaataattgc

SEQ ID NO: 132979 - DNA, 428 bp, Homo sapiens
cactgcttacaagttaggtaaccaggtcaagcagcctaatctttctgaaccagtttactcatctgtaaaatactgagaatactaatttattcatttgcttgacaaacatttattagatgcctcctttgtgctagtttaacccaactcacagggctagagttataactaaataaaatattgtattaaaagcacaaggcacacagtagatactcaagaaagttagttctctccctcctcaacccagtggttttttttttgttcatttagtggactttgcctttcagttctgtaaatgagaaacccccttgcctaagaatggccaggctatgggaaaagctggttcatcccccatagtcttattaaactgaattgaatgggactcacacaaaattgattggctctrtgaagtcatatgaatcattctaatt

SEQ ID NO: 132980 - DNA, 546 bp, Homo sapiens
tagtttttaccctagaatgtctaaattcatacttgtggtttaggttaaaggttgccctcatcttatattaaaaatcttttcatttttgtgttattctaatccatgaatagtttctgacatggttcttttttatggtgaatcctcctgaaagagatacagttcttaaagtacatttccctgatacacaaatatggcacaagcactttaagctatattccttgccctgaatatttcctattctccacttcatctgccttaaacataatagtaargcaaagagaggggaaagaggttaatcaggaaggttaatacttcagtgttcattgagaaattttttaaagtgaagagagaaaacaaaaaaattcgttgggcttttatgatttagtttattcaagagattagtgatcttggggatgcattacaaagctctagaaccttaattaaaacttttggccatacatatttcttagtatgacacaagctaactaatttaaaggatatgctttcactaaacgtttagcaggaaaatacactagtagccatcac

SEQ ID NO: 132981 - DNA, 273 bp, Homo sapiens
tttgtccttcctgtgagtcgatgattctttccaaattaaaaggtttttttttttaaacatatttatgccttctagggacttggactgaggggaagtctggagcaagtgcccagttcgtcattttgattccatccagactaaattgttttgactcattacaaaaatattatttttttgaaataacaaaatttcatktaccctttttaaaaagaatgaggtaaatatatacagacatgaaaagaagtttataaaaaaatttgattttttatattt

SEQ ID NO: 132982 - DNA, 591 bp, Homo sapiens
tctttacaaatgatgacagcaccaagaaagaaagaattgaatatttttatgaagttataggcatttttctggatcagaaatatatataaatttctaactaataaaagtttgtgatttacttccaatctaatttaacaatatgaaagtattacatcttaagcataagagtgtttcatyatgtgatatcatgttaactttttctgggaaacagcttaaatcagtcatagacattttatgcatttgaatcctggaattccaatatgttttacctgtggtaatcaggtaagtcataaaacaaaattgtaattttaaaaaatggtattattgtccaaaactgcaattacttttgcaccagcctaacaaataaatgtaaagtctggaatgaatttattgaattatttttaaaaatacacattaatatatgtggcaggttttaaaatattttctcctaaacaaagaataccacattgatacaggagtactgccagcttgatgaaacacagtaacaccagtcaattatctgttttgtaaggagattttccacagaaaattagataacatttacatcaataagttggtattcacaaaggc

SEQ ID NO: 132983 - DNA, 597 bp, Homo sapiens
aattttaaggaatatcagtctataaaactgttggctacaaaaataaatgaaagaaaaaaatcacactcaactgtctacatttaagcatacttccttgtttaacaccttcataaatattttgttttcagtcaaaactgaaggatgggaatctaatggaaaaattatttcagcaaagcctgcttttattatttctccaygaacagcaagctgagatgccttgacctgcataactcattactgtccatgtaaatagtagctgtcctggggcttaggagatgtaggaaaatttttttccccttttcaaatctttttctctttaaaaacttcatgacctgattagcatatatctcagaacctcttggcgtagatcagtttgacacctgtgagaatatatgctgtaggtctgttgtaaaataaaacccctactttaaaaagtatcaccttgcattacatggaggtgaagtattgcattctccttttctttaaggcttttctagaagggaatatgcatccctgtacaatttacttcaagcacccagagagaagagagaagaagtggtggaaggatccatttttctaccctggctcagaaaattc

SEQ ID NO: 132984 - DNA, 575 bp, Homo sapiens
tcaaatatatcctattccttattatttacatcaacaaggctaagtacatcaaaatgttcaggtagataaagtattcactcaaatgaattctgctgtcctcatattcaatctccgagatggtttgttcttactgcacgttttctatttcttcagcatayagagctatttagattaagaaagactaaaactgaagagtcaatttaatacatagaaaacacaactgcattgtttttttccttccgtgttggacaaattctgattcttagtatcaaatacactatgaagaataacttttttataaacaaattgtaagtctgaatactttttttttaaaaaaaaagaaattttatttggtcttatttgtagtttttctaaaaaaattcaaaatctgataattatttttaaattgtgatacactctttacattctaaaatttgtgctgcaataaccatattttaatttcaagtcatatataaaaaaaagtattagttttctaacaatttttgagcacccattatgaatcagagctgactccaggcagagatagtgtctttcttgcatatctccctatttgt

SEQ ID NO: 132985 - DNA, 575 bp, Homo sapiens
tcaaatatatcctattccttattatttacatcaacaaggctaagtacatcaaaatgttcaggtagataaagtattcactcaaatgaattctgctgtcctcatattcaatctccgagatggtttgttcttactgcacgttttctatttcttcagcatacagagctatttagattaagaaagactaaaactgaagagtcaatttartacatagaaaacacaactgcattgtttttttccttccgtgttggacaaattctgattcttagtatcaaatacactatgaagaataacttttttataaacaaattgtaagtctgaatactttttttttaaaaaaaaagaaattttatttggtcttatttgtagtttttctaaaaaaattcaaaatctgataattatttttaaattgtgatacactctttacattctaaaatttgtgctgcaataaccatattttaatttcaagtcatatataaaaaaaagtattagttttctaacaatttttgagcacccattatgaatcagagctgactccaggcagagatagtgtctttcttgcatatctccctatttgt

SEQ ID NO: 132986 - DNA, 517 bp, Homo sapiens
ggggttacaattcgacatgagatacgggtgggaacacagacccaaaccgtattaccaggtcctgctttgttgcccaggctggagtgcagtggcatgatcatagctcattgcatcctcaaactctcagatgcagagatccccccgcctcagcctctggagtagctaggacgacaggcatgcaccatcacgctcggctaattcttagtatttctgaaagcatgggtagcagtgcgtgtgtggaggaaggaaggctgtagagggctggtgttccctcgctgttccttctccacaggagaaattgagttgggtgtgtctaattccagcttgccagctgagggcgcttctgttccgtaattccaccaccctggccttggtgagccgagtacaatttcttatcccaaagataggcctaggagcaggttctttttcactcaaagtragggaggcttcaacacagaccatagccaacacagaccaggcatggtggtgggcgcctgtagtctcagccatcaggagg

SEQ ID NO: 132987 - DNA, 556 bp, Homo sapiens
gaggcaggcatttccctaccagccagtgagagacacagaggcaagcagaagtgtcaagttgcttatacagtcagcagcaacaaagccagagtgaagagaggcattggtggtgaagggtggaggggcctctggaggggtggctgagctgtctatcaacaggacgatgaactggggctggcagtggccaatctgtagcagcaaaggggacagggaatggtgaggaccagggttggtgcaatgactcccaggctgcatgtggaagtccatcttacatgtgagacaaccatctcatgttgagaattcctagggacacacaagtgggaagtgccttgccatttgatagatggggctagtcgtccactggacaaagaataaaccatgaaggtgaaccaattatatgaaggctggctaattatattttagagactycaccatgtgttatttgaattataatgcaacaactaaccattacccctagaatacagcctggatttccatcctcattatggttggtaaatcactagctggatggttcaatggccttgattggctttgg

SEQ ID NO: 132988 - DNA, 556 bp, Homo sapiens
gaggcaggcatttccctaccagccagtgagagacacagaggcaagcagaagtgtcaagttgcttatacagtcagcagcaacaaagccagagtgaagagaggcattggtggtgaagggtggaggggcctctggaggggtggctgagctgtctatcaacaggacgatgaactggggctggcagtggccaatctgtagcagcaaaggggacagggaatggtgaggaccagggttggtgcaatgactcccaggctgcatgtggaagtccatcttacatgtgagacaaccatctcatgttgagaattcctagggacacacaagtgggaagtgccttgccatttgatagatggggctagtcgtccactggacaaagaataaaccatgaaggtgaaccaattatatgaaggctggctaattatattttagagacttcaccatgtgttatttgarttataatgcaacaactaaccattacccctagaatacagcctggatttccatcctcattatggttggtaaatcactagctggatggttcaatggccttgattggctttgg

SEQ ID NO: 132989 - DNA, 336 bp, Homo sapiens
tatttgttcaagatagtatggtatccttttaaatagaaacacaacatttactctaattaataaatgcaattttctgaggtaaagtgatagtaacattagccaggcacaagtagaattttatatttttatatatttttatcattataagacagtaaatttctatattaaatctgggcagctgtttgccagtcagaacctttctctattccccctgccctcactcccacccaagctgttaagaaaggcratattcaaggcctggtatatggtcagttgtacacattatgtattcaacacatttaattattatcattattgggcactatttcattactg

SEQ ID NO: 132990 - DNA, 616 bp, Homo sapiens
acacacatagtaagtatatatatatatatatatacctgtgtatatatatctacacacatatatatacgtatatatatatacctgtatatatatatctacacatatatatacagtgtatatayatacatataatagtgaattaataaactactagttcgatctgccctggctcatttgtcaaggagcttacaatctctcttattaagaaaacacatattcattaaagcaggtgctcttataaaaagaggtacagccaaataagaccacaaggtaaaagaaatacaagctttaataacaatctaattatgcccaaatgatgcttaccagatacaagctttacttaaatctttttccccccttttcacttaaccgttgtggacaccttagaccttctcaacagtcccctttcttccagggccaagtccttcccaactccaagcccctcacaattctagggttcctccctgccccccttcattcttcctgctattcatgtgtttgcttcaccaaaagtcttcatcctgcactggtcattggccctgtgtcctcctcttctttgaaatgtactgattttaaaacttcccctcttggtgagaagttttctattttatagccc

SEQ ID NO: 132991 - DNA, 610 bp, Homo sapiens
aagcaaacatacacatcctaaaaagttcacaaacactgtaaattactgtttgattggttgagtgcattaatgttctactttacattacctctattttccattaaaatgaagtaaagcaaagtttaccctgtcatagaacacctactctgtaagtaaaagctaggaaatggcaatgagcaaggcatagttagtagatataaaatgattagagcagagatttcatataaaggctagaggcaataatgttctaaagggaaatttaggccttattataaagagtcttgattgccagggtcagaaatatgagtgtattttgtaatcagtggttcattagaattacctttttgagatcttaataaacatgagtattggcagggctgataattagatagtatttaggaccattctggtttttgcagccatagtccatgctgattggtcaggaaagcagttttgattggttagtgtttttgtcatatcactggtaaaattctttggatatcacccctgaatgtctgggtcctatgtccagagagtctacttcctatgtctagatgaggcttgggcacagyattctctacaatctctccatgtggtactaatgcaaagt

SEQ ID NO: 132992 - DNA, 547 bp, Homo sapiens
tggaggttctttaacctgaatgatatataattcatagtttctcccacggggaaaaaaataaacagcaaataaggaaaaactttttgaaatattgtggcacstttatcactattaaacatgtgataattctagaataatctgatacagaggtggaaattaagcttgctgacatttgtctaaaagaattgcctgaatgaaggtggggaaggtaaaggaaatgataaatctgatgaaaaagtaatagactctattcttcaaccaaatgtgaatcatttatctgtcacacacttttttcaagtaaacctcctaattagcatgaataattagaaacaggatttgcatattttctttcaaagaacaaattgtggcttaccatcttgatatcccaacaaagtatatctaacctaactattaaaatattgtgaagatttctataaataaaaacatttactacggtcagattttcaaagtcaaaataaagtgactgtctagtgtgtttgaggatatttggagggttctatttggctgcctacaattcaattcagta

SEQ ID NO: 132993 - DNA, 559 bp, Homo sapiens
cagctgatccatcaagtgcagggtctgcaaaatatctcaagcactgatcttaggagcagtttagggaaggtcagaatcttgtagcytccagctgcatgactcctaaaccataatttctactcttgtggctaatgttagtcctacaaaggcaatctagtcctcaggcaaaaaggaggtctgctttgggaaaggggttttactgtctttgtttaaactgtaaactaagtttctcccaaagttagttcagccttcccccagaaatgaacaaagacagcttggaggttggaagcaagatggagtcagttaatttagctctctttcactatctcaatcataattttgcaaaggcagttacaatccctccctttgggttttataacaccttcatcttaaggtgtaggctatgaagatgggaaaaggccatcaatcaatctggcttcttcctgctaacaggagacatagtgggaatgggagttaaccccgagatgacaagagtggaactgctttgcactgatctgggtgtaatcatgcaggcccggatgggatttcaaggcttgca

SEQ ID NO: 132994 - DNA, 559 bp, Homo sapiens
ttggcctatggttcttgagagtaggtacagaagcttcttaagtaacagtaatgcttttctgaaggaagtcaaaggtggggttctgaccacagctcagagaaacaaagccagaaatttccagtgaaagaatttctattcaggtggaattgctgactagccatgagatcatttctgaacaccagtcataaagctgtgcctaaaatatgcttaacacattcaattgcaatcagtaaaagccatagtctttaaatttcatgatyagatgtaccaaaggacccttgttcctctagtcaagtgagtaagtgctggcgaattaccaaaatctaaatttaataaaattgtattagtcaccttctgaggtgtcatctcagagtaatgctgagatcaaaaccctgagttgaacatgtcaaaccaattgcaggatgccaggtggcttatgaaacaaagagaaacaactgacatgatggtcggtgtggctctgctggtaaaggaagagcatatttacattttgagagtcaagaccctggcctatccctcttgtccaaatatattgtctgcc

SEQ ID NO: 132995 - DNA, 564 bp, Homo sapiens
tttggtttcctttactttttccttattaatttgatttattttgtttgtttgtttttacaatagtttagcaactgctaagcatrgctgtattaaaatatggcttgttgtattatacatagttttgggttgcttcttagagtcctaagttggactatccttctgacactataatcccgaagtcattattgggcacagtaagagattttcagctccaatatctaacatctatgattatctcttgacttcttccacgtggaggagacctcagtcttgttttcttcataggcattagatttaacatttctgcagagcagagatcctttcatttgcttttcctcttaattaccccttatgactagtgaaattagttttgcataaaatgctagagaactttattggaggccttgtctgccattaatatttcctctgaagtgaaacttgcctagtctataagggactccattaagagatgtcaattggaaacaagacagtctttttgcagactcagctggtgataaatctttcctttctcaccctcagggtgattcagagcgtatttttcat

SEQ ID NO: 132996 - DNA, 668 bp, Homo sapiens
tccatcatatagatataccatagtttgttagtattttattcttgtttatattatttccaattwttaatgattaaaaataatgctaaattgaatatatttgcatataaatcttagcgtgttcctctattttcttaggataaactctgaggaagaaaattattggactgtaggtcagatatatgtttaagcttttggtatataaggggatttcctctgagatagggcacgcctttttaaaaatccctaaagtgtatgatagagcttcttgggaagaccctcagccatcttgacattattctttagtctttcaaatatttgccaattttctaattttcatgttagttggtttttgtttgataacttttgggactcatttctggtttatataattgaccctgtgtattacatattcatgctgcttgctcattttcttctattaaaatatttcttttatttatatatttagtttcttactgatttttgtagctctttacctcagacatacctatcacaaatgttttgtccaatttttcttttgcattttaatttacttttaaacattgagtctattataaatacaaaaaacttcattctttttaaagtgaatacttcattgaattttaaattatatgactgctaccagaattaaaacagacaacatttctgtc

SEQ ID NO: 132997 - DNA, 473 bp, Homo sapiens
taattattaatagaaaacttttttaaaaaataagaaaacgttacgtaaatatgttttacacttctgagtaatacatttacattaaagtaattagaataacaataatatctatgagatttaatagtagaaaagactaaaggatagttaaaagcataaagataatttatactgataaaattacagatatattaataaaaaaacacacattcctcaatagtaaatttaattttctatacaagctaatggaaaaattagaccctttgactcaaagcatccatcatyattgattgttaagctattattttcaccatttaaaagttaattatgcatatactatcgtactcttaggatagtaaattactaaatttgggaaagggggtttggccacatactgtgtaaaccttaaagatgtcattatgtgttagtgtagtaagttaaccacaagcaagttattgtaaggaataatttataac

SEQ ID NO: 132998 - DNA, 613 bp, Homo sapiens
ctggttaaaagttctgtcacgggagccagttgttccttgtgttcgcaggatgctttctttaaccctgggtcctgctcaggccagtaacagcacaccctgggcctacaactgctcaggatctgtgtgtaagacatggaaactctgtcatataaatgtatttagtgctcctccctcgaatagccctaagccctgtcatataaatgtatttactgcccttccctcgaatagccctaagcctctattctctcatttatcattctttgttttttactgccttaatggtttttgtgatcatattagcctattttctatttttatcctcttgtcattctgcccatcaactgagagcagtggccatatcctgtttgtacatgccgacctttctgaaaacaattcattcattcattcatkcattcatccacccacccatccattcaacaatcctggccctgtcctgggaactgaggatgcagcaatagagaaataaagatggctgctgcctgccaggtgcactgcccagatccttgttcagggtcactctgctcattccccagctgccaggattgttactggctgatgacccacattgagtcctccctatgaattgcccttg

SEQ ID NO: 132999 - DNA, 584 bp, Homo sapiens
  misc_feature (1)...(584): n = A,T,C or G
tagtcacttcagcagaattctgcttcatctttgtcactgggcaaaattaggggcatgtcctgtgttattggagttgctagaacacaaacgaagtccaagttgagtcaaagaggaccccagagacctgactgtgcattgtcctcctggctgaagtgagaagagagtcgctttgtttggcagtggaggctttccaaatttagagagtttcttaatgactcttcaactgcgattacnatcctcgaggataattagtaatgttgctgcttaggctgttcagcaccaatcaatcaaagaggatacacagaacttgcaataaatccagaatttgaacccattccagtgaggaaaaggtatctccttcaaggttcaataaaagaggttcatcattctggtaaatacatttagaaargcaaaaattaaatgaacaagaggcttagcttttgtgcagttacaattcagttttgtcttgttcttcagtggttggggatgaatggcaaaaagatctttatgtggagatatcataaaagaagaaaaacaggtgagatagtgaatttctctgaaaatggcaagcactgtcatctctt

SEQ ID NO: 133000 - DNA, 572 bp, Homo sapiens
ttatcttaacagacacaggtctagtcagaactgcaaaactgacttatctgcagagccagctcaaactgcaggcttataggctttccaggtccatgttctactccatgcccctctttacaacagaacaacacagaaggacaaggacaaagaaaaatggcaacaacaaaaaaaggctgtttctgaggggaaagggatcaaacgatatgaatattcataccacaaagtaccaaaagtacaccagagacatcacaccccaagactagccacacagatcctttttttgccgttaatcaaaccttgcagaggagacagatagtgatttttactgtttgctcaactggattgcccagagaaccaggccaggagcctggctggtaagaaattcttacacttttgccacggtgtcagtttcctgggttcccyttgctgtggcttcctgaaaaaaaagaacaattttgatgatcttgctcacagtgccataactgtggggcccagggccctttgccccctaaagttttgctgaaagttactgaggcagattgatgaatagaagagtggcatacaaatttatt

SEQ ID NO: 133001 - DNA, 455 bp, Homo sapiens
gaaagaaaatatgagtatgtgctgggctctgaagactgctagtatcacttttcaagtactttaccctctgtataaaagtatatttaaacagggtgctgtggctcatgcctgtaatctcagtgctttgtggggccaaggtgggtggatcacctgaggtcaggagttcgrgaccagcctggccaatgtggcaaacgaaacctcatctctactaaaagtacaaaattggctgggcatggtggcaggtgcctgtgatcccagctactcaggaggctgaggcaggataattgcttgaacccaggaggcggatgttgcagcgagatgaaatcatgctactgcactccagcctggacaacagagcaagacttggctcaaaaaaaaaaaaaaaaagtgtatttatctgctttagagggatgagtgaagtttcctatgcctggaaagtttacaaatgcctacca

SEQ ID NO: 133002 - DNA, 455 bp, Homo sapiens
gaaagaaaatatgagtatgtgctgggctctgaagactgctagtatcacttttcaagtactttaccctctgtataaaagtatatttaaacagggtgctgtggctcatgcctgtaatctcagtgctttgtggggccaaggtgggtggatcacctgaggtcaggagttcgagaccagcctggccaatgtggcaaaygaaacctcatctctactaaaagtacaaaattggctgggcatggtggcaggtgcctgtgatcccagctactcaggaggctgaggcaggataattgcttgaacccaggaggcggatgttgcagcgagatgaaatcatgctactgcactccagcctggacaacagagcaagacttggctcaaaaaaaaaaaaaaaaagtgtatttatctgctttagagggatgagtgaagtttcctatgcctggaaagtttacaaatgcctacca

SEQ ID NO: 133003 - DNA, 395 bp, Homo sapiens
taattatttgtctatgataaatttcaggaaggataattattgctccaaagggttttaattatttttaaagatctttacacaatttcagattgcattttttagaaatttttgctaatctttatttctttcagtaggttagatttaccttaccctaaaatcaacaatgcttttttaaattatgataattttatggattaaaatattatcattacattttttwaaaaatttcaacaattttaagggtacaagttgtttttggttatatggatgaattgtttagtggtaaagtctagtattttagtgcacctgtataccaccccattagtgtacattgtacccaataggtagttttcatcttcaccccacttccaccctcctcttttctgtctccaatg

SEQ ID NO: 133004 - DNA, 491 bp, Homo sapiens
aggagctgggtaaaatgaagctgttggagtagccattcttttactcctttactttcttaataaacttgctttcactttgycctgtggactcaccctgaattctttcttgcgtgagatccaagaaccctctctctgggtctggatgaggaccctttcctgtaatagtcgtgcccggtccctggtaagtttttgttaaagggactggactaacctaaatttaggattgagagatccacttgtcacacacggatgagtcagggcctggcattttggtaacatcactattcccagtacaattacatccttaatatttttccctgatatgaaaccctttctgaagtctcttttaaattgttacaataagaggaggctatagacctgggattcagggaagataaaatgaagcatttaagagcctccttcttttgagggaaatgggccaagtacattctttttacaaagttaaccaggaaagaaaagcatctgaagat

SEQ ID NO: 133005 - DNA, 402 bp, Homo sapiens
gaattcaatgcttgggtcacctccarattcattttcacagtctttcatgttttggtcatactacattgtattttgctgccatatgactgatctttttttgttaaatgtgagatactttttaaaaaatatttaacaatgcattgaggcctagtagcatgttatcttgctgcagaagagatgggagtctacttctgggggatggtcaggggtcctccgtacaggctgcaattgaggtcgtctctgcaggctcagtccctacaaaggccagggtatttcctgtccacctctattctgatgcatgactcttctgggtctcaaccagagccagtggacttcagtatggatcgctttcattggcagaccctcaatccacttgttttccatctaaccccacgcatgtgt

SEQ ID NO: 133006 - DNA, 402 bp, Homo sapiens
gaattcaatgcttgggtcacctccaaattcattttcacagtctttcatgttttggtcataytacattgtattttgctgccatatgactgatctttttttgttaaatgtgagatactttttaaaaaatatttaacaatgcattgaggcctagtagcatgttatcttgctgcagaagagatgggagtctacttctgggggatggtcaggggtcctccgtacaggctgcaattgaggtcgtctctgcaggctcagtccctacaaaggccagggtatttcctgtccacctctattctgatgcatgactcttctgggtctcaaccagagccagtggacttcagtatggatcgctttcattggcagaccctcaatccacttgttttccatctaaccccacgcatgtgt

SEQ ID NO: 133007 - DNA, 402 bp, Homo sapiens
gaattcaatgcttgggtcacctccaaattcattttcacagtctttcatgttttggtcatactacattgtattttgctgccatatgactgatctttttttgttaaatgtgagatacttkttaaaaaatatttaacaatgcattgaggcctagtagcatgttatcttgctgcagaagagatgggagtctacttctgggggatggtcaggggtcctccgtacaggctgcaattgaggtcgtctctgcaggctcagtccctacaaaggccagggtatttcctgtccacctctattctgatgcatgactcttctgggtctcaaccagagccagtggacttcagtatggatcgctttcattggcagaccctcaatccacttgttttccatctaaccccacgcatgtgt

SEQ ID NO: 133008 - DNA, 402 bp, Homo sapiens
gaattcaatgcttgggtcacctccaaattcattttcacagtctttcatgttttggtcatactacattgtattttgctgccatatgactgatctttttttgttaaatgtgagatactttttaaaaaatatttaacaatgcattgaggcctagtagcatgttatcttgctgcagaagagatgggagtctacttctgggggatggtcaggggtcctccrtacaggctgcaattgaggtcgtctctgcaggctcagtccctacaaaggccagggtatttcctgtccacctctattctgatgcatgactcttctgggtctcaaccagagccagtggacttcagtatggatcgctttcattggcagaccctcaatccacttgttttccatctaaccccacgcatgtgt

SEQ ID NO: 133009 - DNA, 536 bp, Homo sapiens
ataaattaaagagtagacattataataatttaaccaaattaaatagttaataaaaactagttaccagttattccatgaataaattatatcagaaacacctaaagcctatagcytccttatcaatgacagatttgaatatttattctcttttcaattataacggaaacacctaatgtgcttgtacaaaatctcccaagtaacttaaattaagtcaaactctatcaagaacccataaagtccaagatactgagctagatatagcttgtgctttgctcagcaaaaaatattatacaaaaaggaaagcattcttaaattaaaataatattgtgttcagatggctggattagataaaaatccctctccacaaattttataatggaggttttttaaaacaataaaaggaaaaaaggattaagaaacaataaataaaagtgttgattacacctaaaaatttaaataacatctctggtaaaaggaaaaaaacaatcaggtttaattgatttcaaaactgataatcaatgtatcgaaagtcaatg

SEQ ID NO: 133010 - DNA, 536 bp, Homo sapiens
ataaattaaagagtagacattataataatttaaccaaattaaatagttaataaaaactagttaccagttattccatgaataaattatatcagaaacacctaaagcctatagcttccttatcaatgacagatttgaatatttattctcttttcaattataacggaaacacctaatgtgcttgtacaaaatctcccaagtaacttaaattaagtcaaactctatcaagaacccataaagtccaagatactgagctagatatagcttgtgctttgctcagcaaaaaatattatacaaaaaggaaagcwttcttaaattaaaataatattgtgttcagatggctggattagataaaaatccctctccacaaattttataatggaggttttttaaaacaataaaaggaaaaaaggattaagaaacaataaataaaagtgttgattacacctaaaaatttaaataacatctctggtaaaaggaaaaaaacaatcaggtttaattgatttcaaaactgataatcaatgtatcgaaagtcaatg

SEQ ID NO: 133011 - DNA, 621 bp, Homo sapiens
cccagagcacaatatgtaaaaacaccagtatttagccagtaaccaaatagtaagatccttcaaaagaaatacagacaaagaagtagtcacagagataggaagaaaaaggtatcataaatgccaacaaagtacagttgaaataagggagcagttagcaccaaaacttcccagaaatcaggtaagaccaggactaaaatatccagtagattcggtaagtaggatatcactgatctctaaggcaaaagcaaygtccatgaactggttgggggcaaatccataaaaaaactgcaaagttttagaaaataactgagaactgaaggagtggcgataccaagcttggggatagtggaaggaaaagagatataaccaagagagtgacacagggtaaaggatttttaaaaattttcttgaaaaacaggagtcttgaacaagtctttttaggctaaaaggagtcaagtgtgaagggagagaaaaaaaagacaagacaggacaagatttttttaagcaagagaaaaggtgaagtagttctaatccagtgactttcaattcctctgtgaaaacaaggtgggtttattgaagaaagaaggataagggaagcaaagtgaatgcaaaagttgaact

SEQ ID NO: 133012 - DNA, 621 bp, Homo sapiens
cccagagcacaatatgtaaaaacaccagtatttagccagtaaccaaatagtaagatccttcaaaagaaatacagacaaagaagtagtcacagagataggaagaaaaaggtatcataaatgccaacaaagtacagttgaaataagggagcagttagcaccaaaacttcccagaaatcaggtaagaccaggactaaaatatccagtagattcggtaagtaggatatcactgatctctaaggcaaaagcaacgtcmatgaactggttgggggcaaatccataaaaaaactgcaaagttttagaaaataactgagaactgaaggagtggcgataccaagcttggggatagtggaaggaaaagagatataaccaagagagtgacacagggtaaaggatttttaaaaattttcttgaaaaacaggagtcttgaacaagtctttttaggctaaaaggagtcaagtgtgaagggagagaaaaaaaagacaagacaggacaagatttttttaagcaagagaaaaggtgaagtagttctaatccagtgactttcaattcctctgtgaaaacaaggtgggtttattgaagaaagaaggataagggaagcaaagtgaatgcaaaagttgaact

SEQ ID NO: 133013 - DNA, 534 bp, Homo sapiens
tcggtaagtaggatatcactgatctctaaggcaaaagcaacgtccatgaactggttgggggcaaatccataaaaaaactgcaaagttttagaaaataactgagaactgaaggagtggcgataccaagcttggggatagtggaaggaaaagagatataaccaagagagtgacacagggtaaaggatttttaaaaattttcttgaaaaacaggagtcttgaacaagtctttttaggctaaaaggagtcaagtgtgaagggagagaaaaaaaagacaagacaggacaagatttttttaagcaagagaaaaggtgaagtagttctaatccagtgactttcaattcctctgtgaaaacaaggtgggtttattgaagaaagaaggataagggaagcaaagtgaatgcaaaagttgaactactgaagcagccaccacagagaatggggaagagagatgagtagggctacataggaagtttgtgygcaactttaagtccaccgccaagtgctgaagactacaaactggaagtgcccaccaaa

SEQ ID NO: 133014 - DNA, 636 bp, Homo sapiens
attaaggaatcagagatggcttatatctggataaatagaagtacagataactcttttgagaagaaaatgtgcaatgaaagggactagaaatataaagtatgagctggaagggtatgragggtcagtgagatccatcttaatgcgggagtcaggagaacttgtttgtaaagcactgaagatggtttgggtgagagagacaacagctgaagaaggtgtttggaggaacagggctgggtatccaaagcaaatgtgaaagggttgaccttttataggaggaggggcacttcccacattgtcacaggaggaaggaggagaaaacagatgccaaagcaggtagttcaagtgcacctataccatggaatactacttggcagtaaaaaggaacaactgttgatacatgcagcaatctggatgaatgtccagaaaattatgttaagtgaaaaagtcagtccaaagaggttatactgtataattccactaatatataacattcttacaatgataaaattatagaactggaggactgattcatggttgccagggattaaggaggggatgaggtaggagggaagtaggtatggctataaaagggcaacatgagggatccttgcgatgatggaaatgttctttatcttg

SEQ ID NO: 133015 - DNA, 489 bp, Homo sapiens
cccggctaattttttttgtatttttggtagacacagggtttcactgtgttagccaggatggtcttgatctcctgacctcgtgatcctcccgcctcagcctcccaaagtgctgggattacaggcataagccacygtgcctggcctgtgtgtaaatatatttctatcgggaggctctgtatgcccaataaggctaatgaagaaacttaaaccaaaaatgtatagagtaacaggatccgtgaacagaaggcttcctccccccactcccctgctcatttcttaggttctagcgtgattctacaaataatgggctttggtccttcccgaggaaacaagattaattattgaatccatatattaaaaatctaagttgctttgttcttaaaattccctttagaataagaaactggtttcgggctttttttttttttaacctgttatcaaggtgttgagctttttggatgaggcgtaatcatattcctttttctttct

SEQ ID NO: 133016 - DNA, 577 bp, Homo sapiens
gcattcagtaaataatgttgaaggaataaataaatatttatggaaaagtgacttttttttttagttgcaggttgagcacgatggtgtgattcttcatgctgtaatgggtgacctaataagaccatccatctaaaatctctatggctttgctgtycagtgtgcatcttacagttgtgattggccttaaagtctatgatacaggctaaatcccattgagtttcacatcagccactcaaaaaatatggtgacaaaatttgtgaagagattattagtgtctacattcaaggaaatttcattagtctgcttttaagcaatcatatagtcacatttgtttatatattttgattcattgactaagttgaagtgatgtgtgtgttcaagtatgggggggattggaaaaacaaggaaccaaattggtttatgtccagatgatagcattatactcaatataacagttccgtgcccaattgcaacaaaatacatttcagaaaagtataggccctcaacgtgagaggtattaatatgttagtaagatataaatgaaggccctgaggtttggtaggtatgaattttagta

SEQ ID NO: 133017 - DNA, 577 bp, Homo sapiens
gcattcagtaaataatgttgaaggaataaataaatatttatggaaaagtgacttttttttttagttgcaggttgagcacgatggtgtgattcttcatgctgtaatgggtgacctaataagaccatccatctaaaatctctatggctttgctgtccagtgtgcatcttacagttgtgattggccttaaagtctatgatacaggctaaatcccattgagtttcacatcagccactcaaaaaatatggtgacaaaatttgtgaagagattattagtgtctacattcaaggaaatttcattagtctgcttttaagcaatcatatagtcacatttgtttatatattttgattcattgactaagttgaagtgatgtgtgtgttcaagtatgggggggattggaaaaacaaggaaccaaattggtttatgtccagatgatagcattatactcratataacagttccgtgcccaattgcaacaaaatacatttcagaaaagtataggccctcaacgtgagaggtattaatatgttagtaagatataaatgaaggccctgaggtttggtaggtatgaattttagta

SEQ ID NO: 133018 - DNA, 577 bp, Homo sapiens
gcattcagtaaataatgttgaaggaataaataaatatttatggaaaagtgacttttttttttagttgcaggttgagcacgatggtgtgattcttcatgctgtaatgggtgacctaataagaccatccatctaaaatctctatggctttgctgtccagtgtgcatcttacagttgtgattggccttaaagtctatgatacaggctaaatcccattgagtttcacatcagccactcaaaaaatatggtgacaaaatttgtgaagagattattagtgtctacattcaaggaaatttcattagtctgcttttaagcaatcatatagtcacatttgtttatatattttgattcattgactaagttgaagtgatgtgtgtgttcaagtatgggggggattggaaaaacaaggaaccaaattggtttatgtccagatgatagcattatactcaatataacagttccgtgcccaattgcaacaaaatacatttcagaaaagtataggccctcaacgtgagaggtrttaatatgttagtaagatataaatgaaggccctgaggtttggtaggtatgaattttagta

SEQ ID NO: 133019 - DNA, 537 bp, Homo sapiens
tgagaacataaaacattttaataggaatttcatataactaaactaagtatttgagagcccaaccagagaattatggctctttgaaaacaaactttatgggacttagtgttcttagtctaccctctattacagttcttaaaaaaactatagcatttctatcgttgactttaaatctttgtcacttcttgcatatgtaaagggttaaatgtgtctctgcttaatgacttgggggccatatctgtttgaagastgagttttggtctctgtaggtctttagagtttagagtctatttttttctattgagagtcttagtgtgagtgtctctcttctaatttgggagtgtggaggattgttttatttttccagttgtgatcctcataaatcaccccaacactttcagtgtcatgaccttaattctctaggacatgcaatatacctttcccaattaagtggactcatggtctggctcaagagtgatattctcagaatggaagagcacttcttcctgacccctcttagaatgaccactgtgtaat

SEQ ID NO: 133020 - DNA, 462 bp, Homo sapiens
acaactttcctgtgtcctttttaatagtggcagagtatgtcattgcacagatacaccattgtataaattgtctgaccagtccctggggggtggactctcaacagttttaaagcctgtgagttctgtgaygtccggtgtgagaatgcttggcacaccattacttttaggtgtaaggggattcgtagttggtgaggtaagtcttctcctggtgtttagtcaggatgccttagagtgtgttgtgttgtattaaatgatggatggtgtaacaaatacccttgaagttctcactggcttaacataaagagttagtttcttccttacctacgggccatttttgcaggcccatgctccgtcccacgcggtcactcaggctgatagtcgttctgctatctttatgtcacttccaaggtcccctgggtgttgacaccctgattgggatatgggagaaggagtgcatgggaa

SEQ ID NO: 133021 - DNA, 462 bp, Homo sapiens
acaactttcctgtgtcctttttaatagtggcagagtatgtcattgcacagatacaccattgtataaattgtctgaccagtccctggggggtggactctcaacagttttaaagcctgtgagttctgtgatgtccggtgtgagaatgcttggcacaccattacttttaggtgtaaggggattcgtagttggtgaggtaagtcttctcctggtgtttagtcaggatgccttagagtgtgttgtgttgtattaaatgatggatggtgtaacaaatacccttgaagttctcactggcttaacataaagagttagtttcttccttacctacgggccatttttgcaggcccatgctccgtcccacgcggtcactcaggctgatagwcgttctgctatctttatgtcacttccaaggtcccctgggtgttgacaccctgattgggatatgggagaaggagtgcatgggaa

SEQ ID NO: 133022 - DNA, 468 bp, Homo sapiens
ccactgattctttcttctgcttgatcagttctgctattaaagaactctgatgcattcttcaatataccacttgtacttttcacctccagaatttctgcttgcttattttcaattgtttcaatctcttagttaaatttatctgatagaattgtgaattctgtctctgtgttaacttgaatttctttgagtttcctcaacacagctattttgaattctctgcttgaaaggtcgcatatctctatttttccagcatcgatccctcatgccttatttagttcatttggtgaggtcatgttttcctgaatggtgttgatgctagtagttgctcttcggtgtctgagcattgaagagttaggtatttatcgtagtcttcattgcctggccttatttktagctgtccttcttgggaagccattccagatatttgaaagaacatgggtgttgtgatctaagctgtgacctaagctt

SEQ ID NO: 133023 - DNA, 449 bp, Homo sapiens
atttaccgtagcttaacttgagtgaagacagattaattaccagttacacatcacactataagattcatgagtataggcatgatatcagtattattcaccattttaccctcacaacctagcactgtacttaggatmtagtaagtgctcaagaaatatttttgactgaatgaatagatacattgtatggtagagatttttctttttatatactggtgaaaatgaactataatcacaaacaaaaataaccttcattgttccataatttatatatgtgatttcagatatttccaagagttgtatctggtcacaatggacatgagattaatttttctgaaaatgctggcatcatgtgccctttctgtgctccttcttctccaccgtacttagaattttaaagtatattagaaattacagatgagaaaatgtgataagtggcttactttgaattc

SEQ ID NO: 133024 - DNA, 449 bp, Homo sapiens
atttaccgtagcttaacttgagtgaagacagattaattaccagttacacatcacactataagattcatgagtataggcatgatatcagtattattcaccattttaccctcacaacctagcactgtacttaggatctagtaagtgctcaagaaatatttttgactgaatgaatagatacattgtatggtagagatttttctttttatatactggtgaaaatgaactataatcacaaayaaaaataaccttcattgttccataatttatatatgtgatttcagatatttccaagagttgtatctggtcacaatggacatgagattaatttttctgaaaatgctggcatcatgtgccctttctgtgctccttcttctccaccgtacttagaattttaaagtatattagaaattacagatgagaaaatgtgataagtggcttactttgaattc

SEQ ID NO: 133025 - DNA, 449 bp, Homo sapiens
atttaccgtagcttaacttgagtgaagacagattaattaccagttacacatcacactataagattcatgagtataggcatgatatcagtattattcaccattttaccctcacaacctagcactgtacttaggatctagtaagtgctcaagaaatatttttgactgaatgaatagatacattgtatggtagagatttttctttttatatactggtgaaaatgaactataatcacaaacaaaaataaccttcattgttccataatttatataygtgatttcagatatttccaagagttgtatctggtcacaatggacatgagattaatttttctgaaaatgctggcatcatgtgccctttctgtgctccttcttctccaccgtacttagaattttaaagtatattagaaattacagatgagaaaatgtgataagtggcttactttgaattc

SEQ ID NO: 133026 - DNA, 449 bp, Homo sapiens
atttaccgtagcttaacttgagtgaagacagattaattaccagttacacatcacactataagattcatgagtataggcatgatatcagtattattcaccattttaccctcacaacctagcactgtacttaggatctagtaagtgctcaagaaatatttttgactgaatgaatagatacattgtatggtagagatttttctttttatatactggtgaaaatgaactataatcacaaacaaaaataaccttcattgttccataatttatatatrtgatttcagatatttccaagagttgtatctggtcacaatggacatgagattaatttttctgaaaatgctggcatcatgtgccctttctgtgctccttcttctccaccgtacttagaattttaaagtatattagaaattacagatgagaaaatgtgataagtggcttactttgaattc

SEQ ID NO: 133027 - DNA, 491 bp, Homo sapiens
accaagatttagatcaaagtggtaactggtagagacaaggttccaatcacagctttgtctgatacagttctttttttaatctactgcttcccaacattagaggataccatccaagaagacaccgttgctcccgactgtggcaaagaaaaaaaagtctacacatgcagatatatatacttagagtcacacaaagtataacaaacttctggggagccaaaaagtaggatgtacacatcaaatcacctgactttggtgaaagcctagatgtagaaatcatggaagcatacatttagaatcctatattttggaggttaagtggaaaccagggagtgtgatacattctccagctttgagttggctgtgtttgtagtcatgcgtatgttcaacatcactttaaaaccttgtagggcygggcacagtggctcatgcatgtaatcccagtgcttcagaaggccaaagcaagaggatcacttgagactaggagttcatga

SEQ ID NO: 133028 - DNA, 648 bp, Homo sapiens
atcaattttgttgatctcttgttagaaaagaatccttacacaattgttctgtgggcattaagagatgttaccagctttttctataaggataaaataatttgtgaagaaattatactcactttggctttgacaatggtactgyagtcaaaaattcaaagtcgaaagatttttattgttacctttccttttatggtaccatatgataaaaaaaaacttgcatataaggactttataaagtactttcaaaggtattatttcatttaaacttaagaaatctgtgttgtaggcttgtcagatattattcttaatattttattgggaaaaaaggctcgtaaaaactaagagattttcccaaagttaataaactagtgagtgatgaagtcaggatgaaaacccatgttgactagtccagagttcccaaaacaatgcaacctataacattactggatgggggaaaagctttggatcctattcacagtctgaagaaaatggaaagttaattgttttgtaataattattattcaaagataataactaatctttgaataatctttggtaataataattctttgaatcctttggtagaactcaaagaatcacctgccaaagacaaaagattcttctctgataaacataaccagctaataa

SEQ ID NO: 133029 - DNA, 495 bp, Homo sapiens
ttgtagtctgtgcctgtgcagccaaggaacttccaggtcttcagggaaaaccctgatgtagaagagcagagattcactgaaaattgcttgaaggggacctggcagcattcatgcaactgtcccctacaggttccctaaaatccagtggcttgagggaatttagcatctgctacaaattgcatccttgaaaaattaaaacaaaatgattgtatgcattatttaagatacataaatatgtgtaaaagtgtcaaaaatattcaagggaataatacaaactacttcaaaatcatagttttggggtggatgtaagaatgagtgtgacttcaactgtaggtataattaatttctatagagaaaaaatgaagaatctaaaggaaatatcacaaaatrttagtatttattaatttaatagatatgggtatctagttattactttctgtatttttttatatattccacaattaaatattgttttgaaagaataagttctggtgc

SEQ ID NO: 133030 - DNA, 548 bp, Homo sapiens
aacagtgtagtgacagcagttgtagaacacatgaacagcgtgtaaaaagcataaaagatgctaaataaatgtcagttccctctgctctttgagaggttcattatgctaacttcctcatctctcaagagctaatatgtcaaattctagcagacaaaagatcctcaaaactcamgttgaatctataggagccttcaacttgaagaatcttctctaaattcagtctggttcctcatctgaggaccctctgaagaaatctgcccagaacttctggttaatcctgtacagtaataagtagcattctggctatgctcttagaaaatttagcttttcatcaccaatttagagatggtttttaagtatttctgaaatgaatcctaccctttctccccctttcttttcctttttccctttattctttcccaatccttttaatatatggactctagatctcaaaaatagatggtaaagtcaggttgtaattggggtggggaaccagggggagaaaatttgacctgctttcctttctaaaacttcaagcactaggatac

SEQ ID NO: 133031 - DNA, 550 bp, Homo sapiens
gttcacgccattctcctgcctcagcctcccgagtagctgggactacaggtgcccaccaccacgcccagctaatttttttgtatttttagtagagatggggtttcaccgtgttagccaggatggtctckatctcctgacctcgtgatctgcctgccttagcctcccaaagtgctgggattacaagcgtgagccaccacaccaggccaaaaatttaaattaaaaaataaatactttatacatacaaaaaataaaataaaatgggtctatctcaaagctgattattcaaacaatgaacaatatttttccttgtagatataacttttaattattagaaaggtgaaattgttcatttatattacatttatagtaacttttaaaaaagtaacataaatggagaatttttaaagtatttaaaaagtaatatgaatggagaatttcacctttctaggaatcagaagttatatacacatatttaaattttaaaaattaatatatattttaatctttaggaatataagaataatattgccaaacttgtaagtgaaatgaa

SEQ ID NO: 133032 - DNA, 538 bp, Homo sapiens
gcataaacatggtcatgaaaacagggagtcaattatgctcyccgaaattggagatctaataggtgcattttcatggctacaacactccacctactgtactacacagagttacttctctacatgagttcatgtagcaactcttctgtggttcttgttggcctctcttcctaaagggatactagaagtattatttaagtgttcttcctagtgacctgaccatatatttagccaatgggttccagatcccataattggttcaggtctggagactgagaaaaggatgataattttttaattgaggcatgtaccctaagccttgtgttcttccattttttatttttttaaattgtagtacctgttaagcagaattggctatccatctattaactatctctacaactacctgcacatcaagtctttttggctgctctccagccttcctggtaatttggtaattgtggcctcctgccttttggcagttaagcactatcatctggcttttattactttgtggtggagaggcctgccatccccatgg

SEQ ID NO: 133033 - DNA, 490 bp, Homo sapiens
ttaaatattttttctttgtctttatatttgaatgacaatttggctaagcataaaatataagggtcacattatcttgcactggttacttttttggcatccstttactgcctctatgggattaatgttgctttagggaagtctgaatgtaagcttatgttttttatttccttctgcataagtgactttatcttcttgtctagctgttcaaaaaagtcttttcatctttaaaattcacagactttacaagggaatattttggtgttgaaagtcctgcatcagattttcctgggattctccatatctttttaaatcatagatcaattttaattatagaaaattttccttaattttacctttaaacatatttatttttctattttggttgattatacctatgtttgattgcctttgtctgaattctatatctgtaattttctctgtaaccttttaaatcttggtgtcttatttttcctttatttaattttgttca

SEQ ID NO: 133034 - DNA, 545 bp, Homo sapiens
tgctttgtttgctaaactttttttctgttcttgatggagtaaaaattgcatttgcatttacagttgttcattttctttgttcccatactcctactaattttgcaagaattcttttctcattgcagatcattggaaaagatttccagttaaaagaaaaactagtaacgaatgagarttactttgtggatgcagtttttactattttcacttcctttctaggttgggaatagaatagcacatgtttctcatttcacaagtttcactgtagattttgaccaaaagcaaatttttgtactattctatagtttattttaagataccgaatagctatttatattgtcatccataaaaagaatttggaaaaatgtactaaaaaataaaaaacttcaaaatttttacaagattgtcttctcactgatgagcatgaattctgtatatactaaaaatattaacatgttctactattagtactagcatctcatcccatgaatatcagtaagactgcttcaaaataaaatttaaaaatcaaatctgaaaaaattgat

SEQ ID NO: 133035 - DNA, 545 bp, Homo sapiens
tgctttgtttgctaaactttttttctgttcttgatggagtaaaaattgcatttgcatttacagttgttcattttctttgttcccatactcctactaattttgcaagaattcttttctcattgcagatcattggaaaagatttccagttaaaagaaaaactagtaacgaatgagaattactttgtggatgcagtttttactattttcacttcctttctaggttgggaatagaatagcacatgtttctcatttcacaagtttcactgtagatwttgaccaaaagcaaatttttgtactattctatagtttattttaagataccgaatagctatttatattgtcatccataaaaagaatttggaaaaatgtactaaaaaataaaaaacttcaaaatttttacaagattgtcttctcactgatgagcatgaattctgtatatactaaaaatattaacatgttctactattagtactagcatctcatcccatgaatatcagtaagactgcttcaaaataaaatttaaaaatcaaatctgaaaaaattgat

SEQ ID NO: 133036 - DNA, 591 bp, Homo sapiens
tcttattgatctaattaacatttttcattattttagtagattattgaaataggttagaggaattggctgatctaagatttttactgtaaattgactcataatttaaataatagcttaaatgtggcaaatgaaagcaaaaactcagcttgccctcctgttattctgccattcatacaatatatatttattgatatggactacacatggtgttgagataacaccagtaaaacagttccatgccatctggattttatgtactagtgggaagaaatatgcaattaataaacaaatgaacaagataattgaaaattgaggtgagtgggtaaagagacaaatagaatgaagtaatactgtgttaaaggttaagtatgattgccaggaaaggctacagtgataatatctggatagtgaagagctaaccttgaaagataatttccaggctggagaaaaatatggttaagggctttggagcagaggagggcttggtaggttttaggaatwgtccgttttggtcagcattgtcaaagcaagggaggctgttttggagaggcaggtagacactagggaggcatttagattgtgcttgaaatg

SEQ ID NO: 133037 - DNA, 643 bp, Homo sapiens
attggaaaaacccttctagacattggcttaggcaaagaccttatggccaagaacccaaaagcaaatgcaacaataacaaagataaataaatgggatttaagtaaactaaaaagcttctgcacaccaaaagaaacaatcagcagaggaaacagacaacccagagagtgggaaaaatttttgccgtctatacatttgacaaatgaataatatccagaagctgccaataactcaaacaaatcagcaagaaaaaacaaacaatacattaaaaagtgggctaaggacatgaatagacaattctcaaaagaagatatacaaatggccaataagcatatgaaaaaatgctcaacatcattcataatcagggaaatgcaaataacactcaccttactctggtgagaattgccataatcaaaaaataaaaaaaaatagatgttggcatagatattgtgaaaagrgatcacttttacactgctggtgggaaggtaaactagtacaaccactatggaaaactgtgtagatatttcttaaagaacaaaattagaactactatttgatccagcaatcccattactggatatctatccagaggaaaagaagtcattgtacaaaaaagatagttgtacatgcatgtttatagcagcac

SEQ ID NO: 133038 - DNA, 516 bp, Homo sapiens
ccactttcggtagtgtggaaattttgacaatactaattctaatccatgaacaatggatgcctttctattcatctgtgtcttctttaatttccttcagtaatgaaatttagaattttcattgtacaagtatttaacctcttttgttaagtttattcctattttattatttgtgttgctataatgaattattttcttaatttctgtagtttgttattattgtatagaaatgctattgattggctgggcatggtggctcacacctgtaatctcakcactttgggaggtcaaggtgggtggatcacttgagcccaggagttcgagaccaggctggctaacatggtgaaaccccatctctaccaaaattacaaaaattacttgagcatgttggcacacgcttgtagtcctagctacttgggggggctgaggcaggagaattgctagaacccaggaggcagaggttgcagtgagccataatcgtgccactgaaccactgtactccagcttgggtgacagagt

SEQ ID NO: 133039 - DNA, 574 bp, Homo sapiens
tttaagaaggctgtaaatacaggaagtcatgaaggatattattggaaatttcatatggtatctttaaacttarggaaatgagccagcaaaaatatgctgcacctcactgattgattaaaaaatacaagttggctggccctggtggcccacacctgtaatcccagcacttcgggaggccaaggcaggcagatctccggaggtcaggagttcaagaccagcctggccaacatggtgaaaccccatctctactaaaaatacaaaagttagcctggcgtggtggtatgcacctgtgatcccagctgctttggaggctgaggcaggagaatcacttgaaccctagaggcggaggttgcagtaagctgagatcgcgccactgcactccaacctgggcaacagagcaagactctgtctcaaaaaataaataaataaatacaagttatagccagtcatgatagctcaagcctgtaatcctagcaggtgagcagagttcaagaccagcctgggcaacatggcgaaaataccccgtctctacagaaaatagaaaaatgagccaggtgtgttggtgtgagcctgt

SEQ ID NO: 133040 - DNA, 574 bp, Homo sapiens
tttaagaaggctgtaaatacaggaagtcatgaaggatattattggaaatttcatatggtatctttaaacttagggaaatgagccagcaaaaatatgctgcacctcactgattgattaaaaaatacaagttggctggccctggtggcccacacctgtaatcccagcacttcgggaggccaaggcaggcagatytccggaggtcaggagttcaagaccagcctggccaacatggtgaaaccccatctctactaaaaatacaaaagttagcctggcgtggtggtatgcacctgtgatcccagctgctttggaggctgaggcaggagaatcacttgaaccctagaggcggaggttgcagtaagctgagatcgcgccactgcactccaacctgggcaacagagcaagactctgtctcaaaaaataaataaataaatacaagttatagccagtcatgatagctcaagcctgtaatcctagcaggtgagcagagttcaagaccagcctgggcaacatggcgaaaataccccgtctctacagaaaatagaaaaatgagccaggtgtgttggtgtgagcctgt

SEQ ID NO: 133041 - DNA, 412 bp, Homo sapiens
tattatgtttgaaaacagtgctagattactacttgcttatttaaattaaatttggtcctaatttctttaatctgtttttttgcttatttgcttttaggatctgttttttaaactttggtccttctgaactttccctggttttgctatattctttctaaagcatagaaatttatgcagtaaaaaattgaaatgtaaatcaacaatattagtatttgctattaattttaggcaggttactaaatgaaattccttttgaggtgtgattatttatgcccagagacagaatataataaattttgttgtttttaatagtgtctgtgaaacccagtgttttytgggccctacctgctacttcagccatttcacctacatacctttctacccctctttacttcatggactgccagaattc

SEQ ID NO: 133042 - DNA, 522 bp, Homo sapiens
tctgatatatttagctttgttttgtcaactcctatactcatcatgcaaggtagaraaaattcagttggcttctactgaaacaatgcattagtgctataatagtgaatgttttttgtgccatgaattaaggactgtacgatgtggcaattcttagagtatatctagggacctttctacatattagttgctccaacatcttcagattaaggttctcattttccttccatcatgaaaaatacatccctcctccccctccaaaaaaatcctcatagataaaagcacaaagtcagggcaatgatgatgtacactctgcaacaatccaacaaaatacactgtttgttcttagaaacgcagtgtggaccgggggcagtggctcatgcctgtaatcccagcacttcaagaggctgaagcaggaggaacttctgagcccaggagttcaagaccagcctggaaaacataaggagaccttgtctttgtaaaaagtaaaagaaaaactaggcaggtgtgttggcacgcgcctgt

SEQ ID NO: 133043 - DNA, 442 bp, Homo sapiens
gggaggatcgcttgcactcagragttcgagataagcctgggcaacaaagtgagaccctatctctatagaaacaaacaaacaaagtcccacaaggtaaataataacaatactaataaataaatacaatatttttaaaaagagaaaataaaagtgattttcaccatgaatgctgcccagtagctgacaactgcttgggggtgtagaagcccactcttgaggccatgctaggagaacccctgcctgggtgtgccttctttgttctcactgaccatctgcagaactggtctcactcacaccattcaaaaatttatccaaaataccactctaaactctaatgattttccatccctctcaaacaaacatgcaaatcagcttggccagacttggagcagaaggcagtgtggtcaggaagggagaatccagatgagaaggagcacacagg

SEQ ID NO: 133044 - DNA, 555 bp, Homo sapiens
gtaaaactagaatgatctttcagaaattccagaaggacttctttccatcaggattagttgaagatatatctctattttcatttcattgattaatcgattaattgattgattgtacatatttaaggtgtacaatgtgatattgtgatatataaatacatagtgaaaagatgattacagtcaagcaaattaacatatccattctctcagtyaccttttttcttttgtggtaaaagcacctaaatgctaagaaaactctttaagcaaatttccagtatgtaatacatttttattaactatagtcctcatgctgtacatcacatctctagacttttatcctacataactacaacattatactatttgacctatatctccccatttccccccacctctcccaccccactgcaaaaaccattctactctacatttccatctatttgactttttaaaaattccacatataagtgacattatgcagcatttttctttctgtgtctggcttatttctcttagcataatatactctaggttcattcatttattgcaagtggcaag

SEQ ID NO: 133045 - DNA, 454 bp, Homo sapiens
ccaccgcagttcagcaaagccactgtagccagactgcctctctagattcctcctctctgggcagggcatctctgaaaaaaaggcagcaatcccagtcaggggcttatagataaaactcccattaggctgggacacagcacctgggggaaggggcagctgtgggtgcagtttcagcagacttaaacattcctgcctgctgactctgaagrgagcagtggatctcccagcacagctcttgagctctgctaagggacagactgcttccccaagtggctccctgacccctgtgcctcctgacttggagataccacccagcaggggttgacagacacctcatagaggagagctccagctggcatcttgcggttgcccctctgggatgaagcttccagaggaaggaacaggcagcaatctctgctgttctccagcctctgctggtgatacccaggcaaac

SEQ ID NO: 133046 - DNA, 454 bp, Homo sapiens
ccaccgcagttcagcaaagccactgtagccagactgcctctctagattcctcctctctgggcagggcatctctgaaaaaaaggcagcaatcccagtcaggggcttatagataaaactcccattaggctgggacacagcacctgggggaaggggcagctgtgggtgcagtttcagcagacttaaacattcctgcctgctgactctgaagagagcagtggatctcccagcacagctcttgagctctgctaagggacagactgcttccccaagtggctccctgacccctgtgcctcctgacttggagataccacccagcaggggttgacagacacctcatagaggagagctccagctggcatcttgcrgttgcccctctgggatgaagcttccagaggaaggaacaggcagcaatctctgctgttctccagcctctgctggtgatacccaggcaaac

SEQ ID NO: 133047 - DNA, 530 bp, Homo sapiens
tggttaaattagaaccagggagagagacatcaacaaaacacaatacaaatgagtwtcccgcatgttagaagcctataagtgcaatggaaggagaatatgcacatatagcagaataaaagagctcgggaccatgtgggagagtggaaattttaaataggctgatcaaggaaggcctcatcatagtataatagatccaacaatcccttatatctctgatttatctttatagtgttgctaaattaatcttactaagacttatgattttactatttccttactcaaaaattctcactgattcccactgcccaaaagataaagtataagctccctttctggcatgccaggttctcatcgctctggcccaatactcctcactgcctctcccctgccccagcaaaccaggctgtcatctggccacacctgtactgtcccactttggtgcttttgctccagtggccttcttctctatctccacttcttaacactctaccccctgtcaaagtccagctcaaatatttctcccccacaaa

SEQ ID NO: 133048 - DNA, 522 bp, Homo sapiens
accagggagagagacatcaacaaaacacaatacaaatgagtttcccgcatgttagaagcctataagtgcaatggaaggagaatatgcacatatagcagaataaragagctcgggaccatgtgggagagtggaaattttaaataggctgatcaaggaaggcctcatcatagtataatagatccaacaatcccttatatctctgatttatctttatagtgttgctaaattaatcttactaagacttatgattttactatttccttactcaaaaattctcactgattcccactgcccaaaagataaagtataagctccctttctggcatgccaggttctcatcgctctggcccaatactcctcactgcctctcccctgccccagcaaaccaggctgtcatctggccacacctgtactgtcccactttggtgcttttgctccagtggccttcttctctatctccacttcttaacactctaccccctgtcaaagtccagctcaaatatttctcccccacaaagtttt

SEQ ID NO: 133049 - DNA, 523 bp, Homo sapiens
accagggagagagacatcaacaaaacacaatacaaatgagtttcccgcatgttagaagcctataagtgcaatggaaggagaatatgcacatatagcagaataaaagagctcgggaccatgtgggagagtggaaattttaaataggctgatcaaggaaggcctcatcatagtataatagatccaacaatcccttatatctctgatttatctttatagtgttgctaaattaatcttactaagacttatgattttactatttccttactcaaaaattctcactgattcccactgcccaaaagatamagtataagctccctttctggcatgccaggttctcatcgctctggcccaatactcctcactgcctctcccctgccccagcaaaccaggctgtcatctggccacacctgtactgtcccactttggtgcttttgctccagtggccttcttctctatctccacttcttaacactctaccccctgtcaaagtccagctcaaatatttctcccccacaaagttttc

SEQ ID NO: 133050 - DNA, 523 bp, Homo sapiens
accagggagagagacatcaacaaaacacaatacaaatgagtttcccgcatgttagaagcctataagtgcaatggaaggagaatatgcacatatagcagaataaaagagctcgggaccatgtgggagagtggaaattttaaataggctgatcaaggaaggcctcatcatagtataatagatccaacaatcccttatatctctgatttatctttatagtgttgctaaattaatcttactaagacttatgattttactatttccttactcaaaaattctcactgattcccactgcccaaaagataaagtataagctccctttctggcatgccaggttctcatcgctctggcccartactcctcactgcctctcccctgccccagcaaaccaggctgtcatctggccacacctgtactgtcccactttggtgcttttgctccagtggccttcttctctatctccacttcttaacactctaccccctgtcaaagtccagctcaaatatttctcccccacaaagttttc

SEQ ID NO: 133051 - DNA, 417 bp, Homo sapiens
gtgagtaatgaaagtaacaagccaaatgaaaatagccaaaaccacggctaattcatcctagttaaaaatgtacacacstgaatacacacacctcccaccacaaacaccacactgtctgcttcaattctcatctcacaaaagttttgcttatctgttttaactaatgtgtctttccccatcagtcgaacagtatttcccaagacacaacgatgtgtgaaacaggaactgttatgcatacaactttctcagtctaaaatcatggtggaaaagcgtacaaaactcctttgtttttagctggtgaggaaattcttctctgagccctcagaaatttcatcataaaattgtgttactgctgaaatacaatgctcataaagtcatataatctccaagctggacagtctgagtgtgaacacttcc

SEQ ID NO: 133052 - DNA, 576 bp, Homo sapiens
gaattcttcaatgacagttgacactcccatatataagctccaggcagagaccgtgtctatattctcacctttgcacaacatctagctcagagccacaaaaagtaggcactcattagctacttcttcaatgaataatgaatattacagatcaatcatcagctctgtttcaaaagagggaactgaggctcagaaaggcaaacagacttactcaaaaccccaggttgctgaaccagaaaaaatagtcttgtctccagacttttaatcccatagttctcatccagttctaccacatggcccgaaagcttgttcatgggccaagtcacaggttctaactctattgctgggacaaaagataattgagaggagagacaaaaggaattattcattgggtcatatgagcagttgaacataagtgagaaattgagaaatgaaagactgaaactcaaacgaaaagttgatgagtgggtggtgtggttaaggtattgacasacagttgagagattgatctggttgactgatctgagatgtacacacatacagcacaggagatgagactccacaaagacagcacatata

SEQ ID NO: 133053 - DNA, 327 bp, Homo sapiens
aactgctgtcacctggccactcaaaagagtgatgcttggcccagcagcattggtgtcagtggtgagcttgaaagaaatgcagaatctcargctccaccttagaccttcagaatcagaacttgcattttaacaaggtgcccacatgatttgcgtgcacattaaagtttaagaaggctgctctagaggaatattttaaaagtcaagcagttgcaatttttacactttccaagtttgagatatattttactttcttgatacttgctacatgccacaatagggtcaggggtaagcccaggtctcagccctcagaataatccattagttcta

SEQ ID NO: 133054 - DNA, 530 bp, Homo sapiens
cttcaaccctgtctttggatattagtagtatagaggtggcaacaatagtagtagtggtggcaagaggaggaagagtactaccccattctccacttaggggatatagaaatttgaggcccaattactaattactcaattgccaagtgacagaattaagagaggtggaccttaatctcatatctttggacccaaatagacagcyttattcccaaactcatagagcctcttggttgccaccgtgagcaggtttctcaagttaattctctttgctgatcttttactgattaagcagaggctttcaaagtcccttaaaagattacacataaagtatttgtaaccattcccagaaatgggtgttgaccattaaatgacttcttggattctcccatctctaaactttacagttccaagatgacattttttcatccaaaatcatgctgagaaatttttgctgttctaatattcaaaaagattgctaattttagtaaaccatttttctatattttagataactgcaaacactccttttt

SEQ ID NO: 133055 - DNA, 444 bp, Homo sapiens
tttctagtaggggccacatgaaaaatgttgtagactctgaatgatcttgttatttggtttaaaaaacaaattgagaccagtgcagtggctcattcctgtaatcccagcaactcatgaggccaaggtgggaggatccattgaacccaagtgtttgatgctgcagtgagctgtgatcatgccgctgcacacttgtcaaagcaacagagagagaccccacctctaaaaacataaataaataagcaaataaaataagacaaaaagttaaagtaagaatatagcacagagtaatgcatcttactctcaaagccatggatttgcacytctcttccaaatgtgtgccctgggaggtctccagttaagcaaaggaagtctgcacttccccagggtcagggccaaggcttcagggctgtcattgcttgccaaagacattgctttccaaaataa

SEQ ID NO: 133056 - DNA, 606 bp, Homo sapiens
tgggccttgaagggtgagtaggagttagaggaatattagagagggagaaaacattccaagcaggaacaggaatggcccatgtggagatgagtcagaagccgactggctgtagcagaagatgagtggtgggattkcctaagtcaggtggggccagctgtgagatggaaggaggaatgttaaggatccaagagagtgttgttgagatctgatgcagcaagcattagatttctgataggtccttgaatgaagatgtgataggatgcgacttggtcatgacagcatcagctctgtactctagaaagggtccctcaggcagggacatttgctccccagaggtggagaagcagagtgcatgagaagggttcttaatacattgcatttgtacctcaacagcctccaatctctctttcagattgtgtaccgcggggatccctatagtgcacacaactccacagagtttctcatctacgaaagaggagtcgaggttggatgttggggcttgtgcatcaactccgtgttttcctcactttattcttgtaagtctttctctctcctaaggatgtcttctaaaagtttctggtctagcacaacttggatttgatattt

SEQ ID NO: 133057 - DNA, 606 bp, Homo sapiens
tgggccttgaagggtgagtaggagttagaggaatattagagagggagaaaacattccaagcaggaacaggaatggcccatgtggagatgagtcagaagccgactggctgtagcagaagatgagtggtgggattgcctaagtcaggtggggccagctgtgagatggaaggaggaatgttaaggatccaagagagtgttgttgagatctgatgcagcaagcattagatttctgataggtccttgaatgaagatgtgataggatgcgacttggtcatgacagcatcagctctgtactctagaaagggtccctcaggcagggacatttgctccccagaggtggagaagcagagtgcatgagaagggttcttamtacattgcatttgtacctcaacagcctccaatctctctttcagattgtgtaccgcggggatccctatagtgcacacaactccacagagtttctcatctacgaaagaggagtcgaggttggatgttggggcttgtgcatcaactccgtgttttcctcactttattcttgtaagtctttctctctcctaaggatgtcttctaaaagtttctggtctagcacaacttggatttgatattt

SEQ ID NO: 133058 - DNA, 420 bp, Homo sapiens
cagtaatagctcaaagtggtatgtatttcattggcctaggcctgaaattctcctcattcctctggctcacctctgggactaaggacactgagaagcctctgcaatggatgggctcaaccggccaaccagccctcctacactatatggtatacaatattagtgtttaccaacccctccttgttctggccaatgcaatgtgagtagaattagtgtgtgttttctctttgactctgagcaagttgccgacctgtctcatttttctcatctataaagcataatatctayattacagggttgctgaagagatcaaattataaacacacacatgcacacatagctagcatttaacagtatctaacagttggtagggaatcaataaacctaggtaccctttctctctgttcccttccttctaaccat

SEQ ID NO: 133059 - DNA, 603 bp, Homo sapiens
tttttatcaatatgatttcaatgaaatcccaaacaattttacaaacttgacagtaatatatgtaggatgcatcagcaaaaaaaatgtaacatcccaagagcccaccataatgacatcacaaatgaaaggaagctttctacctcaaatatcccatctttctcagcctcaatagacagggtttttctttgttggtaagttatctgagatttttgccaaagatatgggggtaggagcaaagcctcctttttaaaagtttcagttaatacagtacagttaataagttatatttaataagttttcctgattgattgggttagctgtcttattagttattttccctagatcttgttcctaaagaatagtccagcaaaaatatgctggaattagtgaaattaaagagattattttatatgaaaaggcaataaggaggcagcacttgaaaatatttttttcttggggaaagaaaaagagattawttttttctccttaccctggtccaggctaattctcaagtatgtaatgaagatttgtatacctttactcaagcatttgagtagcaagatgagcttctttttgggaggcaaaaacaaaaatgttttttaa

SEQ ID NO: 133060 - DNA, 428 bp, Homo sapiens
gaattcaatgcttgggtcacctccagattcattttcacagtctttcatgttttggtcatattacattgtattttgctgccatatgactgakctctttttgttaaatgtgagatacttgttaaaaaatatttagcaatgaattgaggcctagtggcatgttatcttgctgcagaagagatgggagtctacttctgggggatggtcacgggtcctccatacaggctgcaattgaggtcgtcggtgcaggctcagtccctacaaaggccagggtatttcctgtctacctctattctgatgcatgactcttctgggtctcaaccagagccagtggatttcagtacgggtcgctttcattggcagaccctcaatccacttgttttccatctaatcccacgcatgtgtgcaaaagctgctgtgcttctttgcat

SEQ ID NO: 133061 - DNA, 418 bp, Homo sapiens
cttgggtcacctccagattcattttcacagtctttcatgttttggtcatattacattgtattttgctgccatatgactgatctytttttgttaaatgtgagatacttgttaaaaaatatttagcaatgaattgaggcctagtggcatgttatcttgctgcagaagagatgggagtctacttctgggggatggtcacgggtcctccatacaggctgcaattgaggtcgtcggtgcaggctcagtccctacaaaggccagggtatttcctgtctacctctattctgatgcatgactcttctgggtctcaaccagagccagtggatttcagtacgggtcgctttcattggcagaccctcaatccacttgttttccatctaatcccacgcatgtgtgcaaaagctgctgtgcttctttgcat

SEQ ID NO: 133062 - DNA, 402 bp, Homo sapiens
gaattcaatgcttgggtcacctccagattcattttcacagtctttcatgttttggtcatattacattgtattttgctgccatatgactgatctctttttgttaaatgtgagatacttgttaaaaaatatttagcaatgaattgaggcctagtggcatgttatcttgctgcagaagagatgggagtctacttctgggggatggtcasgggtcctccatacaggctgcaattgaggtcgtcggtgcaggctcagtccctacaaaggccagggtatttcctgtctacctctattctgatgcatgactcttctgggtctcaaccagagccagtggatttcagtacgggtcgctttcattggcagaccctcaatccacttgttttccatctaatcccacgcatgtgt

SEQ ID NO: 133063 - DNA, 427 bp, Homo sapiens
aattcaatgcttgggtcacctccagattcattttcacagtctttcatgttttggtcatattacattgtattttgctgccatatgactgatctctttttgttaaatgtgagatacttgttaaaaaatatttagcaatgaattgaggcctagtggcatgttatcttgctgcagaagagatgggagtctacttctgggggatggtcacgggtcctccatacaggctgcaattgaggtcrtcggtgcaggctcagtccctacaaaggccagggtatttcctgtctacctctattctgatgcatgactcttctgggtctcaaccagagccagtggatttcagtacgggtcgctttcattggcagaccctcaatccacttgttttccatctaatcccacgcatgtgtgcaaaagctgctgtgcttctttgcat

SEQ ID NO: 133064 - DNA, 428 bp, Homo sapiens
gaattcaatgcttgggtcacctccagattcattttcacagtctttcatgttttggtcatattacattgtattttgctgccatatgactgatctctttttgttaaatgtgagatacttgttaaaaaatatttagcaatgaattgaggcctagtggcatgttatcttgctgcagaagagatgggagtctacttctgggggatggtcacgggtcctccatacaggctgcaattgaggtcgtcggtgcaggctcagtccctacaaaggccagggtatttcctgtcyacctctattctgatgcatgactcttctgggtctcaaccagagccagtggatttcagtacgggtcgctttcattggcagaccctcaatccacttgttttccatctaatcccacgcatgtgtgcaaaagctgctgtgcttctttgcat

SEQ ID NO: 133065 - DNA, 427 bp, Homo sapiens
aattcaatgcttgggtcacctccagattcattttcacagtctttcatgttttggtcatattacattgtattttgctgccatatgactgatctctttttgttaaatgtgagatacttgttaaaaaatatttagcaatgaattgaggcctagtggcatgttatcttgctgcagaagagatgggagtctacttctgggggatggtcacgggtcctccatacaggctgcaattgaggtcgtcggtgcaggctcagtccctacaaaggccagggtatttcctgtctacctctattctgatgcatgactcttctgggtctcaaccagagccagtggayttcagtacgggtcgctttcattggcagaccctcaatccacttgttttccatctaatcccacgcatgtgtgcaaaagctgctgtgcttctttgcat

SEQ ID NO: 133066 - DNA, 426 bp, Homo sapiens
gaattcaatgcttgggtcacctccagattcattttcacagtctttcatgttttggtcatattacattgtattttgctgccatatgactgatctctttttgttaaatgtgagatacttgttaaaaaatatttagcaatgaattgaggcctagtggcatgttatcttgctgcagaagagatgggagtctacttctgggggatggtcacgggtcctccatacaggctgcaattgaggtcgtcggtgcaggctcagtccctacaaaggccagggtatttcctgtctacctctattctgatgcatgactcttctgggtctcaaccagagccagtggatttcagtacgggtcgctttcattggcagaccctcaatccacttgttttccatctaatcccacrcatgtgtgcaaaagctgctgtgcttctttgc

SEQ ID NO: 133067 - DNA, 394 bp, Homo sapiens
gttgctcaggctggggtgcaatggctccatcagctcactttagccttgaactcccgggctcaagtsatactgccacctcaacttcccaagtatgctactacaggaacacaaactccttttttaaattttttgtggatatggggtctatgttgcctaggctggtctcgaactcccaggctcaagcagtcctcctacctcagcctccccaaatgctgggattacaggtgggagctactgtatgcctggccttatctaagctgtttccctgaaaatccccgacttcgataatgattccattggccccaccatgccctgtcctgccttcctggctgtgcccaagcttggtccctgcctgcctgcctcactctctgggtctcgagctcctgtgacacat

SEQ ID NO: 133068 - DNA, 394 bp, Homo sapiens
gttgctcaggctggggtgcaatggctccatcagctcactttagccttgaactcccgggctcaagtcatactgccacctcaacttcccaagtatgctactacaggaacacaaactccttttttaaattttttgtggatatggggtctatgttgcctaggctggtctcgaactcccaggctcaagcagtcctcctacctcagcctccccaaatgctgggattacaggtgggagctactgtaygcctggccttatctaagctgtttccctgaaaatccccgacttcgataatgattccattggccccaccatgccctgtcctgccttcctggctgtgcccaagcttggtccctgcctgcctgcctcactctctgggtctcgagctcctgtgacacat

SEQ ID NO: 133069 - DNA, 387 bp, Homo sapiens
ttaaccccatctctacaaaaaacagctgggcgtggtagtgcacacctgtaattccagctacttgggaggctgaggcacgagaatcatttgcatcttggaggcagagtttgcagtgagctgagatcgcaccactgcactccagccgggatgacagagcaagaccctgtctcaaaaaaaagaaaaaggaacaaacaacagcaacaacaaaaaaacctctgtgtcaatcacagccttcaagctaggggagaggcggccgaattctgccctctgctaactaactatagctttgtggaaatgggygagtggcatgcccctgtgagcctcagggccccatctgtaaaatgggcataactgtcatgcccgtctttaagaacagccttgggggta

SEQ ID NO: 133070 - DNA, 530 bp, Homo sapiens
cttagcttcccttcccacatgtttgtgattagcccctagagagacaatgaagcaggcccaatacgttggtttcagaagaactgggctgaagcttcacaatgattgccttgtttccaggccgccatgaagtgtgtttgagtgttaagatggagactcagttcgcctcaagttttggtcagcccgaaaatctccgctcacaacatgggtgcagtgtgtggaatttgctgccccgtggaatccagggtgttacacattggggctgagtttctcagaaaagacacagcagttgtataaccaatgaaaatatttacaattatgcagctgtgataaggtaatcgaattccatgcmgcagggcagaaacctatcccttccagtaatgaggtaggaattctcgctggctcccatgttgttaccggattaattttatggtttcttcaatttaccttaataggaaagtggttgcttcagggatcacagacaaatgagacttgtgaaatctggagccttagttccgtgtccctgacttgaa

SEQ ID NO: 133071 - DNA, 448 bp, Homo sapiens
aattattttgctttattgatgaatggaaggaagagtttatgactggaatgacggatggatggatggacagacggacggacagatggatggatggatggatggatggatggatggatggatggaagacttaatagatgggtggatggttaatggatggatggtttgagatagatggataacrgttggagagtggatagattgatagatgtatgaatgatgaaagcattgatgaatggatggaatgatggatagatgaatacatagaaagttaattgacagatgtatagataatagagtgaaagatgtttttatagaaagaataatgagtggattttctgatgaatatggatcagtggacaaaaggaagaaaaggtaatagaaagatagatagatagatagatagatagatagacagacagtatgtggtgagtctgcttggaattgaagg

SEQ ID NO: 133072 - DNA, 456 bp, Homo sapiens
agttcttaaagagaatgctttcatcttttcaccgttaaatgttatgtttgctgtgggcttgtcatatgtagcctttattatgttgaggtatgttgcttctaggcctggtttgttgaggatttttatcatgaagaaatgctgatttttattgaatactttttctgcmcctattgagataatcatatggcttttgtccttcattttgttgatggaatgtatcacgttatggatttgcatatgttgaaccattcttggatccccaggttaaatccgacccaatcatggtgtatgatctttttgatgtgctgttggatttgatttgctagtattttgctgaggctttttgtatctatgtgattcagggatattgatctgtagttttcttttttgttgtgttcttgtctgattttgttatcaggatgatactggcctcgtagaatcagttagggagaattc

SEQ ID NO: 133073 - DNA, 576 bp, Homo sapiens
ggaattccatttcttgcattaatactgactgttcctgattaatcccccttctgaaaacaacaacaaatgctggataacatgtataaagtgttcttaaatgtgtttataagatggcaaatgagaaagaaagatttagaagccaaagtgaaatgacagttagaccctctgatgtcaggagagcactgcagccagctttaaccctgcyggcactagcccaacacagctggacttgagctttggttcttatgtcattgaaggactcaggagttaagagaccaagtccagggcctgcccaaagtagaaagtctaacaggacatacaatccctgcataaagctagtacccaaaggccaggcctttaatgtaaaggtaaactagaaataactaccctttctcaaggaaactacaagtaaagtgatccctggaccagtaagtactcccagacactctgtaagagcaaatacaatttctctctggaataatccactttagactcaggcaacgtaagctcacaaacataattcataatacaaacaaggaaacaagataccataagcaagagccagcagaaacaacg

SEQ ID NO: 133074 - DNA, 582 bp, Homo sapiens
ctagcagtgagcaaggctccatgggcatgggacctgctgagccatgtgtgggatataatctcctggygtgccgtttgctaagaccattggaaaatcgcagttttttgggtgggagtgtcccgattttccaagtatagtctgtcatggcttcccttggctaggaaagggaaatcccatgaccccttgtgcttcccaagtgagacgatgcctgccctgggtcagctcgccctccatggtctgtacccactgtccaaccagtcccagtgagatgaaccaggtacctcagttggaaatgcagaaatcaccgtcttctgtgtcaatcatgctgggagctgcagactggagctgttcctattcgaccatcttggaactggaaacttgtaaaataaaaatcttaattagatttgcacaatattttctgtattgggctatctttatcatttccatttatgtgaaatatatttgttctccaagaagaaaatacatgtctactcttctgcatacatagtagttataattttttgtttgatatacaaacagttttatatacattaacatttttaggataaaactgtgatatag

SEQ ID NO: 133075 - DNA, 429 bp, Homo sapiens
gcttatatttagcagataaaaatatgagcctctcaaaaaactctctgaagtgtccatgcccaaagaggccctcactctctcaacttttttccctatttctctttaaccaagattctttccaggtaaggcaaagtcacttagaagaaatttgaaggtacatttkctctttaagaataacactactttatacttggcatttgcagccagtcacaccccaataaccatgacagagcaagcccttgaaataggattcccccagaaacaataaagtttataatccagtaaagcctgcagataattttctcaaattcttccaggggcaacaaatccctaacataattaatttgtagccctctcttgaatgttactgttgttactttttattttgaaatcatttcagatttacaaaatattgcaagaagagtacaa

SEQ ID NO: 133076 - DNA, 545 bp, Homo sapiens
tttaaactttacatctaccaatccacctgtgacatccccctgactgtagcccctccatcctgcccccaagatatccagcctttatggccaaaccaatgtatacctacatgtattgatatatgtctttgcctgtaacctctgtctccataaaatgtataaaaccaagttgtaacccaaccacatgttctcaggatttcttgagactataccccagtgatgatcactcataatttgctcagaataaacctctttaaacattttacagagtttggcctctcttctctctttctctacgtatatactttctctgtctctctctctctctctctccatacacactctctctctcttcatatattctctctctccaatatactctctctctgtcgcaatatgactctctctctgccatatgtattctctttctctctctttctctttctctctctctctctctctmtatatatatatatatatcctctctctttctctctctctctctacacacacacacacacacacacgtatacactcataaagccaaa

SEQ ID NO: 133077 - DNA, 552 bp, Homo sapiens
agtccctcaccagacaacaaacctgctagtaccttgattttggacttcccagcctctactactgtcaaatacatttctgttgtctgtaaactacccaatttatggtattttgttatagcagcctgaacagactaagacactaatggatctagattttctagtaatataaggatcaaataggtctcttatggttcttaataagcgaactcaaacagcaaaactgatttcctctgctctccacttacttaactagacagacacaacctttaggcttcatgtaccattcttaatacactacttaacatggtattttkgggttgctcttcctgaaaggctgttctctcttggaattgtgccctcttcaaaaaacattaacatcccctactaaaaaagaaattaatattaatcagggaattgatccaatcattatgtagtagcattcctcatatactcatccaaatggcagattgttctaatgctgtgatatgtatttataccttttcagcaggcccctgccatctggatttggaattcttttagcagaagacaaag

SEQ ID NO: 133078 - DNA, 635 bp, Homo sapiens
agtctcctcattttcagacagactcaagagcagacctggmacaataacatccagtgtcatcacaagttgttgaaatggacagggatctattccaattttgtgatggataagtacatgggccgccaaataacaggccaacagcagctaggactgatctctaagcacagcgagaaataactcaggggttgaggaacttagttcatttgtgttgctacaacaaaataccacaggctgggaatttataaagaacagaaatgtactctctcactgttcgggaggctgggaagttcaagatctagtcaccgatatctggtgagggtcttcttgctggagcctcacatgacaaaagatgcaaggacaaaaaggagtcaaccttcctctgtcaagtccttaatccattcatgagagtggagcccgcacctcaacacctccccaaagacttcacttcccaacactgttatattggggattaagtttccaacacatggatttggggggacacattcagacaatagctgggccctatatatacaagtggaacagtgagaggaggacatctgggcatttgcatggataggacctcatttgtactgagaggctggtgaggctgataattttcagtttacaaatgagta

SEQ ID NO: 133079 - DNA, 635 bp, Homo sapiens
agtctcctcattttcagacagactcaagagcagacctggaacaataacatccagtgtcatcacaagttgttgaaatggacagggatctattccaattttgtgatggataagtacatgggccgccaaataacaggccaacagcagctaggactgatctctaagcacagckagaaataactcaggggttgaggaacttagttcatttgtgttgctacaacaaaataccacaggctgggaatttataaagaacagaaatgtactctctcactgttcgggaggctgggaagttcaagatctagtcaccgatatctggtgagggtcttcttgctggagcctcacatgacaaaagatgcaaggacaaaaaggagtcaaccttcctctgtcaagtccttaatccattcatgagagtggagcccgcacctcaacacctccccaaagacttcacttcccaacactgttatattggggattaagtttccaacacatggatttggggggacacattcagacaatagctgggccctatatatacaagtggaacagtgagaggaggacatctgggcatttgcatggataggacctcatttgtactgagaggctggtgaggctgataattttcagtttacaaatgagta

SEQ ID NO: 133080 - DNA, 516 bp, Homo sapiens
tgggaaaggcaggccagtgaactsgtgaatttggcctaaacatagtgtgcaagagggaaagatagccacggagcccacagaggtgagttggagccaaatcgtgaccttaaaccctagggtactttgaatgtcctgaagacatctaatgattttcagcagatcagtcctgcatttttggatactgtgacaacaggtataaagatgaactggaacaggagagaaggaagcacagagagattatatgggagtttgtcaccatggtgaaagatcaaaagggtttgaaccaaagagagattagcagtggaacagaaaataggagatggcacagaaaaccctagtagggtgtaaagacagaattggaatgggatgttagcagggggctggtggtgcacctggggaagaaagcagaggtttctggtttgggtgattgtctatatgaaaacgggataaacaaaggagggcagggcatgacgatacaacagatcagaaggaaacactggggaaacttatctgagc

SEQ ID NO: 133081 - DNA, 579 bp, Homo sapiens
tttctgctagctttggagttggtttgttcttgttgttctagctcccattggtgtgatattaggttgttaatttgagatctttctaactttttcatgtgtatgtttagcactatcaactttcctcttaacattgcttttgctgtgtcccagagattctcatgttgtatctttgctttcattagtttcaaagaatttcttgacttctrccttaatttcgttgtttacccaaaagtcattcaggagcaggatgtttactttagatgcaattatttggttttgagcaatcttctcagtattgatttctatttttattgtgctgtggtccaagactgtggttggtatgatttttttttttaatttgctgagaattgttttatggctgattgtgtggtcagtgttagagtatgtaccttgtgcagatgagaagaatgtgtattctattgttttggtgtagaaagttcttagatgtctattaggtccatttgatcaagtgtcaatcaggtcctaaatatctttgttagttttctgcctcaatgatctgtctaatactgtcagtggggtgttgaagttgcccattat

SEQ ID NO: 133082 - DNA, 601 bp, Homo sapiens
gatgtgtataaatgtcctgttgacctatccactgccacatgtgaaaaactaaatttgcaaagtaagtttaaatttacttgcaaggcatgtgatttgtcttagactcaactgaaaaataacatcagaacaatcattgttctgtcttaaagaaatacagacagcttttttttgcccttatgtctttagtaatatggggcacaatcatatccaaatttccaaaacagtttggagacttgwcttaacaagatgcgtggaaaatgtgctatctcctggaccattacctatagaccatggactggtttccatcaacatttagaataattttgatgattacttgcagaatcaaggctatccttgaatccgaggctatccatatttctttctctcctctttgcaaaataaaccattaagtttggaaacatcagtacaagggctgagtttggaggcaccaaaaacactctgtgtttcttgttatgtctaaatgatggcattctaataaaacaaatccacaatttggaattatttgctgttttaattatccccatctcagatgcctcctattaatgccaaaaatttactaaaggttcaagggtagacagct

SEQ ID NO: 133083 - DNA, 534 bp, Homo sapiens
ctgtataagaatttcatggcagcattagtcagaatagcttaaaattgaaaacatctcaaatgtccatcaagagagaaatcaataaacaaccatagcatattaatacaatggaatactaatcatcaataaaaaggaaaataaaactactgatacatgtaacaacataaataaatctcaaaaatattatactgagtaaaagaagtcagacatagaggagtatatcctatataattccatttatatgaagttctagactaggcaaaactaagctgtggtcagataaatctggtcagtggtcacctcttaggtggtagggaayggaaaagggcataaggaatttttcttggggtaagaagcctgagtgtctcttcatgatggaattttcttggtgtgatgttctttaactcaatgtattttaaacatagatcttaaataatttccatctaaatatgctgctgtgtcttctatgttaaaacatttaaaatattctcttgctaaaggagatggctactctaatgtacataattatcaaaa

SEQ ID NO: 133084 - DNA, 538 bp, Homo sapiens
caatatagtgctcaaaattctagccaaagtaataaagcaagaaaagaaagttgaaaggcatatgaagagaaaggaagaaataaaactgccccattggcaaatgacattattgtatacataggaaatcccaaagaatcttctaaaaaaaccatcttagggttaataagacagtttagcaaattcacagtatatacaaagtaaacatacaaaaattaattatgtgtttacatactagcaataagcacatgaatactaaaattaaaaatataaggacttagaaaatgagatatttagaagtcaatctaacaaaacacatatagagctaggatgttgaaaactacacaacactgatggaaaaaatcaaagaagatctaaataaatcaagacacataccatgttcatggatcacaagacttgacatagcaaagatgtcaattcttcccamactaatatatagatgtaatacaattcctgttaaaatcccagcaagattttgtagacaagattattgtaaaatttatatggaaggacagagaaa

SEQ ID NO: 133085 - DNA, 539 bp, Homo sapiens
ggttgtctcacaggaatgagagccaggattgcaaaggcgagatgtgatgtgagtccagagcaagcctagatgatgacagccgtggagctgggaaatgttctgcagctcaatgaagcccctgatgaggcccagagagaagaggaaaagaaaaatagaaaaccattcaccattcttgattttctgctatgatctaattagggggaaacgataaacacctaatatgaaaatccaaatttacagaaagaggyaaagcaagactttccatttattgtacaaagcaattcatccccagaggtcctctggaaaacttaaactgctggataatgttttactgaattttctcacagtattctagcaaagccaaactccagagatacaagataaacagagccctaaattacaaagtacagaaattcttagcaaaatggcagtaacaatgggaggatttggaacaagtgccttttgtaggaatgccaatgccactagaagttttgcttagcaaaccagccctggcacagggaccaaggccaaaaacacgg

SEQ ID NO: 133086 - DNA, 507 bp, Homo sapiens
aatctatagattcaatgcaatttctatcgaaataccaacatcatttttcacagaattagaaaacaatctgaaaattcatatggaaccaaagaaagagcctgaatatccaaagctatcctaggcaaaggtatcacattacctcacttcaagttatactacaaggctatagatacaaaaagagcatggtactgttataaaaatagatacataggccaatggaactgaatagagaacccagaaataaagccaaatacttacagctsactgatctttgacaaaaaatacaaaaataaaacttggggaaaggacatcctgtttaataaataaatggtgctgggaaaactctagagccacatatagaagaattaaactggatccccatctctcaccttatacaaaaatcaactcaagatggatcaaagacttaaatttaagacctgaaaccataaaagctgtagaagaaacctaggaaaaactcttatgaacattggcctatgcaaaatattt

SEQ ID NO: 133087 - DNA, 596 bp, Homo sapiens
ctctcaccaggccccaccttaacattggaaatcacatttcaacatgagatttggaggggacaaacatccaaaccgtatcagatggattctccctgagggcctccagaagaaatcaaccctgccaatgccttgctttctgactgtagtttccagaattgtaggaataaatttccattgttttaagccacccagtgtgtagtaacttgttacaacaaggctattaaactaataaagtgtccaaataaatgtgaatggtcatcatagcttctatcaatatccatattgtatcatcgttgtcattgttatatatctaagcacctaacacattacygtgtgtatacaagaactcaattcataattatagtaggataaaagatttgtcacatgtgcagattaaaaagaagtaatgcagtgtgaggggcagccacacatactccaaaggagtcttgaaagaataaattcttttctctatctgaaaatccactttgcctgtaaaatttcaggatctagaagttctgattatataactcctctctaatttgactccaggagtgattttctatcttctaatccagatccacacaaattattcctcc

SEQ ID NO: 133088 - DNA, 511 bp, Homo sapiens
tgaaaggaaagtatcttgggcccccaaaattactgaagaaaactcaagctggaaactgcttggagcaaatctgcctcccattctattcaaagtcacctctctgttcactgagatagaygcatacctgattttcctcctttggaaaggctaatcagaaactcaaaagaatgtagccctttgcatatcaccttctgtgacctggaagctctctcccccgcttcgagtcttcctgccttttcttcaagttgtcccgcctttccagactgaaccaatgtacttcttacatatattgattgacgtcttatgtctccctaaaatgtatataaccaagctgtgccccaaccaccttgggcacatgtcatcaggacctcctgaggctgtgtcatgggctcgtgtcctcaaccctggcaaaataaactttctaaattaactgagacccgtctcggattttcggggttcacatgtcacaggctcctagttttcctcttttctagctctaattctcattgtc

SEQ ID NO: 133089 - DNA, 511 bp, Homo sapiens
tgaaaggaaagtatcttgggcccccaaaattactgaagaaaactcaagctggaaactgcttggagcaaatctgcctcccattctattcaaagtcacctctctgttcactgagatagatgcatacctgattttcctcctttggaaaggctaatcagaaactcaaaagaatgtagccctttgcatatcaccttctgtgacctggaagctctctcccccgcttcgagtcttcctgcctttkcttcaagttgtcccgcctttccagactgaaccaatgtacttcttacatatattgattgacgtcttatgtctccctaaaatgtatataaccaagctgtgccccaaccaccttgggcacatgtcatcaggacctcctgaggctgtgtcatgggctcgtgtcctcaaccctggcaaaataaactttctaaattaactgagacccgtctcggattttcggggttcacatgtcacaggctcctagttttcctcttttctagctctaattctcattgtc

SEQ ID NO: 133090 - DNA, 575 bp, Homo sapiens
gaaaaaaaactagtaaaaattagagcagaactcaatgcagttaaagayagaaaaaatagtaacaccaaaagctgattattttaaaagatcaataaaatcagtaagccttgagctaggctaactaagaaaaaaagagaaagaacacaaattaccaatatcagaaatgaaagatgggatatcactacagattccatggacattaaatattgcccactctcaggtagttctctatggcaatgtgagaatgaacatttctcacatgttcattatgtgagaaatattatagaataaagaataaaggttcatatattatgaaccactatatgccccaatatttggtaacctagatgaaatgaaacaattccttgaatgacacaatctttcaaaacacagacaagaaaaaataggcaatgtaaataggtctctatctattttaaaaattgaatcaataattaataaccctccaaaagaaaaatcatcaggcccagataggttcactggtgaactctaccaaatatttaaagaagaaattatgtcagttccctgaaatatctctcagatgacagaagcagagg

SEQ ID NO: 133091 - DNA, 560 bp, Homo sapiens
aatctttcccgttttatttttatgatatttgtttttttgttttttgagtcagggtctctgttgtctgggctggagtgtggtggtattatcatagctcactgcagccttgaactctggggctcaagtgattccacctcagcttcttgagtagctgggaccacaggtgtgtgtcactgtgcctggataatttattttattttattttatttttggagaatggggtcttgytatgttgcccaggcaggtctcgaactcctgggctcaaactattctctgcctctgcctccctaagagctggggttacaggcatgagccactgcacctggcttattttttaaaaatttttattgtattttatttttttaaaatttttgtagagacagggtctcactttgttgcccagtctggtcttgaactcctagcctcaagtgattcctcctgccttggcctcccaaagtgctgggattataggcatgtgccaccatgcccgcccagtaaattacttgtaaaagtgtatgcacagtcattataattaggtatttttggaattttccagtttt

SEQ ID NO: 133092 - DNA, 527 bp, Homo sapiens
tatatttgaaactattaaaataatttwaaaatgactaagtatttgattatatcaaatatagacaataataaccttgaatgtacatggattaaatgtccacttaggggctgggtgtggtggctcatgactataattccagcactttgggaggccaaggcagaaggattgcttgaggtcagaggttcaagtgcagcctggtcaacacagtgaaaccctatctctacaaaaaacaaacaaaaataaaaaattaactaattttaaaaaatatatatttcttctaaattctccacctgaaagatatagactgactgaatgaattttaactatgatctgactatgtgcttccctgaacaaatgcactttacctgtaaaacacatattaactaaaagaaaagagatggaaaaaggtattccatgaacagaaaccaaaatgagtaggagtagctatacttctgtcagacaaaacagactttaagtcaaaactagctttagaaaaaagacaaaaatgcttattatacaacgataaa

SEQ ID NO: 133093 - DNA, 527 bp, Homo sapiens
tatatttgaaactattaaaataatttaaaaatgactaagtatttgattatatcaaatatagacaataataaccttgaatgtacatggattaaatgtccacttaggggctgggtgtggtggctcatgactataattccagcactttgggaggccaaggcagaaggattgcttgaggtcagaggttcaagtgcagcctggtcaacacagtgaraccctatctctacaaaaaacaaacaaaaataaaaaattaactaattttaaaaaatatatatttcttctaaattctccacctgaaagatatagactgactgaatgaattttaactatgatctgactatgtgcttccctgaacaaatgcactttacctgtaaaacacatattaactaaaagaaaagagatggaaaaaggtattccatgaacagaaaccaaaatgagtaggagtagctatacttctgtcagacaaaacagactttaagtcaaaactagctttagaaaaaagacaaaaatgcttattatacaacgataaa

SEQ ID NO: 133094 - DNA, 527 bp, Homo sapiens
tatatttgaaactattaaaataatttaaaaatgactaagtatttgattatatcaaatatagacaataataaccttgaatgtacatggattaaatgtccacttaggggctgggtgtggtggctcatgactataattccagcactttgggaggccaaggcagaaggattgcttgaggtcagaggttcaagtgcagcctggtcaacacagtgaaaccctatctstacaaaaaacaaacaaaaataaaaaattaactaattttaaaaaatatatatttcttctaaattctccacctgaaagatatagactgactgaatgaattttaactatgatctgactatgtgcttccctgaacaaatgcactttacctgtaaaacacatattaactaaaagaaaagagatggaaaaaggtattccatgaacagaaaccaaaatgagtaggagtagctatacttctgtcagacaaaacagactttaagtcaaaactagctttagaaaaaagacaaaaatgcttattatacaacgataaa

SEQ ID NO: 133095 - DNA, 527 bp, Homo sapiens
tatatttgaaactattaaaataatttaaaaatgactaagtatttgattatatcaaatatagacaataataaccttgaatgtacatggattaaatgtccacttaggggctgggtgtggtggctcatgactataattccagcactttgggaggccaaggcagaaggattgcttgaggtcagaggttcaagtgcagcctggtcaacacagtgaaaccctatctctacaaaaaacaaacaaaaataaaaaattaactaattttaaaaaatatatatttcttctaaattctccacctgaaagatatagactgactgaatgaattttaactatgayctgactatgtgcttccctgaacaaatgcactttacctgtaaaacacatattaactaaaagaaaagagatggaaaaaggtattccatgaacagaaaccaaaatgagtaggagtagctatacttctgtcagacaaaacagactttaagtcaaaactagctttagaaaaaagacaaaaatgcttattatacaacgataaa

SEQ ID NO: 133096 - DNA, 587 bp, Homo sapiens
tgatgactgtcaaacatgggcccagccaataagagagatgttgactctggtagctaggcttaggggtctaggtcttttacttgtaggaaggtaacagaagattatgacactcacacatattgtataaagcttttgggcaatacagagtgtcattacaagactgagcacacaggtgagattgtgactctcctatacacacctarccaacagtttgaattgccaccctcacatgtagactgagcttactggtgaggtcctgaacctcacacatgaacctattccgccggttggatggtggcaaatttctgaacccaattcacttgcacaataaacccagccaatagaagatatgttgatgcttgtacttaggcttagggcaacaggtaaggttttgggttttctacttgtataaatgtcacagaggattactacactcactaatattgtataatgccctcaggttgtacaaaaagtgtcattacataactcagcaaaatttgagattgtgactctcaaatgcacacccagcaaacagtaagaattgtcccccacatatatggacagaacccacttgtgaagtcctgaaa

SEQ ID NO: 133097 - DNA, 615 bp, Homo sapiens
gcatggtggcacatgcctggggtctctgctgctcagaggctgaagtagcaaaagtgcttgagcctagattgttgaggctgcaatgagctgtgatcacgccactgcgctccaccctgagtgacagagatagtctctctcaagaaaaaggaaaaaaaaaagaaaagaaaaccacagagattaaatgataaaatatttgcttaatgtttgtaaagctctaattgcatagcagatttctagaagtcagttgccaaggctaatgcctatgtattgagacagccaagtaaaaatgagtcctcagagaatctcaaaccggcctatgcactgggaggatggggcagagcctcaggaagttcacaccgtctgcaggaggagtttcctggcctctcctgttcctgtatggggacctggaattcaatcggtgaggtggagagcttgttagcaggaccccatctcattttattgagttgttttcttcttcctttttgcytaataaattctgctcctcgcccctctatgtgtctgtgaacctaatatttcctggtaattttacaagaaactggtttttttcctataacatttttggtttccagacatggggcttgaggaagggtgagt

SEQ ID NO: 133098 - DNA, 548 bp, Homo sapiens
aatgcaaagttttagagattaaaaaggaaagggaaaaaggaaagaaggtggcatttaataagggagctcaaccaaacaggcttctcagtcaaaggtatgaataggttgccctgataagacagtttccaaactggacactccccttactgaccagagctgatgctcacctgatctgcctgggctcacctgcacaggtgtctgagaggacgcccctgtcagtggtccactgctctcctctttcttccaaataagacaacgcattgggtttgcacagttgatcagctgctcatgagaaaaaaacacatgttgtgcgaggactgtgccatgccctgacaccagggccgatattctcaagtctttaggggctctagagatgggagtggcaaaatgcatgtgcctaaattctgatggccacagccaaactyttccactgagcaactaaatacaagttccctcactaggtctcagaggacactgaggctctccggtctacaaaaccaagggcctagctaaggaatacctttgagaagcccaaaaacttttagtca

SEQ ID NO: 133099 - DNA, 546 bp, Homo sapiens
tattcagatttcaaacttagccttgacaccacacttctctatctagactgcagcccctcttgcataaggcgctcccagcccctgcattcttctcccggtcatcttctgccacactcatgccttctctccytctgtgtgtcctccttagaggaaccaggggacctgctcatggcactcagcactgcaaatatttctttctttcaataaagaaaagagatgtatttcttacatttctggaagctgggaagttcaaggcggaggagcggcctctggggagggtcttcgtgctggtggggcctctctgcagagtcctgaggtggcacaggccttcacacagcaagggggctgagtgtgccagcttagacatctcttcctcttcttataaagtcccagactcatcatgggggctctaccctgataacctcatctagtcctaattgccgctcagaggtcctgcctctcagcatggttacagtgaggattatgtgtgcacatgagacttggagggggcattcaaaccacagccttctgccccggccgcccaca

SEQ ID NO: 133100 - DNA, 583 bp, Homo sapiens
ttaccttgtttgtcaagggctttgggaaatggagtggaggcatctgatgatggagaaccagggttccccatttgggtactcatttattaggcaaagtaattcttttgggacctggatgacctagaagcaggaatctgacttatgacatcgagaggacagtcagcactgaatggcctttagatgccaggttcgatggattccctcagaaaggtcaggaaaccgggcacagttcctagagcctcagatcctatctgagctctttctaggggcaaaggtgccccctcctctactctccagcagccactgggccaatgctctttgcccagaatttgacccacctataggcacttccagttaaacatcaggcaggtactttctgggcaagatttccatgaacattcccctaccgttaacttgcttgcaaccaaaattgggtgatwcgtcccagtgccagacccatgtgcacactcaggacagattttctttacaatctcaaattgatctgaactaatctgttcaggtccctctttctggtcaaagacctcgtgtgccaggtttcttctgcttggagcacatttttact

SEQ ID NO: 133101 - DNA, 517 bp, Homo sapiens
attccctccccggagtccttccctgactgcaccatttgaagccgacctaccaccattctgtgttatcatagcacctgtctatttttgtatgtattcatgtgcatttcttgtgcgttgcctgaatccccactagaatattagtaccgtaagcacagcggcattttctttcttgttctttaatctgtgcccaagactggcrcttagctgctcctcaacaatgtgttgaatgtgtgactgctgaaaggacaaacggaaaatcaggccccattgaggatctttcagtgcacagcaggcactttgctgggcgctgctgagcctccctgcagagcagctgtctgtggctgggaggagttgccctcagtcgcatttcatctgagctcctgggagtgctgctctttgcagcgtctctgattcacagagccccagctgatgggagcagagctgttcagaatgacaaacaaagcgcaaagctggagactgcacccaccaggcgtggggcgggagctcgcgggcctcc

SEQ ID NO: 133102 - DNA, 405 bp, Homo sapiens
agcagcaacttgtctgggcatcttgcaagtaacttttttttggtttatttttgagacaaagtcttgctctgtcacttgggtttgagtgcagtggtgttaacatagctcactgcagcctcgaattcctggcctcaagagattcttctgcctcagcctcccaagtagctgggaccacagatgcacaccaccatgcctggataattcctttttagtttttgtagagataggatctcccagtgttgcccaagctgatctctaactcctggcctcaagcagtcctcccgcttcagccacccgaagtgctgagactacaggtgtgagtcactgtgcccagcaacaaaaaaccttttaccaccctccaacgtaakgaagaagtttccagtgaggggtgaaagacagtgactt

SEQ ID NO: 133103 - DNA, 431 bp, Homo sapiens
cctgtgcttgcttctgggggaacctgagctggaagtcagcagatgacatttgagcctccctggccattgcttattgcctgggcacatagtgaataccactcaggacagggtccagagggcaaggctggctggtgtgtgctggcctctcccccatatcccaggctgggcagcccccactgtgtttccatagtgatgatgacaactatgatgatgaccttattggtcatcattgggtggccacattcgatgctcggcgttttctaygtaatatcttaggtaattcccctaccacctgctgctccacaatcaggtctgttgtaacatgtctgttctctaaaggggcagggcacagacataggtgacagctccatcaagaatcaagcggggatgacgcagtgggctgtgtcttgcacggcagtggagaggatatc

SEQ ID NO: 133104 - DNA, 431 bp, Homo sapiens
cctgtgcttgcttctgggggaacctgagctggaagtcagcagatgacatttgagcctccctggccattgcttattgcctgggcacatagtgaataccactcaggacagggtccagagggcaaggctggctggtgtgtgctggcctctcccccatatcccaggctgggcagcccccactgtgtttccatagtgatgatgacaactatgatgatgaccttattggtcatcattgggtggccacattcgatgctcggcgttttctacgtaatatcttaggtaattcccctaccacctgctgctccacaatcaggtctgttgtaacatgtctgttctctaaaggggcagggcacagacataggtgacagctccatcaagaatcaagyggggatgacgcagtgggctgtgtcttgcacggcagtggagaggatatc

SEQ ID NO: 133105 - DNA, 481 bp, Homo sapiens
atagccattatcataatgttggggcacttcaggcctcaggagcagacctcagaaaacagaatctctctctgaccttcttcctcctgtcacctgccccataccctggagaaaaaaatactgcacagagaggccaaaaagaatctgaacggataggcctggctgggtttggatcatgccctttttgtccaatcacatttctacatgttgatcagtcacgcctattcagtgaagtctccataaaaggccccagaggagtgggtctggagcatccatgtggctgaatttatggagcttcctgaacggtggtgcccagggagggcatggaagctcagtgccctttcctttgtacctcacctgtgtatctctccatctgattcatttgtgatagcctttataataaactggtacatgtgtttccctgagttctgtgagccactccagcaaattagtcaagyccaaagagggggttgtggggacccca

SEQ ID NO: 133106 - DNA, 582 bp, Homo sapiens
gtgactgggagggtgtaagaagggaacctcatggcaggtaaaatttttttatttcttgacctgggatatgttcattttgtgaaacttgatgaaytcactgttttaaaatcatgtacttttctgcatatatgttattcttcaattaaaaagtaaaaagaagacagaaaaagaaaaggcagcatgttaagacaaaatacttaactatattttattagtgaaagtttaggatccaatccacataaagagtttctgtttaaaaatgacaaacaaccttagagaaaaatggacaaagattataaaaaacaattcacataatacatactattatccaatataaaaggcagattcccttagtttctctcttcgaagcctgggaaataggtacttaaacaccaatggccttgactacccatttgaataggaaaacaaaaggctgacaaaatgttgggcggggggatgtgggaaaaggggcatcagtaccccttttctgactgtaccatcagtcagatataaattgttaaaattcttttggaggaaaatttggcaatatttatcaaaataaaaacaggactaacccctagt

SEQ ID NO: 133107 - DNA, 452 bp, Homo sapiens
ccctgaaatattcaacctggaagagaagctgtaataattgtctagttcaggtgattcaaactgtatcccccartggaatctcttttgggatcatggagtgggctgggggaagcccaggagtctggggctcttaccttaactcacctgttaacatgagaaagaccttctgaccaaagattgcaaagtaaaacaacctagagaagcttcaaggaattctgcattacctggaaggaaactaagggaactaagagaaaaagaacttgcaaattgatcatcagtgaattagaatacaggcctctgtgcttcccctccagggctcagccccgtgctgtgagctttctcttgcagattttctatctcccctgtcagatggcccggggagaacaggcacctgctctgcggatgagaagcgtggcctggagacattgcccaagaagggatgtttgtttcct

SEQ ID NO: 133108 - DNA, 547 bp, Homo sapiens
aattgtgataagagcctctgcacaacccacagtagctttggagagcactgagctacaaaagtgatggggaaggaacctgctacatgctgggacctttatatttccaccttatctaatgtccccaatgatgttttaagtaggcactattatcaccctatcccaagacatcaattaacttgtcctttatctcagaattggtcaaaggtggaaccaggattccgactcacatatttctgaatctaaaggtcttgtttcactgcagagcgattgagcgtacatgaactcaragaaagacaggatgactgattctaacagaaataaccacacaggcttcaatgaagagtcagggtctgaaacgggccttaggacaaagaacagctcaggaggctgagaagacagttgaaggtattgcgggaaggtgtgaaagaattagaataagttcagacatgaaaacataaaatgtgggtcaagtctttctacacagaccaagggagtagactggggctgtgttatgggggctttgaatggcagcctaaggaattggaac

SEQ ID NO: 133109 - DNA, 397 bp, Homo sapiens
gaactttttatggtgatgcacacattmtatatcatggttgaaatggctacatatatttgtcagaactcattgaattgtacattttaaaatgtgaattttattgtatctaaactcgacctcagtaaacctaatgtcagcatttgtgaagggttatcagaagccttttaggatatcacttgtaaaatgggacagtagaccaaaagacaatgaagctttttgctcaaaattccatgagtagtggtgcctgtggatagaatgcttatgttcagattcttaatcccacacgactgcacaattcccttggcattaactcacaccctcctatgtattgtgctttttaactttctgtggatgtgtgtctggctgtgtgtatggaagttctggaaacacaggggtc

SEQ ID NO: 133110 - DNA, 513 bp, Homo sapiens
ggggtgctgagagctctccctcttctgcttcccctgcccagcacatgcctctgaggtgagtggggtgtgaggattctgtgggcctgatttcagctgcagcaaggacagagagccaggtggatttctccatcccaattgtcatgggatgaagaaatctaagatgacaaaagtgtagggccagagttgccagcaggggtggaagtatggggctgagccatggaaaagggcagggtcccaggaagatcccctgagcctcaggagggactcctgtgtgtcttagtcctttttggctgttataaaaatgccatggactggggaacttataaacaacgctgtagattgggsaacttataaacaatagaaatttatttctcacagtcctggaggccaggaaatttcagaccaaggcactggtggtgtcttctgaggatccactttgtggttcatggatagcaccttctcactgcatccctgcagtgatagtggcaaatgtgctcccttgggcctatttta

SEQ ID NO: 133111 - DNA, 538 bp, Homo sapiens
ccttggttttattttattccttttgcgccctcaccctacttcatgccttgctgggaataggaacagtggtgcagacttaagagaagaggccaaggaagagcaagtgaaatctgctggtcaccgtagatttaagcccttaggagacagggttgtgtttctcctcctggcagagttgcaatgagacaatgtctatcaaatacaagaagagtggctgagttcaaggaggggtagaaatctgtcaatgaaaaattctatatcacattgaagtttggtcatagaaggtagcttctggtgttctgccccctaaccatggcatgccatgatttagtccgtaatggacacagcttagtggagtttgtttcatctccaaacttcactcattgtttaaagatactggctaggtgtcagcacagcctgggccagggagagacgatggcccattagtcatcatctgtcatgcctatggactgtagggaccagagcatttacactcagaatcacagagayaattagcacattgatgtcattgttcctaacc

SEQ ID NO: 133112 - DNA, 546 bp, Homo sapiens
tgtgacaaaaaaatgcattcctgcctatccagccattgaggtctcctggattaagacatatttgtaggctattaaaaccatccaaacagagagagagagagagttgttttatcctgtccaggatcacaagattccagggtggagagccctctccatcaacccaggtattatctagatgagaagaccaaggcccagcatgaggaactccctttgctgtggcccctatctcgcagtagcagagtgaaaactcagcccagagctctgcctcctcacctccacatcctcttggcccacgccaggactcctgaaatgagtgtgtgccaagctcatctgcaaagagtggatggacactcctggtttctccagcatttgtgttcagattgtggccacctctgctgtgctgcagggcaagttggaatgagggtaggtcagggataaccactccataacttactatttgccagagaatatttccatctaaagatttcccttaagcaggactcttgtgcaygggcctctcatttctgtggttgttccttcatttct

SEQ ID NO: 133113 - DNA, 554 bp, Homo sapiens
ggctctgtggctttctcaccatcagagtactacatctacctgtaggaacaaatggattttaaatgcataataccattcataaaaatgcaatgtgctatctaacttgaaggtacaccaccagcaaccccaggraatttgggatggagctagaatcagagcccttctcttgagactcctcattcaatactcttgtaagttcgggttaaagaaaggagcctgtcatctcggattgagtctcagcagcatcatattcaagccaagtgactttaatcaaataactccttaagcctctgtttccttgtctgtaaaatgggggtaataatattcaccttgtctagctcttagtgatgcaagggggatctattgagataatatgaaaaagcattataaatttcaaaatgctttaaacaggtagatatatattggttagagaaataaaaagagaaaataccagcagcccccactctatgcaataatagctaacacttagcatgtgccaaggactgctgcacctccagcctcctcttccttccaaccaccccaggctaatgagg

SEQ ID NO: 133114 - DNA, 561 bp, Homo sapiens
ttcagttttaagccctaagcaagaacacatggaacaattaataatatttatctgtgaaatgagctttctcccatgcaaccaatactttgaacgtataatttgtatgacatacagttttccctaacctaaaattggaaaaccctttagctagtacaccaaaatgtctgagctggagaagttttcattaatttgcacaagcaagcatgtaccaattcttgtttggattaaattatttataactctaatggaaaagtgggaggagacctactccatttcttcaaatccctttgcatccaacttacatttctaagacctttcagaacatgtaatataatccttaagagtaggaagctggtaaatcaaggtaataatttctctccaactcaactgatttcatagtaaatatggactcttactattctcttggctttggctgccatgtttatgtatatatttcttcaactccrgcagtacttttattctcaccaataagtttatgtccatttcttgaatcctttatgtaaaaggatatagcatcttcttcacatacagaaggagaga

SEQ ID NO: 133115 - DNA, 576 bp, Homo sapiens
ccacagagttgatgagatcacttcctgctgcctcagcacagggctggagctgagtcaggccggccaggccacccatcgcaaaggctgtcattaggactgattgtcagagataatgtaaagccttaggaaatgtcactgacacccagaaaatgggagcggaaacctaccttgtagcaccatccgcttataccctgtgattccaccgaaacgtcctcctgatctacggctctcacctccttcctatcagctttccttgctggtgacagaatggtacctgcaccctggaggagaaccctcacaggccatgcttggtccctggggtttgggggcagcttgggctcatraagagaaacgatgtggagggagaagccttagtcttaacctctggcattgccacttgctggcaccatctgttccttcgcctccgtgggctctggtttctgcttctgcacccctgcaatgggacagtcccagcacctgccatatttatctcccgtctctgttgtttgtggaatcagatgttggatgggactttctccgcttgtgaaatcgggttagaatctggaatgggagctt

SEQ ID NO: 133116 - DNA, 423 bp, Homo sapiens
gaattctgtattatataacacagataaaggctacaagagactccataatttgactttttaccccgtatctccgagactggcctaaaacttgcaaatagagrttcttccaaattaaacagtcattatgcttccatatttatgaagcattttttgctattttcctacatcctaagaagtacatcctgatgcaaaacacctgctccccataaggccatccagccaactgactccagaagagaagaaatgctgtcaagttattcagaagcacatttgcaagcaatgtaggcttcaggaagaacaaaaaggcaaacaaactttcccaatgggcaatttccagcaagcaaagggagtgactctttataggcaagaaaggccactgcagaagagtggggtgagactgaaaacacaaacaggcaacggcca

SEQ ID NO: 133117 - DNA, 435 bp, Homo sapiens
tcagaatccgcttctctgctgcaattgtcccaaacagaaaaggtccgatcagtttggctaatcactagctggagaggtgtgttcctctgtgagcaaactttgaggcagacatagacccctgttccaatgacataaccgtgatgttgagattcatttttcttagagcacatggctgcttttctgagagatggtttatagaggtcagaaaaagcatagacaaaaagcataaagtaaaacttccatgcccacagaaacaagacataacaaacaaaataaaactgcccataaactttaaaaaaaaagtgtttaactgccacggtgtgaaatccagaatcacatgaattaatacataaattgtgttctatttgttttgkgaaggtgtggaattgtccatttttcaagatagaaatattgtgcaaatgcaaatgttgaact

SEQ ID NO: 133118 - DNA, 449 bp, Homo sapiens
agatctgctccttcccccaaggtctcccgacatggcaggcccctggctggcagtcccatatgacacagcacacaacccaccgggaacatctaacagtcagaacatctgctggccttttctctgcactttgcagctgttttaaacttgtaaccgttccctctctgaggtcacttcaggcttgtggacaaacatgaagtgtcttagggtatttatctcagtctccaacgagtctgggtccttggacttctgcttatttatttaacaaatacttgctaagcaccggctatgtgccaaacattgctcttgatgatacaatggtgaacaagaaagatgcaggttctgccctcatgaaacaaagtctacaagggaaaacaaactttgagtaakttaactggctattgagaagatgtacagagtatggctattgggaagatgtacagagtacacca

SEQ ID NO: 133119 - DNA, 431 bp, Homo sapiens
ctattttcctttatggaagttggctaccactgtatagacacttacctccagtcccaggtgtgacccmaaccagaaagcctctcctaaaacatgggaccaatcctgggaaatgccagatatggcttttgtaacttaggtaatagaaatgatctctgtgagtcccacatgatcaaatacaaaattatacaggattcaaattaatcacatggacaggcataaaacaccagactctaaatattatttacccagcatcaagcagatgtttgtttccaaagctacaatctcctctaattggctgatgctgtgctgcatagactccaatgcaagcttatgttctataatgaatgacaaatgcctagaagaatcctctgtgaattggcagcctcctcctctagcatgcaaattatgccgaaatcccatcagcagacgca

SEQ ID NO: 133120 - DNA, 554 bp, Homo sapiens
tgatcacggctcaccacagcctcgaattccctggtctcagggtggtcctcccacctcagcctccagagtagctaggactgcaggtgcatgttaacttttttgtattttttgtggagatggggcttcgccatgttgcccagtctggtcttgaactcctgggctcaagcaatctgcctgccttggcatcccaaagtgctgggattgcaggtgtgagctactgcacctsgacaggaatttagtttatagtttaatttgaaagcaaggatgataatagtgttccactaaaactgattccctcattgtttcagggcttaaaccacctttgtaaaactaaggaaaggccacaagattagggaggggcctgaattctgctaaaatggaggcatagtcttaggcatagttttagaaccagccattgttctataagtcacaagatttgtgacttccccaattgctcccatatataacatcactattatagaacctaggattggtcttgtgagatgtttttcagactttgcattctggcaaataactgaccccacctggacttg

SEQ ID NO: 133121 - DNA, 577 bp, Homo sapiens
actcactaaccttcaattcccatttcccctgcaacctccctaccccctatactaggcaactagcaatctaccttctgtctctacaatttgcttattctgratatttcacataatttgaataatataatatgtggctgagttctttcacttagcataatatttttgggtttatttatgttgtagcatatatcaacacttcaatcctttttattgccattattattttgttgtataggtataccacatgttatttctccattcatcagcttcttgacatttgtttttttctaatttttggctattgtaaataatactgctacaaatggttgtgcacagagttttgtatggacatatgttttcatttatcttgggtatattcctagggggaatttgctgagtcatacggcaactctatgtttatcttttgaggaactgccaaactgttttctgaagcagctacattattttgctttcctacctgcagtacactagagcttcaatttctttacatcctagccagctgtgctattttctatcttatatgatagctccagtaaaattttaataggaatggtaa

SEQ ID NO: 133122 - DNA, 577 bp, Homo sapiens
actcactaaccttcaattcccatttcccctgcaacctccctaccccctatactaggcaactagcaatctaccttctgtctctacaatttgcttattctggatatttyacataatttgaataatataatatgtggctgagttctttcacttagcataatatttttgggtttatttatgttgtagcatatatcaacacttcaatcctttttattgccattattattttgttgtataggtataccacatgttatttctccattcatcagcttcttgacatttgtttttttctaatttttggctattgtaaataatactgctacaaatggttgtgcacagagttttgtatggacatatgttttcatttatcttgggtatattcctagggggaatttgctgagtcatacggcaactctatgtttatcttttgaggaactgccaaactgttttctgaagcagctacattattttgctttcctacctgcagtacactagagcttcaatttctttacatcctagccagctgtgctattttctatcttatatgatagctccagtaaaattttaataggaatggtaa

SEQ ID NO: 133123 - DNA, 577 bp, Homo sapiens
actcactaaccttcaattcccatttcccctgcaacctccctaccccctatactaggcaactagcaatctaccttctgtctctacaatttgcttattctggatatttcacataatttgaataatataatatgtggctgagttctttcacttagcataatatttttgggtttatttatgttgtagcatatatcaacacttcaatcctttttattgccattattattttgttgtataggtataccacatgttatttctccattcatcagyttcttgacatttgtttttttctaatttttggctattgtaaataatactgctacaaatggttgtgcacagagttttgtatggacatatgttttcatttatcttgggtatattcctagggggaatttgctgagtcatacggcaactctatgtttatcttttgaggaactgccaaactgttttctgaagcagctacattattttgctttcctacctgcagtacactagagcttcaatttctttacatcctagccagctgtgctattttctatcttatatgatagctccagtaaaattttaataggaatggtaa

SEQ ID NO: 133124 - DNA, 602 bp, Homo sapiens
tggtccccaacctttttggcaccaaggaccagtttcatggaagacaatttttccatggactggggcagggttgggagaggattcttgggtgaaactgcacctcagattatcaggcattggatcctcataaggagtgtgcaacctagatccctcgcatccacagtttacaacagggtttgccctcctatgagaatctaatgctgctgatgatcgacrgggacggagctcaggtggtagtgttcattcacccgccgctcacctcctgctatgcagcccggtaccggtcccaggggttggggacccctgttctaaactttgatggtcacagtagggatatcctataatgtaatttaattagacccttactgttgaacgattagagttcgtaacagattacgaaaggtgtatgccaataataccgggaccgtacacaatctagctatgtgcatctccggattatttcccccagtgcaaattctttgctgtgaaattctgggtcaagaactagatgtatctgttttaattacattaacacagaaaaaaagtttatgttaagaaaaaacaagatgaaataacatgattcatttttgcatatgtataaa

SEQ ID NO: 133125 - DNA, 379 bp, Homo sapiens
atccaccctggtgttgactgactttaacaaggttcagttcacagagattgagggcagaaaaaggaaatggcytaaaaagggtaagtttgctgtgttgccctcacaccacttgattcatggtccttatcctaaggatctcacctgatacttggttttataggaaggatgtgtaaaattcccagaacgctaggaaacagggacgaaaacacttcaaagggaaagttaatgaacttgtttctgaccacagagcatccttcagcacatgctgtctggagtggcctccaacaaggagtgtgtggtgaggtgctgagaatgcaatgggagcagggtcctgtccccacgctaaagaagctcacagtttaatgcaaatgagaagcca

SEQ ID NO: 133126 - DNA, 379 bp, Homo sapiens
atccaccctggtgttgactgactttaacaaggttcagttcacagagattgagggcagaaaaaggaaatggcctaaaaagggtaagtttgctgtgttgccctcacaccacttgattcatggtccttatcctaaggatctcacctgatacttggttttataggaaggatgtgtaaaattcccagaacgctaggaaacagggacgaaaacacttcaaagggaaagttaatgaacttgtttctgaccacagagcatcyttcagcacatgctgtctggagtggcctccaacaaggagtgtgtggtgaggtgctgagaatgcaatgggagcagggtcctgtccccacgctaaagaagctcacagtttaatgcaaatgagaagcca

SEQ ID NO: 133127 - DNA, 331 bp, Homo sapiens
ggctggggcccgggcgcgtcacggggccgggtgtctcttgggtccccgtgggccgaagaggctgggcggggttccgtgggggccgcgaggggcccggagcccaggactgggaccgcggggccgaccttgggccctgccgaggttccgcgagtggccggcctgagctcggctggccctttcggaggaccgggagctctccgttggcggccccagatgctcccggaaagaagccgcagttatttcagagccagctgcaaacctgtrggtttttcttggtctccgagttaggaatgaaaattgctaaagcagtggttttccaacttcagcctga

SEQ ID NO: 133128 - DNA, 331 bp, Homo sapiens
ggctggggcccgggcgcgtcacggggccgggtgtctcttgggtccccgtgggccgaagaggctgggcggggttccgtgggggccgcgaggggcccggagcccaggactgggaccgcggggccgaccttgggccctgccgaggttccgcgagtggccggcctgagctcggctggccctttcggaggaccgggagctctccgttggcggccccagatgctcccggaaagaagccgcagttatttcagagccagctgcaaacctgtgggtttttcttggtctccgagttaggaatgaaaattgcyaaagcagtggttttccaacttcagcctga

SEQ ID NO: 133129 - DNA, 326 bp, Homo sapiens
caagatcatgtttataacaccagcagttgagtacaaaatgatgcaaagtggtgttatcaatttcctaagaaggtgggtggscttcatgtgattgtaattggaatcctgaagaactggggtgatctttcctccaggaataattagcctttataggaaaatctgcagggtgggtcagaatcctgctttaaatattacttttctggcatttgatcagtaggttacagtggttgctccctaagtgttaattgatgataaaagatcttaaactctctcaatgaagatctcaagagggactgaaattccagtgtgtttaatattggagcatt

SEQ ID NO: 133130 - DNA, 266 bp, Homo sapiens
ttgtaattggaatcctgaagaactggggtgatctttcctccaggaataattagcctttataggaaaatctgcagggtgggtcagaatcctgctttaaatattacttttctggcatttgatcagtaggttacagtrgttgctccctaagtgttaattgatgataaaagatcttaaactctctcaatgaagatctcaagagggactgaaattccagtgtgtttaatattggagcattcacaaaaattgtagtgatcttttaagaattc

SEQ ID NO: 133131 - DNA, 266 bp, Homo sapiens
ttgtaattggaatcctgaagaactggggtgatctttcctccaggaataattagcctttataggaaaatctgcagggtgggtcagaatcctgctttaaatattacttttctggcatttgatcagtaggttacagtggttgctccctaagtgttaattgatgataaaagatcttaaactctctcaatgargatctcaagagggactgaaattccagtgtgtttaatattggagcattcacaaaaattgtagtgatcttttaagaattc

SEQ ID NO: 133132 - DNA, 266 bp, Homo sapiens
ttgtaattggaatcctgaagaactggggtgatctttcctccaggaataattagcctttataggaaaatctgcagggtgggtcagaatcctgctttaaatattacttttctggcatttgatcagtaggttacagtggttgctccctaagtgttaattgatgataaaagatcttaaactctctcaatgaagatckcaagagggactgaaattccagtgtgtttaatattggagcattcacaaaaattgtagtgatcttttaagaattc

SEQ ID NO: 133133 - DNA, 574 bp, Homo sapiens
agtcagtttcttcccaggtgaaaacattaatcaagcaaggataatctttaaaattaaaccttagttctaaatatgatttttgagtacaagcttttttaaagtgttgagttgcttcatttacttacttgataaaattgagaagcagtattgcccagtggttaagagcactggtcctagaattttacttagttttaarttctggctctaaaatgtactatgatttggggcttgtgaggaagtaatgtgtgtagaggcgttaattattagcacaatgcctggaatatagtaagcaacccagtaagtattagtaattataaggatcataaatctgattgaatacttactctgtctgaccctgcactcagtgcgaagggattcagaaattatttgacattcttcccaggaacttgacatagaatactgtttttcctttgtttttttgtttttgttttttgagatggaattttgctgtcgcctaggctggagtgcagtggcaccgtctctgctcactgcagcctccgcctcccaggttcaagcagttctcctgcctcagtctcccgaatagctgggatta

SEQ ID NO: 133134 - DNA, 574 bp, Homo sapiens
agtcagtttcttcccaggtgaaaacattaatcaagcaaggataatctttaaaattaaaccttagttctaaatatgatttttgagtacaagcttttttaaagtgttgagttgcttcatttacttacttgataaaattgagaagcagtattgcccagtggttaagagcactggtcctagaattttacttagttttaagttctggctctaaaatgtactatgatttggggcttgtgaggaagtaatgtgtgtagaggcgttaattattagcacaatgcctggaatatagtaagcaacccagtaagtattagtaattataaggatcataaatctgattgaatacttactctgtctgaccctgcactcagtgckaagggattcagaaattatttgacattcttcccaggaacttgacatagaatactgtttttcctttgtttttttgtttttgttttttgagatggaattttgctgtcgcctaggctggagtgcagtggcaccgtctctgctcactgcagcctccgcctcccaggttcaagcagttctcctgcctcagtctcccgaatagctgggatta

SEQ ID NO: 133135 - DNA, 574 bp, Homo sapiens
agtcagtttcttcccaggtgaaaacattaatcaagcaaggataatctttaaaattaaaccttagttctaaatatgatttttgagtacaagcttttttaaagtgttgagttgcttcatttacttacttgataaaattgagaagcagtattgcccagtggttaagagcactggtcctagaattttacttagttttaagttctggctctaaaatgtactatgatttggggcttgtgaggaagtaatgtgtgtagaggcgttaattattagcacaatgcctggaatatagtaagcaacccagtaagtattagtaattataaggatcataaatctgattgaatacttactctgtctgaccctgcactcagtgcgaagggattcagaaattatttgacattcttccsaggaacttgacatagaatactgtttttcctttgtttttttgtttttgttttttgagatggaattttgctgtcgcctaggctggagtgcagtggcaccgtctctgctcactgcagcctccgcctcccaggttcaagcagttctcctgcctcagtctcccgaatagctgggatta

SEQ ID NO: 133136 - DNA, 574 bp, Homo sapiens
agtcagtttcttcccaggtgaaaacattaatcaagcaaggataatctttaaaattaaaccttagttctaaatatgatttttgagtacaagcttttttaaagtgttgagttgcttcatttacttacttgataaaattgagaagcagtattgcccagtggttaagagcactggtcctagaattttacttagttttaagttctggctctaaaatgtactatgatttggggcttgtgaggaagtaatgtgtgtagaggcgttaattattagcacaatgcctggaatatagtaagcaacccagtaagtattagtaattataaggatcataaatctgattgaatacttactctgtctgaccctgcactcagtgcgaagggattcagaaattatttgacattcttcccaggaacttgacatagaatactgtttttcctttgtttttttgtttttgttttttgagatggaattttgctgtcgcctaggctggagtgcagtggcaccrtctctgctcactgcagcctccgcctcccaggttcaagcagttctcctgcctcagtctcccgaatagctgggatta

SEQ ID NO: 133137 - DNA, 428 bp, Homo sapiens
actttacatgattttgataagcatcaaatatatttttttccacattctcacaaatgcttgcctttttttttttwaaacttttaggttcagggatacatgtgcaggtttgttacacaggtaagcctgtgtcttgggggtttattgtacagattatttcatcacccagatattaagcctagtacccattagttacttttcctgatcctctccctcctcccaccctctaccttccaatcagccccagtatatattgttcccctctatgggtccatgtgctctcatcatttgtaattttataggtgaattctttctataaacaactagtaatggttaacctctatgtagtccaattttctatgtcacatgtaagggtgtgacacatataagggtgactctatgactgagcacacaatagccctatgccatgg

SEQ ID NO: 133138 - DNA, 628 bp, Homo sapiens
ggaatagcatacagcaacgcaaataaacaatctgtaactactcccaacattgatggttcttcaaacataacagcaagtgaaagaagccagaagagaggacayggtgtatgattccatttatataaaatacaaaggcaggaaaaactatcccatagaggttcctctgacaggagaccagtgacaggaagggggacagtggagagggaggattgtttgctgaaactctggcaatgttttgcttgttattgtgggagttaatgacacagatttgttaattttgcaaaaatacaacaagctaaagtctgacaacatattcacctttctgtatattccaatttttaaaagtttaagaactccaagcatttaaaattcctttcccaaagaacaaagtctctgatcccatgaagaaggtgcaaggcatgtcccacctgaggagaggaagcccactatattaatctgatctcatgctgctaataaagacataactgaggctggataattttataaaggaaaagaggtctaatttagtcacagttccacatggctggggaggcctcacacaaaggaggagcaaagtcacatcttgcatggtggcaggcaagacagagcttgtgcaggggaactcccc

SEQ ID NO: 133139 - DNA, 415 bp, Homo sapiens
agttgatgctcagtattgacaatcacaatcactatctaacaatctgtattttactcttccgatattttaactacctcacctcctcatccaataaaatgtaaactctacgaggactaaatgtttgtcctttgtgttcactgccggatccccagccctcagcacttcattcgttgagtggacagatattaatgccacatggtgacattattrtctccatcttacacatacagaagatggatccaggtggtgcaaagatgtgcccaaaggaaaataaatagaaaaagtcaaaatgactagttgcagaaggttttactgcgaattccatgtagttcccatcgtgcatactgccttcaaaaatggcagcttttcatatactttcagggagagattagaatcctatagaactcctgacaaa

SEQ ID NO: 133140 - DNA, 537 bp, Homo sapiens
tttattcccagggtttcattctcctgaacacaattgcccaattaacaaaaaagccagaataggggcccacacaaatggttcctaatatgttcattaatacattttcaaagttattgcatgtcacaaagttactgcatatcaccatgggctaggtcctctgtgagtgctggggactccaagttgaacagggatctcacctacaaggagcttaccatcaaacaagggaggtaagatgtacacaatgcaagataggaagtcatcattgctacaagggaatgaaaaggaggaaagaattattcccagctaggaggagcatggratgcttcctggaggaggcatctgaaccaagttttgattgtaggtgagaagtggtgtcaaggatgggagggagcattctccaagcatgcttggaggaaccaagcataagaggatagaagaccagggctgtgtgcaaacaaagggaatacttagacattcgggctgcccggacttaaaggtgtatggttggctttaatggaaaaaaatggtcaaagtata

SEQ ID NO: 133141 - DNA, 626 bp, Homo sapiens
tcccatgcccagcacctgaaagtagctatttagtctcagcctgtgctgagaatgacaaaagggtttcctaagaatggcagagcacaaactctaggagacctgtttagcgtaaatcagcatcacctcaagggtttgttaaaataagattgctaagccccaggctctgagtttctgattcagtaggtctaggtagagctccagaatttgcatttctaacaaactcccagatgctgctggttcagggacaatcctttgagaatctgtattstgaacaattaactctccaggttcatacacaataaacaatttagagccaatatagtctccaatctcagcttccagctgcctgtcccaaggatctggagatcccgtaagcattggagcagagtaagcagtcatagcccaagttagatctcggtcctttcacgtgcataccagcatggtttggtcgaggtggaaacatgcatgtcccactctaaaactcttaatataaaccacagagatgtactggataatgctgtgaaaagcagagtaacctgtcatagcagagtgggtgagagaggagatttttaaggcagactccctggatcctgcaagcccacttactaactgggtgatcatggacg

SEQ ID NO: 133142 - DNA, 521 bp, Homo sapiens
taactccctctcatacagtggattctcaataagagcaatgtgtrttattgtccctatagcaatttatttaattatacaaattactgagctatgatctatatgtcccccatccccatcaaggtcctaagtaaaaccctggagcctccatccttccaggtgagtgctccaagttaatgagcaagtctgtccctacagaagttttttgtttgttttttgagaaggagactcactctgtcacctaggctggagtgcagtggtgcaatcctggctcactacaacttctgcctcccaggttcaagtgattctcctgcttcagtctcccaagtagcctggattacaggtgcctgccaccacgcctggctaatttttgtatttttagtagagacggggtttcaccatgttggccaggctgatctcgaattcccgacctcaggtgatccacccgcctcagcctcccaaagtgctgggattacaggtgtgagccaccccgcccggctacagaagtttttatgagtcagcca

SEQ ID NO: 133143 - DNA, 611 bp, Homo sapiens
tgtatgtgtttgaaaatttcctaaataaattaataaatacctgttaagaaaaaggtgttcatttttaaatctaggaaaagatataggaaaatgtaaggaagataaacataatcccacaccccagagataattgcttttgcactttttgttgtatttttagaaaacagagaatgcggaatggtttgttttcccccccatatgtttctcaaacccatttttcttgcttgcaggaagagagtatatttcctgtacaatatgttctttgtgccacagggtggggagaagaggaggggaaggtggagattcagcatgccaggaaaataatggcagcatccatatatggggaaagtaaatgtggcagcttttcttagcagaaacatacccatcatagtctcagtaggtgacwgcatcccagtcacacagtgagcaggcagtcatgaaggaggcaaagaagctatattttgcattttaggatcagagtagtttcctaataaactaaaactgattcgtataatttgtatatttatgctatgagattacaaactaggtgatctagccctaagtactttatcatacttaacagagtgcctgcagattttactcagtttggt

SEQ ID NO: 133144 - DNA, 339 bp, Homo sapiens
tgaattcttttcaagatgaaatgagggctatccaggaagatggatgtatacagtactagtcaatttcaccaaaaaatagttccctatttggtgaatgggattaaaatacgagtattgatattaatatttagaaagcacagcatatggcacttcttccatttgaatttacaaatctttgtgasgtatcgtttgcagctctaatagccactcaaaccaagtatggacatcactctccacagaacgagattctcatgtcaccacagcacgtaccgtgctttccaaacctaagctttccaaaaaataaaaaagattcaattgcattgctatcaggaaaagaac

SEQ ID NO: 133145 - DNA, 403 bp, Homo sapiens
gaattcttttcaagatgaaatgagggctatccaggaagatggatgtatacagtactagtcaatttcaccaaaaaatagttccctatttggtgaatgggattaaaatacgagtattgatattaatatttagaaagcacagcatatggcacttcttccatttgaatttacaaatctttgtgaggtatcgtttgcagctctaatagccactcaaaccaagtatggacatcactctccacagaacgagattctcatgtcaccacagcacgtaccgtgctttccaaacctaagctttccaaaaaataaaaaagattcaattgcattgctrtcaggaaaagaacatttggaatgctcaaatgaaagccaaaaggtgaattttactgttagcaagtaaaataaaaatatt

SEQ ID NO: 133146 - DNA, 411 bp, Homo sapiens
gatggatgtatacagtactagtcaatttcaccaaaaaatagttccctatttggtgaatgggattaaaatacgagtattgatattaatatttagaaagcacagcatatggcacttcttccatttgaatttacaaatctttgtgaggtatcgtttgcagctctaatagccactcaaaccaagtatggacatcactctccacagaacgagattctcatgtcaccacagcacgtaccgtgctttccaaacctaagctttccaaaaaataaaaaagattcaattgcattgctatcaggaaaagaacatttggaatgctcaaatgaaagccaaaaggtgarttttactgttagcaagtaaaataaaaatatttcaaagtagtgtttatttaatcttcatgtcctccgttaagaattc

SEQ ID NO: 133147 - DNA, 395 bp, Homo sapiens
ctagaattacagagtttctgagagagaggttacttttggtattatgtattcggtggcagatactgtcatcgtctacccaacatctattctccccccacttccttgcaaactgaccctcaattttgttcagagtatcgatgtacccatctatacatttacaacttttacaacacatttacagtgtacccaacttacacatttcccagtctccctttcagatagtgaccaygtgacacagttctggccaatgagatgcaagtcaaagccactgtgtgggttggcccctttcttcttccttcctcctcctgcctagcatgcagacatgatgcctagaggggacagccatcttctgagtatgagaacaaatgccacctctcaagctggctaacagggat

SEQ ID NO: 133148 - DNA, 582 bp, Homo sapiens
aggaagcataagtataccattgttttaatggttatctttgatgagatcatgggcaagttgaatttttatttcttacgtgtatttttaaaagcaagcaataactctaaataaattaatctaggccaggtgcagtggttcatgcctataatcccagcactttgggagattgaggcaggaggaccacttgagcccaagaattggagaccagactggacaacaaaaggagaccctgtctctataaagcacatacacagagacacacacacacacacaccaaaaacctagctaggcatagtggcacacacctgtggtcccagctactcgggaggctgaggtaggaggatcagtttaggcccgggagcttgaggctgcagtgagctgtgatcgtgtcactgggtgacagggcgaaatcctgtctcaaaaaaaaaaaargcaaaactgtagttctaggacagatttgatataaaaaacaaaagtaaagcaggctatttgtttagtaacatcaattgctagacctctctcctgtttatgtattcacttggaagtcccataggcatccaaattcatcatttaaaactgaat

SEQ ID NO: 133149 - DNA, 594 bp, Homo sapiens
tgatccatatttattctatctctctgtctgtctattaatttatttatggtggggagggaggaggaaggcaacagatggagttataaatggacatgaccctgcatttgctctgctaactcccctyggtttaaggaaacatggctattcctcgaccctgcatgcctggctgacccaggctgtcctcgctggtggctggtggctgggggcaaatgcatttgtaatggaagaggtgaactcactgtcgggggttcgagggagcgcggggaggtgttttcttctgtggtaataagattgtcagggccccttcctggctcgtgcattgcatggaccgatgcaggctgccagaatgggaagctcactcttcttaattagtcctaatgcagttgaggctgttttcttagcctgaccaaagggagtagtaattaatatggtgggagagacagacggagagttcaaggccggcatgtgtgcccccgaccctggggtcactggggaaggggaacctagaagacaatagcctggctcccgcaggcctggacaaaggctggttctggttctcaaacctcagctcactgtggccttcccattaatgag

SEQ ID NO: 133150 - DNA, 594 bp, Homo sapiens
tgatccatatttattctatctctctgtctgtctattaatttatttatggtggggagggaggaggaaggcaacagatggagttataaatggacatgaccctgcatttgctctgctaactcccctcggtttaaggaaacatggctattcctcgaccctgcatgcctggctgacccaggctgtcctcgctggtggctggtggctgggggcaaatgcatttgtaatggaagaggtgaactcactgtcgggggttcgagggagcgcggggaggtgttttcttctgyggtaataagattgtcagggccccttcctggctcgtgcattgcatggaccgatgcaggctgccagaatgggaagctcactcttcttaattagtcctaatgcagttgaggctgttttcttagcctgaccaaagggagtagtaattaatatggtgggagagacagacggagagttcaaggccggcatgtgtgcccccgaccctggggtcactggggaaggggaacctagaagacaatagcctggctcccgcaggcctggacaaaggctggttctggttctcaaacctcagctcactgtggccttcccattaatgag

SEQ ID NO: 133151 - DNA, 518 bp, Homo sapiens
ggggtgggaggcactgacctcagtgtgaaaactttggccttgacattacagttgcaagtgaggaatcatccaatgtctgatggcataaaagggatcttttgtgtgtcctggagccatatcacaaacagtctgaccaagcgatatattgaaacaatttcatagggtgagtttcaaaagattggctcttcgaatatgctttgactgtaatagttgagagacagagagagagagagagagaaaggaccatcctaattctaagtaattaagcttagtgttcttatactaaagaatatctttggcttgttagcacwatcagaatcaccttgaactttttaatatcacagaagcacagccctgccctcctgatccaaatcttcaggagcaagagccaccagcatctacatttttagcaggctcacaggtggtcctggtgcatggttaggattgagaagcactggcatgctgttttgtggtggagccggactttttcatccaacagcttgtttggttcttcctat

SEQ ID NO: 133152 - DNA, 253 bp, Homo sapiens
acacaaacctctctttcacctacccatccagctccctcaaaacaaaacaaaaaaacaaaacacatctccccatttccaggggaaagcatctgagctagcttgaaaagttcccaacagcctgtctgggtcttccyggggttagttgggggtggttgtaatcatgacctgagttagggacgggggtccctttctggcctgctccgtgtactttagagggctccagggaccccataaacctctgttgtcaggtgac

SEQ ID NO: 133153 - DNA, 357 bp, Homo sapiens
tgaataaataattctatactgtaggggagaagctcatctcctctaagccctaggaggaagcagtttagagaacggcttcttggaatcgggtagacttgagtttcaagcccagcattcagtttcctttgggggaacctyggacaattcggcttctctgaacagactaaagaagttaatacaatcgagataatcatcatgatgttgttggcgcagtaccggctacagaataactactcagttaacagtagcaattattattttctctgtcagttttacatcactttcctttcaatgccagagtgaaaataagatagcaactttttttttttttttgagtgtgagctgggccaactctgc

SEQ ID NO: 133154 - DNA, 483 bp, Homo sapiens
gtttacacatttattttttatttttgttgtatattgacaaattatagttgtacrtatttatggggtatagagtggtgttattatgtttaaatataatgtggaatgattaaattaagctaagtaacatatatatcaccccaatttttaatgttttgggaatgagaacattagaaatttcctttcttagtgatattgaaatgtacaggactcagttattagccatatttagcacagtgtgctattgatctaaaaagccaaacttattcttcctattgaactgagtctttgtaccctttggctatcatttctccagtatccccaaccccagcctctggtagccaaccttctactctctgcttctatgagctcaattagtttagattccacatataagtaaggacatgtagtattggtatttctatgtttggcttatttcacttagcataatattctccaattccatccatgttgttgcagatgacg

SEQ ID NO: 133155 - DNA, 430 bp, Homo sapiens
gtagtatggacattttaacaatattaagtcttccactccatgacataggatgtctttccacttatctgtgtctttaaatttccttcatcaatgttatataattttcattgtacaagacttttacctctttggttaagtttattcatagatacttaatttttttgttgttgctattataaatgagacttgttttctaaattggttcttttggatagtttgttgtttgtgtatagaaacatcactgattgttatacattgattttgtatgctgtaactttattgagttgttcattagtcttgacagttttttgttaggtaacataatcatgtcatcttcaaatagaggtaattttacttatttctttccaatttgsgtgacttttctttttcttatctaattgctctagataggacttgagtacctgattga

SEQ ID NO: 133156 - DNA, 245 bp, Homo sapiens
atggggacgtggacatatctgggggtacatctttctgccaaccacagaccagtaamtaggagccttgtcagtctgatccccattccgcttctctttactcaggcctccccacctcaaccctgactccctatggtcaaggttggagcctctgcctcctggcaccctcttcagacagcatagaagtccctcgtggctgcttaccattctctaaggcctggacttctgtctttcagagtttagaaaat

SEQ ID NO: 133157 - DNA, 439 bp, Homo sapiens
caattatctgaaaactatttcaaagaaaactctttgtctcattctggcatttgctcaagggtatggctttccatcagtctctctgtctccatgtctcttttacatacatatgtatgtgtatatgcgtgcgtatgtgtacatacatccatacatatagacatattctctctctctccacacacactcacacacccctccaacctctgtggctctgagcgtcatgtgtgtaagacactgacgcgaatggtgagtgcctaggcaggggtcaaacaaaggctacctaccatgccagaggattgccacaaacacctcttaagcaagcatattccttggctcctcccagacacactgaatctgaatctctaggattctgatttcggagcccaggaatcctccsgtgcaggagttcccaggtgactctgatgcaccgggaggctgg

SEQ ID NO: 133158 - DNA, 540 bp, Homo sapiens
cgttggcagggccacgttccatctagaggtctaggggagggtccttcctgccactccccacttctggtggctgcagcattccttggtttgtggccacatcactccaatctctgcctccacggtcgtgtggtcttctccttttctgtgtctcaaatctcctctgcctccccctgaggacacttctgattgcatttagcaaaccacaaacaaccccaagataactcaaaataatctcatctcaaagaccttaactcagctctgcaaagtctttgctctatgaagtaacattcccaagttccaggattaggaggtagatatctttttcccgtgaagactcggggttaacttgctccaagcscttcagttggagattttcaatcctgttggttaaatcaggttttaaacatccttagacccaaatctggccatacaaggcagagaaaatcaacttcatgcatctttaccatgtaaagattcccatgtcacttcatggggatgtacttcaaagatgggtaggaaatggcagcaaagtgccaacag

SEQ ID NO: 133159 - DNA, 456 bp, Homo sapiens
tcttcctcattctctctttgcctgctgccatccctgtaagatgggacttgctcctccttgccttccaccatgattgtgaggtttccccagccatgtgaaactgtacattcaattaaacctctttcttttttaaattgcccagtctctggtatgtctttatcagcagcatgaaaatggactaatacatcatcctatctgaytaatacaggagagggaaaaactcatagcagcatatgtcatccggagcctctccaatcttttttttaataatgcccaatttacagttttataaaaattacttgacctgtaaagaagcaagaatgtgtaagtgatgaacaagagaaaaatcagactacagaggatccagatatttgaattagcacacaagaacattaaaataaacatgattagtatgttcaaggagacagaataaaagatagattccagcagagagaa

SEQ ID NO: 133160 - DNA, 464 bp, Homo sapiens
tcttcctcattctctctttgcctgctgccatccctgtaagatgggacttgctcctccttgccttccaccatgattgtgaggtttccccagccatgtgaaactgtacattcaattaaacctctttcttttttaaattgcccagtctctggtatgtctttatcagcagcatgaaaatggactaatacatcatcctatctgattaatacaggagagggaaaaactcatagcascatatgtcatccggagcctctccaatcttttttttaataatgcccaatttacagttttataaaaattacttgacctgtaaagaagcaagaatgtgtaagtgatgaacaagagaaaaatcagactacagaggatccagatatttgaattagcacacaagaacattaaaataaacatgattagtatgttcaaggagacagaataaaagatagattccagcagagagaattacacaa

SEQ ID NO: 133161 - DNA, 464 bp, Homo sapiens
tcttcctcattctctctttgcctgctgccatccctgtaagatgggacttgctcctccttgccttccaccatgattgtgaggtttccccagccatgtgaaactgtacattcaattaaacctctttcttttttaaattgcccagtctctggtatgtctttatcagcagcatgaaaatggactaatacatcatcctatctgattaatacaggagagggaaaaactcatagcagcatatgtcatccggagcctctccaatcttttttttaataatgcccaatttacagttttataaaaattacttgacctgtaaagaagcaagaatgtgtaagtgatgaacaagagaaaaatcagactacagaggatccagatatttgaattagcacacaagaacattaaaataaacatgattagtatgttcaaggagacagaataaaagatagattcmagcagagagaattacacaa

SEQ ID NO: 133162 - DNA, 402 bp, Homo sapiens
agtccattaagtgaaagcaagtatattaggaatgtaaaggaataaaagaatggctactccccgtagacagagcagccccaaaggctgctggttgcccatttttgaggttatttattgatgatatgctaaacaaggggwggattattcatgcctcccctttttagatcatagagagtaacctcctgatgttgccatggcatttgtaaactgtcatggtgctggtgggagtgcagtagtgaggaccacgagaggtcacccttgtcaccatgttgattttggtgggttttggccagcttctgtactgcaacctgttttatcagaaaggtctttatgtcctgtatcttatgctgacctcctatctcatcctgtgacttagaatgccttaaccacctgggaaggcag

SEQ ID NO: 133163 - DNA, 460 bp, Homo sapiens
tttggtttggttttgattttgctttttcaatcatttcacctaccactttgattccttctaacacagggaaatctaaattgacagatagcctattcctgtggtgacctttctgcatagcccagagccaatctgtgcaayaggatatgtccttcagtgtatagccttagggttctatcaaataagtgctcacaaaagaatttatttgttactcctctacgacaggtactatcctacataaaaatcaagtcaagatttctgccattgctttgttctttcatctgaaggacaaaagtagaggagactgttgtgaactaaaataaaatttggtgaaccttcgcagcctttaaaaacatgtcattttcaccgtgaaattcacgactggtttccaaagctacatggccaccagaaattgaaagtaaggaagataaaaaattaaggagagcaaaaattatccatatca

SEQ ID NO: 133164 - DNA, 615 bp, Homo sapiens
caaaagagttaccccttctcctttaccaccttctttatggaaagtggtggtgggagggagaatgtggcatgtccaggacccagctttctaactattcttttttcctttttcttgcctcttccttccccttcattttaatggtgggtcagttttaggcagatacaactagaagtggttagctacagagaggttaaacaaatacataaacatattatgaataaaaagagtcaggtttcttattaatgaagaatagttttacaaggggaaaggagaaagaggcctaaggtggtgaattggaatgtgaactcatgatagacagatagatggtagacagatagatagatagatagatagatagatagatagatrgatagtgtatttgaatacatacacaaatttttagctcttccaatagatagagaaagcctccaataatgcaactaattataatgagcacacctagcactcagaaaatggtttctaaatctcatacttcattaaaagaaaccaggactctctgaaaaaacagctgactgttacagctaggaatggaaaaatatgaaatggaaatgggccatcttattgtactacaaagtaaggaattgctcaaaaaat

SEQ ID NO: 133165 - DNA, 424 bp, Homo sapiens
aaaatgacaattctgaacatagcacttgagacccaatctgtctggcctaaaggaaaytttagttcaaatatgcattttgaaaattccatcttccatgctttgcccattctcttcctttctgacccctcacttctcaacctaatcttattgagaactatgttaactgttgtcctcctccctgtgacagtaattccccattcataattaatttttccttttgttctgtgctccattatacctaaaactttaatacctgtcacattctacttgtcgtgtgttacagtattattacctatgcacaatttactttatgggagggtacaatgtattataccttttaatatgcttatgagagtgccttgcatgaaacaaatgcatagtaaatatctgtagaattcaggtagaattcagggatctcgtttat

SEQ ID NO: 133166 - DNA, 424 bp, Homo sapiens
aaaatgacaattctgaacatagcacttgagacccaatctgtctggcctaaaggaaattttagttcaaatatgcattttgaaaattccatcttccatgctttgcccattctcttcctttctgacccctcacttctcaacctaatcttattgagaactatgttaactgttgtcctcctccctgtgacagtaattccccattcataattaatttttccttttgttctgtgctccattatacctaaaactttaatacctgtcacattctacttgtcgtgtgttacagtattattacctatgcacaatttactttatgggagggtacaatgtattataccttttaatatgcttatgagagtgccttgcatgaaacaaatgcwtagtaaatatctgtagaattcaggtagaattcagggatctcgtttat

SEQ ID NO: 133167 - DNA, 290 bp, Homo sapiens
catacattaagattgtgtttaaatgtgtggtcactggtgatcacmtaattcgtttttgatgtccatttcttcccaagtataaaattaatgcattaattagtcattataaggaagctttcctaagtcctttcctaaatgaaatactaaacattaaggtctcttcctctgatcatcaactgttaaacattgtcttcctgttcacatcgaccttgcgttttcttctaaagcagaatagcaattacagtaataatagctccttttagaataggattttagaggaagttactggc

SEQ ID NO: 133168 - DNA, 290 bp, Homo sapiens
catacattaagattgtgtttaaatgtgtggtcactggtgatcacctaattcgtttttgatgtccatttcttcccaagtataaaattaatgcattaattagtcattataaggaagctttcctaagtcctttcctaaatgaaatactaaacattaaggtctcttcctctgatcatcaactgttaaacattgtcttcctgttcacatcgaccttgcgttttcttctaaagcagratagcaattacagtaataatagctccttttagaataggattttagaggaagttactggc

SEQ ID NO: 133169 - DNA, 582 bp, Homo sapiens
tgaatcatctttagtttactcttgttctagaaacggttattacaaacaagtatatagaaacagaaaaatcttttgcagaaaatggatggttaaaaggataacatttcttctctaattgttacccttccaacttttcacatggatttgtgtcttataagccaatttcagtgacagcaaagtgctagtgataagggaagactctcatctaaagctttacaagtttgcaggaataaatcaatatgctgtctttgactactgttgccagcggtgcattgtatcatgtwaatttcctcttagaatctattgcctagcacctggaaaaatagttgccaagtaatgtaagcactctaaacccaagattaggctgtagagaaagagcagcccctattcctggcagacaaaaataattgtaagcaaaatatccctgatgtactattagttgatatgaaaattattcttgacatagaagactgagaatagaaaaatcgttcggtatgtacagtgtcaggtttggaaaaaataagtgccaacaacatacttcttccacatcgtagtgacaatttaaacaatgaataaatactt

SEQ ID NO: 133170 - DNA, 546 bp, Homo sapiens
agcttacatatacatatatagtttatagatacatatatatgtgtgcatatagatagcttatatatacacgtgtgtatatagatagcttgtatatatatacatagtttataaatatacatatatatgtgtatatagatagcttatatatacatacatatatatgtgtgtgtatatatatatgtgtgtgtgtgtgtgtatatatatacacacactcctgaactcaactgctyctcccacctctgccttccaaagttctggaattacaggtgtgagccactgtgcccagtctaaaaagtcaagctttttacaggagtgatgaaagagtttccagtcagatagaacacaatgtgcagaggtcctatggtgagaatttgacatttggggggaaggaaaacctcccttacatggagagttgttgagttttctgtcactacttcatggctttctactctacatgctatactccttctgagacaaactaattatctcacagatactgcaaagtcagcaccaccaaaataaatgttttattttcttcagtcctaa

SEQ ID NO: 133171 - DNA, 557 bp, Homo sapiens
atggggtgggtaaatgatgattccctgacaatgtataaaccccaacatgttatgacctgacaagtatcaggacacctatcttggttcccattcaagacttacttaaatacaggaatcagaatgacttggcaatgtagaacataaaatatattaagctcctttgatttagacagctgtttctgtttctttttttttttttttttcctccttttttgagacagagacttgctttgttgcccaggctggagtgcaatggcatgatctcagttcactgcaatctccacctcctgggttcaacagattctcctgcctcagcctccccaataagtggaactgtataggcacataccaccacacccggctaatttttgtattttcagtaraaatggggtttcacattttggccagactggtctcgaactcctgacctcaggtgatctgcccgcctcagcctcttcaaatgctgggattacaggcatgaaccaccgtgcctggcctctgtttttattttctaagaaaatttttacaaataattaaaagctacccataaacacggg

SEQ ID NO: 133172 - DNA, 560 bp, Homo sapiens
agtcagcaagtaagcaatatgagccrtgccagagctcctcagcttcttccaaagcagtactatgagccttcagctccatggacctcagagagggagggtccacactcatggagtataaaaggaattttctccaatctgtagaaccctcttataaataagtaagcatgtgtttctacgtctttgtccataatacatcaccacattttaagggtatatttgtggttgatagtctggtttaaaacatagactaggtggtatatataatactgtattttataagatctgggtaaatacgagtaagatccttcaaactaacatgtcattatcctccagaatagttgaaacgaaggcataaaatactcatgtgactctcacttgagagacatagcacatatgaattagaacaccgtgaaaagaaaaaacaaaagggctttcagagatgagcacccaatgaaaagttcctgagacagggatccaaaattgtagatgctgacatgctatggggctgcttttcatgtggacaactctcaataagtgctagactgaataaatgctgcaca

SEQ ID NO: 133173 - DNA, 426 bp, Homo sapiens
gaattcaatgcttgggtcacctccagattcattttcacagtctttcatgttttggtcatatkacattgtattttgctgccatatgactgatctttttttgttaaatgtgagatacttgttaaaaaatatttagcaatgaattgaggcctagtagcatgttatcttgctgcagaagagatgggagtctacttctgggggatggtcaggggtcctccatacaggctgcaattgaggtcgtcggtgcaggctcagtccctacaaaggccagggtatttcctgtccacctctattctgatgcatgactcttctgggtctcaaccagagccagtggacttcagtatgggtcgctttcattggcagaccctcaatccacttgttttccatctaatcccacgcatgtgtgcaaaagctgctgtgcttctttgc

SEQ ID NO: 133174 - DNA, 433 bp, Homo sapiens
  misc_feature (1)...(433): n = A,T,C or G
nnncgcggaattcaatgcttgggtcacctccagattcattttcacagtctttcatgttttggtcatattacattgtattttgctgccatatgactgatctytttttgttaaatgtgagatacttgttaaaaaatatttagcaatgaattgaggcctagtagcatgttatcttgctgcagaagagatgggagtctacttctgggggatggtcaggggtcctccatacaggctgcaattgaggtcgtcggtgcaggctcagtccctacaaaggccagggtatttcctgtccacctctattctgatgcatgactcttctgggtctcaaccagagccagtggacttcagtatgggtcgctttcattggcagaccctcaatccacttgttttccatctaatcccacgcatgtgtgcaaaagctgctgtgcttctttgc

SEQ ID NO: 133175 - DNA, 426 bp, Homo sapiens
gaattcaatgcttgggtcacctccagattcattttcacagtctttcatgttttggtcatattacattgtattttgctgccatatgactgatctttttttgttaaatgtgagatacttgttamaaaatatttagcaatgaattgaggcctagtagcatgttatcttgctgcagaagagatgggagtctacttctgggggatggtcaggggtcctccatacaggctgcaattgaggtcgtcggtgcaggctcagtccctacaaaggccagggtatttcctgtccacctctattctgatgcatgactcttctgggtctcaaccagagccagtggacttcagtatgggtcgctttcattggcagaccctcaatccacttgttttccatctaatcccacgcatgtgtgcaaaagctgctgtgcttctttgc

SEQ ID NO: 133176 - DNA, 426 bp, Homo sapiens
gaattcaatgcttgggtcacctccagattcattttcacagtctttcatgttttggtcatattacattgtattttgctgccatatgactgatctttttttgttaaatgtgagatacttgttaaaaaatrtttagcaatgaattgaggcctagtagcatgttatcttgctgcagaagagatgggagtctacttctgggggatggtcaggggtcctccatacaggctgcaattgaggtcgtcggtgcaggctcagtccctacaaaggccagggtatttcctgtccacctctattctgatgcatgactcttctgggtctcaaccagagccagtggacttcagtatgggtcgctttcattggcagaccctcaatccacttgttttccatctaatcccacgcatgtgtgcaaaagctgctgtgcttctttgc

SEQ ID NO: 133177 - DNA, 426 bp, Homo sapiens
gaattcaatgcttgggtcacctccagattcattttcacagtctttcatgttttggtcatattacattgtattttgctgccatatgactgatctttttttgttaaatgtgagatacttgttaaaaaatatttagcaatgaaytgaggcctagtagcatgttatcttgctgcagaagagatgggagtctacttctgggggatggtcaggggtcctccatacaggctgcaattgaggtcgtcggtgcaggctcagtccctacaaaggccagggtatttcctgtccacctctattctgatgcatgactcttctgggtctcaaccagagccagtggacttcagtatgggtcgctttcattggcagaccctcaatccacttgttttccatctaatcccacgcatgtgtgcaaaagctgctgtgcttctttgc

SEQ ID NO: 133178 - DNA, 426 bp, Homo sapiens
gaattcaatgcttgggtcacctccagattcattttcacagtctttcatgttttggtcatattacattgtattttgctgccatatgactgatctttttttgttaaatgtgagatacttgttaaaaaatatttagcaatgaattgaggcctagyagcatgttatcttgctgcagaagagatgggagtctacttctgggggatggtcaggggtcctccatacaggctgcaattgaggtcgtcggtgcaggctcagtccctacaaaggccagggtatttcctgtccacctctattctgatgcatgactcttctgggtctcaaccagagccagtggacttcagtatgggtcgctttcattggcagaccctcaatccacttgttttccatctaatcccacgcatgtgtgcaaaagctgctgtgcttctttgc

SEQ ID NO: 133179 - DNA, 433 bp, Homo sapiens
  misc_feature (1)...(433): n = A,T,C or G
nnncgcggaattcaatgcttgggtcacctccagattcattttcacagtctttcatgttttggtcatattacattgtattttgctgccatatgactgatctttttttgttaaatgtgagatacttgttaaaaaatatttagcaatgaattgaggcctagtrgcatgttatcttgctgcagaagagatgggagtctacttctgggggatggtcaggggtcctccatacaggctgcaattgaggtcgtcggtgcaggctcagtccctacaaaggccagggtatttcctgtccacctctattctgatgcatgactcttctgggtctcaaccagagccagtggacttcagtatgggtcgctttcattggcagaccctcaatccacttgttttccatctaatcccacgcatgtgtgcaaaagctgctgtgcttctttgc

SEQ ID NO: 133180 - DNA, 426 bp, Homo sapiens
gaattcaatgcttgggtcacctccagattcattttcacagtctttcatgttttggtcatattacattgtattttgctgccatatgactgatctttttttgttaaatgtgagatacttgttaaaaaatatttagcaatgaattgaggcctagtagcatgttatcttgctgcagaagagatgggagtctacttctgggggatggtcasgggtcctccatacaggctgcaattgaggtcgtcggtgcaggctcagtccctacaaaggccagggtatttcctgtccacctctattctgatgcatgactcttctgggtctcaaccagagccagtggacttcagtatgggtcgctttcattggcagaccctcaatccacttgttttccatctaatcccacgcatgtgtgcaaaagctgctgtgcttctttgc

SEQ ID NO: 133181 - DNA, 426 bp, Homo sapiens
gaattcaatgcttgggtcacctccagattcattttcacagtctttcatgttttggtcatattacattgtattttgctgccatatgactgatctttttttgttaaatgtgagatacttgttaaaaaatatttagcaatgaattgaggcctagtagcatgttatcttgctgcagaagagatgggagtctacttctgggggatggtcaggggtcctccatacaggctgcaattgaggtcgtcrgtgcaggctcagtccctacaaaggccagggtatttcctgtccacctctattctgatgcatgactcttctgggtctcaaccagagccagtggacttcagtatgggtcgctttcattggcagaccctcaatccacttgttttccatctaatcccacgcatgtgtgcaaaagctgctgtgcttctttgc

SEQ ID NO: 133182 - DNA, 426 bp, Homo sapiens
gaattcaatgcttgggtcacctccagattcattttcacagtctttcatgttttggtcatattacattgtattttgctgccatatgactgatctttttttgttaaatgtgagatacttgttaaaaaatatttagcaatgaattgaggcctagtagcatgttatcttgctgcagaagagatgggagtctacttctgggggatggtcaggggtcctccatacaggctgcaattgaggtcgtcggtgcaggctcagtccctacaaaggccagggtatttcctgtccacctytattctgatgcatgactcttctgggtctcaaccagagccagtggacttcagtatgggtcgctttcattggcagaccctcaatccacttgttttccatctaatcccacgcatgtgtgcaaaagctgctgtgcttctttgc

SEQ ID NO: 133183 - DNA, 426 bp, Homo sapiens
gaattcaatgcttgggtcacctccagattcattttcacagtctttcatgttttggtcatattacattgtattttgctgccatatgactgatctttttttgttaaatgtgagatacttgttaaaaaatatttagcaatgaattgaggcctagtagcatgttatcttgctgcagaagagatgggagtctacttctgggggatggtcaggggtcctccatacaggctgcaattgaggtcgtcggtgcaggctcagtccctacaaaggccagggtatttcctgtccacctctattctgatgcatgactcttctgggtctcaaccagagccagtggacttcagtatgggtmgctttcattggcagaccctcaatccacttgttttccatctaatcccacgcatgtgtgcaaaagctgctgtgcttctttgc

SEQ ID NO: 133184 - DNA, 426 bp, Homo sapiens
gaattcaatgcttgggtcacctccagattcattttcacagtctttcatgttttggtcatattacattgtattttgctgccatatgactgatctttttttgttaaatgtgagatacttgttaaaaaatatttagcaatgaattgaggcctagtagcatgttatcttgctgcagaagagatgggagtctacttctgggggatggtcaggggtcctccatacaggctgcaattgaggtcgtcggtgcaggctcagtccctacaaaggccagggtatttcctgtccacctctattctgatgcatgactcttctgggtctcaaccagagccagtggacttcagtatgggtcgctttcattggcagaccctcaatccacttgttttccatctaaycccacgcatgtgtgcaaaagctgctgtgcttctttgc

SEQ ID NO: 133185 - DNA, 388 bp, Homo sapiens
aggctggagtgcaatggctcaatcagctcactttagccttgaactcccgggctcaagtgatactgccacctcaacctcccaagtctgctactacaggaacacaaactccttttttaaattttttgtggatatggggtctcactatgttgcctaggctggtctcgaactcccaggctcaagcagtcctcctacctcagcctccccaaatgctgggattacaggtgggagctactgtacrcctggccttatctaagctgtttccctgaaaatccccgtcttgggtaatgattccattggccccaccatgccctgtcctgccttcctggctgtgcccaagcttggtctctgcctgcctgcctgcctccctctctgggtctcgagctcctgt

SEQ ID NO: 133186 - DNA, 388 bp, Homo sapiens
aggctggagtgcaatggctcaatcagctcactttagccttgaactcccgggctcaagtgatactgccacctcaacctcccaagtctgctactacaggaacacaaactccttttttaaattttttgtggatatggggtctcactatgttgcctaggctggtctcgaactcccaggctcaagcagtcctcctacctcagcctccccaaatgctgggattacaggtgggagctactgtacacctggccttatctaagctgtttccctgaaaatccccgwcttgggtaatgattccattggccccaccatgccctgtcctgccttcctggctgtgcccaagcttggtctctgcctgcctgcctgcctccctctctgggtctcgagctcctgt

SEQ ID NO: 133187 - DNA, 521 bp, Homo sapiens
ggcgctgccggaacttgtagttccacctcccgccgcgctaaatagccggaaacgggggcggccagaacagagaactaccgaggcgaaggtacgggtggcggcgaggggtcaatccgcgccgggggyggggttggctgtgaggccgtcggaggtggttgggtgggaggagatccgctcacacacacgaggaggagggttgagctgctgccgccgccgcctctgtcgtcgtcgcgagtgtggagtcgggactggagctgctgccgcggcgacgccggggatctttgtcgctagctcccggcccttctgccccgccgccttccctcagtcagcgttgcccactcctctccggccgggcgcccctgcctccatttctcgctctctgtccaccacacacacggcccccccgatcatggatccgggcagtggcggcggcggcggcggcggcggcggcggcgggagcagcagcggcagcagcagcagcgactcggcgcctgactgctgggaccaggcggacatggaag

SEQ ID NO: 133188 - DNA, 390 bp, Homo sapiens
actcaccactagttgttaaactttcagcaaatcccataactgagtcttagtttcctcctcttcaawatgtggatggatgtatgttcgtttcagaaggctatgaggattagacatcagggcccaacaccaagaaaaccagcctcatgctaactccatctaaattcatcctttgcctagggaactgcccaccccatctgtccagaagcagcatgggctcttttcccattttccacacacatcttcactgttcattcttgggatccaacttggtcccaaggcctgaaggagttgccttgctgaattaactttgtaggaggactagttaggcttatggcagttgtgaatggttccttgctttaaaatgcacccatgtgcagactgtcatcctgt

SEQ ID NO: 133189 - DNA, 415 bp, Homo sapiens
gctcacacctatcatccccacacttttggaggccgaggcaggtggattgcttgaacccagcctgaacaacatagagagatcctatctctasaaaaaatacaaaaaaaaaaaaaaaaaaaaaaaaaaaacaaacaaaagctgggtgtggtggtgcacgcctgaagtcctagctactcaggagactggttgagggaggaggattgcttgagcccgagaggttgaggccatagtatgctgagattatgccactgcacttcagcctgggcaatgggagtaagacctgtctcaatttttttttttaagccaactttgtaaaatacgaaaaggggtttattttgagccaatatgagtggcgatggcctgaaggatggtctcagtaggtcctgagaaagtgtacccaaagcggtcaggttac

SEQ ID NO: 133190 - DNA, 415 bp, Homo sapiens
gctcacacctatcatccccacacttttggaggccgaggcaggtggattgcttgaacccagcctgaacaacatagagagatcctatctctacaaaaaatacaaaaaaaaaaaaaaaaaaaaaaaaaaaacaaacaaaagctgggtgtggtggtgcacgcctgaagtcctagctactcaggagactggttgagggaggaggattgcttgascccgagaggttgaggccatagtatgctgagattatgccactgcacttcagcctgggcaatgggagtaagacctgtctcaatttttttttttaagccaactttgtaaaatacgaaaaggggtttattttgagccaatatgagtggcgatggcctgaaggatggtctcagtaggtcctgagaaagtgtacccaaagcggtcaggttac

SEQ ID NO: 133191 - DNA, 415 bp, Homo sapiens
gctcacacctatcatccccacacttttggaggccgaggcaggtggattgcttgaacccagcctgaacaacatagagagatcctatctctacaaaaaatacaaaaaaaaaaaaaaaaaaaaaaaaaaaacaaacaaaagctgggtgtggtggtgcacgcctgaagtcctagctactcaggagactggttgagggaggaggattgcttgagcccgagaggttgaggccatagtatgctgagattatgccactgcacttcagcctgggcaakgggagtaagacctgtctcaatttttttttttaagccaactttgtaaaatacgaaaaggggtttattttgagccaatatgagtggcgatggcctgaaggatggtctcagtaggtcctgagaaagtgtacccaaagcggtcaggttac

SEQ ID NO: 133192 - DNA, 415 bp, Homo sapiens
gctcacacctatcatccccacacttttggaggccgaggcaggtggattgcttgaacccagcctgaacaacatagagagatcctatctctacaaaaaatacaaaaaaaaaaaaaaaaaaaaaaaaaaaacaaacaaaagctgggtgtggtggtgcacgcctgaagtcctagctactcaggagactggttgagggaggaggattgcttgagcccgagaggttgaggccatagtatgctgagattatgccactgcacttcagcctgggcaatgggagtaagacctgtctcaatttttttttttaagccaactttgtaaaatacgaaaaggggtttwttttgagccaatatgagtggcgatggcctgaaggatggtctcagtaggtcctgagaaagtgtacccaaagcggtcaggttac

SEQ ID NO: 133193 - DNA, 529 bp, Homo sapiens
agcaatgctttactgcctgttataattccttgaagaaaatgctttagaatcttgatcacacttgttaaaaatttccattaaaagctctgctcttctcagcagctggtctaagcacaatggttttggcatccaccaagtgaaaagtttgttcatcttaagttttcagtcagaattgtgtaagctggcccagttgagatgtctatggtgttggctattgtttctgctgttaatcactggtacccttcaataagggcatgaacaagatacattttttccttgaaaattgatgtggatggtctgatgctgtgggcttcatcctcagcgctgtctcatttcttcttaaaatgaattaattatctgtaaactgctgatttctttggggcattgtccccatgaacatcttgtaaagcatcagtgatttcacccttcttccatccaagctcaccataaatgtgatgtttgttgtggcttcarttttagcagaatttatgttgctctaatagaagctccttttaaactgatgtcttgt

SEQ ID NO: 133194 - DNA, 599 bp, Homo sapiens
cttgggggttttattatctcatcagttgatccagaagcccttggagaagctgccactctcgcatcagagcaccagcctccaataataagacccacggcacgttatgggcatggtaaaggttagtggaccctggagcaaggctgaccacgtgaggttctagctctggacatgcaccagctctgtgactgtggccaagtcactccacctgcctgacccttgtgttccttctgtgtaaagagcagtgggggggcaccgacagcacctcctcaaccgccgcaaagatttagactatcatcggcgttagcaggcacggaacatgtgtgatgtgttttgttactattattcattggagctgctgggaacctttgctcagatgctccacacacagtgtctggcacagmacaagcactcggagagggagtgctgttatgttcattacaggtgcatcgtggcccttgctatttggatggatttgctgagtttgggcagtgtatagatggggatatgggtacaatgacccttttttcagcattcttattatcaggaattcctccatgaaggcagaacccagcctggctttccggagcagcatcccttgg

SEQ ID NO: 133195 - DNA, 530 bp, Homo sapiens
atcacaaagaatccagttgttttacctttctaaacaatgagtaccataactctgaaaacacatcatttatttatgccaagtctgataaatttacatataaagtatctttacttttcttgctcttccttctgtcctaatgtttatcaggatgacatattaaactgatctaccattatgaagagttataatacacatctagaaatttttaaattatccttctgatataacgatcattgcaaatacctctccatctaaaaagacaygacaactaaatatagcataaaatcctagacaccagatcaggtactggtagaaaaaaaaatgctacaaaagatgttactgggacaactggcaaaattgtaatgtgggctgtaaaaaactaaatatcctgaatttgctcacgtatgcagtttcataagataatatcctggctctcaggatatgcacattaaagtattaagggctaaagaggcacagatgtatgcagcctactctcaaatgaccccccaaaaatttgtgtgtgtatgtgt

SEQ ID NO: 133196 - DNA, 595 bp, Homo sapiens
tatccaagggatgctgctccggaaagccaggctgggttctgccttcatggaggaattcctgataataagaatgctgaaaaaagggtcattgtacccatatccccatctatacactgcccaaactcagcaaatccatccaaatagcaagggccacgatgcacctgtaatgaacataacagcactccctctccgagtgcttgtkctgtgccagacactgtgtgtggagcatctgagcaaaggttcccagcagctccaatgaataatagtaacaaaacacatcacacatgttccgtgcctgctaacgccgatgatagtctaaatctttgcggcggttgagggaggtgcttgttccgggttggccccccccccccccactgctctttacacagaaggaacacaagggtcaggcaggtggagtgacttggccacagtcacagagctggtgccatgtccagagctagaacctcacgtggtcagccttgctccagggtccactaacctttaccatgcccataacgtgccgtgggtcttattattggaggctggtgctctgatgcgagagtggcagcttctccaagggcttctggatcaactg

SEQ ID NO: 133197 - DNA, 519 bp, Homo sapiens
ccccagccatgtggatgggatttctccttcattgatctgatggtggtcgtggcaatgtataagcacctggaaacaggtcagacaggtccaggtgagaaccaggggtggggagaaggggaggcccaggaaaacatccaggtggcagaagctctggcactcagagagtcctgatgcaagatcttagactcatcaatgaggcagtaattcctctatatccagctgtacccaacccctacaccctactctcaaataccagaggaagcagaattgttcactgttctggacctcaaggatggcttcttctgcattcccctgcactctgactcccagtttctctttgcctttgaggatcccacagaccacacatcccaacttacatggacggtcttgcctcaaggtktagggatagctctcatctgtttggtcaggcactggcccaagatctcggccacttctcaagttcagggactctggtccttcagtatgtggatgatttacttttggctaccagtttggaag

SEQ ID NO: 133198 - DNA, 512 bp, Homo sapiens
ggccgggtgtgatggcatgcgcctgtaatcccagctacttggggggctgagaggcaggagaatcgcttgaatmcggtgagaggcagaggttgcagtgagccaagattgcgccactgcactctagcctgggtgagagaatgagagtccatctcaaaaaaaaaaaaaaaaaaaaaaagaaagaaagaaagaaaaaaaagaacacatctaatgaaggaggaaactgaggttcagagagagaggacttgcccagttcacacagccacacagaggctacgccaggcctggaactcagaacttgggactccatgtataaagggacccatccattcatccaattccttcattcagcaaacatttattgaacgctgtggtaaacagaataatggcccccctaaatgtccacattctaatccccaaaacctatgaatatgttaccttacatggtaaaaaggactttgcagatgtgactgtttagggtttaggatttttgttgttgttgtcgttgttttaga

SEQ ID NO: 133199 - DNA, 549 bp, Homo sapiens
tactctgtcgcctaggctggagtgcagtggcacgatctcggctcactgcaacctccacctccggggctcaactgatcctcctgcctcagcctcccgagtaactgggactacaggcatgtgccaccatgcccaactaatcttgtattttttgtagagaygaggtttcaccatgttggccaggctggtctcaaactcctaatctcaggtgatctgccggtaagctagcagaatttttttttatttttttttattaagagacggagtttcgctcttgttgcccaggctggagtgcaatggcgtgatctcggatcaccacagcctctgcttcccaggttcaagcgattctcctgcctcagcctcctgagtagctgggattacagacatgtgccaccacgcccagctaattttttgtaattttaataaagacggggtttctccatgttggtcaggctaatcttgaactactgacctcaggtgatctgcccacctcagcctcccaaagtgctgggattacaggcgtgagccaccgcccctcgccaagctagcaga

SEQ ID NO: 133200 - DNA, 425 bp, Homo sapiens
gaattcaatgcttgggtcacctccagattcattttcacagtctttcatgttttggtcatattacattgtattttgctgccatatgactgatctctttttgttaaatgtgagatacttgttaaaaaatatttagcaatgaattgaggcctagtggcatgttatcttgctgcagaagagatgggagtctacttctgggggatggtcacgggtcctccatacaggctgcaattgaggtcgtcggtgcaggctcagtccctasaaaggccagggtatttcctgtccacctctattctgatgcatgactcttctgggtctcaaccagagccagtggacttcagtacgggtcgctttcattggcagaccctcaatccacttgttttccatctaatcccacgcatgtgtgcaaaagctgctgtgcttctttg

SEQ ID NO: 133201 - DNA, 498 bp, Homo sapiens
gctgggattacaggtgcctgccaccacgcccggctaatcttttgtatttttagtagagacggggtttcaccgtattagccaggatggtctcaatctcctgacctcgtgatccatccgcctcgccctcccggagtgctgggactacaggcatcagccaccgtgaccggctcagactgtactcttatagccatctgaaatacgttttctaggtagagatagattgtgtaagggtacagttgtgaggataacagaaacatggcagattatttaaaatcatcctgaacrtggtgctttatctgatgaaagtgattgtaatccataggaaaatgtttcaacgtgcgcaagagttgcggcggcgggcagaggactaccacaaatgcaaagtaaggagcttcctccccgcagttgcaggatagttcagtgctgatgcagatgatgccacggctcttagactctctcaacattcaatttctcatgtgttggctttttcagatcccc

SEQ ID NO: 133202 - DNA, 407 bp, Homo sapiens
ttaaatgagatattcatcaactcagcccttatcgttgagtgccttcagtgtgccagactcttttttggccactggagatagacagatttcttaccctcatttaatttattcacaagataaagatacacaaacaagcaattacattaggagaaaaccattacacaggaagtgcagtagagcataagagtctgagatggggaaagctatagagagggtgggggaggtgtctgagagttgaaggatgagaaagaatttgccaggggacgagctgggatagagaagtccacaacgaggcaayaggcactgagatgtgtgtgaatgcacttagcataatgcctggtgcacagcagatcatcaatacctcctgttgtcctcactcttatcctcttgtgttatgaaaaaaactc

SEQ ID NO: 133203 - DNA, 509 bp, Homo sapiens
gaattctttccaaaactgcgctgtgcaggccagcaagggcaggggccaatttcaagccttagttgagaagagggctcagtggagtctgactaaagtttggtttaaggagagtcttcatcargctgtcctcacagagcagctcctagagcagagagccatgtgggaaagggtatagagggaatctaggggccaaccaggagctaccttgggagctatacaagtgaaatatttttcagtaaagaatgctgactcccttataaacagggtaaagtgaaatttgaccaaaatcagtttctttgaaagccctgatggaacataacacattacaaggatatgtctgccaagtgcctgagtaaaagtccttagagttgtacgtgaaaatgtacgtgtttaattatgatactgtgaaccttggatttctgagtagatccagaatgactttcaaggttggtatgctcatttttatgaaatgcatctcaaaaagctttacagttacaattgtgcttggg

SEQ ID NO: 133204 - DNA, 273 bp, Homo sapiens
gttgtactaacttaacgcttrtgtctgaatgaagttggccaaatgcttacatatgtttcctggtggtgattctttcagtattctcagttcacatgccactgggtcatcagaagacaagtatctggatttcagagccaacagtttgcttttatttaagctgcaagaccctccattgccataagatctgccactgccataataacaaaacctcagctggaacttctgctgcagccattgaggtctgtacataggcctcctgctctcgcttctggt

SEQ ID NO: 133205 - DNA, 273 bp, Homo sapiens
gttgtactaacttaacgcttgtgtctgaatgaagttggccaaatgcttacatatgtttcctggtggtgattctttcagtattctcagttcacatgccactgggtcatcagaagacaagtatctggatttcrgagccaacagtttgcttttatttaagctgcaagaccctccattgccataagatctgccactgccataataacaaaacctcagctggaacttctgctgcagccattgaggtctgtacataggcctcctgctctcgcttctggt

SEQ ID NO: 133206 - DNA, 475 bp, Homo sapiens
atctggctttcttttcctgttggaaaagaggctcgtgtgcatgttactctgactcagtagttctcaaactttttgttctcaggacctctttacgctcttcaaaattattgactgggttataactgttgttatttatagtataakaaattaaaataaactagtatatttttaaaatttagaatagcatgattttgtaaatttctttaatatctcgcttaatcgaagatagctggagtgtcagatctgcttttccattcagtctattttaatcagttgttttggctgaattatataaagaaaatttagtctcactcaaatatgtagttggaaaaggaaggagtattttactagctgttttgataattttggttatccttttgtgatactacgccaaatgtgaacagtgatgtaacagcatgcattaatcatttcagaactgctgattactgggttatacagctcttctaacgttgac

SEQ ID NO: 133207 - DNA, 522 bp, Homo sapiens
ttaaaacattttgagatagtactttccaacacaaagaacctaagagtgaagcagcacacagcatttgcaaaggatcaataagatacagccccagcgaggcgctgtggctctcacctgtaatcccagcactttgggaggccgaggtgggcggatcatgaggtcaagtgatcgagaccatccttgccaatatggtgaaaccctgcctctactaaaaatacaaaaattagccgggcatggtggtgggcgcctttagtcccagctactcgggaagctgaggcaggagaattgcttggacctgggaggyggaggttgcagtaagccgagatcgtgccactgcactctagcctggcaaaagagcgagactccgtcttaaaaaaaaaaaaaaaaaaaagatacagccccaaatttggctcacaatttatctcagtgtttataaaatctagatttttttacctgatctcttaaatgactgaagattaattaactttgataatttgatacaatatggaaactacctacagg

SEQ ID NO: 133208 - DNA, 573 bp, Homo sapiens
gccccaacctcagtgtcacctttagtttttccctttcttgtctttccccctagcccctaactgcccaatccartgagtccttttaactctactcccaaaatgtctgtaagtattcattcatatccccctccctcattttatctccactctcattgccttttttctgggtcttacattctttcttttttaaaaaactattttaattttaattttttattgagacagggtctcactttgttacccaggctggtctccaactcctgccttcaggcattcctcccatgttggcctctgaaagtgctgggattacaggtatgggccattgctcctggccctgggtcttacattctgaagcatctgtcactatgtaattagaatattttctaaaatcttttgaaaggcttggactattgtaatcatttcctaagtttacataaagtctgtagtcactcttcctctctccactctacgtgccactgctggggtaatttggcagagatttagcttagatagtgtcacatgctcaaaaattttatctttgttgtctattagtaagttctagtttattgaact

SEQ ID NO: 133209 - DNA, 422 bp, Homo sapiens
aggaaacataataagaataagacttcttcttcttattattttttgatacagggtctcactctgttgtccaggctggagtagagttgcatgatccaggcaaattgcagcctcaacctcctyggcttaagcgatcctctcacctcagcttccaaagtagctgggactatagatgtgtgtgctaccatgcctggctaaattttaatttttttttctttttttttttagaaatagtggttcgatatgttgctgaggctggtctcaagctcctgggttcaagtgattatcttgtctcaggctcccaatatactaggattacaagtgtgagccaccacacctggtctctcagagtaaatctttataaatttggattgagtgatggtttccgaagtcaataccagaaacaaaatcaacaaaagaaaaaa

SEQ ID NO: 133210 - DNA, 591 bp, Homo sapiens
gatatccacatgcaaaagaatcaatctctacctcacaccatatacaaaaatttactcaaaatggataattgaacttaactgtaagaactaaaattaaagattacttaggaggaaacataataagaataagacttcttcttcttattattttttgatacagggtctcactctgttgtccaggctggagtagagttgcatgatccaggcaaattgcagcctcaacctcctcggcttaagcgatcctctcacctcagcttccaaagtagctgggactatagatgtgtgtgctaccatgcctggctaaattttaatttttttttctttttttttttagaaatagtggttcgatatgttgctgaggctggtctcaagctcctgggttcaagtgattatcttgtctcagsctcccaatatactaggattacaagtgtgagccaccacacctggtctctcagagtaaatctttataaatttggattgagtgatggtttccgaagtcaataccagaaacaaaatcaacaaaagaaaaaaattgataaattgaactatatagaaatttaaaacttctgtgcttcaaagaacaccataaag

SEQ ID NO: 133211 - DNA, 450 bp, Homo sapiens
tatttcttggtctttcattttctcttgtagtctatgcatttatttaattcaatagatgttattaaacacatcccatgtgccaaacatttataatgacacacattaatatgatgtatgctagacagaggagacagtggctaattctcatgttggaagtcagggagttaagcaacagagagagagagagatgttacaaaaagcatttatcactgaatwaacccatgaacaaaattgaaaagaatgagaaaatatggtgtgtttagggcaaaatgcattgtcttttgtagcctgagcctaatgagagtatgcatgtgtaggagggtggtgagtaagagacgtaattattttaaaaattcaaaattcaaaacaacatgtattaaaaagttggcaataaatgaagtgcttcatactatagcactgaacttatgagaaagcctgctcttcttcagc

SEQ ID NO: 133212 - DNA, 450 bp, Homo sapiens
tatttcttggtctttcattttctcttgtagtctatgcatttatttaattcaatagatgttattaaacacatcccatgtgccaaacatttataatgacacacattaatatgatgtatgctagacagaggagacagtggctaattctcatgttggaagtcagggagttaagcaacagagagagagagagatgttacaaaaagcatttatcactgaattaacccatgaacaaaattgaaaagaatgagaaaatatggtgtgtttagggcaaaatgcattgtcttttgtagcctgagcctaatgagagtatgcatrtgtaggagggtggtgagtaagagacgtaattattttaaaaattcaaaattcaaaacaacatgtattaaaaagttggcaataaatgaagtgcttcatactatagcactgaacttatgagaaagcctgctcttcttcagc

SEQ ID NO: 133213 - DNA, 488 bp, Homo sapiens
aggcagtactttatcttttttgttctctgctggatctttaatgccaggaacggtgcctggcatatagcaatcaggctctgaataaatatttattgaatgaatggactggacctggtgacagcgtgggtttgagatgaaacagatggcagtggcagttctggtgctgacagagaacagctatctgctccagcagcaacacctcccttccaggagcctcagtttctacatctatataaggagggttgtaattacccagacctgccagacatcttgtgamgatgaaatggaaggattcatgtgaaagtgtctattaagctacaatattccatgtgtgagtcatggtttgtttagcctgattttagtgttttgattgcattttttctttctgtcggggacttaaaatccttttgaaagtacgtagaatataagtgattcagatagaaaaagaaagtagatgagaatatttcacaaataaggatgtagcatta

SEQ ID NO: 133214 - DNA, 527 bp, Homo sapiens
cacacacacacacacacacacacacacacactctcagagtgggcaagggtcccatgagatgacactcatacattcctggtgaaaatagagattcttacaaaaaataatttagcatcaagcatcaagagccttaaaatatcgatttttaaaaattgactaatctaactatttggaatctatccaaaraatgaattgcaggtagagttgcatgtataagatagttcaacatgatgttgttgcttatagtagagaactgttggtaataaccaaatccctgacaacagaggaaaattctaaaaacatttccataaagaataatgcattgaaattcatcaatcacagatattatgctctaagaggatttaatgtcaggggaaaatgctgtcaatgtaatttcaaaggaaaaaaagaaaaaagctatatagatggcattttctcagttttcaaataaaagcacatttatatacaataactatttcaagtgtacaaacacagaagtaaaattaccggtcccccataacatatga

SEQ ID NO: 133215 - DNA, 527 bp, Homo sapiens
tttaaagggaccccataacaccattgggtgttgtttggtttatggcgcctctgcgaaatcacagacacataattcattccagcagcaacttctttctggttgagtcagcattgcgctcagcacccagacatctataccatagccacccccgacaccaccaccagatttccaagaccccggacccagcacccygaagggtctctgattctgcactggagcagtttcttctcccaggccccactcctgaatgaagcccagctcagacggctttaggacagcctagacttagtcaacttaaattcaggttgaaatagacaaaaagtagaaataaaaataagattttattttaaaaatgtgctggggggtgtggatagtgatggggaggatctactccaagaaggtgaattgccttgagggattgcaatccctgggagagggcacttggagaactgcagccccggtgtcaggataacttgggtggggtccagtctccccacctcctttgctttgtgactccacatttgtca

SEQ ID NO: 133216 - DNA, 527 bp, Homo sapiens
actcaatttaactccacacatggacatgcacatacacacmattttaaaactgatttcatatttaaaagttgtgttggggaaataaatatttttattattattttatgaaaatgtcaacatttattttagatatagggggtacaggtgcggatgtgttgcattggaatattgcttgatgctgaggtttggagtatggatcccatcaccctggtagtgagcatagtagattttattttagagatataaaacaatgtcctagaaatctgcatgtttcaaagacctcctttaatcacatacctattgttttcagaggaaaaaaggaggtgaaaagaagaaaagtatcctgtctatgtcaaggagaaaactagcgactatttccagaaatactcaattactctttttgctaaatgaaacaattttacaaggattatactattgctctggtgtctaatgtgggtgtgctcccattagtccactttgcaactgtcccagaagtacagtccaattagtcagtatagtgttgactg

SEQ ID NO: 133217 - DNA, 517 bp, Homo sapiens
tgttgcattggaatattgcttgatgctgaggtttggagtatggatcccatcaccctggtagtgagcatagtagattttattttagagatataaaacaatgtcctagaaatctgcatgtttcaaagacctcctttaatcacatacctattgttttcagaggaaaaaaggaggtgaaaagaagaaaagtatcctgtctatgtcaaggagaaaactagcgactatttccagaaatactcaattactctttttgctaaatgaaacaattttacaargattatactattgctctggtgtctaatgtgggtgtgctcccattagtccactttgcaactgtcccagaagtacagtccaattagtcagtatagtgttgactgagccatttgtgtgttgattgaaatctcaccattttattgcatgaagatggaaaattgcccgaattggccaaacttgtgctattctcactcaagttttagaagaaaagtctccctttaagaccattatatatgatgagatattg

SEQ ID NO: 133218 - DNA, 644 bp, Homo sapiens
ctgtcctcaggtctatagatagcatgtgactgagccaaagttccaaacaattttgggcgccaccatacacaatgctgtctctctagggattttgacaagaaatgttgcaccaaaaggttggaagtgaaaagaggaagacttctgcctgcccacgtcatgaaattttcttctctaaatttttgcttttttattattccttgaacaatccttaattcaccctgtctatgcacatagtataatagtttaacttatgctcaacttcttttccttttatttgtcctggtgcacccttagctggtcatccagtgacatcttaccttcattatcactgctgtgtccttaaactttccatccaagcagatggaamtttccatccatgcagatggaacataacaagagacagccaaaatacaaacagaatcacatctcaagaattgcccatgggaagaagatggaagtcacatcagatcatcttggacttacatttcattctcctatattttttattcctatggacatagacacacaaatataggttaggaaccccacttaagagaagccttgagtttttatatattttttcacacctctggccaaaccttctcctgatcaccttaccttgtgaatcaaccaggagtctctct

SEQ ID NO: 133219 - DNA, 644 bp, Homo sapiens
ctgtcctcaggtctatagatagcatgtgactgagccaaagttccaaacaattttgggcgccaccatacacaatgctgtctctctagggattttgacaagaaatgttgcaccaaaaggttggaagtgaaaagaggaagacttctgcctgcccacgtcatgaaattttcttctctaaatttttgcttttttattattccttgaacaatccttaattcaccctgtctatgcacatagtataatagtttaacttatgctcaacttcttttccttttatttgtcctggtgcacccttagctggtcatccagtgacatcttaccttcattatcactgctgtgtccttaaactttccatccaagcagatggaaatttccatccatgcagatggaacataacaagagacagccaaaatacaaacagaatcacatctcaagaattgcccatgggaagaagatggaagtcacatcagatcatcttggacttacatttcattctcctatattttttatkcctatggacatagacacacaaatataggttaggaaccccacttaagagaagccttgagtttttatatattttttcacacctctggccaaaccttctcctgatcaccttaccttgtgaatcaaccaggagtctctct

SEQ ID NO: 133220 - DNA, 608 bp, Homo sapiens
aattttgccatccctatgaacattcagaaagacaatgctaaaattaaattctgaatctcagcccacccagctgtactcatagtgagtcccaaatgactacgtgtcatgcccacccaccaatcactctcttgctacttaccgacatcaccraatcctccagaaccaatgtccactggtctgggtgtttccggtctgagaacctctggtttgcgaatctctggtctgagcaccactggggtaaggttttctagggttggcttcgacaactttgctgcttgcctgttagttcgcagaaacgaagccagcatgtcctggcctgtgtcctctaagcaggagatgaacaaaggaagagcctgactccctcgagtctccagatctatgatcagctgcctggcctgatcccgccgagatccagagcctgcccgctgtttggaaagaaaggcaggatactaattatccacgtacttttatatggctctcaccttgtctccccatttcccagctactgtaagtctaaacaatcaggcacgtgggcagcaatggagctgcaggtgcactgtgtgccatttaccagcctttgctgatctgttcattattttgcagggcaa

SEQ ID NO: 133221 - DNA, 608 bp, Homo sapiens
aattttgccatccctatgaacattcagaaagacaatgctaaaattaaattctgaatctcagcccacccagctgtactcatagtgagtcccaaatgactacgtgtcatgcccacccaccaatcactctcttgctacttaccgacatcaccaaatcctccagaaccaatgtccactggtctgggtgtttccggtctgagaacctctggtttgcgaatctctggtctgagcaccactggggtaaggttttctagggttggcttcgacaactttgctgcttgcctgttagttcgcagaaacgaagccagcatgtcctggcctgtgtcctctaagcaggagatgaacaaaggaagagcctgactccctcgagtctccagatctatgatcagctgcctggcctgatcccgccgagatccagagcctgcccgctgtttggaaagaaaggcaggatactaattatccaygtacttttatatggctctcaccttgtctccccatttcccagctactgtaagtctaaacaatcaggcacgtgggcagcaatggagctgcaggtgcactgtgtgccatttaccagcctttgctgatctgttcattattttgcagggcaa

SEQ ID NO: 133222 - DNA, 582 bp, Homo sapiens
agaacatctgtatttaatcctggtttttagttaattgacaagctctaataagagaattaacttctccattctgggctgattttacatcaggtataggaatataccctaggtgaaagtttgtaccagtaatatgaattattaggtaataacctccacctttatgatttaggtgttattcatcaggaaatagtgttaaatcaggagtctcaatgaaagtattacttaagggatatacaaaatatgttgctaatctacataaaacagatgtgaacacactcttagtatccagccatgtttcctgtcaaccacacagtaactttgacttcacttgggacttgttctaattttcaaattagttacttattaatcttaatgcttctagatattatgtgtgactattttarcagagagtgaagaaagacaacctaggctgactacacaatgaggaaaatcacaacctgatgaaacaggaagcctctggaagtgaatggctccaggattgaataatttgacagctcatgtgcccaagaagtttcttttctcaattttccacactgatgcatccagaaagtcagcttcacc

SEQ ID NO: 133223 - DNA, 178 bp, Homo sapiens
tgtcctgcctttctgaactaaatcaatgtacatcttatatacatatattgattaatgtctcatgcctccctaaattgtataaaaccaagctgtgcccacaagcttgggcacamatcatcaggactccctgaggcggtgtcacaggcatgtccttaatcttggaaaatgaacttcctaa

SEQ ID NO: 133224 - DNA, 539 bp, Homo sapiens
ggcttttttttttttttttaacacaaaatcttattaaaaaaaaacatagattgtgcagatgtgaataaaaacagcacaggaccctgtgaatctcctcctccctttcacgggaggttgtggctaacactttctgagcattagtgtgtgccaagcacaactccctacagcaactccatgaggaaggtgctattgtcttccctctacagatgaggaaaccaaggctcagagaggtttaatgccttgcccaaggtcacacaggttgtaaatggcagagccaggattccaccccaggcgtcgggctccgatgggctttggcygtttgctgaactgcttattcacaatctgttgtgtttctctcctggccctcttatatgcatggcagagatacacacgtgcctgcgtggggtttggagttgggtgggttcaggggtgtgctggcagatgtttaacatctgtttctgggagaaaaaagccctaatgcctagcgttttccagcttccatggtgtaaatactcctaccgtggtttatttcaagccac

SEQ ID NO: 133225 - DNA, 273 bp, Homo sapiens
agcagcagggaagagtgggtgtctggccctgtgctcctggagmagcccctggaagcccaaggtctgaagtcagctgaggtgtcaggaactgcagtcttcagggaggaaggaggccaaagccccaagggggagtccctgctctgggcagggtggagaaggtggagtttgtctcatttagcactgacactagcgcctggcacacagtggatactctggatactcagtgtttgtggagtataaatgaatgagtaaattgctaattgaggttatatc

SEQ ID NO: 133226 - DNA, 492 bp, Homo sapiens
tatcagtgttgggttttcattcacagagacatcagtgtgagtgagaaaccaagaagtcaagtgaggagtggagaacatgttcagtctgaaaatcagcatatwctcagaggcacccattgccccatgacacaggtggagaattttggaaaccagtgaagtgtgagttcacaataagtgatgaagttatcatttttccaaactttcattaatatgcaaagtatttctatagatcactcatgcatatacacacaaaatgtgtttttgcatttatggatgtctagagaaaaataagtgagaaaatttttccaggttgcagagatctgtttaagttgcagattccataggagagtgtctttgaacgaatactggtctattgattaaatagttcaaaattctctctgttggagcagccttccaattatgtagatttctttattgcttcttgagttgtgaaacataaacccaaggattgacttactgtaattcaactgg

SEQ ID NO: 133227 - DNA, 414 bp, Homo sapiens
agaagtcaagtgaggagtggagaacatgttcagtctgaaaatcagcatatactcagaggcacccattgccccatgacacaggtggagaattttggaaaccagtgaagtgtgagttcacaataagtgatgaagttatcatttttccaaactttcattaatatgcaaagtatttctatagatcactcatgcatatacacacaaaatgtgtttttgcatttatggatgtctagagaaaaataagtgagaaaatttttccaggttgcagagatctgtttaagttgcagattccataggagagtgtctttgaaygaatactggtctattgattaaatagttcaaaattctctctgttggagcagccttccaattatgtagatttctttattgcttcttgagttgtgaaacataaaccca

SEQ ID NO: 133228 - DNA, 414 bp, Homo sapiens
agaagtcaagtgaggagtggagaacatgttcagtctgaaaatcagcatatactcagaggcacccattgccccatgacacaggtggagaattttggaaaccagtgaagtgtgagttcacaataagtgatgaagttatcatttttccaaactttcattaatatgcaaagtatttctatagatcactcatgcatatacacacaaaatgtgtttttgcatttatggatgtctagagaaaaataagtgagaaaatttttccaggttgcagagatctgtttaagttgcagattccataggagagtgtctttgaacgaatactggtctattrattaaatagttcaaaattctctctgttggagcagccttccaattatgtagatttctttattgcttcttgagttgtgaaacataaaccca

SEQ ID NO: 133229 - DNA, 589 bp, Homo sapiens
tccgatgagtttaaatgagcatgtggcaatttagatgggcctggctgtgtggtatgttatatgtaaatctgaactatgtaaacataaagggcatgtctgaactagtgtgagggtgagagatcttagaggscccacacctcacactcttgtgcttatttgctccaggaacctccaggttcttcgagtgaaaatcgacatagatcctttcctggataaatcatccaaagacctaatctctgagaaatacacacgtacatttctccagatagaccatccaggggaaagacatatctagaaccttatctgtattgggtaaggtagtccatctccattacagaccctcccagcagccttcctttatcatgaaagtggataaaattagccgatactgaaataatcctataatattatagccagaaaagggaaagcatcagtttcatttctggagactctgcatataggtcacagcccagagaaaaaaaggatgattgaattattaagaatcaattgtaagaacatataatacttccaggatgcacactttgttttctcaccagtataatctgggttaaagatgaaagtgtggcag

SEQ ID NO: 133230 - DNA, 589 bp, Homo sapiens
tccgatgagtttaaatgagcatgtggcaatttagatgggcctggctgtgtggtatgttatatgtaaatctgaactatgtaaacataaagggcatgtctgaactagtgtgagggtgagagatcttagagggcccacacctcacactcttgtgcttatttgctccaggaacctccaggttcttcgagtgaaaatcgacatagatcctttcctggataaatcatccaaagacctaatctctgagaaatacacacgtacatttctccagatagaccatccaggggaaagacatatctagaamcttatctgtattgggtaaggtagtccatctccattacagaccctcccagcagccttcctttatcatgaaagtggataaaattagccgatactgaaataatcctataatattatagccagaaaagggaaagcatcagtttcatttctggagactctgcatataggtcacagcccagagaaaaaaaggatgattgaattattaagaatcaattgtaagaacatataatacttccaggatgcacactttgttttctcaccagtataatctgggttaaagatgaaagtgtggcag

SEQ ID NO: 133231 - DNA, 579 bp, Homo sapiens
agatatttttcatacaacatttattctgcaagcaaatttcagggattgtagaatgaatcacattaacaaatctgatacagaacttcctctgaatcaatctttgtaaacatcaatttctgaatcaacgttgtaaatacttcggaacacaagcacaagttcacattttaactctacttttatctctatttaaawaatgccaaaaaatctcattttgtgcatgtaacgttttgaatccccaccatcaatgcatgacatttcttgtttttccacattcatgttaccatttatcatcatgagtattgtgagttttagccatgctgataggtgagtaatggcatctaatatttatttaaatgcacatgtcccaaataaaaaaatttatattaaacaatttttatataatttttgctgagatgcctttcctgatatttggttcatttttatctccattgttttcttttcattagttgtaagtttacttgcatattgattataaaagtcatttaacaaattgaaagaattgatttaacaaatatatgacttggaagtattttctcccagtctgtggttgcctttttc

SEQ ID NO: 133232 - DNA, 579 bp, Homo sapiens
agatatttttcatacaacatttattctgcaagcaaatttcagggattgtagaatgaatcacattaacaaatctgatacagaacttcctctgaatcaatctttgtaaacatcaatttctgaatcaacgttgtaaatacttcggaacacaagcacaagttcacattttaactctacttttatctctatttaaataatgccaaaaaatctcattttgtgcatgtaacgttttgaatycccaccatcaatgcatgacatttcttgtttttccacattcatgttaccatttatcatcatgagtattgtgagttttagccatgctgataggtgagtaatggcatctaatatttatttaaatgcacatgtcccaaataaaaaaatttatattaaacaatttttatataatttttgctgagatgcctttcctgatatttggttcatttttatctccattgttttcttttcattagttgtaagtttacttgcatattgattataaaagtcatttaacaaattgaaagaattgatttaacaaatatatgacttggaagtattttctcccagtctgtggttgcctttttc

SEQ ID NO: 133233 - DNA, 488 bp, Homo sapiens
gatccatgctacattattcattttcttgttcaaatctccacagctttattaggtgctgggagctcatttagtttggatcctgcatccttacagcaaagctgatccttttgtttttgaacacttccctgtttcctgatattaaaatggattctaagcttgtctctttatcacctttttcatacatagaattagccatktatataaagattgcttgtttctgattttaaagaatagtgttaaaataaaatattgtgataatgggtatgtgtgttgctaatgtggtataagtacttctgggacctctcaaccttctgttctagtaaatgagcatgtttatatgaatcatgtttatggacccattgaaactatgtacctaatcttctgtaacttgattacattaaaaatgagcacacactggtctctccacccaactatgctgccacatggacctttataaccttcctttcttgactgtccataaccatcca

SEQ ID NO: 133234 - DNA, 488 bp, Homo sapiens
gatccatgctacattattcattttcttgttcaaatctccacagctttattaggtgctgggagctcatttagtttggatcctgcatccttacagcaaagctgatccttttgtttttgaacacttccctgtttcctgatattaaaatggattctaagcttgtctctttatcacctttttcatacatagaattagccatgtatataaagattgcttgtttctgattttaaagaatagtgttaaaataaaatattgtgataatgggtatgtgtgttgytaatgtggtataagtacttctgggacctctcaaccttctgttctagtaaatgagcatgtttatatgaatcatgtttatggacccattgaaactatgtacctaatcttctgtaacttgattacattaaaaatgagcacacactggtctctccacccaactatgctgccacatggacctttataaccttcctttcttgactgtccataaccatcca

SEQ ID NO: 133235 - DNA, 488 bp, Homo sapiens
gatccatgctacattattcattttcttgttcaaatctccacagctttattaggtgctgggagctcatttagtttggatcctgcatccttacagcaaagctgatccttttgtttttgaacacttccctgtttcctgatattaaaatggattctaagcttgtctctttatcacctttttcatacatagaattagccatgtatataaagattgcttgtttctgattttaaagaatagtgttaaaataaaatattgtgataatgggtatgtgtgttgctaatgtggtataagtacttctgggacctctcaaccttctgttctagtaaatgagcatgtttatatgaatcatgtttatggacccattgaaaytatgtacctaatcttctgtaacttgattacattaaaaatgagcacacactggtctctccacccaactatgctgccacatggacctttataaccttcctttcttgactgtccataaccatcca

SEQ ID NO: 133236 - DNA, 488 bp, Homo sapiens
gatccatgctacattattcattttcttgttcaaatctccacagctttattaggtgctgggagctcatttagtttggatcctgcatccttacagcaaagctgatccttttgtttttgaacacttccctgtttcctgatattaaaatggattctaagcttgtctctttatcacctttttcatacatagaattagccatgtatataaagattgcttgtttctgattttaaagaatagtgttaaaataaaatattgtgataatgggtatgtgtgttgctaatgtggtataagtacttctgggacctctcaaccttctgttctagtaaatgagcatgtttatatgaatcatgtttatggacccattgaaactatgtayctaatcttctgtaacttgattacattaaaaatgagcacacactggtctctccacccaactatgctgccacatggacctttataaccttcctttcttgactgtccataaccatcca

SEQ ID NO: 133237 - DNA, 499 bp, Homo sapiens
tttctcttcctgacaagcaagtaacccagaggattccttttctttcctagattgagaaagatttttcccaaacgtcagctgagttcaggcataccctgtccctgaatgctcatttaccctcaaatgggtacacacacctgtcaacatgtgggctcttctgtcagacaaacacacctttactcatgtggattcttccatcagacaaacacacatgtccccacatggactctttcctcagactaccacatatgtccttacatttactctttcctcagaaaacagacatttcctcacrtttactcttgtctcagacaagcaaacacgtccccatgtgaactcttcactcagataagtacacatatgtccacattgactgtttcctgacacaagtccatatatctgatgttgaaatatgttgtgaaaagtgatctccagataatgataattataaaccccctccctaacaaggtgtagatctgcattattttcattgtaactc

SEQ ID NO: 133238 - DNA, 237 bp, Homo sapiens
cacagaggacagatgagcaatgccgrgcggtgcacccaggaccacaaaaagaaagacatggaaatatgtcccctcccctcctcatgaaaggcagctcatcccctgttccttcaggccccggtgaggagccatcccatgtgtgtgcccttcctcagtgtccacaccgtgggatctgcactgatctgggcttcccttctcatcaccctcagtattagtggcccttgtgaatcaggtcca

SEQ ID NO: 133239 - DNA, 237 bp, Homo sapiens
cacagaggacagatgagcaatgccgggcggygcacccaggaccacaaaaagaaagacatggaaatatgtcccctcccctcctcatgaaaggcagctcatcccctgttccttcaggccccggtgaggagccatcccatgtgtgtgcccttcctcagtgtccacaccgtgggatctgcactgatctgggcttcccttctcatcaccctcagtattagtggcccttgtgaatcaggtcca

SEQ ID NO: 133240 - DNA, 237 bp, Homo sapiens
cacagaggacagatgagcaatgccgggcggtgcacccaggaccacaaaaagaaagacatggaaatatgtcccctcccctcctcatgaaaggcagctcatcccctgttccttcaggccccggtgaggagccatcccatgtgtgtgcccttcctcagtgtccacacygtgggatctgcactgatctgggcttcccttctcatcaccctcagtattagtggcccttgtgaatcaggtcca

SEQ ID NO: 133241 - DNA, 317 bp, Homo sapiens
caacaactcatgaaacatttccaggttagctttttcctatcttcaatactatacaacgagtggcacctgctccaggtactctaataaatggaccctagttctctctgcaggcccttatttctcagatttcagggtttttttctctgtgacatcaactcagatatgttgaagcgttcatttttcgtagttgttcaagtttcttattaatgaggtcagaagaagatcattttctcawtttttttacattcccatgcttagtatttgctttctaaataaaattcagaaacgaagacaaaatatcaaatatccactatttg

SEQ ID NO: 133242 - DNA, 595 bp, Homo sapiens
aggggaagtcagtgagagcccaggcacaaacctccctgaaagggtcccagagaccaccagggggcgccaggacactgtgcacggggctgtctccagggcaggtgcaggtgctgctgagggctggctttctgtcatggcctggggcagcctcatcgtcaaatttccccagggaacttctccagatttacaattctatattaacatttgatgtctctaaatgtaaaacgtttttttttgttcctttgtttttgtaacargaggaaacaccctcacctccacagaagccagggtgtcactttgggggcagaaataatcctttcatggtcaggatgagagtcctgaggaatctcagggaaacctggagagtgttttccaattagactcagagcagagacctccatgggaatctctgattagaacaggccttgagctctgatgggagccaagagagaggctcacccagggtcagggtccttaaaacctgatggttttcacagctgtcccctctcaacttgtaaaactgtgcccatctgactcagactgattcagctgaccctctttctgctgatccattttccatctctgtagacttgat

SEQ ID NO: 133243 - DNA, 545 bp, Homo sapiens
tcagtgagagcccaggcacaaacctccctgaaagggtcccagagaccaccagggggcgccaggacactgtgcacggggctgtctccagggcaggtgcaggtgctgctgagggctggctttctgtcatggcctggggcagcctcatcgtcaaatttccccagggaacttctccagatttacaattctatattaacatttgatgtctctaaatgtaaaacgtttttttttgttcctttgtttttgtaacaagaggaaacaccctcacctccacagaagccagsgtgtcactttgggggcagaaataatcctttcatggtcaggatgagagtcctgaggaatctcagggaaacctggagagtgttttccaattagactcagagcagagacctccatgggaatctctgattagaacaggccttgagctctgatgggagccaagagagaggctcacccagggtcagggtccttaaaacctgatggttttcacagctgtcccctctcaacttgtaaaactgtgcccatctgactcagactgattcagctga

SEQ ID NO: 133244 - DNA, 586 bp, Homo sapiens
gctgtctttgaatcagtcccaactagattatctagaacactcttcgtgacttaggaaaaaataatggcaggctccactaacacctgtattatgccatgggagcaacacctaggctactgtgtgattgaatagatgagactacggtctagtcaaggtgacaggtaaaattgattgttgccattatgatattttattttatatttgkcaatataatcatgctcatattataaatattttttgagacggagtcttgctctgtcgccaggctggagagtgcagtggcacgatctcagctcactgcaacgtcttccacctcccaggttcaagcaattctcctgcctcagcctcccgagaagctgggattacaggtgcgcgtcatcatgcctggctaatttttgtatttttagtatcgacgaggtttcaccatgttggccagtgtggtctcgatttcctgacttcgtgatctgcacacctcggcctcccaaagtgctgggattacaggcatgagccaccacgcccggcctagttttattaatgtctgtccataccagcaactacatacctatggggacattaatttacatct

SEQ ID NO: 133245 - DNA, 586 bp, Homo sapiens
gctgtctttgaatcagtcccaactagattatctagaacactcttcgtgacttaggaaaaaataatggcaggctccactaacacctgtattatgccatgggagcaacacctaggctactgtgtgattgaatagatgagactacggtctagtcaaggtgacaggtaaaattgattgttgccattatgatattttattttatatttggcaatataatcatgctcatattataaatattttttgagacggagtcttgctctgtcgccaggctggagagtgcagtggcacgatctcagctcactgcaacgtcttccacctcccaggttcaagcaattctcctgcctcagcctcccgagaagctgggattacaggtgcgcgycatcatgcctggctaatttttgtatttttagtatcgacgaggtttcaccatgttggccagtgtggtctcgatttcctgacttcgtgatctgcacacctcggcctcccaaagtgctgggattacaggcatgagccaccacgcccggcctagttttattaatgtctgtccataccagcaactacatacctatggggacattaatttacatct

SEQ ID NO: 133246 - DNA, 586 bp, Homo sapiens
gctgtctttgaatcagtcccaactagattatctagaacactcttcgtgacttaggaaaaaataatggcaggctccactaacacctgtattatgccatgggagcaacacctaggctactgtgtgattgaatagatgagactacggtctagtcaaggtgacaggtaaaattgattgttgccattatgatattttattttatatttggcaatataatcatgctcatattataaatattttttgagacggagtcttgctctgtcgccaggctggagagtgcagtggcacgatctcagctcactgcaacgtcttccacctcccaggttcaagcaattctcctgcctcagcctcccgagaagctgggattacaggtgcgcgtcatcatgcctggctaatttttgtatttttagtatcgacgrggtttcaccatgttggccagtgtggtctcgatttcctgacttcgtgatctgcacacctcggcctcccaaagtgctgggattacaggcatgagccaccacgcccggcctagttttattaatgtctgtccataccagcaactacatacctatggggacattaatttacatct

SEQ ID NO: 133247 - DNA, 427 bp, Homo sapiens
atgtctgtccataccagcaactacatacctatggggacattaatttacatctgcagacatatgtgtaaatacacaagcctatacatacatgtgtagtcatttatatttaacattataacaaaataattctaaaatattttctaaagaattaaacttaatgatgagctaaatataaattagagtaatctataattgatttcaacagttctctatagtttacataaatggatgtctatttctaagctttaacatagtgtattcgtcattttaaaatagtcaagaaaaaattacaaatgttcttgtcacawaaaagataaggatttgacgatttgaggtaatatatatgtgaattaactcgattcaattattccatattgcattcacaaaccataacatagctttgtgccccataaatatatacaaccaa

SEQ ID NO: 133248 - DNA, 549 bp, Homo sapiens
ggttctacaaacacacatacatacacaacagcccagcaaagacacatacatatgcccatgcaaaagtgaaygtatatctaaacaccaaaatagcacacctatttgtttcatattttttaattacttaattgaatttaaactgtgtttgcagtttgaggttgtagtagaaaataatgctcttctacgtgtatgtctgcctattccaatactaaaaagacaaatatatttaaatacatgttttgttaaagctgaatgtaaatgctgttcttgccaaatatgtcactcaaatgtgcaatggtattaactttaaatatcagtctgtttttaataaattgaataactaataagacaaacattgtattacattatttgttaaatttagattgtagttttcaaaccaggaaagataaaattgtttcatttgaaaaatttaaaaaaaaacttttttggcatgaatattcaatacaaactctggtatttatttgtcaatattcctttatgatagagaacatccaggataatgaaactgaacacagcccatgattttca

SEQ ID NO: 133249 - DNA, 549 bp, Homo sapiens
ggttctacaaacacacatacatacacaacagcccagcaaagacacatacatatgcccatgcaaaagtgaacgtatatctaaacaccaaaatagcacacctatttgtttcatattttttaattacttaattgaatttaaactgtgtttgcagtttgaggttgtagtagaaaataatgctcttctacgtgtatgtctgcctattccaatactaaaaagacaaatatatttaaatacatgttttgttaaagctgaatgtaaatgctgttcttgccaaatatgtcactcaaatgtgcaatggtattaactttaaatatcagtctgtttttaataaattgaataactaataagacaaacattgtattacattatttgttaaatttagattgtagttttcaaaccaggaaagataaaattgtttcatttgaaaaatttaaaaaaaaacttttttggcatgaatattcaatacaaactctrgtatttatttgtcaatattcctttatgatagagaacatccaggataatgaaactgaacacagcccatgattttca

SEQ ID NO: 133250 - DNA, 613 bp, Homo sapiens
tgaaactgaacacagcccatgattttcagggctcactcacaatggcatcttcctagagggtggtctcagagggtccaagcacatggggatttggacttcatcatcaaaacactagtgagccccagggctgaacacacagagggcagcaggagctgcagagcccactctgtggtacttagggaaatgaggggatggtctgcaggaccctggaaaagggtgagtagggcagagtctgcaggtagatgagcatattctaaggagagccattatcctctaaacttggttggcttcartgattatgaagacaagggaactgattcaccagacttggaggtcagaaagtaaagtgactttctttttccttcatggagactgaggaaggtaaaatactttcaaagaaaaagggaagatggagaaacagtctgaaaaacaggacacctgaagccaaccaaaatggagaacaagagtatttaaagtcgtgtttaatttccaaaaacagcagatgaaagaaaaagaaacaaaatgccatgtatacgctgagttaatgttaaaaaacatgtacaattgtttgactattacagcacaaaaatacaaaactctaatcattgaaaca

SEQ ID NO: 133251 - DNA, 613 bp, Homo sapiens
tgaaactgaacacagcccatgattttcagggctcactcacaatggcatcttcctagagggtggtctcagagggtccaagcacatggggatttggacttcatcatcaaaacactagtgagccccagggctgaacacacagagggcagcaggagctgcagagcccactctgtggtacttagggaaatgaggggatggtctgcaggaccctggaaaagggtgagtagggcagagtctgcaggtagatgagcatattctaaggagagccattatcctctaaacttggttggcttcaatgattatgaagacaagggaactgattcaccagacttggaggtcagaaagtaaagtgactttctttttccttcatggagactgaggaaggtaaaatactttcaaagaaaaagggaagatggagaaacagtctgaaaaacaggacacctgaagccaaccaaaatggagaacaagagyatttaaagtcgtgtttaatttccaaaaacagcagatgaaagaaaaagaaacaaaatgccatgtatacgctgagttaatgttaaaaaacatgtacaattgtttgactattacagcacaaaaatacaaaactctaatcattgaaaca

SEQ ID NO: 133252 - DNA, 618 bp, Homo sapiens
gtagtttcaaattctttatgaactcattgctcccaaaatatttgtcaaggaatttgtgttttgaataatttcgggttaattttggactcaatttattggaattttttgaagtatttatgtattttcaattaatatccataggtcctcatctttacatattgatatctaactcacctggtctgtgcccccaacagcccagaccctgccttgcaaagaggttcctgctgggacttacaaatcatttcccccaagcttctctagcccagcatgaaatggctgtgtcctggtttatcacactccttcagtgacaccatatgctactgacacsatctcttgaaacaactgattagccttactaaacctattgaactctgcaaggagacccagagcaaggattcaatgacacagaaaggagccccttctctgaagctccagattcacttcattagtggaaccaaaatgaagacaaaaacttacaggagatttgggagtgccgtgtttcttcactgggctcttgcagttgaatgttgcatctgagaataccagcaggtgcagatacattcagatgaaagcccactccatatccactattccaataacacacattttcccttcttc

SEQ ID NO: 133253 - DNA, 618 bp, Homo sapiens
gtagtttcaaattctttatgaactcattgctcccaaaatatttgtcaaggaatttgtgttttgaataatttcgggttaattttggactcaatttattggaattttttgaagtatttatgtattttcaattaatatccataggtcctcatctttacatattgatatctaactcacctggtctgtgcccccaacagcccagaccctgccttgcaaagaggttcctgctgggacttacaaatcatttcccccaagcttctctagcccagcatgaaatggctgtgtcctggtttatcacactccttcagtgacaccatatgctactgacacgatctcttgaaacaactgattagccttactaaacctattgaactctgcaaggagacccagagcaaggattcaatgacacagaarggagccccttctctgaagctccagattcacttcattagtggaaccaaaatgaagacaaaaacttacaggagatttgggagtgccgtgtttcttcactgggctcttgcagttgaatgttgcatctgagaataccagcaggtgcagatacattcagatgaaagcccactccatatccactattccaataacacacattttcccttcttc

SEQ ID NO: 133254 - DNA, 326 bp, Homo sapiens
ctgacattattctgatgaatcatacctcaataataaaactgtattgaatggtgtacctgttcaagaggctgcttgagtaaatagtttctacctcccctacttaggagtcctgccacaacccaacatgctctaaaacctgggggccactaagaacaaagacagaagtttgaatattatgaagttattatgaagtttttgagagatccacaatcactgatggggtgattggtgagggttttctctaagggcctaggcttggaagagtatggctstttgttatgatgaacaaagagctgttttttttgatgagtagatggcagcaaaga

SEQ ID NO: 133255 - DNA, 315 bp, Homo sapiens
tcatgttctcacatgttgtgygactttgggttaaaacacacctgaaacatttaatggctgttgtccttgatcatttgatcatcatctgcattttagttgatgtgatttttttaaacctcagtttgaaggaaagaaaaaaaaaatctatagactctatctaggccagaattacttctctctctttcccttggtagctgcgaatgtagccccaaatatgataggaatcaataaacactgcagctgttacaacactttcttggtcagctgttccaacagtatgagaaccacggcagcacaattattttatgggactaa

SEQ ID NO: 133256 - DNA, 539 bp, Homo sapiens
ctcttgttcccgtgatcacatctcctgtcccttaactatatctacatcccctcgtgtcagaacacattgtgcagtgtctcattctaggaataagatattcagtaacttggacagtgactctagtagcttctctatgattaagaaaaatacatgtgaagataagagttaattcttctaagtataaatgactacctatcaggtttgggctttgactaaattttttaaattgtctccttatgactggtgggtatccttacagggtgtaatgattttgttagacaaatgtgatatctatcactatcagctcaggcactcggtgagaggtgctggtcagtctggttggcggtatctgtgctcagcctttattgtacgttagggaatgtgctgatataaagagagaggatgctatcacttgtgtggcaataatgattaaaytgcagaaaatcatcgtattatgaggtctccataccctcctatgcagcagaagagatttcccttgctttcagctgctggtttccttacattaaaatttattgcat

SEQ ID NO: 133257 - DNA, 224 bp, Homo sapiens
cctgctccctcacattgggtcactcaggcacattaacktgcgcttctgtctgttcccttgtagcttcccaggcccccaggacagggcacggaacatggtctctagcttctgcctctgctggatctcccaagtaatcttaccggaatcactgttcttagctattcatttccagaaaacaggaaagaacctacgaggcaaaggcatctcctacagatacagggtgg

SEQ ID NO: 133258 - DNA, 224 bp, Homo sapiens
cctgctccctcacattgggtcactcaggcacattaacgtgcgcttctgtctgttcccttgtagcttcccaggcccccaggacagggcacrgaacatggtctctagcttctgcctctgctggatctcccaagtaatcttaccggaatcactgttcttagctattcatttccagaaaacaggaaagaacctacgaggcaaaggcatctcctacagatacagggtgg

SEQ ID NO: 133259 - DNA, 224 bp, Homo sapiens
cctgctccctcacattgggtcactcaggcacattaacgtgcgcttctgtctgttcccttgtagcttcccaggcccccaggacagggcacggaacatggtctytagcttctgcctctgctggatctcccaagtaatcttaccggaatcactgttcttagctattcatttccagaaaacaggaaagaacctacgaggcaaaggcatctcctacagatacagggtgg

SEQ ID NO: 133260 - DNA, 224 bp, Homo sapiens
cctgctccctcacattgggtcactcaggcacattaacgtgcgcttctgtctgttcccttgtagcttcccaggcccccaggacagggcacggaacatggtctctagcttctgcctctgctggatctcccaagtaatcttaccsgaatcactgttcttagctattcatttccagaaaacaggaaagaacctacgaggcaaaggcatctcctacagatacagggtgg

SEQ ID NO: 133261 - DNA, 405 bp, Homo sapiens
ttgggtcactcaggcacattaacgtgcgcttctgtctgttcccttgtagcttcccaggcccccaggacagggcacggaacatggtctctagcttctgcctctgctggatctcccaagtaatcttaccggaatcactgttcttagctattcatttccagaaaacaggaaagaacctacgaggcaaaggcatctcctacagatacagggtggtcaccaatagaatggcctggggtccaaaaaaaggccagtgaatgaaacttaacagaatccagatgtggccttggcagacacayggcagccccaaatgcctcaatctgactgggcttccttgatagaatgttgttggacactgagcagggctgtcgtgcttttataaagggttgagtaaaccagagaaggcaggag

SEQ ID NO: 133262 - DNA, 405 bp, Homo sapiens
ttgggtcactcaggcacattaacgtgcgcttctgtctgttcccttgtagcttcccaggcccccaggacagggcacggaacatggtctctagcttctgcctctgctggatctcccaagtaatcttaccggaatcactgttcttagctattcatttccagaaaacaggaaagaacctacgaggcaaaggcatctcctacagatacagggtggtcaccaatagaatggcctggggtccaaaaaaaggccagtgaatgaaacttaacagaatccagatgtggccttggcagacacatggcagccccaaatgcctcaatctgactgggcttccttgatagaatgttgttggacactgagcrgggctgtcgtgcttttataaagggttgagtaaaccagagaaggcaggag

SEQ ID NO: 133263 - DNA, 582 bp, Homo sapiens
aaatgtataaaagcaagctgtatttctatcaccttgggcacatgtctcaggacttcctgaggcttgtcatgggtgggttcttaactttggcaaaataaatgtattagtctgttctcctgctactaataaaaacataaccaagcctgggtaatttgtaaaggaatgaggtttaatggacttatagttccacatggctggggatgctkcacaatcatgtcaggaaagcaagggacatcttacatggtggcagacaagagagagtttgtgcaggggaactccccttgataaaactatcagatctaatgggacttattcactatcatgagaacagcatgggaaagtgctgacttactgcaggagaactacgtaattttatatttccctatgtgcttctttttcattacacatgtaaattttcttaccatccaaatttcccctctacccagcttttcctctgtgtatattgaaagccctaaaaatcgtctttaaggaatggcactaaccacacacagtttctgtggttacttttatttttcttccaggctgtcctaactttgggaaaattaattttaatttgattga

SEQ ID NO: 133264 - DNA, 582 bp, Homo sapiens
gctccacttccaaacactttgtagacagaggtcctttcactgaagaacaagcacccacaggacatgctcctcacagtgaacccacatttgattagcatggagacaattgggatcatttctgggaccattactgtctatgacactgagcagatgcctttgcctcatcctggtttcatcaggcactagcacagcccactgggggctctgatgaagtgaccgctggatgtcccatgtgagtatccagcaggccccatggacaagctctgagatcttctgggtgctactgagacagtgtcttcarcatctgcctgagatcctaagatcttcaatagaagactcttggtttactgatttggcttgtgatgtgtgattggtgctgattttctcatagactgacaatggcaatgaggtgttggaataataatttggagttcttcatgaactcccagctctcaaaataatttccaaggaattggtgttttgagtaagtttgggttttatttctcattctatttaaaataattttgtgacatatttatatcaggaaacacaagacactccaatgagaaagctgtttttatg

SEQ ID NO: 133265 - DNA, 599 bp, Homo sapiens
tcctcaaccatgcgcaccagcatcagagtcgtgaggaagctcaggggtgcccggtgagtcttctccagtcagactcaggacaggaacttcaatgggattccctgactagaatggcttttagggattttgattacagccaagagagaggctggaccaggttcagtgtcatgtaggacctcacaggttttatgtatgacatttctcctgaaaatattcaaatgagtatcagcactgatctggtkctttctgactttcatttttagtggttcttgcttttccatttgcttttcctgctttctggaaaaaatgatgttgtccctgtggtctaaatcctggggctcaagccctttccctggagcttaggtggggctcaggctgtgactcctgcagccattgggagaggctgctgagactttcttctctctcattattaagcacactccactctgttttctggagacgcatctgggaatgcatgtggccattaggaatgagggcataagcttctttggtcaaagtggggtgaggatgtggaattgatcctgtgctgtgtaaactgtcacagagtcaccttctttaccggtagtgttagaagagcc

SEQ ID NO: 133266 - DNA, 599 bp, Homo sapiens
tcctcaaccatgcgcaccagcatcagagtcgtgaggaagctcaggggtgcccggtgagtcttctccagtcagactcaggacaggaacttcaatgggattccctgactagaatggcttttagggattttgattacagccaagagagaggctggaccaggttcagtgtcatgtaggacctcacaggttttatgtatgacatttctcctgaaaatattcaaatgagtatcagcactgatctggttctttctgactttcatttttagtggttctygcttttccatttgcttttcctgctttctggaaaaaatgatgttgtccctgtggtctaaatcctggggctcaagccctttccctggagcttaggtggggctcaggctgtgactcctgcagccattgggagaggctgctgagactttcttctctctcattattaagcacactccactctgttttctggagacgcatctgggaatgcatgtggccattaggaatgagggcataagcttctttggtcaaagtggggtgaggatgtggaattgatcctgtgctgtgtaaactgtcacagagtcaccttctttaccggtagtgttagaagagcc

SEQ ID NO: 133267 - DNA, 599 bp, Homo sapiens
tcctcaaccatgcgcaccagcatcagagtcgtgaggaagctcaggggtgcccggtgagtcttctccagtcagactcaggacaggaacttcaatgggattccctgactagaatggcttttagggattttgattacagccaagagagaggctggaccaggttcagtgtcatgtaggacctcacaggttttatgtatgacatttctcctgaaaatattcaaatgagtatcagcactgatctggttctttctgactttcatttttagtggttcttgcttttccatttgcttttcctgctttctggaaaaaakgatgttgtccctgtggtctaaatcctggggctcaagccctttccctggagcttaggtggggctcaggctgtgactcctgcagccattgggagaggctgctgagactttcttctctctcattattaagcacactccactctgttttctggagacgcatctgggaatgcatgtggccattaggaatgagggcataagcttctttggtcaaagtggggtgaggatgtggaattgatcctgtgctgtgtaaactgtcacagagtcaccttctttaccggtagtgttagaagagcc

SEQ ID NO: 133268 - DNA, 529 bp, Homo sapiens
acacacacacacacacacacattggtgataagctgtcagactctccccactttttgtcattataaacaatgctacaagaacttccttaatcatataactaatcttcctagtgcttgtgtttctgtaggagaatgtcccaaagagagactgctgaacaacaaagacaagtatgttatttgttttaatagatattccagattacattccaaaaaggttgtagaaatctcatttagtgctcagtctgacatattttragtttttgcagactggcttcagaaatggaaataaattatgaacatagcataataatcattttaggcaattcatctaggctttgaaggagaaaaactcagcaacatatctaagcctgcaaataatcaagttatcctagcaaaatacatcctgagaagcaggagagaatgattttgagatagccaaccccaagggactgtccaaacctgccatatgtcatcactgtgaccttgaacaagttacttaacctgtttacacctgagtttcctcataaata

SEQ ID NO: 133269 - DNA, 554 bp, Homo sapiens
aatatgttaaaaatgagaaacaacatagtgatcattattccaggcacaacgaacaataataactcctaataatgaataataaagattattaataacccctttgcatttgcaggactrtgtaccatttactaacctaatgtcttcagacattacctcatttaattctcagcagggcagtcgcaattatccccccgttactgatcagatatcaagaaccatgttgggggaactcagagtctacgtttgattctctgattctcttcccaggccttttctctactctaatctgatgatagagacaaaggggctaactgtgaaggcaactgcccttcccagcacgtgccaatagaggcaaaagttatgggttgctcatctatcccccccgaccctaccgtctgcagtgtgaccttgggcaagtcacttgcactctgtggatgatctcaaatgcctcttccagctctaaatatctttgatttatgctgaatgtcttgcggaggtaattgaattttcagggtggtgtgtcataactcattcctaaaagtttgaaacagaag

SEQ ID NO: 133270 - DNA, 554 bp, Homo sapiens
aatatgttaaaaatgagaaacaacatagtgatcattattccaggcacaacgaacaataataactcctaataatgaataataaagattattaataacccctttgcatttgcaggactatgtaccatttactaacctaatgtcttcagacattacytcatttaattctcagcagggcagtcgcaattatccccccgttactgatcagatatcaagaaccatgttgggggaactcagagtctacgtttgattctctgattctcttcccaggccttttctctactctaatctgatgatagagacaaaggggctaactgtgaaggcaactgcccttcccagcacgtgccaatagaggcaaaagttatgggttgctcatctatcccccccgaccctaccgtctgcagtgtgaccttgggcaagtcacttgcactctgtggatgatctcaaatgcctcttccagctctaaatatctttgatttatgctgaatgtcttgcggaggtaattgaattttcagggtggtgtgtcataactcattcctaaaagtttgaaacagaag

SEQ ID NO: 133271 - DNA, 575 bp, Homo sapiens
aggactgcatgtaccatttttaaaaatcagagacccagcatgggaaatctccaagagctatttctagtgtgtgactgcccaatattctaaactaagaacttgaggaagccattcccaatgatcaaattggtggctcccatctgcctagtttttgcttcctaaaaataatttcccagaagcctcagagctgtggttgagaaggaggcaamataatcagtcatcagggagattcctggtcaaagaaattctttcttcaccaagctaagggtgccagccccctacagaagcggggcccaccagcatcctaggacccagaaatgtggatagcatgaagatggttcaagctcccagagcccttttcccatgtaaactggcactccattgagatatcactttatgcctattaaaatagctattatcaaaaagacaaaagacaataagcactggcaggagattgggaaaaaggaaccactgtacattgttggtggaaatgtagaatggtacagccattatggagaacaccactgagttttctcaaaaaattaaaaacagcactaccgtatgacccagcaatc

SEQ ID NO: 133272 - DNA, 576 bp, Homo sapiens
cacaggcttgccttagctcaataggataagtggtttacattagctgatcacccatgagtgattacatggttttaatgcaagttctcataatgctgggagaccttgatagctagagtcgacttacccagatatccatgcctaaggaacgctgttttgccacttgtgcgtttgctaactagcaccactgcctcttagtgacctgttcctgaattgcagtcataatatgaatcagaacmatggcagcctctccaacaatgcatcttagtgttggctgcatattagaatcacctggggatccaaaaaagtactgatgcctggagcccacctccagatattaggatttaagtggtctgaatgcattctgtgcattgggatttttaaaagcttccccagtgattctaaaatacagccatgttcaagaatctagagcagaagtcagcaaactttttctgcaaagggccagatagtaaatattttgggctctacaagccatatggtatctgtcacagctacaatggcatatggtatctgccattgtagggtgaaaccagctgtagataatatataaattaatgg

SEQ ID NO: 133273 - DNA, 577 bp, Homo sapiens
gtgcagcttttaccacttccttatgacaggcctgccrtctgcggggccttcctcttcaaaggataaaacaattcaaaaacaggagacttgcaggggagagcaatgaatctccagggccctgctaattaaaaagcccgcattacattacttcctcaaggactcatcttctaatttttaggattatggtacattgattaatttatacaagtttttaatccctctgtgcttaatgaagtccaggaacattggaacaggagcataaatgagcttcatattattttattagagagaattatggcccaacctgtcgtgaagaagtttgtgagggtggggaggcagccctcaagctattaacccattgctttccaaatgccagcagggacattcttttggggcagacacagagggaactcatctttctaagccactcttctgtagttgctggttgcctggaaggaaagtgtcgtctttcttatgggatgcagtgcccgtccccaccctggcacagccaccctcctgtacctgctgccccacctaccccactcccagtgcccatttccaccaggctgcccccaca

SEQ ID NO: 133274 - DNA, 577 bp, Homo sapiens
gtgcagcttttaccacttccttatgacaggcctgccatctgcggggccttcctcttcaaaggataaaacaattcaaaaacaggagacttgcaggggagagcaatgaatctccagggccctgctaattaaaaagcccgyattacattacttcctcaaggactcatcttctaatttttaggattatggtacattgattaatttatacaagtttttaatccctctgtgcttaatgaagtccaggaacattggaacaggagcataaatgagcttcatattattttattagagagaattatggcccaacctgtcgtgaagaagtttgtgagggtggggaggcagccctcaagctattaacccattgctttccaaatgccagcagggacattcttttggggcagacacagagggaactcatctttctaagccactcttctgtagttgctggttgcctggaaggaaagtgtcgtctttcttatgggatgcagtgcccgtccccaccctggcacagccaccctcctgtacctgctgccccacctaccccactcccagtgcccatttccaccaggctgcccccaca

SEQ ID NO: 133275 - DNA, 577 bp, Homo sapiens
gtgcagcttttaccacttccttatgacaggcctgccatctgcggggccttcctcttcaaaggataaaacaattcaaaaacaggagacttgcaggggagagcaatgaatctccagggccctgctaattaaaaagcccgcattacattacttcctcaaggactcatcttctaatttttaggattatggtacattgattaatttatacaagtttttaatccctctgtgcttaatgaagtccaggaacattggaacaggagcataawtgagcttcatattattttattagagagaattatggcccaacctgtcgtgaagaagtttgtgagggtggggaggcagccctcaagctattaacccattgctttccaaatgccagcagggacattcttttggggcagacacagagggaactcatctttctaagccactcttctgtagttgctggttgcctggaaggaaagtgtcgtctttcttatgggatgcagtgcccgtccccaccctggcacagccaccctcctgtacctgctgccccacctaccccactcccagtgcccatttccaccaggctgcccccaca

SEQ ID NO: 133276 - DNA, 403 bp, Homo sapiens
actttgaattctgcagaggaattcacatgccacatgtggcatgtgagtggagaggaagggacagataactggccctgggggagttaggagggcctctgggaggagctgaccctgaagckgcaccttaaaggaagagatttccaagtagagatgtggggtaggggagaggatgcctggcagagggcttagcatgtgcacagaggacagactggatgagtcctgactgcttttctgccgtagtcaccagggctgactgtgatgacagacttggagcctccctgccagcctccttttcctcctctgaggatttccctgtaatggagcctctgtaacctgccctctgcagcgggtcccttgcctttcaggcctgatgaatcgtccatctccctcatctcatgtatag

SEQ ID NO: 133277 - DNA, 403 bp, Homo sapiens
actttgaattctgcagaggaattcacatgccacatgtggcatgtgagtggagaggaagggacagataactggccctgggggagttaggagggcctctgggaggagctgaccctgaagcggcaccttaaaggaagaratttccaagtagagatgtggggtaggggagaggatgcctggcagagggcttagcatgtgcacagaggacagactggatgagtcctgactgcttttctgccgtagtcaccagggctgactgtgatgacagacttggagcctccctgccagcctccttttcctcctctgaggatttccctgtaatggagcctctgtaacctgccctctgcagcgggtcccttgcctttcaggcctgatgaatcgtccatctccctcatctcatgtatag

SEQ ID NO: 133278 - DNA, 403 bp, Homo sapiens
actttgaattctgcagaggaattcacatgccacatgtggcatgtgagtggagaggaagggacagataactggccctgggggagttaggagggcctctgggaggagctgaccctgaagcggcaccttaaaggaagagatttccaagtagagatgtggggtaggggagaggatgcctggcagagggcttagcatgtgcacagaggacagactggatgagtcctgactgcttttctgccgtagtcaccagggctgactgtgatgacagacttggagcctccctgccagcctccttttcctcctctgaggatttccctgtaatggagcctctgtaacctgccctctgcagcgggtcccttgcctttcaggcctgatgaatygtccatctccctcatctcatgtatag

SEQ ID NO: 133279 - DNA, 569 bp, Homo sapiens
ccttgtaaaccattccagagcaaagsaaagagagggaaagagaggtcaggctgaagccaaggcctgcagcattaggggagaagcaaggaaaaattgctgtggagtctttcctaactagaaagctacactttgtcttacgcatgagggagaaagcatgtctgcacttagcaaggccattttccccaaagttgtcagtgatgtcactcatatcacctggtaaaagttttttcttctaacaataattgttattgtacccattatggaaaatttgataatacagatcaataaagaagaaattggattacctatatagtgacattcctgacatgaccacttatcagctgtcctaggcaaacactatgacatcagcaaacctcagggcttttttacttgtttgggtttttttgtttgtttgcatttctgagacagtgccttgccgtgatgcccaggctggagtgcaatggcatgatctcagctcactgcaacctctgcttccagggctggagccatcctcctacctcagccgccctagcacctggaactacaggtgtgcaccaccatgcccaact

SEQ ID NO: 133280 - DNA, 569 bp, Homo sapiens
ccttgtaaaccattccagagcaaaggaaagagagggaaagagaggtcaggctgaagccaaggcctgcagcattaggggagaagcaaggaaaaattgctgtggagtctttcctaactagaaagctacactttgtcttacgcatgagggagaaagcatgtctgcacttagcaaggccattttccccaaagttgtcagtgatgtcactcatatcacctggtaaaagttttttcttctaacaataattgttattgtacccattatggaaaatttgataatacagatcaataaagaagaaattggattacctatatagtgacattcctgacatgaccacttatcagctgtcctaggcaaacactatgacatcagcaaacctcagggcttttttacttgtttgggtttttttgtttgtttrcatttctgagacagtgccttgccgtgatgcccaggctggagtgcaatggcatgatctcagctcactgcaacctctgcttccagggctggagccatcctcctacctcagccgccctagcacctggaactacaggtgtgcaccaccatgcccaact

SEQ ID NO: 133281 - DNA, 494 bp, Homo sapiens
gcggcgcccagcccgcagccccgatccggacaccccactgcatccctcccttcccggtcccttccycgcacgggcgcccgagagacggacaaagagttggggccaagtttgagcgccgggcacggccaggctcagggaaggaaggtccccggaagacacctgggtaccagagttggtgcgaggaggaaaagctgggaggcgaattcacaatcctgggggtggagggcaggcaggggaggggaatcaggccaatcccagccgagtgagcccccagcgagctggggctccggatgggaggcctgtctcgcgctccaaagaaaagcaaaccgccctcccaggtccgcccggattgccgaagcccctctggaaaaactccttcccctcttacaccaaactttgcgccgggcctcgttccctcccgggtaggcagcggcgcaggaagggttaagccagcccgtcccagctgacagtcagctgattgggccctgattgac

SEQ ID NO: 133282 - DNA, 494 bp, Homo sapiens
gcggcgcccagcccgcagccccgatccggacaccccactgcatccctcccttcccggtcccttcctcgcacgggcgcccgagagacggacaaagagttggggccaagtttgagcgccgggcacggccaggctcagggaaggaaggtccccggmagacacctgggtaccagagttggtgcgaggaggaaaagctgggaggcgaattcacaatcctgggggtggagggcaggcaggggaggggaatcaggccaatcccagccgagtgagcccccagcgagctggggctccggatgggaggcctgtctcgcgctccaaagaaaagcaaaccgccctcccaggtccgcccggattgccgaagcccctctggaaaaactccttcccctcttacaccaaactttgcgccgggcctcgttccctcccgggtaggcagcggcgcaggaagggttaagccagcccgtcccagctgacagtcagctgattgggccctgattgac

SEQ ID NO: 133283 - DNA, 412 bp, Homo sapiens
agccaaacacgatgacttttgttttgttttctgccgttcttaaaagaaaaaaagataatattgcaactctgactgaaagacttatttttaagaaaacaggttgtgtttggtgctgctaagttctggccagtttatcatctggccttcctgcctattttttacaaaacacgaagacagtgtgtaacctcgacattttgaccttcctttatgtgctagtttagacaggctcctgaatccacayttaattttgcttaacaaaagtcttaatagtaaacctcccctcatgagcttgaagtcaagtgttcttgacttcagatatttctttcctttttttttttttttcctcatcacaactaagagatacacaaactctgaagaagcagaaatggagagaatgcttttaacaaaaaag

SEQ ID NO: 133284 - DNA, 557 bp, Homo sapiens
gggccactcagctgcccaggtctgagggatcccagctgttctccctccaagcagcgtctggagactcatcagaccttcgaagccccctggcatcccattctttcccccgaggtactgtctctgcatcttcgatgtttttctaatccagcggaaccacagaatcagaacttccagaacttctgctttcagcctctcctcatcttatttgtcagtgataaagttgttcattgatgtgtcctaggcattctagtcagcatgtgcagtttgggggaaccgtgttatttagactgttccatctgtttgctctgatctttgatcacttggtagcatcctgacaagaccctagtctaagggcaacaaaggctatggtcatgaaatagcacatgacctgtgctacaaaccatccctgcagatctgtggccmcataatagacccagttctcaaatcaggctgatagggttagtgttggagtgttttggtcctgaccctggaagaaaaatacagggtgcaacttggtctctgcctgagagtgggaggtttgacagaggcgtggtgaa

SEQ ID NO: 133285 - DNA, 334 bp, Homo sapiens
ttttgtcttcccaaagaaagccactggactcttgaatttaaccctagctgggtagtaaggcttagaaaggcatggagtatctgcatcactcaacggtgtatcctcagggcctgggactgagttccaactatgaatgaaaatgcccattctgtgttgcttccaggggcacagctatcctcatactcccctctctttgtgttrtggagctgattcccgaaaagtctgatgccaatcttcccttctctcttaagtgagaaaataaacaataatataaatcagtgccaatattgctttttaattttagctccaggaagtagaggactgaactatgatc

SEQ ID NO: 133286 - DNA, 416 bp, Homo sapiens
agtggctacggatgatgctgttggacatgggagaatggcttcctgtttgttctcaaccctcctgccttggttsttctcaaaccagagtgggggccatgtctctactccacactccatccaagaaattggagaaccatgcactactggggtcagtttgccagacttagcaaataaagtcacaggatgcccagttcaatttgaaatttagataaatgacaaatatattttagtataagtcaatcccgtgcaatataggaacctactcatgctaacaattctcattggttatctgaaattcaaactggactgggtactccctattgtttctggcaaccctatgctggggcatgttcctaagaggagttcccacggtccccagaccatccaaaccccgctttggaccactaagcacagtt

SEQ ID NO: 133287 - DNA, 439 bp, Homo sapiens
tgcataaaatatttgtctcccagtggctacggatgatgctgttggacatgggagaatggcttcctgtttgttctcaaccctcctgccttggttcttctcaaaccagagtgggggccatgtctctactccacactccatccaagaaattggagaaccatgcactactggggtcagtttgccagacttagcaaataaagtcacargatgcccagttcaatttgaaatttagataaatgacaaatatattttagtataagtcaatcccgtgcaatataggaacctactcatgctaacaattctcattggttatctgaaattcaaactggactgggtactccctattgtttctggcaaccctatgctggggcatgttcctaagaggagttcccacggtccccagaccatccaaaccccgctttggaccactaagcacagttaa

SEQ ID NO: 133288 - DNA, 439 bp, Homo sapiens
tgcataaaatatttgtctcccagtggctacggatgatgctgttggacatgggagaatggcttcctgtttgttctcaaccctcctgccttggttcttctcaaaccagagtgggggccatgtctctactccacactccatccaagaaattggagaaccatgcactactggggtcagtttgccagacttagcaaataaagtcacaggatgcccagttcaatttgaaatttagataaatgacaaatatattttagtataagtcaatcccgtgcaatataggaacctactcatgctaacaattctcattggttatctgaaattcaaactggactgggtaytccctattgtttctggcaaccctatgctggggcatgttcctaagaggagttcccacggtccccagaccatccaaaccccgctttggaccactaagcacagttaa

SEQ ID NO: 133289 - DNA, 524 bp, Homo sapiens
cttttcaagcaggggtccccaacccccaggccacagaccagtaccagtctgtggcctcttaggaaccaggtcacacagcagaaagagtgatgagtgcgtgggtgaagcttcgtctgtgtttacagccactccccatcattcacatgactgcctgagtgctgcctcctgctatatcagtggtggcattaagattcttataggagtacaaactctactgtgaactgcgtatgcaagggatctaggttgtgccytccttatgagaatctaatgcctgatgatctgtcacagtctcccatcaaccccagatgggaccatctggtggcaagaaaacaagctttgctctcccactgtttctacattatggtgagttgtataattaattcattatatattataatttaataataataaaatgcacaataatgtaatgtgtttgaatcatctggaaaacatccccaccccactcccagtccatggaaaaattgtcttttatgaaactagtccctggtgttagaaaggatggg

SEQ ID NO: 133290 - DNA, 431 bp, Homo sapiens
gaatcgtactttggaggacargccttggcttcagccagcttttgtggctgtacgaatatagcataggagctttaagagcactgctgaagcctctgttactggtacttggcttttctggccccactgtcatggcttaactctgtgctatctcttatctgaatctctttgtgtttctcccctattcagatcaaccaatcaaggctcccataaagattttggcctcatcttgtttttatcatctttgctgcttgtagtcaacaggaattcagtacctttagctgtactgatgtgtttactctttcctagaaaagcaaggaaatgttttgcttctgtgttgttttttctttgcccccacacctagaatgtcttttttcacagcccacgtttaaagctgatctacctctcataagccacacattctagtttgtaga

SEQ ID NO: 133291 - DNA, 434 bp, Homo sapiens
aggacaggccttggcttcagccagcttttgtggctgtacgaatatagcataggagctttaagagcrctgctgaagcctctgttactggtacttggcttttctggccccactgtcatggcttaactctgtgctatctcttatctgaatctctttgtgtttctcccctattcagatcaaccaatcaaggctcccataaagattttggcctcatcttgtttttatcatctttgctgcttgtagtcaacaggaattcagtacctttagctgtactgatgtgtttactctttcctagaaaagcaaggaaatgttttgcttctgtgttgttttttctttgcccccacacctagaatgtcttttttcacagcccacgtttaaagctgatctacctctcataagccacacattctagtttgtagagatgcttccccttgtta

SEQ ID NO: 133292 - DNA, 431 bp, Homo sapiens
gaatcgtactttggaggacaggccttggcttcagccagcttttgtggctgtacgaatatagcataggagctttaagagcactgctgaagcctctgttactggtacttggcttttctggccccactgtcatggcttaactctgtgcyatctcttatctgaatctctttgtgtttctcccctattcagatcaaccaatcaaggctcccataaagattttggcctcatcttgtttttatcatctttgctgcttgtagtcaacaggaattcagtacctttagctgtactgatgtgtttactctttcctagaaaagcaaggaaatgttttgcttctgtgttgttttttctttgcccccacacctagaatgtcttttttcacagcccacgtttaaagctgatctacctctcataagccacacattctagtttgtaga

SEQ ID NO: 133293 - DNA, 431 bp, Homo sapiens
gaatcgtactttggaggacaggccttggcttcagccagcttttgtggctgtacgaatatagcataggagctttaagagcactgctgaagcctctgttactggtacttggcttttctggccccactgtcatggcttaactctgtgctatctcttatctgaatctctttgtgtttctcccctattcagatcaaccartcaaggctcccataaagattttggcctcatcttgtttttatcatctttgctgcttgtagtcaacaggaattcagtacctttagctgtactgatgtgtttactctttcctagaaaagcaaggaaatgttttgcttctgtgttgttttttctttgcccccacacctagaatgtcttttttcacagcccacgtttaaagctgatctacctctcataagccacacattctagtttgtaga

SEQ ID NO: 133294 - DNA, 434 bp, Homo sapiens
aggacaggccttggcttcagccagcttttgtggctgtacgaatatagcataggagctttaagagcactgctgaagcctctgttactggtacttggcttttctggccccactgtcatggcttaactctgtgctatctcttatctgaatctctttgtgtttctcccctattcagatcaaccaatcaaggctcccataaagattttggcctcatcttgtttttwtcatctttgctgcttgtagtcaacaggaattcagtacctttagctgtactgatgtgtttactctttcctagaaaagcaaggaaatgttttgcttctgtgttgttttttctttgcccccacacctagaatgtcttttttcacagcccacgtttaaagctgatctacctctcataagccacacattctagtttgtagagatgcttccccttgtta

SEQ ID NO: 133295 - DNA, 513 bp, Homo sapiens
cctctggagaatagtgagtgaagaggaaggaaggcctgggtcagaatcctagtttagcatttttgtgaaagkatagaagaggaagccattcaaaaaaatacagggacattgagaagggaagtgtcctagatataggacatccagatgggagtagtcagccttgtcagatgctctagggattataaggaaaaagagttttgtagagagacagaagaagctagattgaatactattgagtggtagagacatttgaaaatgaaaagcttgaggtaagttatttggtcagtgagtttttcttgaagtcgaggataggaagctattgctggagggagatatgagatgtttattttaaatgttggagagattatgttcttttggccaaggggaaggagccactagaaagcagaggttgaagaaacaggagaaagaacattgatagattaactggccctcaccttttctctgcctcaaggaaagcagtcaaagttggtatagacagaattttggcagtgt

SEQ ID NO: 133296 - DNA, 513 bp, Homo sapiens
cctctggagaatagtgagtgaagaggaaggaaggcctgggtcagaatcctagtttagcatttttgtgaaagtatagaagaggaagccattcaaaaaaatacagggacattgagaagggaagtgtcctagatataggacatccagatgggagtagtcagccttgtcagatgctctagggattataaggaaaaagagttttgtagagagacagaagaagctagattgaatastattgagtggtagagacatttgaaaatgaaaagcttgaggtaagttatttggtcagtgagtttttcttgaagtcgaggataggaagctattgctggagggagatatgagatgtttattttaaatgttggagagattatgttcttttggccaaggggaaggagccactagaaagcagaggttgaagaaacaggagaaagaacattgatagattaactggccctcaccttttctctgcctcaaggaaagcagtcaaagttggtatagacagaattttggcagtgt

SEQ ID NO: 133297 - DNA, 513 bp, Homo sapiens
cctctggagaatagtgagtgaagaggaaggaaggcctgggtcagaatcctagtttagcatttttgtgaaagtatagaagaggaagccattcaaaaaaatacagggacattgagaagggaagtgtcctagatataggacatccagatgggagtagtcagccttgtcagatgctctagggattataaggaaaaagagttttgtagagagacagaagaagctagattgaatactattgagtggtagagacatttgaaaatgaaaagcttgaggtaagttatttggtcagtgagtttttcttgaagtcgaggataggaagctattgctggagggaratatgagatgtttattttaaatgttggagagattatgttcttttggccaaggggaaggagccactagaaagcagaggttgaagaaacaggagaaagaacattgatagattaactggccctcaccttttctctgcctcaaggaaagcagtcaaagttggtatagacagaattttggcagtgt

SEQ ID NO: 133298 - DNA, 542 bp, Homo sapiens
catcaagtttcccatcttttttaagtagctcatcacagagttattaagaaggtaaatattccgaggactttgtgaatgagagctgagggcgtggaggaaactrgtaaaagtcaaagatgatgcttaggtgtctgccttgggtaactaggggatggatgggggtgctatcccctgagatgtgacacagtaaaggagcaagtttaggcaggaagagaagtaggtaagtttgaattgggtgtgatatgtccaaacaagatgtctaggaggtggttcggagcttatgagagggatctggttaagggatagagtcataaattatcaaattatcaccatatagatcataattgaagccatgggaatgaatggatccttcagtagagagggtcaaagaaatgaacaaaattccttgggaaataccatcatttagggggcaagtagagaaagaggaacccagaggaaaaggtgagaccagtcagagagattggaagaaaatcatagggtggggtgccacagaagccacagggaggaagtggggtgaagta

SEQ ID NO: 133299 - DNA, 608 bp, Homo sapiens
  misc_feature (1)...(608): n = A,T,C or G
aagcttcccagtccctggattggattcccacattttcttcttccatgcaggtggcacttacctcttaggacctggtacagagcctaccttgaagtgttctctccctctcccaatcttttgtgctttgagcgcctgcagcacctcaccttactgtgtattgtctcatattgtgctctaaatanaataaacgcgtttttaaaataaaacttgaaccggtattccagggagctgcaggtgttttttcttttggcatttttaagtctggccacagnggtatataggtacatccaggcacctggtaaatatctagtcggtcaaatcttctaaaccttgatcagaaaaatggcccagtttcatccctcccctgttcctgcagggacacagccaagtgtkgaacagaaatatggggcagaggagccagtatggtgtgtggatgtggtcatgcacctcactcagtagaaggggccactcctgccttctttaatattcaaatgtcatccatctccttaaggctcaactcattcaggaaacagagatatagtgtgagtcaggtacttgctggacaatggtgttgtagaatttcaaaaacaaccaaaagtattatccct

SEQ ID NO: 133300 - DNA, 523 bp, Homo sapiens
gaattcagtatttgagaaatatggtttccagtcactcagaagagctgtagagatggaaaacatgtggtgtgaataatatatgccatagacaaggcaaatatgtgaaaaacttatatttgtacttttgtttttgctacacagtttacacaaatcactgcctaagcattaatatttatactcctaagcgtttttttctaccatgcccatcaaactgttgcataatcagagtagtcagtatatcacatcacacaggggagaacaacttaccggcctcagttcctgtaaatatttttcttttgtgctggattaaggttatcctcatggtaggggtccttgtggaagtaaagtatgccaacatattttatgatttaaaaaaatatggacacttcatgactctacaaaaagttggtgtttatattctgcatggaagatatgtttytgacctagcccctgaagtttttgaggtttattcatcctgaatttatttttaagctaaagagagggcccttttctgcagagagat

SEQ ID NO: 133301 - DNA, 530 bp, Homo sapiens
tctgtttctcaactgcacctcagcagcctcctcatccccaaggcctttgcctctgctgtttctcttaccaggatgctagagagccagcagcttttcctgtggctgactctttagcatccttcacgtctcagtccaaatgcctcctattctaaaagcactatgttggccgcttcatctaaagtcatgctcaatgtcattctcacttaccatctggtttatctctttggaagcatgtwtgacagccttgatttatgtatttattgactttgtggtgtttctgatcttgctccactttaatggaggatccagagaacagatgcctcgctcttctattctatgtccccaggatctagaaaaagagtctggttcaataaatatggcttgaataaatgaatgaaggaaaatgaatgaactccaaaagtccagtgattaatcttcagtcctgtaaatcgtattcaggacttgaactccagtgttctgagtccagggtcattgattttttccagctcaatctaactgaccatatctgc

SEQ ID NO: 133302 - DNA, 474 bp, Homo sapiens
tgggaactcaaatgaattgttcccatgttccagtgagaaacatcatcaccctgctcccaaacaacatactatgtgcaaaagagagacaaagacctgaagtttctctttccgagggtatatttgttatggatttggagagagccacaacctttcctacacattattgctcagatgagcttcctgcrttcagaagaaggaagtgggggtatggcaggtagttgcagaggtaggtttatgcccaactggaatgggagtcatcaaatggcacagctgtcctggggctccaaacagcttctcatcaggattccctggaactcccccagctttgcctcagacgttccaagctcagttttgtatatgcagttacatttccgctgccttcctcgggggaccagctttaagtaaagaggatgagaatgtgaagttacagagctcagcttgccaatactccaccagaggaaatcacagggcaga

SEQ ID NO: 133303 - DNA, 529 bp, Homo sapiens
acatttcatataaatggaattatacagtatgtggtcttttgagtctgactttttcacttagcataatgtgtttagtgttcatccatagtgtagcatgtaaaggatatggagaaattagaacccccatacatgatgataggaatgtaaaatggttcagtcacatgtgggaatgtttggaaattccttaataagtcaaacatctaattaccacatgaccccgcaattctactattagttatrtactcaaaagaattgaatcagatagcaaaacaagtgtacaccaatgttcatggcagcactattcatcatagctaaaaggtggaaacaacccacatatctatcaattgatgaatggatgaaaaaaatgtagcatatccagggattcctttgaacaaatcatatcactttcctgctcaaactcttcagtggctttcccttccattttatgttaaataggattggaccatccatggctacaaggtctcaggtcaggcagcccactcaacctttccaacgtgatctcacacta

SEQ ID NO: 133304 - DNA, 529 bp, Homo sapiens
acatttcatataaatggaattatacagtatgtggtcttttgagtctgactttttcacttagcataatgtgtttagtgttcatccatagtgtagcatgtaaaggatatggagaaattagaacccccatacatgatgataggaatgtaaaatggttcagtcacatgtgggaatgtttggaaattccttaataagtcaaacatctaattaccacatgaccccgcaattctactattagttatgtactcaaaagaattgaatcagatagcaaaacaagtgtacaccaatgttcatggcagcactattcatcatagctaaaaggtggaaacaacccacatatctatcaattgatgaatggatgaaaaaaatgtagcatatccagggattcctttgaacaaatcayatcactttcctgctcaaactcttcagtggctttcccttccattttatgttaaataggattggaccatccatggctacaaggtctcaggtcaggcagcccactcaacctttccaacgtgatctcacacta

SEQ ID NO: 133305 - DNA, 595 bp, Homo sapiens
aggaataatattattggtcacactgggttccttaaacccaattcaactttgcccctatatcagcaatttagtaggtttaactacattgcttttctgttccaatctgctttgtgaagtgcttaagaaaaggmcctttataactctctataataataaattatgaacaacaaaaaaagggcagcagcgtcgccctcctgttcctccaaggggaaagctgagcctaattcatatattctgctctgtctggctatctggtggaaataaaagattgatgcgaactttactgtgtaaaatttgggtctttatccaacagaagacaattgaatattataaaaacatgcagcacacttgaagagacttattttattcaagcactaagaaccttcaccctgagagaaactgctttctgttaaaaatgaaataaattaatatatgcctgcatgagaaatagatttctctgatagttttttaatctgagaatcttgcagctgagaagtccaactgcttcattttaaaagtgcagaaacaaataacccttgggttggtaagtagctcacctaagatcacgcaaacatagatggacaaactcaaccca

SEQ ID NO: 133306 - DNA, 599 bp, Homo sapiens
ctacggtttgggaacctgcttacattatcaccagtatttacaaaaccctgaaatctatcctcattttttaagaaaagcaaggcatggggagtaaaggatggaagtcactcagctgagataaataagcagggctgacaatggaagccatgcctatctggtttcaaaagcagtgctcttactgttatgctaagatgcttctccttcaagacaagagggctgtccgaattgtgccctctgtatccccagtgcttgacacatatttgttcaatatttgcaaatatttgttgaacacctgcataaacagactagtgtgcatgcacacacacacacacacgcacacacacacataagcacacaagcacacacacagattgttgtggctgtttttatgacacrtatggctccacactcaggcttttgtgatcatggagagaggaacagagggaggcattgtgctcaggagtccctgatcctgaagctttgcaaggagaaaggtctcaaagagcacaggaggcaacagctttctgaggcacctggccccacagagacgttccaatcctgcctggttttcatgttgcagagaccacagggcatcctgg

SEQ ID NO: 133307 - DNA, 548 bp, Homo sapiens
cagacctggttcaggggagaacagtttcaccacccccacccctgcgacagattttgctgtttttatgcgtgggcacagaggtgggcatgtttggagagttgtgaagaggaactgaacatgtccttcagaaaggggaggagctgatagtgcctaatgaggagcttggtgtggcatagcactgaagttttaaatgctttaaagtaaaaccagaaataaatttaatttcaagtaaaatgctgatataatccctgtatagaagctggaatcttttgagtgaatagacgctaatttgggggactgtcttttccttcactggctgtaatgtgtggaacggtgacccccagaakgatttgtctgtgccttaacactcctaacctacaaacatgactatatttgggaaaataggctttgcagatgtaattaagttaagaatctcaagatgagctcattcccgggttatctggacagaccttaaatccaatgacaagtgtttttataagacatttgtaagagacagaagagaagacacagaaacaaaggagaaggct

SEQ ID NO: 133308 - DNA, 426 bp, Homo sapiens
cggggctcaggattgaaaagctaccatgtctgagccgacggtgatggatgctaccaatttagagagaggaggggcagctcttcatgtggtgaaagaatcatttgttttgccaagagaagctttcctgtggcagacacagagtgtggctctgacagggaagtgctcctggcatccttttgtaagcgacccattctgagcacaattttaaaaaaatagcatgtgttggttaagcttgcttttttattgtcttaatacagagaagtatagagaagaagaaaaaaaaaaawctaaacatataaaaatggcccgtaatccccctacccagtgatttctgttgacctttaaaaccaatcaaaataaaagtaatacaatataggtaggtctagacaattcaaagagttcagtaagtaacaaagttaaagtaaa

SEQ ID NO: 133309 - DNA, 577 bp, Homo sapiens
ttgggttatcctaagttaatgactaaagtttatatgtactccaaaattcagatctatttatgtttctgcttatcaaatctctcaaatccacctcaaaattgccatgtccaaaatcaaatttgttgtcttccccacactaaatttcaaaatctggtctcttttttgcgttttctattagagcaaatggcactagtaatcacttctaactttcatgagccatcaatctcctaacgaattgtggaattctttcacttcaacaactgtctggtctgagcagcaaccatcacctcttacctttagtggccacctaactggtgtatccatacaacctcttgctctttayaatcaattttctagaaaaaaaatccagaatgagcatttcaaataaccatctggtagtatcctcctctctgcttgaaacaattcaatacttcttcaccacggttggccatgcttgatctggcctggctctgttgctgtcttcagcaagcattcctccactcaatgctttcagccacccggaacttggtacggcattcacaaaatgttctgtgttccccactaagagaaggctttt

SEQ ID NO: 133310 - DNA, 569 bp, Homo sapiens
tggtgtaaatatattcctatttagtaataggcattctgggagtctttcctgggtttgacaattctaaatatagaaaaagatgcataaattgagagattaatttgtggggggtgtgtgtgtaattagagcttaatatcagaaaaagccagcacaggataagttaaatgatgacatacccattgcctagatgaattaactaaacattttaattatgacagctatgtagcaasttcaaaagcatgtataatatccaactaggtgtaaaagaaataagcaggatatttaatgggaaatgcactaggattataactgtgtaaaaaataatagctaccatttatagagaagtctttctcatcagccctttgttaagtactttgcattgactatcctattgaatctttgtaatagccccgtgaggttagcatcccatttacaaatgagcaaacttgacttgggaggataaagtttattgccttaagtgacagagttagcgagtagtcttgagtattccaggctcagctctggaatttctaaccactactctattatcctttctgtgagaacagagc

SEQ ID NO: 133311 - DNA, 501 bp, Homo sapiens
agaatcaactcaactcctgaggacagagaatgccttgtaatttttttaagaattgttctcagtgggacatgcaaaaaatgcttgtggaaatgattaaatgagaaaagttttcttgctaaccagatttcttactgatcagtcaagtatgttctgattgctttctatatgctctgccacacagataaaatatattaaaataccataataaacagagcttgargagaaacaagacaatcttttggcaactagaaaagggtaaaaccatcagatggcatattattaaatctgagtttttatagtgtagatgatataaatgatatttgttgtcaggaaaggaagaaataaatattagtatatatcacatctcatggattagatagattttgaactcaaagaacaaatggctttggataggcagaatatattgcctaatgaggaaaaagatatgctgcatacagagaatattaagagaagttcaacctaaggggatctgttttagca

SEQ ID NO: 133312 - DNA, 584 bp, Homo sapiens
ctcacacctgtaatcccagcactttgggaggctgaggcaggtggatcacttgagctcaggagtttgagaccagcctgggcaacatggtgaaacctgtctctacagaaaatatgaaaattagctgggcatggtggcatttgcctgtggtcccagttactcaggaggctgaggcaggaggatcgcttgagcctgggaaacggaggttgcagtgatctaagatcatgctactgcactccagcctgggcaacagagcaagaccctgtctcaaaaaaaaataatgtgaaaacatcgatacctaagaatgactggggaaagcaaaacaaaacatctgctttactttttccagagaagccacagtccactttgcagcacttwgaaatgacattggaaatgacacttttgcagaattttaaagtccatgttggaatctcaggtcctttaatatggattctcagtggagtcaaatgaatttcaaatgcataacttctgattgccacctgagattacttgtattttggttgctgtcctcaaagtagtcaaggagtggcagtggcatgagctgctctgggagaagaggggagagg

SEQ ID NO: 133313 - DNA, 418 bp, Homo sapiens
gaattcctgcctgggattttgtttgaaaaaaaaaaaaaagttttgctgctaaagagagtttgaaaatcattgccttaggggaatgatkaaataaatattacattagatggtgacagaaaaataaaaaccaaagagcaaatatgcctacatttttttttcttcaatttcaggcttggatactttatttcattggacgttagtagctctccttcacttgagtttctctctttaaaaaatgaaagaaaatgcaaaacacatttgttcatctgacaagataattgaaaatagtttaattcggagaagcagagagattttctgtagagatactcatttgaccaccaacatctgaatctggaggaagaatggcttttcaagaaacaataacatagtctgctttctaaagacactggagtttggc

SEQ ID NO: 133314 - DNA, 439 bp, Homo sapiens
ttttgtttgaaaaaaaaaaaaaagttttgctgctaaagagagtttgaaaatcattgccttaggggaatgattaaataaatattacattagatggtgacagaaaaataaaaaccaaagagcaaatatgcctacatttttttttcttsaatttcaggcttggatactttatttcattggacgttagtagctctccttcacttgagtttctctctttaaaaaatgaaagaaaatgcaaaacacatttgttcatctgacaagataattgaaaatagtttaattcggagaagcagagagattttctgtagagatactcatttgaccaccaacatctgaatctggaggaagaatggcttttcaagaaacaataacatagtctgctttctaaagacactggagtttggcttatgcaattctgcatatttaaaggagtagggaattc

SEQ ID NO: 133315 - DNA, 418 bp, Homo sapiens
gaattcctgcctgggattttgtttgaaaaaaaaaaaaaagttttgctgctaaagagagtttgaaaatcattgccttaggggaatgattaaataaatattacattagatggtgacagaaaaataaaaaccaaagagcaaatatgcctacatttttttttcttcaatttcaggcttggatactttatttcattggacgttagtagctctccttcacttgagtttctctctttaaaaaatgaaagaaaatgcaaaacacatttgttcatctgacaagataattgaaaatagtttaattcggagaagcagagagattttctgtagagataytcatttgaccaccaacatctgaatctggaggaagaatggcttttcaagaaacaataacatagtctgctttctaaagacactggagtttggc

SEQ ID NO: 133316 - DNA, 397 bp, Homo sapiens
agtttgaaaatcattgccttaggggaatgattaaataaatattacattagatggtgacagaaaaataaaaaccaaagagcaaatatgcctacatttttttttcttcaatttcaggcttggatactttatttcattggacgttagtagctctccttcacttgagtttctctctttaaaaaatgaaagaaaatgcaaaacacatttgttcatctgacaagataattgaaaatagtttaattcggagaagcagagagattttctgtagagatactcatttgaccaccaacatctgaatctggaggaagaatggcttttcaagaaacartaacatagtctgctttctaaagacactggagtttggcttatgcaattctgcatatttaaaggagtagggaat

SEQ ID NO: 133317 - DNA, 484 bp, Homo sapiens
ccatggcggtgcttttgcttcatggacttggcaccctgccacggtcttcctggcattcaacctctgcttgcccttgtttctggctttgtcgttcccactcagcactgacaacttgtaagagcctcagcacattatatgaccacgataggaccacatggattccactgctggatttcaaactccaataattaaccttgtatttcttcaagttgagcagtgataactgcctatgagatggccaagttggccacctggcctgcctgggttactcttggtctggttggctcatgacttacacttagccttttgtgatcttggtgtagggagggcagaactgtgcgttttctaagagaagcagggtaatatgattaataaaaggtgaagatttacrtagaggaatcgagcacctgttatcatacagtctaggaaaagtccaagcaaaccaggcaggctgttgctttgagcacatgggggtctacattct

SEQ ID NO: 133318 - DNA, 484 bp, Homo sapiens
ccatggcggtgcttttgcttcatggacttggcaccctgccacggtcttcctggcattcaacctctgcttgcccttgtttctggctttgtcgttcccactcagcactgacaacttgtaagagcctcagcacattatatgaccacgataggaccacatggattccactgctggatttcaaactccaataattaaccttgtatttcttcaagttgagcagtgataactgcctatgagatggccaagttggccacctggcctgcctgggttactcttggtctggttggctcatgacttacacttagccttttgtgatcttggtgtagggagggcagaactgtgcgttttctaagagaagcagggtaatatgattaataaaaggtgaagatttacgtagaggaatcgagcacctgttatcatacagtctaggaaaagtccaagcaaaccaggcaggytgttgctttgagcacatgggggtctacattct

SEQ ID NO: 133319 - DNA, 641 bp, Homo sapiens
gaattccagccaccagttggaagtctcccacaggggaacaggatcagcatgagaacacagctgcttcctctccccttcctatgacttcaccctgtactcttgatctccacacttctgcccactccaaagccctcaaaaacccaagcctcaacttccttggggaaatggctttgaggttccctcccatcttctcgttctgtgaccctgtggtcaaggtgtttgaaccagagcaactccatcttgaataggagctgggtaaaatgaggatgagacctactgggctgcattcccagacggttaaggcattctaagtcacaggatgagataggaggtcagcacaagatataggttataaagaccttgctgataaaacaggttgcaataaagaagayggctaaaacccaccaagaccaagatggcgatgagagtgacctctggtcatcctcattgctacactccaaccagcaccatgacagtttacaaatgccatggcaacatcaggaagttaccctatatggtctaaaaaggggagacatgaataattcaccctttgtttagcatatcatcaagaaaaaactataaacatgggcaaccagcagcccttggggctgctcgatgtcgtagccattcttttattcctt

SEQ ID NO: 133320 - DNA, 589 bp, Homo sapiens
tgacctctggtcatcctcattgctacactccaaccagcaccatgacagtttacaaatgccatggcaacatcaggaagttaccctatatggtctaaaaaggggagrcatgaataattcaccctttgtttagcatatcatcaagaaaaaactataaacatgggcaaccagcagcccttggggctgctcgatgtcgtagccattcttttattcctttactttcctaataaacttgctttcactttactctgtggactagccctgaattctttcttgcatgagatccaagaaccctctcttggggtctggatcatgacccctttccattaacactatgattaaacctgtttctctgctgcaacctggtgtcatggcatattgatttgctgtgtgcattggttaacaaacctattgcgattacaatttgtgtgtgtgtttttttgtctatttaaatttcagggattttatttcatgaaaaaccttgaccaacaggatttccacttagctaaaaaacactgagatttttttttcacaggttctgttgttcagtagctatatatataagtgctttatatcttgtcattaatagaca

SEQ ID NO: 133321 - DNA, 568 bp, Homo sapiens
aagtgtgtggcaccttcccctttgctctctctctcctactcttccatgtgaagatgtgctggcttcctcttttgccttctgccatgactgaatgtttcctgaggtctccccagccaggatccctgtacagcttgcagaatcatgagccaattaaacctcttttctttgtaaattacccagtcttaggtagttctttatagcagtgtgagaatgaactaatacagaggccattggggaactcgggggttgagaggatccatctgtctcaagccaccctgggtagccttgagattcctccagagagcagtggggcaactgcaggtccctatataggtttttttctccaaacaccctggaggttggaagcattgatggcagatgaggaaagcacagcatcacagttaggactgcagcttttgaatcacaggaacctggktcacttcctgtttctgccactttttctgtccatgaccttggagcttgttctctggattctctgagcatcacagtaagctcatttgtaaaatggtaaagccaggctcacacagtcaaatcaggcaacagatct

SEQ ID NO: 133322 - DNA, 434 bp, Homo sapiens
aaacaggcaaatagaatcaataacaagcaaaaggcactaaaaaaatgagatatgagatagggctataacaatagatatgagatttttaaatasaaaatgttatgcacaattgtacaatacatttgcaaaacctaatgaaatgcgtaattctctgtctccctcaaaagttctaccactgacataagaagtgggaaccctgacggggtcaacagcaggataagtatattattgaagacatagtgtctaatgtctttctttttcttttttcttttactttattggaagacaaggtgaacttggtagttagtttacatttggggaagaaagtgggtgagattgtggatatagggatactccatattaatatgttggtgtttcagtcttaataaggcaagtgatagaagttgggttaagttttgaattccacctgccta

SEQ ID NO: 133323 - DNA, 411 bp, Homo sapiens
agaatcaataacaagcaaaaggcactaaaaaaatgagatatgagatagggctataacaatagatatgagatttttaaatagaaaatgttatgcacaattgtacaatacatttgcaaaacctaatgaaatgsgtaattctctgtctccctcaaaagttctaccactgacataagaagtgggaaccctgacggggtcaacagcaggataagtatattattgaagacatagtgtctaatgtctttctttttcttttttcttttactttattggaagacaaggtgaacttggtagttagtttacatttggggaagaaagtgggtgagattgtggatatagggatactccatattaatatgttggtgtttcagtcttaataaggcaagtgatagaagttgggttaagttttgaatt

SEQ ID NO: 133324 - DNA, 563 bp, Homo sapiens
tgtagctctactctaactgaggagttgactaaagagggaaagattaaatccaagacattttcttctgggggtgaaaaagagtctcagatggctgatggtgccactgggggctgggatggctgaccctgctggacaggacagatttagaaagctgggttagtgatgagaaatgagatcactagctggctacaggggcatagaagcaatcatcatataatctttggrccttatttttaaagccttgtttttttcctgatatttcagctacttcctgaaatgtttttcattttaggaaatactattttaagataatggccctcataatcaccaatctaataatgtctttctttcttttttttttttggtgagtctcactctgtcacccaggctggagtgcagtggtgtggtctcggcttactgcaacctctgcctcctcggttcaagtgattctcatgcctcagccacccaagtagctgggattacaggtgtgcaacacaatgtccagctaatttttgtatttttagtagagatgggatttcaccacgttggtcagtctggtctca

SEQ ID NO: 133325 - DNA, 563 bp, Homo sapiens
tgtagctctactctaactgaggagttgactaaagagggaaagattaaatccaagacattttcttctgggggtgaaaaagagtctcagatggctgatggtgccactgggggctgggatggctgaccctgctggacaggacagatttagaaagctgggttagtgatgagaaatgagatcactagctggctacaggggcatagaagcaatcatcatataatctttggaccttatttttaaagccttgtttttttcctgatatttcagctacttcctgaaatgtttttcattttaggaaatactattttaagataatggccctcataatcaccaatctaataatgtctttctttcttttttttttttggtgagtctcactctgtcacccaggctggagtgcagtggtgtggtctcggcttactgcaacctctgcctcctsggttcaagtgattctcatgcctcagccacccaagtagctgggattacaggtgtgcaacacaatgtccagctaatttttgtatttttagtagagatgggatttcaccacgttggtcagtctggtctca

SEQ ID NO: 133326 - DNA, 563 bp, Homo sapiens
tgtagctctactctaactgaggagttgactaaagagggaaagattaaatccaagacattttcttctgggggtgaaaaagagtctcagatggctgatggtgccactgggggctgggatggctgaccctgctggacaggacagatttagaaagctgggttagtgatgagaaatgagatcactagctggctacaggggcatagaagcaatcatcatataatctttggaccttatttttaaagccttgtttttttcctgatatttcagctacttcctgaaatgtttttcattttaggaaatactattttaagataatggccctcataatcaccaatctaataatgtctttctttcttttttttttttggtgagtctcactctgtcacccaggctggagtgcagtggtgtggtctcggcttactgcaacctctgcctcctcggttcaagtgattctcatgcctcagccacccaagtagctgggattacaggtgtgcamcacaatgtccagctaatttttgtatttttagtagagatgggatttcaccacgttggtcagtctggtctca

SEQ ID NO: 133327 - DNA, 618 bp, Homo sapiens
catttctccttctttgtggggacacctgcattttcccatgagtttaccccattcttcatgtagccttgctgagactttccattatggtgcctctctctcctatagtgaagggatgaagtgagtccgactcaagacaggccacccaggacttaatatgctgggagcgtacaatgttttcagagagacataaggatggaaaatacttggagctgatttgtcctgatcgtgagagcctaaaaatatcatccattcatcccaggaacctagatcgctgaagcagctttttccggcattcctgaagcttgcttcatcctatttttctttgcttctctatgtcttgtgtgtgtgtgcacacacatgcctgcatatgtgttttcttctcttcataaggtttggtttccatggcttgcaaccaaagaaatgattgtatagcctgacataatcagtcagcaatcacagtcattttacaaataacwcagcagtaaagggttcactgatttccccatgccacagagctaatgagcaatgaagctggaatctgaactcaggtacctctgattcccaatctgttctctcttcatgcagactttggctctatagcattttccaaaaatggcc

SEQ ID NO: 133328 - DNA, 618 bp, Homo sapiens
catttctccttctttgtggggacacctgcattttcccatgagtttaccccattcttcatgtagccttgctgagactttccattatggtgcctctctctcctatagtgaagggatgaagtgagtccgactcaagacaggccacccaggacttaatatgctgggagcgtacaatgttttcagagagacataaggatggaaaatacttggagctgatttgtcctgatcgtgagagcctaaaaatatcatccattcatcccaggaacctagatcgctgaagcagctttttccggcattcctgaagcttgcttcatcctatttttctttgcttctctatgtcttgtgtgtgtgtgcacacacatgcctgcatatgtgttttcttctcttcataaggtttggtttccatggcttgcaaccaaagaaatgattgtatagcctgacataatcagtcagcaatcacagtcattttacaaataacacagcagtaaagggttcactgatttccccatgccacagagctartgagcaatgaagctggaatctgaactcaggtacctctgattcccaatctgttctctcttcatgcagactttggctctatagcattttccaaaaatggcc

SEQ ID NO: 133329 - DNA, 618 bp, Homo sapiens
catttctccttctttgtggggacacctgcattttcccatgagtttaccccattcttcatgtagccttgctgagactttccattatggtgcctctctctcctatagtgaagggatgaagtgagtccgactcaagacaggccacccaggacttaatatgctgggagcgtacaatgttttcagagagacataaggatggaaaatacttggagctgatttgtcctgatcgtgagagcctaaaaatatcatccattcatcccaggaacctagatcgctgaagcagctttttccggcattcctgaagcttgcttcatcctatttttctttgcttctctatgtcttgtgtgtgtgtgcacacacatgcctgcatatgtgttttcttctcttcataaggtttggtttccatggcttgcaaccaaagaaatgattgtatagcctgacataatcagtcagcaatcacagtcattttacaaataacacagcagtaaagggttcactgatttccccatgccacagagctaatgagcaatgragctggaatctgaactcaggtacctctgattcccaatctgttctctcttcatgcagactttggctctatagcattttccaaaaatggcc

SEQ ID NO: 133330 - DNA, 618 bp, Homo sapiens
catttctccttctttgtggggacacctgcattttcccatgagtttaccccattcttcatgtagccttgctgagactttccattatggtgcctctctctcctatagtgaagggatgaagtgagtccgactcaagacaggccacccaggacttaatatgctgggagcgtacaatgttttcagagagacataaggatggaaaatacttggagctgatttgtcctgatcgtgagagcctaaaaatatcatccattcatcccaggaacctagatcgctgaagcagctttttccggcattcctgaagcttgcttcatcctatttttctttgcttctctatgtcttgtgtgtgtgtgcacacacatgcctgcatatgtgttttcttctcttcataaggtttggtttccatggcttgcaaccaaagaaatgattgtatagcctgacataatcagtcagcaatcacagtcattttacaaataacacagcagtaaagggttcactgatttccccatgccacagagctaatgagcaatgaagctggaatctgaactcargtacctctgattcccaatctgttctctcttcatgcagactttggctctatagcattttccaaaaatggcc

SEQ ID NO: 133331 - DNA, 536 bp, Homo sapiens
tcatggtagccattttaaggatcagagaagtctaacttctaaacatgtgggggtctggctgagtttgtaggggcttctgtctttataatgttaggagctgtaaggactgctgacagatgaaccattccagctttcaggtcttcaacgtggttgggaggtgagtttccaattgggaatctgctgaaggtcatggcccctgcctccagagaaacgcacctgcattcagaaatatacctgaagagtccacagacacgcagattgcaagcccaggcttggtgcaagatcagagcagaagatctgaggccaattcattgtaggtatggtgaggctgaggtccagagagatttaggacaggctcaaatggacacygtgagtgtcaggcctccttctctagagcaagcattaacctatactttctccaccagaatttttattacatagcttgagtcttacaggctctcattttaaccatgaaagcaagctataatccctaaaccataattccaggttattattattactatttacagcttcct

SEQ ID NO: 133332 - DNA, 545 bp, Homo sapiens
tccctagttgatggggaggcccctagattaagaaccacagctcccacgtgagaacacatggacacatagaggggagcagcacacactggggcctattggagggtggaaggtgggagaaggaaaaggattaggaaaaataattaatgagtactaggcttaatacctggtgatgagacaagtttacctatgtaacaaacccgcacrtgtaccgtgaacttaaaataaaagttaaaataaataaataagaagacaaaaccaaataaaaagaaccacagccccagcttcaaaagatttttataatttcagaatcctgtgtcagagttcccctcttctcccacttctatcctgtttccaagtgcaagatgctccctgggggccacctggggtgctcttatgtaattggtcttgaggatttagctcaggctttggggtttttgaaagcttcctcagtgattctaacgtgcagtcagggttggtgatgactggtttagaaactccttctcagtcctgaccactaaatcctgctctactgtacagatagaatt

SEQ ID NO: 133333 - DNA, 567 bp, Homo sapiens
ctccctagttgatggggaggcccctagattaagaaccacagctcccacgtgagaacacatggacacatagaggggagcagcacacactggggcctattggagggtggaaggtgggagaaggaaaaggattaggaaaaataattaatgagtactaggcttaatacctggtgatgagacaagtttacctatgtaacaaacccgcacgtgtaccstgaacttaaaataaaagttaaaataaataaataagaagacaaaaccaaataaaaagaaccacagccccagcttcaaaagatttttataatttcagaatcctgtgtcagagttcccctcttctcccacttctatcctgtttccaagtgcaagatgctccctgggggccacctggggtgctcttatgtaattggtcttgaggatttagctcaggctttggggtttttgaaagcttcctcagtgattctaacgtgcagtcagggttggtgatgactggtttagaaactccttctcagtcctgaccactaaatcctgctctactgtacagatagaattctatctgtgaattagtatgga

SEQ ID NO: 133334 - DNA, 545 bp, Homo sapiens
tccctagttgatggggaggcccctagattaagaaccacagctcccacgtgagaacacatggacacatagaggggagcagcacacactggggcctattggagggtggaaggtgggagaaggaaaaggattaggaaaaataattaatgagtactaggcttaatacctggtgatgagacaagtttacctatgtaacaaacccgcacgtgtaccgtgaacttaaaataaaagttaaaataaataaataagaagacaaaaccaaataaaaagaaccacagccccagcttcaaaagatttttataatttcagaatcctgtgtcagagttcccctcttctcccacttctatcctgtttccaagtgcaagatgctccctgggggccacctggggtgctcttatgtaattggtcttgaggatttagctcaggctttggggtttttgaaarcttcctcagtgattctaacgtgcagtcagggttggtgatgactggtttagaaactccttctcagtcctgaccactaaatcctgctctactgtacagatagaatt

SEQ ID NO: 133335 - DNA, 443 bp, Homo sapiens
taaacaaatgaccacagcaggctgcagattggattatataaaaatataactaataataacatagcagataacatttgtcgagcactgacaacatgctagacattgtgttaagtactttacagacattatcttgcatgagattctacagatgaggaaactaaggcttaaagaaccatcccctgcccacggtagtgctgccagatgaaattcaaatttcarttaaacttgtcccatacttataccgaaaaattattcattgtttatcagaaattcaaatttaactgtgtattctgtatttttagttgctgaatctggcaacccatgtccaaggtcacctttgaacccaaagctgtttcacgctggagatgaggcttgccatccccaccacacactgtacctaaaacacccacacaaccaacaggcagcatgctttcaaatgcccc

SEQ ID NO: 133336 - DNA, 301 bp, Homo sapiens
ggttaaaaggggataccccaatacacaggggaggggccttccatagatcaatgataatatttcaggctgaaagatttatttattttcttattctttttatatttcagagacaggatctcactctgtcacccaggctggagtgcagtggtatgatcacagctcactgcagccttgaattcctgggctcaagtgacccttctgcttcagcctcccacrtagctcagactacaggtgagcagcaccatgtctggcttcagactgaaaaaattttttaatctagaattttttttagactagaaat

SEQ ID NO: 133337 - DNA, 661 bp, Homo sapiens
tctgacaaacccacagccaacatcacactgaatgggcaaaagctggaaccattcctcttgtgtactagaacaagacaaggatgcccactgtcactgcttctattcaccatagtactggaagttctagccagggcatatcaggtaaaagaaagaagtaaaaggcatcccaatagtaaaagaaggaagtcaaactatctctctttgccaaaaatatgattctatacatagaaaaccctcaagactccgccaaaaagctcctggaactgataaagaaatttggtaaagtcttgggatagaaaatcaatgtacaaaagtcagtagcatatgtatagaccaataacactctagctgagaaccaaatcaagaacacaatatgatttacattagccacaaagaaaatgaaatacctaggaatttatctaacaaaggaggtgaaagatctctacaatggcaactgcaaaacactgctgaaagaaatcagagataacaaaaataaatagaaatatattccatgcyctggaactggaagagtcaatacagttaaaatggtcatactgtgcaatgttatccctatcaaaattccaatgtcagttttcacagaactagaaaaatctattccaaaattcatttggaaccaaaaaagagccctaatagccaaagt

SEQ ID NO: 133338 - DNA, 499 bp, Homo sapiens
gacgacttcaaaactctcatccaacatccaagagttctgccatttccaagattcagcaatcctctaaatacaagattacatttattgataacacaaagatggatgctttcggtgagtttggcttataggaaaacaatgtcccattatttgatccataaagacataggaaacacattcaagaattaaggaaaactgagagactgaaaatggctttaagcatcagaccaaagagactatagagatatctgagaygattccaactttcatataaatgaaagattgaataaattaattatttcattaaacagattggtttttgagtcttgcactgtgctaggtgctacagatgaaacaagacagacaatcactgccctcacaaagcttacaatgtaagtgggagatttagaaaataagatactacatattcagctgagtgctataacaagagaagaaaagggttccacaggagcccaaagaaagggtggaaatctcctgataa

SEQ ID NO: 133339 - DNA, 451 bp, Homo sapiens
cagacttacggtaaaacttttattattaacatagtcataagtctatattgggaaataatgccaaggaaagaaaaagttggttgagataagattactgatccaagatacgacatawaatttttgcaaaacactaacagctattagaaggatttttttgctcagggatgctaataaacactgtcaggtttttatcaatagaagtatcaattaggcatatattagagaatttgctagaaattcttctctgctttggacattaaccaggcaaactctattttatttccagcttatgctgaaatataaattaggtctgattgaataacactaaattggaaagcatagtttataactttcaagatcatatttagccttcttaatacgtccctagagcaaattcccttcagggcatattaaatttatatggcattatataagagcttgtgaattgcaa

SEQ ID NO: 133340 - DNA, 563 bp, Homo sapiens
gctcatttccactcttatttctaaaacaacaagaaaaacaagaaaataatcttcctatcaattggataggtgaattctgcagattttatggacaattaagtcttgaaatgaagatttaggagtacaaaattatttgtttgctttttttttttcatttctgctactggataaagaaagacattcatcttaaactttattcaaagatggtttcaaaatccttttatctctagcaatatgggatgtattttgcaaaagaaaatgttaaaagagcacaaaagatctaactaaaaggtgttattatcagacttgaaagaaatcagttgcttgaattttactagaaagagatgcaaatcgtttggttgtaatttaatcaagaatgtgaattaatatttctatagcaatatggatttatgttttaaatatctaatagctaaatatttcctaagattcagtctatgcataattcacttccctttcaaacaaaaaacaataratagtcagcaggaaaaactgtaataaagaaagccaaataaacttggcccaatgtaatattgctttgactt

SEQ ID NO: 133341 - DNA, 621 bp, Homo sapiens
ccacccagtttgttatagcagcactaaacaactaatactatagttacactgtgtcaccagaaaaaaactcgaaaacagcaagagaaaaactatttgtcatgtataaacagagagaagaacaacaagattaacagctgacttcccagcggacagagtggaggcctggtagtcatggaatgatgtatttaaagtgctagagggaaaaaaaatcttgtcaaccaacaatgctataacctaaaaaactatgcttcagaaatgaaggtgaaataaagacatccctacataaaaaaagactgggagtatttgttgctagcaaagcagcttcataggaaatactaaaggaaatgacagcaggcagtaaccgaaatataggaacctaaataaatataggaacctaaaccaaataagcagaaggtgttaaataagaaagattaaaacagaaatttacaaaatagaaaacaaaaaaatagaaaaaaacaayaaaaacaaaagtcctttgtaaagataaacaaatttgatacatctttatgcattctcaaaagctgtttcttgaaggacaaaaaaaaagttagttactacaatgttccatggttttctaaagaccacagtacataaacaatg

SEQ ID NO: 133342 - DNA, 615 bp, Homo sapiens
ggatgtagttataaaaggctaacatgagggatgcttggtaatgcaactgttctgtatcttgacctacacatgtggatacaccaaactgcacatgtgataaaaactaaatacccatacaagtatatgtaaaaatgggcaattctaaataaaattggtagattgcatcaatgacattttcccaattgtgatattgcactatggttttgcaacatggtaaccactggcaaaactgagtaaagtatacatggggcattatatttttacaactgcatataaatctataattatctcaaaatataagtttagttaaaaagaagaaacacataaagtatgttttattttctcatcagactgattcatatcatgatcagtaatcaattttgtaaccatagaamaagaggtttgtaaaagtgaaggaaagacagtacattcagttccacagataaagctctatgttgtgcagtataatactttacatatatccaattctgttttttttaataaatcctgagagatagtagctgagctttttaaaaacctttcactgagcagtttgtaactctgattctcaggccatttctttgtttttattttatttgaaatcagttaaagaaa

SEQ ID NO: 133343 - DNA, 584 bp, Homo sapiens
tgattcatatcatgatcagtaatcaattttgtaaccatagaaaaagaggtttgtaaaagtgaaggaaagacagtacattcagttccacagataaagctctatgttgtgcagtataatactttacatatatccaattctgttttttttaataaatcctgagagatagtagctgagctttttaaaaacctttcactgagcagtttgtaactctgattctcaggccatttctttgtttttattttatttgaaatcagttaaagaaagtcacttacatgattttactataggagtgatgatagctttttttttttcatcatttacscttgcttgaagttaaagatggcaaaaggaaaggtaggattctttctttaccctattaaattgatctttcattcaaattattagggaagaattaagtgtacccttcatgacactgtcaagacatatgcactttcttttatttcagaaaatgttagaaagagagaaaccagtcagtctaagcccattatttagctcatgtatctaccttgagccttgagactagagacccaagttattttaactacaagaatgtgagttgattt

SEQ ID NO: 133344 - DNA, 468 bp, Homo sapiens
ggtacatgcacagcatgaaatactacacagctataaaaaataaggaaatcatgtcattgaagcaacatagatgcagctgggggccattatcccaagtgaattaacacggggacagaaaatcaaatactgcatgttctcacttataagtgagagctaaacattgaaaacacatgaacactaagaagggaacaatggacatcaaggcctacttgacagtggagtgtggtaagaggctgaggatttaaaaattacctatcgggtactatgctcattacctgggtgacaaaataatgtgtataccaaatccctgcaacatacaatttactmatgtgacaaactcacacctgtacccctgaacctaaaataaaagttggaagaaaataaatacatgccacaaaggagaatatattaacaacatatttaataaataaaaggcccatattcagcatatacaaagaacatatacca

SEQ ID NO: 133345 - DNA, 582 bp, Homo sapiens
gtttttgctactgagtgacatcatggaataagaacttgtttaaatggttttcaaaattgatcargtttttgaatgacctggaggaacttttaaaattagccaatattggggtcatatctggagagaatgtaatagggtgcaggtgaagttactaaagtccatgaatcataaagaaatctgtggccaccaggccaacgcctgcctggctagttttggaaacctaatggactaaaatctgagggcccagaatacagcaggactgtactggtctgtttttacactgctgataaagactggaaagaaaaagaggtttaattggactttcagttccacatcactggggaggcctcagaatcatggtgggaggcgaaaggcactttcttttttttttttttgagacagagtctcactctgtcacccaggctggagtgcagtggcgcaatctcagctcactgcaacttccacctcccaggttcaagtgattctcctgcctcagcctccggagtagctgggactacaggtgcgtgccaccgtgttcagctaattttttgtatttttagtagagacgcagtttcaccatgt

SEQ ID NO: 133346 - DNA, 491 bp, Homo sapiens
caggaagggtgtacacaacagttcatagtggtagaggttaccccagggaagtaagcaggaacgcatgtgcatctacgcatgtgtatgagaattctttattctatattttcccatattgtttttttttgatttaatagaaatgcattcctttcattttatgtaaytgaaaataaaatgttacatgtttcaaatgagaggcactttataaatccaagaaactactaaacagcagtatataaatggtatcaaacagaatgtgaaaaattactgtgttttaaaattcaataacaggttttcagataatacagagatcatttgcagtgtaaaatttatactttctaagttcaaagctctgaaggcattggaaataatttaaaattaaatagaaacaataaaaattcctggcatctagcataatacctggcacacaataatcatttgttgaatgccagtaattgtcatgagaccctggataggctacatctctgaag

SEQ ID NO: 133347 - DNA, 472 bp, Homo sapiens
aagactcagagatgttagaggacttgcttaaggttatacagataataaatagagagctggaaatattctatcaatttttaatattatcttactactatagagagcttgttgtcctgatctttataaaaactcttacttcttaaaatactttgttttgtgtatcattaccaactaagacaaattagagtgatttttgtttttaatttctcaatgaagactgtagttcattaaatgtgttattcttaaaataccaataatccaaacccatcaccgtagaccttaacatcttttttctttctttctttctttctttctttctttctttctttctttctttctttytttttttttttttttgagatagggtctcactttgtcacccaggctggagtgcaatggcacgatctcggctcactgcaacctccgcctcctgagttaaagtgattcttctgtctcagccaccagagtagct

SEQ ID NO: 133348 - DNA, 458 bp, Homo sapiens
agaaaatgacatagaagcattaatgtgtctaatatagagtacccactaattctcgcacacagttggggagaaaacagggtcaccagtatttacacagactattaatattgtcagtgtcctgagagtctactcagaaccctttggtttctactaattattattaattttataagatctaggagcaagcwgctgccccttaactaggttagcccataaacctctgtgagccaatgaccttcacaattgaagaatttaattattgccacagtgctgtcaatcagaggaagatatttgatgagctattaagacaacctctcagtagctgagatattttaaacaaatagagtctttttccaacattacagagggaaaaaaaagtcacactgcaatatcttagggctcctctggggaagatacatcatttgaaaacactgaggaccccttagaataactcaata

SEQ ID NO: 133349 - DNA, 550 bp, Homo sapiens
gaggaggatgtgaaaattgttcttccacctcctcactcagcagccttgcaaatgaatcttttctcttttgcaaaacccatgtcaatgtgattgctttaccttgtgcaggcaaaacaatcctggacctggccagtaacccaaccaaaccaggtgagctcacaagactggagcccgtttagtaagcatgctcctcccctctctgtctcatcatacactcagtcrattggcacattttgagtgctcactatagcctggtatgtaattgattttttaaaaattactagtgaatttatcctaagtttagtcgtaattgttatttcattttcctttaaaatacccatccatatctttttccgattttattttgtttttatgttctttcttaagatttgtatgtcatgtatattttaaatatctattaactattattttctcataaatattgtaatttcttttagtttgtcatggatctttatacttttttgtagtgcctttgatatacagaagatatattgtgtgtgacttagtatactagggtttactatattat

SEQ ID NO: 133350 - DNA, 587 bp, Homo sapiens
aggaatattaataattaataccctggggaaggaatgcattcctggggggcagtctataaacagccactcggagtatctgtcctatgcggttgagataaggactgagatacgccctggtctcctgaagtaccctcaggcttattagggtrgggaaaaaactccacccttgcaaatttgtggtcaaaccagttctctgctctcgaactctgttttctgttgtttaagatgtttatcaagacaatatgtgctcagctgaacatagacccttatcagtagttctgattttgcccttgtcctgtttcctcagaagcatgttatctttgttctgccttttgccctttgaagcgtgcgatctttgtgacctacaccctgttcgtacaccccccaactttaaaatcctcaataaaaacttgctggttttgtggctcaggttggcatcatggtcctaccgatatgtgatgtcacccccagaggcccagctgtaaaattcctctctttgtactctttctctttatttctcagccggccaacacttatggaaaatagaaagaacctatgctgaaatattgggggcgggttcccccgat

SEQ ID NO: 133351 - DNA, 587 bp, Homo sapiens
aggaatattaataattaataccctggggaaggaatgcattcctggggggcagtctataaacagccactcggagtatctgtcctatgcggttgagataaggactgagatacgccctggtctcctgaagtaccctcaggcttattagggtagggaaaaaactccacccttgcaaatttgtggtcaaaccagttctctgctctcgaactctgttttctgttgtttaagatgtttatcaagacaatatgtgctcagctgaacayagacccttatcagtagttctgattttgcccttgtcctgtttcctcagaagcatgttatctttgttctgccttttgccctttgaagcgtgcgatctttgtgacctacaccctgttcgtacaccccccaactttaaaatcctcaataaaaacttgctggttttgtggctcaggttggcatcatggtcctaccgatatgtgatgtcacccccagaggcccagctgtaaaattcctctctttgtactctttctctttatttctcagccggccaacacttatggaaaatagaaagaacctatgctgaaatattgggggcgggttcccccgat

SEQ ID NO: 133352 - DNA, 587 bp, Homo sapiens
aggaatattaataattaataccctggggaaggaatgcattcctggggggcagtctataaacagccactcggagtatctgtcctatgcggttgagataaggactgagatacgccctggtctcctgaagtaccctcaggcttattagggtagggaaaaaactccacccttgcaaatttgtggtcaaaccagttctctgctctcgaactctgttttctgttgtttaagatgtttatcaagacaatatgtgctcagctgaacatagacccttatcagtagttctgattttgcccttgtcctgtttcctcagaagcatgttatctttgttctgccttttgccctttgaagcgtgygatctttgtgacctacaccctgttcgtacaccccccaactttaaaatcctcaataaaaacttgctggttttgtggctcaggttggcatcatggtcctaccgatatgtgatgtcacccccagaggcccagctgtaaaattcctctctttgtactctttctctttatttctcagccggccaacacttatggaaaatagaaagaacctatgctgaaatattgggggcgggttcccccgat

SEQ ID NO: 133353 - DNA, 373 bp, Homo sapiens
tgtcacaataactcagtgtctctgagcctcacttaccttaactgtaaatatgaacagcgaggattcatacagcagccatgaagwtcaatataaggggtcttgcacaaaacttactcttcaaaagtgctcaaaaatatgtttccctctttcttcttcagtctattatatctagaatgcattagaaggcagttgaatgccaaaaaggaactcccagccattatttcacagcatatgtgtgaattgctagctttgctcttattgtaagtggctcggtttaatttctctacaactgaggggaaatgtccggcttcatagcccagaatacatgctttgtgatgtcttgatggattttattgattttatttcacaccac

SEQ ID NO: 133354 - DNA, 478 bp, Homo sapiens
tacccctgaacctaaaataaaagtttaagaaattactttttcctcttcttcctccttattctatttgtccattcagcagccaaacatcacactattccttccttgaacatcacctgccttctgtctttccaatcctctttcacctcattttagacttccttcttgcagcttccccwaacactcttcttttcctaaagatgtgcttttcccctattttcgtctcacttctacccaattttcactttttatataaatcttttcaacagtgttctataatcagaaaatgtacatatctgaaattttttctgaactctaaaaaggtattttaaactatgtctaaagcctccatagttgactagactggagtcaactaaactcaacatctaaccctccaaaatcctcttcagtgttatttgttcctatcttagttcataggatcactgctatgtccagttagaaatccatacatcattgttga

SEQ ID NO: 133355 - DNA, 478 bp, Homo sapiens
tacccctgaacctaaaataaaagtttaagaaattactttttcctcttcttcctccttattctatttgtccattcagcagccaaacatcacactattccttccttgaacatcacctgccttctgtctttccaatcctctttcacctcattttagacttccttcttgcagcttcccctaacactcttcttttcctaaagatgtkcttttcccctattttcgtctcacttctacccaattttcactttttatataaatcttttcaacagtgttctataatcagaaaatgtacatatctgaaattttttctgaactctaaaaaggtattttaaactatgtctaaagcctccatagttgactagactggagtcaactaaactcaacatctaaccctccaaaatcctcttcagtgttatttgttcctatcttagttcataggatcactgctatgtccagttagaaatccatacatcattgttga

SEQ ID NO: 133356 - DNA, 619 bp, Homo sapiens
cataaggttcaaagtgtatgattcatttatacgaaatacccagaataggcaaatctacagagacggaaagcattggcagttgccaggactgtggggaggtgggaatgacaagtaataattgcttaaatggtgcagggtttccttttgagatgataaaaataggaaccagatggtggtgtaggttgcacaatattgtgaatgtactaaacgctattgaattgtacactttaaaatggctgaaatggtggatttgatctaaacaaagaaagttattttatcatatgtatgttttgttaatcttaattactcacataataatatgttgtgaacatctttccatgacattaaataatcttatgaaatatttaaaaattttaaattttataatttttttaaagtgaactcatagaagcagagagtacyatggtagttgccacagtatggagggtggtagaaacagaggtctaaagtttcagttttaaagaagaaataagttctggagatctaatgtacagcatcgtgactacatgtaataaactgtattgtatactcaaaataagagagtaagagtagatcttaaatgttctcaccacacacacacacacacacacacacacac

SEQ ID NO: 133357 - DNA, 619 bp, Homo sapiens
cataaggttcaaagtgtatgattcatttatacgaaatacccagaataggcaaatctacagagacggaaagcattggcagttgccaggactgtggggaggtgggaatgacaagtaataattgcttaaatggtgcagggtttccttttgagatgataaaaataggaaccagatggtggtgtaggttgcacaatattgtgaatgtactaaacgctattgaattgtacactttaaaatggctgaaatggtggatttgatctaaacaaagaaagttattttatcatatgtatgttttgttaatcttaattactcacataataatatgttgtgaacatctttccatgacattaaataatcttatgaaatatttaaaaattttaaattttataatttttttaaagtgaactcatagaagcagagagtaccatggtagttgccacagtatggagggtggtagaaacagaggtctaaartttcagttttaaagaagaaataagttctggagatctaatgtacagcatcgtgactacatgtaataaactgtattgtatactcaaaataagagagtaagagtagatcttaaatgttctcaccacacacacacacacacacacacacacac

SEQ ID NO: 133358 - DNA, 219 bp, Homo sapiens
agtccacttttgctttttccctaaaattaatatgttagttttctgtgttgcataacacactaccacacacttagcagcttaaaactaaactcctttaytggctgatagtttttgtaggttaaaagtccaatcacagtttacctgggttctttacttcaggatcacaccagctaaaatccaggtatcatccagggctatggtctcatcagaggctcaaat

SEQ ID NO: 133359 - DNA, 402 bp, Homo sapiens
atctgagaaaggtctcagttaatttagaaagtttattttgccaatgatgatggtgtgacacagcctcaggagatcccaatgacatgtccccaaggtggtcagagcacaatttagttttatacattttggggagacttgagacgtcactcaacatacgtaagatgaacattgtttgggtctggaaagacagggagggggcttcccggtcataggtagataagagacaaatgtttgcattcttttgagtttctaattakcctctcaaaaggaggcaatcagatatgcatttagctcagtgatcagaggggtgactttgaaagaatgggaggcaggtttgccttaagcagttcccagcttgacttttccctttagcttagtaattttgggggctcaagatatttc

SEQ ID NO: 133360 - DNA, 439 bp, Homo sapiens
gaattcttctgtggttaccaaaatatgaaccccccaaatctgagaaaggtctcagttaatttagaaagtttattttgccaatgatgatggtgtgacacagcctcaggagatcccaatgacatgtccccaaggtggtcagagcacaatttagttttatacattttggggagacttgagacgtcactcaacatacgtaagatgaacattgtttgggtctggaaagacagggagggggcttcccggtcataggtagataagagacaaatgtttgcattcttttgagtttctaattatcctctcaaaaggaggcartcagatatgcatttagctcagtgatcagaggggtgactttgaaagaatgggaggcaggtttgccttaagcagttcccagcttgacttttccctttagcttagtaattttgggggctcaagatatttc

SEQ ID NO: 133361 - DNA, 535 bp, Homo sapiens
ttttgtgcttgaaacctagggccttggtggcagaggcactggagggaatctcctggtctgtggattgtgaagaccatgagaaaagcatagtttctgggtggagtgcaccgttcctcatggtacagtccctcggggcttcccttggctaggggagggaattcccccaaccccttgcacttcctgggtgaggcaaygccccattctgctttggctcaccctccgtgggctgcacccactgtccaaccagtcccagtgagatgaaccaggtacctcagttggaaatgcagaaatcacctgcattctgcattgatctcactgggagctgcagactggagctgttcctatttggccatgttgccagcaaattctgagatttttttcaaaagtgcaaagaaagacatctgaggggtgctgacatattcgggtcacctcaagccacatgccagcttgcttgcccctgttggattcagcagagggagataggccttgccatacctgtggtgtctgccaaagcttcctcctggcaattcttggg

SEQ ID NO: 133362 - DNA, 645 bp, Homo sapiens
cagcttgcttgcccctgttggattcagcagagggagataggccttgccatacctgtggtgtctgccaaagcttcctcctggcaattcttgggagtgctgatacctgggccacagttagtccaagtttatcactgaagatcctatcaaagttttgtctgaaattccacttttgccttttgtcctaagtggttgtggacatctccaggggctgataccaaggactaggaacagctgagggaggcagaaaggttcagagtacatctctatttacagggaacagaacaccggcctccgagagtccatggagcaatgggaaaattgcagtgattactcatcactgtgaaacttctactttgaatacagtatcttctggcaagcataggggactgcagtcgacaatgctgctgaatatacctgagtacatagtaagacatttgtttggtaaacagtcaatgcatacaataaattaccttgagagggccatctgtgctccagatgtgagagttcatgtgaatagaatggcygcaattcaaagaatcttcacaggaaaacagggctcagagctcatccacaatggacagacagggagggaaacaggtggaggttagttcaccacttcctcataagaaggtaataaatagtttg

SEQ ID NO: 133363 - DNA, 557 bp, Homo sapiens
tcaactcctgatgaagaagaaacatccgtattaatatatagctaataaaaagataagagatgttgtggaaaacttcatacaagggtgcccactctcagaacttctattcaacatagtactggatgtcctagccagagcaattaggccaaagaaagaaataaaaggcatgaaaattggaaaggaagaagttaaattgtttctgtttgcagttgacatgatcttatatacagaaaacaccaataactctgccaaaaaatttagaattcataaatgaatttagtaaagttgcaggatacwatgtgaacatacaaattcggtagcatttctacacatcaacaacaaactatacaaaaaaagaaatcaagaaaacaatcctatttataatagcaacaaaaaatacttagatgtaaatttaaacaaagaggtgaatgatctttacactgaaaactacaaaacattgatgaaaacaattgaagaagccacaaataaatggaaagatatctcatgttcatggatggaaaaagtaatatgtttgaaatgtccatactatccaaagt

SEQ ID NO: 133364 - DNA, 399 bp, Homo sapiens
agaggcacacatcatatctctaatactgctcaccaccacggcatgagtctctctctatcctcttctacgtgaagtgattatactgtcacctctggagctaactgtcctacagtctcaagatgcacacttttacaaccagaagcctatggactgggtgagggagcagaaacagccacaggtactgcccatcagggtaatgtaagtcagcgtgcaaacaactgatcagatgaacatgaatagcaaggtgcygaggcactgggaagagggaccggaaaactctataactgttgaaaaagactcaagcccttgggaagggaaatgcctacgaaattatataaagaccattttatccaagttggtcatcattcagatgaaaaccatgaggcccagaaaagtaaa

SEQ ID NO: 133365 - DNA, 562 bp, Homo sapiens
gtgccaggctctttttaacaataagttcttgtaggataaaacttactcattaccaggaggacagcaccaagctgtattgaggagtctgctgtcatgactcaaacacctcccactggacaccacctccaatgtttggggtcaaattttaacatgaaatttgaagtggagaaacatccagcctatagcaatgacataataactctcttcataattaagaacactatatttaagattacttggcttacatggaataatccccttataaacaagaggtgcaaatttcaagtcactgacatgcctcctctcctctacaatgttttcaaattcatgccaccttttgagcttctttgagtcgaagagcataatggttttagggctggtggaaccaatggataaatgagagtagatgagctggaagrgtctctggtatggctgctgacttgggcagagcctgggactcttatgctaagtggctgtggtgctgccactgggggagtttctttcatgtagggtggtgacacactttgtgcttggtccacatgaccctggtcgccttcgtctt

SEQ ID NO: 133366 - DNA, 570 bp, Homo sapiens
ggcatgatatatttaaagtactgaaggacaaaaactttaccctagaataatatattggcaaaaatatcctttaagcagtaagaggaaataaagacttcccagacaaacaaaagttgaagaatttcatcaacacacagacctgtcctacaagaaatgctaaaggaagtccttcaatcaaaagaaaaggatgttaatgagcaagaaaaaaaatcatctgaagggacaaaactcactagtaatagtaagcatgcaggaaaaacacagaatagtattacactgtaattgcagtatgtaaatttctcttgacttaagtagaaagactaaaatataagccaatcaaaaacactaaycacaacttttcaagacagagagagtacaatcagacaaagaaataacaaaaaattaaaaagtgggagatgacgctgaaatgtagagtttttattagtttctttttgtagagtttttattagttttttaaggtgtcttcagtttaaaataattggttatgagatagcatttccacccctcatagtaacctcaaataaaaaaacacacaacagatacacaaaa

SEQ ID NO: 133367 - DNA, 606 bp, Homo sapiens
cctcagctgagggttctcatagaagcaacatagctggccatgggcttagccctcagatgtgtatatatatattactatttcctattatactgttgttcagatttagtacttgtaaatagacacagtaaggagaaattacacattttttttcttaaaaaggtgtttttttctaattctgtgaaaaatgatgttgtaatttgataaaagtagtgttgaatctgtacattgctttgggcagtatggccattttaacaatattgactctctgttccatgagcatgggatgttttttcatttgtttgcattattaatgatttctttcagcagtgtttttgagataccatctcatgcctgtcagaatggctattattaaaaaaagacaaaaaataatagatgttggtgagattttggagaaaagggaatgcttccgcattgttggtgagagtataaattagttcagccactgtggaaagcagtttggagatttctcatagaacttaaaacagaactactatttaacccagcaatcccattactgggtatatatccaaatgaaaatamatcattctaccaaaaagacacaggcactcgtatattcatcagaac

SEQ ID NO: 133368 - DNA, 532 bp, Homo sapiens
ccccatggcttggcaatcttccacctttacttatctatgagaaacgccagatactttaaattcaggtatatgagaaactatgtcaggtctattagaaactacatgaacagagggaaggaatagtacatttcttaagaatgttgtgtctcctggattattttagtatttttttaaattctgattttacaacaaattagtcatggttaggaattaaagttgggtaaacccagaaaagtaagtatttacttaactcttattagctgtaaggatktttgctggatcctaaggaaggggataaatgtaatgagaataaggatgtgtctattaagttgatgcataaattcacatctgtatatggcaaaataaattttattaccataaatataacacgtatgtaacgcttaaaaacaatgttggcatttatgaaatgttactttaaacattttctgaagtgtttcccatggaatgctaattctggaaatgccttgtttttaattatattattggctgaatgttttaagaaaaaaggacc

SEQ ID NO: 133369 - DNA, 419 bp, Homo sapiens
ttttagctcattttgctagtgtttttttggtctatcaaacaattaaggttgagcattccttttctgttttttaaatgagaattatttccttctgtctattgttttyctttaatagttacagatatattcagactttctttttattttagagtgagtaatcataaaagtgaataaaatatttctacaaaaactgtatgtctttaaaatttttggcaaaaagtagtttttagaaattaacaaaattcctcccctcatttagggtcccttttattcctaatgttaaactttgctctttttctcttttgtaaatatttttgcagaagattttctatttcttagtcttttgaaaaaaaaaatttagtttagttgattgtctccaatgtttgttttctatttaattcaattttatctttattatt

SEQ ID NO: 133370 - DNA, 566 bp, Homo sapiens
tttctgtggttctaaacatgtgagccatatatagcaactagaacagataggtttctatattccacacattgtatgaatgcacatacactcgtgcacaaacacatacattttttttatctggttcagaaatttattccccrtatgctccattctttgacttcctaatggttcattttatgatatgatattgtttcacacatgaatgaattgaaagacataagaagcaatctgtctgctgtgaattcactcctaaagcccttctcatttcttaatgtccatgcatttgagcctctacaaccaagtgccaaaaagaattcttttctttgctttgtatttttactgggtctgcatttctacttatcccaccctcaaagaaaacatttggatttcattcagagttctgaaagaatatttgaatcgtagatttcctttgaacacttgtggcaaaaatgaaatagtactcattccctaatgctcccattacagaacatttgtgaaaaattaattagaaaaaaattaatattgtatatgctccgcttgtagacccagattctttttgcaattga

SEQ ID NO: 133371 - DNA, 571 bp, Homo sapiens
gaggagggaatacagaaagctccttttgcmttatcattatgtataacaatgggctcaaaggtgttaaaaattataatactaaaaggagaaaaaaagaagtgctttcagaaagtttaaacacgaagcaaggaagtataagaaatatggattaaacatagatctgaacaactcctcaaattttatcttttcaacaataccaacttagtacaatcagggcagaaaaaatcctaacaactagaagagcatgaaactgcacttcttagagttattatacaattaacatcttttcatatgtagtttctatatagaaagaaatgtaataggaaaattattttaaagtttcttccaagtgattaaaaatatcaagtacattaggaatcatcttaatttatttttgttttcattccagaatttctcagcaaactttgttcatattaagcctaaggtaaattgtagaacaatcactatcaacattatccaactctcttaatagatggagagcaaagtattaaagttatatgtgttataggccaaattaagagcatcattcttctacaatggctatagggtg

SEQ ID NO: 133372 - DNA, 601 bp, Homo sapiens
ctattatgtcattgcttttgttttgctttattttgcttctatatttgctcatataaatatgagtctaaagtgccagaaatggaacaggcacacagtgattgatcactatattcatttattacacatgttagagggtcaagcatcaccattaaagaaacatctaactgattttctatgagtcaaacaaaattatcattctaatgaataatatatgtattttgcaatattttagttaagccacacttacaaatttacatccataggtaaatttcaggtactcgatctatgggatggttcaagatgcccaacaccttactcagtgagttgttctgagatcaatgaagagtggattcatggagcctctgtcattcacccaaggtgtctacttctccaatattctatgaaagatcctctggtacactatactatttccttccagtgcctgcctttgaggaagatctatcccagatatctaagagyaacctcaaattcatgtgctagaggaaaccagcccattaagtgccaaacacagttgaacaatatgggtagtaaaatcataactctttaaatggttacttactgttacaagcaagtcaaatag

SEQ ID NO: 133373 - DNA, 669 bp, Homo sapiens
aagcgattctcctgcctcagcctcccgggtggctgggattacatgcccgtgccaccatgccaggctaatttttgtatttttagtggagacggggttttgccatgttggccaggctggtctggaactcctgacctcaggagatgcacccgccttggcctcccaaagtgctgggattacatgagtgagccactgtgcctggccattttcatttactttgtattaaatatcgactgaaataataaagttgtgtgatagacaacacaaaatctcagtagaataataagcagttatgctcagatatcagggatggtcctgtaggcagcttctctgtttctcacttggtgtactcagatatctggagtttggctagctgtcagctgattagaatggccttgattagaatggttggagtgactcacctctgtgtgtctctcttcctcctcctggggccactggcttagcccaggtatgtccttcacatggcaataragagggaaagagtgaagaagcccaagagcccttctaaccctccttttgtgtgatgcctgttaagattcacttggcccaaagcaaacatggctgaactcagactcagaaaggaaaggcactacaaagtagatggcaaaggggatagaaccacgaagtgttgaagaattgggaccattatta

SEQ ID NO: 133374 - DNA, 558 bp, Homo sapiens
gcttggtttggtggctaatgcctgaagtcccagcacttttagagatcaagacaagaggattacttgaagccagtagcttgagatgagtcttggcaacatcaggagaccatatctttacaatttttttttaattagtgaggtttgatggcttgtacctgtagccctagctacatggagacagaggcaggaggataatttgagtctaggagttcaaggttacagtgagctaggatggcaccactgcactctagcctgagtaatagagtaagactctgtctctaatttaaaaaaagaaaaaaaggaatttatgaagtcctggaaaaagaatttgaaatattaaagaagttcagtgagatacaggataatactgctaaataatacaaagaaatcataaatataatttagaatatgaatgagaaatttactgagagagatatcattaaaaagagaataaaaattctggaattaaataatattttgaataaaatataaaatacacttgaaagtttcratactaaattaaatcaagcagaagaaaaaacctcagaacttgaagac

SEQ ID NO: 133375 - DNA, 541 bp, Homo sapiens
gttacccacttatataagatatttatgaaaaatgagtaatgcttataaacctacttaatatggtgtctggtacctagaatgctctgtcactrttagctctgattgttatctaaggaacagtgaatggtctataacaggtgtagtgatagcaggtatggtagactctgtaagcttgaaaagaaactcgcaagaggcaataatgcccagttgatcttctagtactttcattttaacagacaacaatgacacagatgtgcacatgtagttttctttagattttctcttattcttgtagcttcattttctgaaaactttactacatcatatggagtttttaatccaaatgctcctattaacattttatagtgatagaaggaattccactgtattctatgaaaagtaagagttacacccgaagagctgaaagctttaactggcattgattctcaggttggctctgttcctatgtttgggcagacattaatttaatcagagctagaatctgcctgcagcaaagactcagcagcttgggaaattgagc

SEQ ID NO: 133376 - DNA, 541 bp, Homo sapiens
gttacccacttatataagatatttatgaaaaatgagtaatgcttataaacctacttaatatggtgtctggtacctagaatgctctgtcactgttagctctgattgttatytaaggaacagtgaatggtctataacaggtgtagtgatagcaggtatggtagactctgtaagcttgaaaagaaactcgcaagaggcaataatgcccagttgatcttctagtactttcattttaacagacaacaatgacacagatgtgcacatgtagttttctttagattttctcttattcttgtagcttcattttctgaaaactttactacatcatatggagtttttaatccaaatgctcctattaacattttatagtgatagaaggaattccactgtattctatgaaaagtaagagttacacccgaagagctgaaagctttaactggcattgattctcaggttggctctgttcctatgtttgggcagacattaatttaatcagagctagaatctgcctgcagcaaagactcagcagcttgggaaattgagc

SEQ ID NO: 133377 - DNA, 505 bp, Homo sapiens
gctacactttcaagaacataaaatccagatgagttgcagacaggccacagtttaagaaaaatgtcagtagaggcatgagctcacatctgatcacaaccattcttctactatgcttgagcagctcgtggaataaatgtcctgacaagtatgtgtgcagctatggtggactgggacagaagaactggagccttcatgtattttgatcccatgtcaggtatatttgtccttcttcagcaatttgaaaagcctctttgaggagttagttgcaatggtgcatttgaaatgcaggcactcctctaaagcaggtgtctcaaaaactgacttggagtcaacttaaatcccactctggaaatcaggctggaaacatcatgaggatggaagcctgtcacagcctaggcttgaacttccaaattagctcacatcttcgacagatgtgccaaagagaatactagctgatccacccyttaagggagaaattaaaactcagtgttttgcagtggttgct

SEQ ID NO: 133378 - DNA, 520 bp, Homo sapiens
aaaagaaagaaagacagaaaagaaggaaaaaagaagaatgatgaaaagaaggaaagaaggaaggaaaaatattaaattggaaaaagtttgtgaaaagtttatgacrttatttggtatgtaattaaggctgaacaaatgatagttgtaacaattatgactgtttttgttcttgatgtgagcattgtgtaggtttgttcctcaaaagataggaacataaatcttaagatctggcttgagcatcattgtttctactaaattcctaggaacagttaatgtcatgtttagcatttagctgttacccagtaaccaatggaataatcagcaatgtcatgaacaacaccatcaggaccacatgtgggagcttatagcctgaaatataaggaagaaaattaagttttagaacacagaatttgtgaatataagggtataaagtttgactttgaaaatttcaaaatgcatttgtttcctttaagcatttcatggtttgtgtattaaaaatatatgttaagattattgtggt

SEQ ID NO: 133379 - DNA, 553 bp, Homo sapiens
actcatttgtatatggatatatttgctcataattaaaaatgttaagcatcttaaccaatattaagatgaattcaaatagtcgctgcaacatgtaagacagragcatccatattaaggcagaatttaacacagggttatcagagtgaggaagagggtcattttggacatttagaaggatacgccacctgggtaaaattttgagttaatatgttaattgaagataataaggaagaacaaataaccaggttgagggagtggcataaacaaaggcacaagttatgtaatgaatcctcacctgaaaatgcgagaaatggaagatgtgggaacaattcctcctacctaatatcatgggggttggaacactttaacaccatttctacagtctattattttaagtaattatctttgtttctttgcttagtcaattaatttccagtttgttattactcttttatatatttaacgtttgcttacatttactagcatttatttcttcttgtgtctcagacctcttatctggagcctttttttctgcttgaagaactagtttcct

SEQ ID NO: 133380 - DNA, 407 bp, Homo sapiens
gttatattgtacctggtgtcataatttggctcaaaagctaaaaactggccaaatttgttagacattttatataaaattgactaatgtctgaaaaaatcataaattagagtgacacctctcaaaargtatttaaatcccaccacaataaaagtatgccttaagttcaatagcaaatttgatattaatacaaccttgtcaactattcagtaaggaggactttttgtcagagaaggttgttaaaatgcctggaaatgattgtacagcaaagtagaggctttcctagtgctacaatcattagaaaagactttagaaattgctcagtttttagtgatgaaacagttcagaaaaaggaagtctagggccttgcatttgatattggcagtttatttgcagactagaatccagcc

SEQ ID NO: 133381 - DNA, 502 bp, Homo sapiens
cgagaacaaaataaaaaggaaataggcaacttctagatatagtgttttctctgactttgaatattttaaaacagatacttgggcattaattgcaaaatattcaattatcacaaagcaagataggttaggtgagatgggaataagtgattgctctctgccatgtgacttctttggagaattggcctttcctcaattatttgatcctggccatgtgaccaattcagtagtctgctttaccccaacagatataggatgctatttagggagtccaacagactaacccaatcttctagcacagtgatttgtataagcaagacatgtgaccaaaaaagcaccaaygagagactgcttgatatttgaataaacagatattccatactaggttgaaagttgttaccaatatacttcgtcagtaggcgtctttccacttttctgaagaatgcttctcttcggagagaagccaactgagagaaggaaatgaagatgatagttgaagagagaa

SEQ ID NO: 133382 - DNA, 408 bp, Homo sapiens
atggtaataatcatagttgccggaaggtttttctccaccatgcatataagagacatgaacacccataaataaagacccatatgatcagatcttcttcaaacaggtcactaattagcttctataattaatacctcactataggaggaagagccaggtaattatctggtatattctgaaggtgagccaccccattttaagtagccatcatcctagaaatacagctgtagaataacaacttcttctgcatgtttaaaggagtcataaacctctctagcagtcctamctacagctgtataaagcacctcttcctgtctgtattagcagaaaattatagcataaaagatttatctttttgcccatggtgccaatagcttattttattttttaagacaaccatatttcttgatg

SEQ ID NO: 133383 - DNA, 408 bp, Homo sapiens
atggtaataatcatagttgccggaaggtttttctccaccatgcatataagagacatgaacacccataaataaagacccatatgatcagatcttcttcaaacaggtcactaattagcttctataattaatacctcactataggaggaagagccaggtaattatctggtatattctgaaggtgagccaccccattttaagtagccatcatcctagaaatacagctgtagaataacaacttcttctgcatgtttaaaggagtcataaacctctctagcagtcctacctacagctgtataaagcacctcttcctgtctgtatyagcagaaaattatagcataaaagatttatctttttgcccatggtgccaatagcttattttattttttaagacaaccatatttcttgatg

SEQ ID NO: 133384 - DNA, 397 bp, Homo sapiens
agccaactaccctcagttctctctgcatccattcttgctttcctttgattttgtattaagcaccaccctgattggctgtctgtccacttgtcttctgtcagtgctgtattttatggaacatcttcagaactctgtgtggatcaagacctctcacctgctactcccacactgtcagtttttaagtcattttgaacccctgggttccagaaggcttctattgatttgtggcccccacatcctcattgctatgattaatgagtaaaattttaggatagcgtcttttactcagtgctggcctgcttagaagataacygctatgacacactgacacagattgtctgattgtcttgaccctgattgtctgtcatgagaatattatgacttcggtgaatagtgt

SEQ ID NO: 133385 - DNA, 564 bp, Homo sapiens
taggtgtggtcctattactattggtcgccataggttctatcagtaggatataaataacggcagtatgtgcaaattctaagaattgtcctgaaagcgaagaaatgagttcattcctcctatctktctgatggctggaatgtgactgcaatagctggtgttccagaagccatttgaaccatgaggtaacttgactaacccagtaatcacttctggttcctgtctatcatagcacctgtgacatgtggtgttatgtatttattggtatggcttggaacttgcctttggagaagagagagacaccctacaaggatttatcccccatatgcttgttacccttcaaagcaagtccacggtgccactattttacaacttacagttgattttggctcattcagacttgccaggagagtgctccatgattatataccctgtgcagtactcttgatgtcacagaacaggagaaaactcacaacactcaataaaggctgaatatttgcaactctatcttgcttgatctctttccaaaagcaccaaataaagtacagtttgccatgcatgcccctg

SEQ ID NO: 133386 - DNA, 454 bp, Homo sapiens
gtaaatgacggaactgaaagaagaaatagacatatccacaattatatttggacactttaacaaccttctctggacaattgatagaacaattagaaaaccagtaagtatacagaactcaacaataccaccaatttacaggatctaatagacayctatagaacatgccacccaacaacagcagaatacacatgtttcaaaggcccatggaacatacaccatgatacactatatcatagaccataaaacataaatctcaacaaatttaaaagaattgaaatcatagagcgtgttcttcaaccacagtggaatcaaactagaaatcaataacagaaagataacgaaaagtcaccaaaaacatagaaactaaacaacacaattctaaatccatgagtcaaaaacaaagtctcaggataaatttacaaatacattgaaatgactgaaaatgacaatacac

SEQ ID NO: 133387 - DNA, 391 bp, Homo sapiens
tatagtgtacaatttggaaaatgttggtatatgtgtacagcctttgaatcagcacttcaatcatgctattagcaattaaattaacctctaattttttctctcacttcyctgtaattttatttcaccatcttgttactctcaccacacttttctcagaaaaattcagatcttctccatgttaatttagaatagttgcattttctacaatttatacaaatgaaatcacaggagatttactgtgaattctttagcttcctacactcagcacaattatttgataatgtcctcacattctaatgtgactgaggcatgccttgatttcaattgttcattgtatttcagtatatgaatatttctcaaattgtttaacaatgcaccaaatagtggatat

SEQ ID NO: 133388 - DNA, 496 bp, Homo sapiens
ggccctgcctctgccctggactggcgctggcactggcatggaccctggccctggcccttygctacttaaggccataccctggcccagccctggtcctgaccctgtcctggccctactttggcctggctctaccccggcatgctattctggccctagccctgaccctgtccctgtccctgtcctggccctagccccattgctggtcctgccattgcccttgtcctgatattgccctttcctggtcctggccctggccttgtcccagccctgctctggccctggtctgaaccctggccctgcaatggacctgccttggtcctgcccagaccctggctctggccctacctctaccctggccatacccttgccctggcctggaccccggtcctggtccttgtcctgccccagccatggccctggccctgccctgcctgtgccctgttctatcctgggctggccctgccatggcctggtcttgccattgccctgccctagc

SEQ ID NO: 133389 - DNA, 496 bp, Homo sapiens
ggccctgcctctgccctggactggcgctggcactggcatggaccctggccctggccctttgctacttaaggccataccctggcccagccctggtcctgaccctgtcctggccctactttggcctggctctacccyggcatgctattctggccctagccctgaccctgtccctgtccctgtcctggccctagccccattgctggtcctgccattgcccttgtcctgatattgccctttcctggtcctggccctggccttgtcccagccctgctctggccctggtctgaaccctggccctgcaatggacctgccttggtcctgcccagaccctggctctggccctacctctaccctggccatacccttgccctggcctggaccccggtcctggtccttgtcctgccccagccatggccctggccctgccctgcctgtgccctgttctatcctgggctggccctgccatggcctggtcttgccattgccctgccctagc

SEQ ID NO: 133390 - DNA, 636 bp, Homo sapiens
ttgtctttctaggaagtctatggtagtgtctccttttggtcttgatttgcagttctctagtggaaaatcacattcatatgctggtgtgtcatctgtacatcttcgaggtttgccagttcatattataattacattggtagatatatgacttgcaaatattttctcctttgcagcttgtccttaattttcttgatagtcacttgagtagaaaatgttttaaaatttgaagttcaactaacgttattttcatttattggtcacaattttaattttcagtattgttgatcaactgttaataatcatrttttaattatatttgtttttattttatatgtataaatttgtggggagtgactgcaattttgttacatatatatattgcatagtagtcttggctttaatgtatccatgatccaaataatgtacattgtacccattaagtaatttctcaccattctcccaccttctgctctcccatctttctgagtctccagtgtccatcattcctttctctatgtccctgtgcacatatgagttagctctcatttataagtgagaacatgtggtgtgtgatgttctgtttctcaattattatacttaaaataatgatgaattccatccatgtagctgcaaaag

SEQ ID NO: 133391 - DNA, 589 bp, Homo sapiens
tgactgtgaggcctctctagccttgtggaactgtggatcaaacctcttcttcttcttttatgataaattgcctaatatcgggtatgtctttattagcagcatgaaaaccaactaatacaattctggatattagggcattgttggatgcaacatttgtgaataacttcccacaatctgtaggttgtctgctcactatgctgatagttttgtttgtttgtttgtttggttggttggttagctggttggtttgctgcatagtaactctttagcaaattagtctctccttatctatttttgtttttgttgcaattgcttttggatacttagccaaaaagtatttgtcaaagctggtgttgagaagagtattttcatgttgtcttcaaggatttttatagtttgatgtcttacatttaaatcttttatcaattttgagttaattttwatatatgttgaaagcagacatccagtttgaatctttgtcatatggctagctagttgtcccagtaccatttatggaacagggaattcctttctcatttcttgcttttttgtcagccttatcaaatatcatatggttgtaggtgtgcag

SEQ ID NO: 133392 - DNA, 443 bp, Homo sapiens
actgtgctataaaatcctgcccccactttattttaattcagatataatgaacatcaactatatgctaggcactaaagatccagttataaaccagacattctggagatgcatacaacacagtcctgaagaccagcagaggagaaagtaggatgttataacccacagtgaaaagtgctttggtggggaaagtcccctatgagaaggaagtaaaagaagagaacctaytccagactaaatggagtataagcatagattctaaactgtagtgatgttgggcacagtggcttatgcctgtaatccaagcacttcagaagatggaagcgggagagtttcttgggcccagtagtttgagaccaacctgggcaacataggaagactccatctctacaaataataaaaaaataattagcagagtgtggtggtgcacacctgtggtcccagct

SEQ ID NO: 133393 - DNA, 537 bp, Homo sapiens
tatgataagtaataaagcaactatatctcagtaattctggttataaagtcaaactgattttatagcagtcctatcacaaaactatatgggttattgttgaaagccgtttaaagtatgatctttgggtttatgccacaccccacgcacacaagttggttttattcaaaagacacaattgggtggttcctgtaataatwgggatcataattttcagtgactaccaaagctctgttccttggtatttaaacccaagttctaaagaatttgtgacattatatttcaggctctcctcttatgactggaggtagagtgttttaagaggcttattaaaggtttgaaaatacaagtcatgttagcatggagtaacaaagctatttaaaataactaagggttgtcacccacagagattgaaacaggtcaaaaggtccagaataactactgagttcatttatatgcaaatactttctcagacgtgtgagtcttcagctctgatatttagcaaggccagctggaggagattctagtgcaaggggttat

SEQ ID NO: 133394 - DNA, 537 bp, Homo sapiens
tatgataagtaataaagcaactatatctcagtaattctggttataaagtcaaactgattttatagcagtcctatcacaaaactatatgggttattgttgaaagccgtttaaagtatgatctttgggtttatgccacaccccacgcacacaagttggttttattcaaaagacacaattgggtggttcctgtaataatagggatcataattttcagtgactaccaaagctctgttccttggtatttaaacccaagttctaaagaatttgtgacattatatttcaggctctcctcttatgactggaggtagagtgttttaagaggcttaytaaaggtttgaaaatacaagtcatgttagcatggagtaacaaagctatttaaaataactaagggttgtcacccacagagattgaaacaggtcaaaaggtccagaataactactgagttcatttatatgcaaatactttctcagacgtgtgagtcttcagctctgatatttagcaaggccagctggaggagattctagtgcaaggggttat

SEQ ID NO: 133395 - DNA, 501 bp, Homo sapiens
tttaccttgctaatgaaaatatcaaaaataatcaagtccccgttccttcatactatacttgtgaaaacttacrccaaggtaaggaaggttaccaggtgaaattacacagcaaactcccaatagagtcaaggaatatacaagttgaaagccacatttggattgattatttgggtcttatttttattctgaaatcaaagcgagtaaatagagtttgatctaaatagaatttgaaggatttagttatcttagtggtggcagtgtgtgtttattccacaatacagagtaggcagaggtgatatttaacaattagaaaacactaaggtataatcatgctttgctcttggtgttagtctgctgaataccactcctccccctttctttgatctcatccttgcaatttgaaagccagaggaatgataaatggccatgaaatacagacaaagattccttttgtttgtcccacagaataggaagatggtcaaattgatcagtcatcaagct

SEQ ID NO: 133396 - DNA, 501 bp, Homo sapiens
tttaccttgctaatgaaaatatcaaaaataatcaagtccccgttccttcatactatacttgtgaaaacttacaccaaggtaaggaaggttaccaggtgaaattacacagcaaactcccaatagagtcaaggaatatacaagttgaaagccacatttggattgattatttgggtcttatttttattctgaaatcaaagcgagtaaatagagtttgatctaaatagaatttgaaggatttagttatcttagtggtggcagtgtgtgtttattccacaatacagagtargcagaggtgatatttaacaattagaaaacactaaggtataatcatgctttgctcttggtgttagtctgctgaataccactcctccccctttctttgatctcatccttgcaatttgaaagccagaggaatgataaatggccatgaaatacagacaaagattccttttgtttgtcccacagaataggaagatggtcaaattgatcagtcatcaagct

SEQ ID NO: 133397 - DNA, 430 bp, Homo sapiens
tcacaggcagcaactttaaatgacagctcatctcatttccactgaggttcacaaggcctgcccaggaggccagagttcaatctgaattcatcttgcttctagcatagacaacagtgcatttcccccacatagctcctttagccaccacgcagtgtttctcctggatcatgctgaagagaccattgccagttctcatttggtctacaaaygtcacctttcactaagaacacttttgagatcatttggaagactgaacaggaggacgtgcatggaaacataggatgattgaaaatgaatcaaaagctgatggttgcaagatattctttatcagtgaaaaacagatttctgataagtaataccttcttccaaatacttttttactttaaacaaataggtaagctggatcacttaatggtacttgaagcaatca

SEQ ID NO: 133398 - DNA, 580 bp, Homo sapiens
caacagtttattgtagaaagaggttatagttttatatcagatgagaatcgctttctagctaactaatttcttattacccagaattgagtaaagtgcacttccttagagcaaacctggtcaaaagaattaaatttctaaaaatagtacaaattaataattatttgagarcagaccagaaatctgtgtttgaataagttctccaagtgattctgatgcctgcaaaagttgtaaaaccaaccatacaaccagtttaggcagtgtgtatctttcctgggtcgactcattacttatgatctaaataaaccagaaatgctgcaacaagaaataaattgaatgtgttagtgtagggggtggctactgcaaaaccaattccaaaatactctcaggaatgcacctaaactctaaggttgtattgtctctcatttattataggattaattttgcctatatgtctctcacattaaaagaacaaatcgaaatagtacaatggaagaatacttaatattaacattcaatgatgaaacaggaaacaacaaacaaacaagcaaagaacaaacatgattttctcctggagtggggt

SEQ ID NO: 133399 - DNA, 589 bp, Homo sapiens
cctcttcagcttttaatcaaacaatttaaattaagtaatcttcgggtaacatttcttgaacactttctatcttctaggcactattaaagtactttagatgtattaattcatatgatattccccatattttcaaaaggtagatactagttatattcctttttataaaaaataaaaataaaacaaagaaaattttactggaagcagctcacttttgtcacttggatggcccttcagaaaagtcccaaactgagccaggaaggtaggtcttgaacccctgcactcagttaaattgagttccttcccataaaagtgaactcttaggaatgaatcactttattctgttaagagcaattacaggggaaatcctcgcccatcagcagtcagcagacacttttaactactaggagaactggtgcctttctcttggaggtggatttcagtcatgcactaaaacatccactactcagacsaaaggataaaccctagatgtataatgaagccacggatatatgactatataaactaatgaataaagagatgcttggaatgtatctgtctgatttatcatctggaaagaagagttacttag

SEQ ID NO: 133400 - DNA, 624 bp, Homo sapiens
tggatttcagtcatgcactaaaacatccactactcagacgaaaggataaaccctagatgtataatgaagccacggatatatgactatataaactaatgaataaagagatgcttggaatgtatctgtctgatttatcatctggaaagaagagttacttagtcctcctaggttagaatcatatttagcatattcagatttttgtcttccatttagaaaaggaagcacaatctgaattatcgttaataaacattcacgcattccaaataatgactttgcaacatgagagccacctagtgaaacaggaagtagtatgtatttagtgcagatgattggctgtctgagacaaatagaagaaagtggattgtctcaaaatatcaccacaaagagtaatagctctagaaatcatactgaggttagattgcaacaaatcagaacaatagaggaagaaggaaattgtcatatcatcagctctgtgctatgtcttttacatrtattatcacacttattccttaaaactacctgcatatcaaaatgccataagaagttgagaaaataaaggttcagaaaggtaaagtaagttgtccaatgtgatacagctaagtaatgaatcttgtggttaaacac

SEQ ID NO: 133401 - DNA, 559 bp, Homo sapiens
tgggatttgggaccaaagctttcacacatccgtccttcaatcctaccatctatccacccatttactcatttattcctttaatatttatgagcaattaatagattctgtctacaagtagatgattgcacttccctgctttggtccctacatgcgtatacctccttcacaatacattgctacgtcttttgaccatattctgaccacatattctagcatgatggcaaatgtgctagaaataagacatttatctaaacttcaaatttgcttttctttggtacattttcttctaactccttttttatrcattttacttcattcattttctctttagacactttatctaattcttaatactctagaatgatccattgaagtgagctgcaagggtaattttttgttgtttctgactatcctttggtttattatacacaagtctctaggtaacctccatttttctcttattaaatgtatccatggagggtgtctttgttaaagatgggctattcctcacctattcaaattagggagccaaacagagagacgaacatacattgaattt

SEQ ID NO: 133402 - DNA, 576 bp, Homo sapiens
ttttactgtgttcacagtgattttcttttgcgcatgtaatgaatccttatttgtttaatgacagtgattaggtttcttaaattaccagaaatcaaatccatttccctcagcactgggcatatacatgagaattttcagttgtatattctccaggctcctttttataatggcactaaataygtataaacaagcatctgttgccgtaatttaaatgttttcttcatatgcactgcatgtatattaaacagagaatgtgttgtataacatattagttatgttcatagattagtatctttatttgtgaatagctagcttgtaaatatctccaataaatgtagcaaagtatatctttccgactcaaatagtcacatcttccatatgacggtatgttttatatttattattcaagatcacgtttcaaagtacttagaatctacagctataagaggtcacacctctccttgctttaggtgattttcaacaaaataactaccttttcttaaactatccagagattcaaatataattttgacacttgctgccttgaaataatggtgctaattaaaattaaaattg

SEQ ID NO: 133403 - DNA, 547 bp, Homo sapiens
ttaccagaaatcaaatccatttccctcagcactgggcatatacatgagaattttcagttgtatattctccaggctcctttttataatggcactaaatatgtataaacaagcatctgttgccgtaatttaaatgttttcttcatatgcactgcatgtatattaaacagagaatgtgttgtwtaacatattagttatgttcatagattagtatctttatttgtgaatagctagcttgtaaatatctccaataaatgtagcaaagtatatctttccgactcaaatagtcacatcttccatatgacggtatgttttatatttattattcaagatcacgtttcaaagtacttagaatctacagctataagaggtcacacctctccttgctttaggtgattttcaacaaaataactaccttttcttaaactatccagagattcaaatataattttgacacttgctgccttgaaataatggtgctaattaaaattaaaattggaatagaaatttaaaattaaaatgacaaaaaagaagaccctgcagttgacaa

SEQ ID NO: 133404 - DNA, 578 bp, Homo sapiens
ggaataaacaatagtgaggagtttacttggctctgagactatgacaatgccaatagcatcatagatggggaaacaaaaaataatgcataagttgaggacgtgtgttttactcttcaagaattttatgtgtgtatgtgtcctatggtcaggcacaatactagacaccaagggataataatacagcccttgtcctcaagatttttatattatagtatttatattataagaaggtggtgtgacatgacaaaagagaaaaaacataaatatgcatgaaaactaagatgatggtaaatagtataaacatttaacaatctaatattctgaatgactggaatttgaggagctgccaagcaggggccagagtatatacayagggtacccatatatactattattcttttgatattatgtcatgaaactaacactttgaggttgcacttaagtcacatgaatggaggttgaatccatggggcctgagaaatttctaaacaactgagcatgaagaaagaaaaaggtcctgggcagacaactacaatggtgggaaagaatgatcctagaaaatcagggaagaatattcc

SEQ ID NO: 133405 - DNA, 643 bp, Homo sapiens
ctattcaaagtgctgaaagaaaacacaaacaaatattaaaaatcaaaagaaatctgctaagaatacttaacctagaaaagctgtcctttagaagtgcaggagagataaagtctttcccagaaaagcaaaggctgacaaacttcatcaccactaggcctgccttagagaaaatgctaatggaagttcttcaagctgaaattaaaggctactgattagtaacataaaaacatatgaaagtataaaactcactggtaaagttaaactcattatcaaattcagaaaactctaatgcttcaatattggtgctaaatcatttaatatctagtataatggttaatttaatgcaattcctatcaaaatttcaatgacatttttaatctaaattgaaaaaaaattactaaaattcttctggaactacaaaagaccctgtatagccaaactaatctggagcaaagagaacaagcctggagacrtcatgctttctaatatcaaattatattagctagtgatagtaatgaaaacagtatggtaatggcataaaacagaccaataaaacaccatatagatcccaaaaataaacccacatatataaagccaagtatatttccaccaaagtgcccagaatacacaacggagaaaggct

SEQ ID NO: 133406 - DNA, 528 bp, Homo sapiens
aatagtagtcttgatttcctggtcttgaagcctaattctaatttactctccygtgttctcccaaatctacagtttaccattccattgacgtcccacctgccttttctaatcacaagccagtagtttgatgacagaaagagctagtgaccttctctgatataggtcccttagaaaattctcttctggggttagtgcaagtgacaagacaaaattcacagccattgctactaatgacatctagcagcagcattaaaaaaggaaacctcttcgcacagctaacaaaggtcatccagaaaacaccagtgctagcttgcagtgaacaccagagtcgctgcccatcataaacccaattactcactcctgctgtgtctcggggtatctgtaactactcaccagcaaccatccttggactgtggccaccaatcgtgccattgtactaaagtcaggagagagatttctttctgtgcattgacctaaaaggaaaaaaataaatttaaaaaaatactgaacctcccttctgcaataaaa

SEQ ID NO: 133407 - DNA, 528 bp, Homo sapiens
aatagtagtcttgatttcctggtcttgaagcctaattctaatttactctcctgtgttctcccaaatctacagtttaccattccattgacgtcccacctgccttttctaatcacaagccagtagtttgatgacagaaagagctagtgaccttctctgatataggtcccttagaaaattctcttctggggttagtgcaagtgacaagacaaaattcacagccattgctactaatgacatctagcagcagcattaaaaaaggaaacctcttsgcacagctaacaaaggtcatccagaaaacaccagtgctagcttgcagtgaacaccagagtcgctgcccatcataaacccaattactcactcctgctgtgtctcggggtatctgtaactactcaccagcaaccatccttggactgtggccaccaatcgtgccattgtactaaagtcaggagagagatttctttctgtgcattgacctaaaaggaaaaaaataaatttaaaaaaatactgaacctcccttctgcaataaaa

SEQ ID NO: 133408 - DNA, 402 bp, Homo sapiens
agggtgaggatgttttacagacattcattattaaacaatgatccacactgtgccaaagcagtcttactttttttttttttttttatgtrgggtaaaagggcatgttttattgcccctaaaatttctctctggcctaaagatgttgaacagatgcagagcagagggagtctcccttgagtgggcttcttcagcaagtggtgtggaaaatgagtgagctttcaagtgaaactggtaatttgaaagaatgtcggatgtctcttaatctgcttcctaaaattttaagtaaaataagcatcactcttcttatggggctgctttgaagaataatatggatgacatctgtgaaatacctttaaagcatggtttgcaatggaatcaaaactttgccaactagtggcaagc

SEQ ID NO: 133409 - DNA, 421 bp, Homo sapiens
aataggacattacttctctactaatctgtgtaaaaacaaaacatgcatagctagatacctacaagaatatttgctctaccataatataaaaataaatttagactggtacatttttctctaactggagaaattccagatatccatacaaatttctggaatctctgcatagtcacaagtccaaactgagcaacattaaggaatatttttcatgattttcaatttttatgtaaagatggaaacatttactctctgattacttgatgaaaatttcaaacctattcgagaggtattgsaattaggtggttatgaaatccctggtataatttgccatgagttcagtaagttaggaacatctaccttacagttgaggtacataaagatctgaatgaaggaacgttagcagagaagacagcagaagaca

SEQ ID NO: 133410 - DNA, 657 bp, Homo sapiens
tttcttctttaaactgcaacataacttcattgcaatgctggttttgtaaatgcaatcacacttgaatgtggtttgaattttaaggagtgtgtcacctggcctggtggtataaattcttcagggaatacaagatgagaatcttgatgcaaatttacaaaacctgaaaacttttaagagataatggagaaaccaaaagggaaygaaaatcagaatagtccatgactctgtccatttcaaatgtacgcttaattctcattccttattcttgtgtagatggtctcagattgtcaaagaacaagaatctactaggtgatggatagtgtacacacacacacacagacagacacatacacacacacacaaacacaaacacacacacacctgctcctcaacttactatggggctatggcctgataaatttatcataagttgaaaatatcttaagtttaaaatgcatttaatacatccaaccaaacaaacatcatagcttaacctatcctaccttaaacgtgcttggaatactcatgttaacctgcagttgggtaaaatcatctaaagcaagcttattttataataaagtgtagaatatttcatgtgatttattgaatactatattgaaaatgaaaaacagagggattgtatgggtactagaagta

SEQ ID NO: 133411 - DNA, 594 bp, Homo sapiens
ctcattccttattcttgtgtagatggtctcagattgtcaaagaacaagaatctactaggtgatggatagtgtacacacacacacacagacagacacatacacacacacacaaacacaaacacacamacacctgctcctcaacttactatggggctatggcctgataaatttatcataagttgaaaatatcttaagtttaaaatgcatttaatacatccaaccaaacaaacatcatagcttaacctatcctaccttaaacgtgcttggaatactcatgttaacctgcagttgggtaaaatcatctaaagcaagcttattttataataaagtgtagaatatttcatgtgatttattgaatactatattgaaaatgaaaaacagagggattgtatgggtactagaagtagagtttctactgaatgtgtattgcttttgcaccatagtaaattagaaaaattataagtcaaactataagttgaattgtaaattagggactgtgtgctgtgtgtatgtatgtgtgtatatgcataaactaataaacacctaaatattataaaatatatattttttatttatacatatgcatgtacacgc

SEQ ID NO: 133412 - DNA, 483 bp, Homo sapiens
ttgaaagtcaaacaaaatacatgtgtgaagggaaacatctcaagttctaaaaaaatgtattatttcaaaccagaaaattaacaacaataatgatgatgactagtatttgttatgattcactaggtatgactcaatgtaccactctaaaagaacattcaatacaatagtttattaaatcctactagtatccactccctatttctgaaatactaagttttagaagttaattatataacaagtaagagatgggattaagattccaatctaatattattaactggtaaccttcattgaatgcttctagaggtagccaacctattatataaatttgtgtatccccaccaaactcagcacaacaccaaacatgccctagttagcaaggaactaacagatttatttattcacagacawgtaatgccttagtggaaatcctaaccaacatcagacacaacaattgacattatttagtcagctgttagttct

SEQ ID NO: 133413 - DNA, 615 bp, Homo sapiens
tcaaccacaaactaggttagatctttgtgttatgctgcacagagccctggagctctacttcaaaactcccatcaacctacttattaaatcagttactattctattcactgattaatttaacatatatttattgaatgcctactctatgtcaggcacaatgctaagcaagttgctctactaagactcaaactccttacattttggtatttttatttttacttaatttaactaattaataacagggtctcattctgctgctcaggctggagtgcagtggtgcaatctcagctcactgccatctccacctcccaggttcaagtgattctcatgcctcaatctccggagtatctggagcgacaggcatgtgcaaccacacccagctaatttttgtatttttggtagagacagagttttgcaatgctgcccaggctggtctcaaactcctgagctcaagtgatctgcccaccttggcctcccaaagtgctgggattacagatgtgggtcaccgtgycagcccaaagtttttggatataagggaaccttcagtccatgagttccctaaggccagagactattaatttttcatgtataagccaagaccatgatctaatatat

SEQ ID NO: 133414 - DNA, 584 bp, Homo sapiens
aatggccactcaaatatcggcccctacctagtccttagaacctgaaaaatgttttaaatgaggagagattgtccatgattatctagaagggccctaaatccattgaccattgaccttgtcagagggaggcagaaggacattgtacatgccaaagtgaagaaactgatgtgaagacagaggcagagattggacccatgtggccaaaagcaaggaaatactatcagctaccagaagctagaaaagacaagggatggattttttccaagagcctccagagggacaatggccctgactaaacctggtaccttaatttcatgctagtgaagtagttgttgatcttctgggctctggaaatgtgaaagaatacatttctgttactttaatctacaaagtttgtagaaatttgctaaggcagccacagaaaaccaatacagattgtgaaagtaagttaacaaaaaatttatcaaacactttattatattcatagaggagagaccatatttagactagggtcrcttagtgataactccagggagtagaaaccatgtttgctgactcccagcctgacatttttggctcatagg

SEQ ID NO: 133415 - DNA, 357 bp, Homo sapiens
cacctcaaatttaactaataaaaatttatgacttggcaaacaccccaggtatttttattgactaacaaatcagctatgacaatcttagcaacaaatcaagttatgctatggggtatgtccacactttcctgttccctctacaacaggagaaaatcaaatytttccaacatcctaacaaactgttactccctgtaaccaaatgtatcacagtatcgtctaccaaggcgttacatcctgaaactttcctacaaaaagcacagcttcaaagaaaccttgcaagctttcttgtaagctcctcccttcccacatcgcccctccccagagccaagaaataaagcacttgaaagaaacaacatg

SEQ ID NO: 133416 - DNA, 357 bp, Homo sapiens
cacctcaaatttaactaataaaaatttatgacttggcaaacaccccaggtatttttattgactaacaaatcagctatgacaatcttagcaacaaatcaagttatgctatggggtatgtccacactttcctgttccctctacaacaggagaaaatcaaatctttccaacatcctaacaaactgttactscctgtaaccaaatgtatcacagtatcgtctaccaaggcgttacatcctgaaactttcctacaaaaagcacagcttcaaagaaaccttgcaagctttcttgtaagctcctcccttcccacatcgcccctccccagagccaagaaataaagcacttgaaagaaacaacatg

SEQ ID NO: 133417 - DNA, 552 bp, Homo sapiens
ggcactaattattaaagtcatctagttatatacaccaattctcaacagacacagttttttttggaaaggcatattaaacagactaagatgtgtactacccattagccaaagataattttattgatttttctaaygagtcttcaaatgttacattctaacatcttagcaaattatttccaaatactgctggaattacatgtaactatcaggaaacaaaagggcttctcaacaacttgtgcgttctacattatctggccagtttccggacaattataatacaattgtgctccaaagtaggagagttccatgaatcaattgcccctaaaatatatttctgtatatttaaggagttctaagcattgggttaaattccaaacagactctgaatacaagcatttatttagtaagagaggttagaataaatcaatcctaaattaggcacagctgccctccccccattgatcaaaaagacaggaaattacatttatttaaaaagttaatgttcctaatatattcaaatctaactaagccccaaaacggtctgagatcaaa

SEQ ID NO: 133418 - DNA, 552 bp, Homo sapiens
ggcactaattattaaagtcatctagttatatacaccaattctcaacagacacagttttttttggaaaggcatattaaacagactaagatgtgtactacccattagccaaagataattttattgatttttctaatragtcttcaaatgttacattctaacatcttagcaaattatttccaaatactgctggaattacatgtaactatcaggaaacaaaagggcttctcaacaacttgtgcgttctacattatctggccagtttccggacaattataatacaattgtgctccaaagtaggagagttccatgaatcaattgcccctaaaatatatttctgtatatttaaggagttctaagcattgggttaaattccaaacagactctgaatacaagcatttatttagtaagagaggttagaataaatcaatcctaaattaggcacagctgccctccccccattgatcaaaaagacaggaaattacatttatttaaaaagttaatgttcctaatatattcaaatctaactaagccccaaaacggtctgagatcaaa

SEQ ID NO: 133419 - DNA, 552 bp, Homo sapiens
taattattaaagtcatctagttatatacaccaattctcaacagacacagttttttttggaaaggcatattaaacagactaagatgtgtactacccattagccaaagataattttattgatttttctaatgagtcttcaaatgttacattctaacatcttagcaaattatttccaaatactgctggaattacatgtaactatcaggaaacaaaagggcttctcaacaacttgtgcgttctacattatctggccagtttccggacaattataatacaattgtgctccaaagyaggagagttccatgaatcaattgcccctaaaatatatttctgtatatttaaggagttctaagcattgggttaaattccaaacagactctgaatacaagcatttatttagtaagagaggttagaataaatcaatcctaaattaggcacagctgccctccccccattgatcaaaaagacaggaaattacatttatttaaaaagttaatgttcctaatatattcaaatctaactaagccccaaaacggtctgagatcaaatcctc

SEQ ID NO: 133420 - DNA, 537 bp, Homo sapiens
acaccaattctcaacagacacagttttttttggaaaggcatattaaacagactaagatgtgtactacccattagccaaagataattttattgatttttctaatgagtcttcaaatgttacattctaacatcttagcaaattatttccaaatactgctggaattacatgtaactatcaggaaacaaaagggcttctcaacaacttgtgcgttctacattatctggccagtttccggacaattataatacaattgtgctccaaagtaggagagttccatgaatcaattrcccctaaaatatatttctgtatatttaaggagttctaagcattgggttaaattccaaacagactctgaatacaagcatttatttagtaagagaggttagaataaatcaatcctaaattaggcacagctgccctccccccattgatcaaaaagacaggaaattacatttatttaaaaagttaatgttcctaatatattcaaatctaactaagccccaaaacggtctgagatcaaatcctccataaaagagg

SEQ ID NO: 133421 - DNA, 552 bp, Homo sapiens
taattattaaagtcatctagttatatacaccaattctcaacagacacagttttttttggaaaggcatattaaacagactaagatgtgtactacccattagccaaagataattttattgatttttctaatgagtcttcaaatgttacattctaacatcttagcaaattatttccaaatactgctggaattacatgtaactatcaggaaacaaaagggcttctcaacaacttgtgcgttctacattatctggccagtttccggacaattataatacaattgtgctccaaagtaggagagttccatgaatcaattgcccctaaaatatatttctgtatatttaaggagttctaagcattgggttaaattccaaacagactctgaatacaagcatttatttagtaagagaggttagaataaatcaatcctaaattaggcacagctrccctccccccattgatcaaaaagacaggaaattacatttatttaaaaagttaatgttcctaatatattcaaatctaactaagccccaaaacggtctgagatcaaatcctc

SEQ ID NO: 133422 - DNA, 526 bp, Homo sapiens
acaccaattctcaacagacacagttttttttggaaaggcatattaaacagactaagatgtgtactacccattagccaaagataattttattgatttttctaatgagtcttcaaatgttacattctaacatcttagcaaattatttccaaatactgctggaattacatgtaactatcaggaaacaaaagggcttctcaacaacttgtgcgttctacattatctggccagtttccggacaattataatacaattgtgctccaaagtaggagagttccatgaatcaattgcccctaaaatatatttctgtatatttaaggagttctaagcattgggttaaattccaaacagactctgaatacaagcatttatttagtaagagaggttagaataaatcaatcctaaattaggcacagctgccctccccccattgatcaaaaagayaggaaattacatttatttaaaaagttaatgttcctaatatattcaaatctaactaagccccaaaacggtctgagatcaaatcctc

SEQ ID NO: 133423 - DNA, 313 bp, Homo sapiens
cctgaggccaaggatggggtttggggtaccccccgaagggaacctaggctcctgtcccgkatgggcctaggggatggaaccgcccccacaaccagctcctggggcacgggggagggatgagaggatgacctgaggggaagctcctgcagcctccttccagcctgggggctgcatcaatgtggctggtgagccgcgaactgagacgagggaagaaccgaaccgaggccacccagtaattcccattgtatcccaaaagaatcttgccaaagatggcgatccggtgcccgtagctttgagaagcagtaataacaca

SEQ ID NO: 133424 - DNA, 504 bp, Homo sapiens
gaggctctctaaactctccacactgactcagagtgaaagtgctaataatgacctaaagccgtgccctatggccccctttcctcttgacttcgcttttcatgcactctgctccagccatactggcctccttgggcttcccagaacacgcgaagcaggacccaggttagggcctttgaactggctttgtttgtccgtgggattccccatgaacatctcatggctgctccctctcttccctcaagtctcccctcagatgtccccttctcagagacatcagcctgtagaaaggagcacttycttcccccactttcctgcgtgatgtttctccatgatgcctgcttcctacatatgtagagtctgtctcactccggagaaggctacctccaagaggacaggtgactggcccttgatttcattaattgtcacaatcctatgccggacacatggttggtgttcaacaaatatttgcggaattaaagaacaaattaataatgttgtgagata

SEQ ID NO: 133425 - DNA, 505 bp, Homo sapiens
ctgactcagagtgaaagtgctaataatgacctaaagccgtgccctatggccccctttcctcttgacttcgcttttcatgcactctgctccagccatactggcctccttgggcttcccagaacacgcgaagcaggacccaggttagggcctttgaactggctttgtttgtccgtgggattccccatgaacatctcatggctgctccctctcttccctcaagtctcccctcagatgtccccttctcagagacatcagcctgtagaaaggagcacttccttcccccactttmctgcgtgatgtttctccatgatgcctgcttcctacatatgtagagtctgtctcactccggagaaggctacctccaagaggacaggtgactggcccttgatttcattaattgtcacaatcctatgccggacacatggttggtgttcaacaaatatttgcggaattaaagaacaaattaataatgttgtgagataaatactctgtgcccatttttctt

SEQ ID NO: 133426 - DNA, 516 bp, Homo sapiens
ctgactcagagtgaaagtgctaataatgacctaaagccgtgccctatggccccctttcctcttgacttcgcttttcatgcactctgctccagccatactggcctccttgggcttcccagaacacgcgaagcaggacccaggttagggcctttgaactggctttgtttgtccgtgggattccccatgaacatctcatggctgctccctctcttccctcaagtctcccctcagatgtccccttctcagagacatcagcctgtagaaaggagcacttccttcccccactttcctgcgtgatgtttctycatgatgcctgcttcctacatatgtagagtctgtctcactccggagaaggctacctccaagaggacaggtgactggcccttgatttcattaattgtcacaatcctatgccggacacatggttggtgttcaacaaatatttgcggaattaaagaacaaattaataatgttgtgagataaatactctgtgcccatttttctttactttttaat

SEQ ID NO: 133427 - DNA, 516 bp, Homo sapiens
ctgactcagagtgaaagtgctaataatgacctaaagccgtgccctatggccccctttcctcttgacttcgcttttcatgcactctgctccagccatactggcctccttgggcttcccagaacacgcgaagcaggacccaggttagggcctttgaactggctttgtttgtccgtgggattccccatgaacatctcatggctgctccctctcttccctcaagtctcccctcagatgtccccttctcagagacatcagcctgtagaaaggagcacttccttcccccactttcctgcgtgatgtttctccatgatgcctgcttcctacatatgtagagtctgtctcactccggagaaggctacctccaagaggacaggtgactggcccttgatttcattaattgtcacartcctatgccggacacatggttggtgttcaacaaatatttgcggaattaaagaacaaattaataatgttgtgagataaatactctgtgcccatttttctttactttttaat

SEQ ID NO: 133428 - DNA, 454 bp, Homo sapiens
tcctgccttgccctcccgaagtgmtgggattacaggtgtgagcaatcatgcctggcctcctttaatttctttctttttttttttttttttgagacggagtctcgctcttttgcccaggctggagtgcagtggcacaattgtatttttagtagagacggggtttcaccatgttagccaggatggtctcgatctcctgacctcgtgatctgcctgccttggcctcccaaagtgctgggattataggcgtgagccaccacgcccggccggcctcctttaatttcttaaccataaatatcctccccccacttttattatggacattctgaagcacataaaaatagggagcatggtataataaatttgtacatatttaacactcagcttctataattagaaacaaatggcccatctggtttcatctaggcctctttgctatcctttcatctccagctgg

SEQ ID NO: 133429 - DNA, 471 bp, Homo sapiens
ttggtctcaagtaatcctcctgccttgccctcccgaagtgctgggattacaggtgtgagcaatcatgcctggcctcctttaatttctttctttttttttttttttttgagacggagtctcgctcttttgcccaggctggagtgcagtggcacaattgtatttttagtagagacggggtttcaccatgttagccaggatggtctcgatctcctgacctcgtgatctgcctgccttggcctcccaaagtgctgggattayaggcgtgagccaccacgcccggccggcctcctttaatttcttaaccataaatatcctccccccacttttattatggacattctgaagcacataaaaatagggagcatggtataataaatttgtacatatttaacactcagcttctataattagaaacaaatggcccatctggtttcatctaggcctctttgctatcctttcatctccagctgg

SEQ ID NO: 133430 - DNA, 471 bp, Homo sapiens
ttggtctcaagtaatcctcctgccttgccctcccgaagtgctgggattacaggtgtgagcaatcatgcctggcctcctttaatttctttctttttttttttttttttgagacggagtctcgctcttttgcccaggctggagtgcagtggcacaattgtatttttagtagagacggggtttcaccatgttagccaggatggtctcgatctcctgacctcgtgatctgcctgccttggcctcccaaagtgctgggattataggcgtgagccaccacgcccggccggcctcctttaatttcttaaccataaatatcctccccccacttttattatggacattctgaagcacataaaaatagggagcatrgtataataaatttgtacatatttaacactcagcttctataattagaaacaaatggcccatctggtttcatctaggcctctttgctatcctttcatctccagctgg

SEQ ID NO: 133431 - DNA, 418 bp, Homo sapiens
gaattcaatgcttgggtcacctccagattcattttcacagtctttcatgttttggtcatatkacattgtattttgctgccatatgactgatctttttttgttaaatgtgagatacttgttaaaaaatgtttagcaatgaattgaggcctagtagcatgttatcttgctgcagaagagatgggagtctacttctgggggatggtcaggggtcctccatacaggctgcaattgaagtcgtcggtgcaggctcagtccctacaaaggccagggtatttcctgtccacctttattctgatgcatgactcttctgggtctcaaccagagccagtggacttcagtacgggtcgctttcattggcagaccctcaatccacttgttttccatctaatcccacgcatgtgtgcaaaagctgctgtgc

SEQ ID NO: 133432 - DNA, 418 bp, Homo sapiens
gaattcaatgcttgggtcacctccagattcattttcacagtctttcatgttttggtcatatgacattgtattttgctgccatatgactgatctytttttgttaaatgtgagatacttgttaaaaaatgtttagcaatgaattgaggcctagtagcatgttatcttgctgcagaagagatgggagtctacttctgggggatggtcaggggtcctccatacaggctgcaattgaagtcgtcggtgcaggctcagtccctacaaaggccagggtatttcctgtccacctttattctgatgcatgactcttctgggtctcaaccagagccagtggacttcagtacgggtcgctttcattggcagaccctcaatccacttgttttccatctaatcccacgcatgtgtgcaaaagctgctgtgc

SEQ ID NO: 133433 - DNA, 418 bp, Homo sapiens
gaattcaatgcttgggtcacctccagattcattttcacagtctttcatgttttggtcatatgacattgtattttgctgccatatgactgatctttttttgttaaatgtgagatactygttaaaaaatgtttagcaatgaattgaggcctagtagcatgttatcttgctgcagaagagatgggagtctacttctgggggatggtcaggggtcctccatacaggctgcaattgaagtcgtcggtgcaggctcagtccctacaaaggccagggtatttcctgtccacctttattctgatgcatgactcttctgggtctcaaccagagccagtggacttcagtacgggtcgctttcattggcagaccctcaatccacttgttttccatctaatcccacgcatgtgtgcaaaagctgctgtgc

SEQ ID NO: 133434 - DNA, 418 bp, Homo sapiens
gaattcaatgcttgggtcacctccagattcattttcacagtctttcatgttttggtcatatgacattgtattttgctgccatatgactgatctttttttgttaaatgtgagatacttgttwaaaaatgtttagcaatgaattgaggcctagtagcatgttatcttgctgcagaagagatgggagtctacttctgggggatggtcaggggtcctccatacaggctgcaattgaagtcgtcggtgcaggctcagtccctacaaaggccagggtatttcctgtccacctttattctgatgcatgactcttctgggtctcaaccagagccagtggacttcagtacgggtcgctttcattggcagaccctcaatccacttgttttccatctaatcccacgcatgtgtgcaaaagctgctgtgc

SEQ ID NO: 133435 - DNA, 402 bp, Homo sapiens
cattttcacagtctttcatgttttggtcatatgacattgtattttgctgccatatgactgatctttttttgttaaatgtgagatacttgttaaaaaatrtttagcaatgaattgaggcctagtagcatgttatcttgctgcagaagagatgggagtctacttctgggggatggtcaggggtcctccatacaggctgcaattgaagtcgtcggtgcaggctcagtccctacaaaggccagggtatttcctgtccacctttattctgatgcatgactcttctgggtctcaaccagagccagtggacttcagtacgggtcgctttcattggcagaccctcaatccacttgttttccatctaatcccacgcatgtgtgcaaaagctgctgtgcttctttgcatctc

SEQ ID NO: 133436 - DNA, 418 bp, Homo sapiens
gaattcaatgcttgggtcacctccagattcattttcacagtctttcatgttttggtcatatgacattgtattttgctgccatatgactgatctttttttgttaaatgtgagatacttgttaaaaaatgtttagcaatgaattgaggcctagtagcatgttatcttgctgcagaagagatgggagtctacttctgggggatggtcaggggtcctccatacargctgcaattgaagtcgtcggtgcaggctcagtccctacaaaggccagggtatttcctgtccacctttattctgatgcatgactcttctgggtctcaaccagagccagtggacttcagtacgggtcgctttcattggcagaccctcaatccacttgttttccatctaatcccacgcatgtgtgcaaaagctgctgtgc

SEQ ID NO: 133437 - DNA, 398 bp, Homo sapiens
ttcacagtctttcatgttttggtcatatgacattgtattttgctgccatatgactgatctttttttgttaaatgtgagatacttgttaaaaaatgtttagcaatgaattgaggcctagtagcatgttatcttgctgcagaagagatgggagtctacttctgggggatggtcaggggtcctccatacaggctgcaattgargtcgtcggtgcaggctcagtccctacaaaggccagggtatttcctgtccacctttattctgatgcatgactcttctgggtctcaaccagagccagtggacttcagtacgggtcgctttcattggcagaccctcaatccacttgttttccatctaatcccacgcatgtgtgcaaaagctgctgtgcttctttgcatctc

SEQ ID NO: 133438 - DNA, 418 bp, Homo sapiens
gaattcaatgcttgggtcacctccagattcattttcacagtctttcatgttttggtcatatgacattgtattttgctgccatatgactgatctttttttgttaaatgtgagatacttgttaaaaaatgtttagcaatgaattgaggcctagtagcatgttatcttgctgcagaagagatgggagtctacttctgggggatggtcaggggtcctccatacaggctgcaattgaagtcrtcggtgcaggctcagtccctacaaaggccagggtatttcctgtccacctttattctgatgcatgactcttctgggtctcaaccagagccagtggacttcagtacgggtcgctttcattggcagaccctcaatccacttgttttccatctaatcccacgcatgtgtgcaaaagctgctgtgc

SEQ ID NO: 133439 - DNA, 406 bp, Homo sapiens
tgggtcacctccagattcattttcacagtctttcatgttttggtcatatgacattgtattttgctgccatatgactgatctttttttgttaaatgtgagatacttgttaaaaaatgtttagcaatgaattgaggcctagtagcatgttatcttgctgcagaagagatgggagtctacttctgggggatggtcaggggtcctccatacaggctgcaattgaagtcgtcrgtgcaggctcagtccctacaaaggccagggtatttcctgtccacctttattctgatgcatgactcttctgggtctcaaccagagccagtggacttcagtacgggtcgctttcattggcagaccctcaatccacttgttttccatctaatcccacgcatgtgtgcaaaagctgctgtgc

SEQ ID NO: 133440 - DNA, 402 bp, Homo sapiens
cattttcacagtctttcatgttttggtcatatgacattgtattttgctgccatatgactgatctttttttgttaaatgtgagatacttgttaaaaaatgtttagcaatgaattgaggcctagtagcatgttatcttgctgcagaagagatgggagtctacttctgggggatggtcaggggtcctccatacaggctgcaattgaagtcgtcggtgcaggctcagtccctacaaaggccagggtatttcctgtccacctytattctgatgcatgactcttctgggtctcaaccagagccagtggacttcagtacgggtcgctttcattggcagaccctcaatccacttgttttccatctaatcccacgcatgtgtgcaaaagctgctgtgcttctttgcatctc

SEQ ID NO: 133441 - DNA, 418 bp, Homo sapiens
gaattcaatgcttgggtcacctccagattcattttcacagtctttcatgttttggtcatatgacattgtattttgctgccatatgactgatctttttttgttaaatgtgagatacttgttaaaaaatgtttagcaatgaattgaggcctagtagcatgttatcttgctgcagaagagatgggagtctacttctgggggatggtcaggggtcctccatacaggctgcaattgaagtcgtcggtgcaggctcagtccctacaaaggccagggtatttcctgtccacctttattctgatgcrtgactcttctgggtctcaaccagagccagtggacttcagtacgggtcgctttcattggcagaccctcaatccacttgttttccatctaatcccacgcatgtgtgcaaaagctgctgtgc

SEQ ID NO: 133442 - DNA, 418 bp, Homo sapiens
gaattcaatgcttgggtcacctccagattcattttcacagtctttcatgttttggtcatatgacattgtattttgctgccatatgactgatctttttttgttaaatgtgagatacttgttaaaaaatgtttagcaatgaattgaggcctagtagcatgttatcttgctgcagaagagatgggagtctacttctgggggatggtcaggggtcctccatacaggctgcaattgaagtcgtcggtgcaggctcagtccctacaaaggccagggtatttcctgtccacctttattctgatgcatgactcttctgggtctcaaccagagccagyggacttcagtacgggtcgctttcattggcagaccctcaatccacttgttttccatctaatcccacgcatgtgtgcaaaagctgctgtgc

SEQ ID NO: 133443 - DNA, 404 bp, Homo sapiens
ggtcacctccagattcattttcacagtctttcatgttttggtcatatgacattgtattttgctgccatatgactgatctttttttgttaaatgtgagatacttgttaaaaaatgtttagcaatgaattgaggcctagtagcatgttatcttgctgcagaagagatgggagtctacttctgggggatggtcaggggtcctccatacaggctgcaattgaagtcgtcggtgcaggctcagtccctacaaaggccagggtatttcctgtccacctttattctgatgcatgactcttctgggtctcaaccagagccagtggacttcagtaygggtcgctttcattggcagaccctcaatccacttgttttccatctaatcccacgcatgtgtgcaaaagctgctgtgc

SEQ ID NO: 133444 - DNA, 406 bp, Homo sapiens
tgggtcacctccagattcattttcacagtctttcatgttttggtcatatgacattgtattttgctgccatatgactgatctttttttgttaaatgtgagatacttgttaaaaaatgtttagcaatgaattgaggcctagtagcatgttatcttgctgcagaagagatgggagtctacttctgggggatggtcaggggtcctccatacaggctgcaattgaagtcgtcggtgcaggctcagtccctacaaaggccagggtatttcctgtccacctttattctgatgcatgactcttctgggtctcaaccagagccagtggacttcagtacgggtcgctttcattggcagaccctcaatccacttgttttccatctaatcccacrcatgtgtgcaaaagctgctgtgc

SEQ ID NO: 133445 - DNA, 418 bp, Homo sapiens
cacatatctcatttcccccctcccacaaaaaatggtgcaagaataaactgagctaaaacagtgagttgactatggtggggggaggtttgatgtcttcctcacaactrtgaaactaaatttaaaagtggttaaatgttttttaaaaaatgtaagagtataaaagaactagtggaaaatattgataagtaactgatgtcagtgtgtggaaaggctttgtagaaggataaaatgcaagaaaagatgcacaagtaacagcatctagatgcataatgctgaaatacaacactaaacattaaaaacaaattataaatcaagaaattggatagcatcaacaatcttagtatttaatgaaatttcacagattaacacaggaaaaattgagaggccatgaagacatgatccatgttttaaaaaatca

SEQ ID NO: 133446 - DNA, 418 bp, Homo sapiens
cacatatctcatttcccccctcccacaaaaaatggtgcaagaataaactgagctaaaacagtgagttgactatggtggggggaggtttgatgtcttcctcacaactatgaaactaaatttaaaagtggttaaatgtttttwaaaaaatgtaagagtataaaagaactagtggaaaatattgataagtaactgatgtcagtgtgtggaaaggctttgtagaaggataaaatgcaagaaaagatgcacaagtaacagcatctagatgcataatgctgaaatacaacactaaacattaaaaacaaattataaatcaagaaattggatagcatcaacaatcttagtatttaatgaaatttcacagattaacacaggaaaaattgagaggccatgaagacatgatccatgttttaaaaaatca

SEQ ID NO: 133447 - DNA, 418 bp, Homo sapiens
cacatatctcatttcccccctcccacaaaaaatggtgcaagaataaactgagctaaaacagtgagttgactatggtggggggaggtttgatgtcttcctcacaactatgaaactaaatttaaaagtggttaaatgttttttaaaaaatgtaagagtataaaagaactagtggaaaatattgataagtaactgatgtcagtgtgtggaaaggctttgtagaaggataaaatgcaagaaaagatgcacaagtaacagcatctagatgcataatgctgaaatacaacactaaacattaaaaacaaattataaatcaagaaattggatagcatcaacaatcttagtatttaatraaatttcacagattaacacaggaaaaattgagaggccatgaagacatgatccatgttttaaaaaatca

SEQ ID NO: 133448 - DNA, 386 bp, Homo sapiens
taaaggctgccctgccaacaaaaccataacgcaggaacaaacatcacaactatgccaaataatcaatcctacaatgtccaaaattttactttaaaactggaattwccagacttcctttctgcattaaccagtttaactagacagtaacgaaatattcctactttatgctgtgatagtttgtttatttatttatttatttatttatttgagacagagtttcgctcttgttgcccaggctggagtgcagtggcacgatctcagctcaccacaacctccgcctcccaggttcaagcgattctcctgcctcagcctcccgagtagctgggattacaggcatgtaccaccacgcccgggtaattttgtatttttagtagagacggggggtt

SEQ ID NO: 133449 - DNA, 388 bp, Homo sapiens
ttaaaggctgccctgccaacaaaaccataacgcaggaacaaacatcacaactatgccaaataatcaatcctacaatgtccaaaattttactttaaaactggaatttccagacttcctttctgcattaaccagtttaactagacagtaacgaaatattcctactttatgctgtgatagtttgtttatttatttatttatttatttatttragacagagtttcgctcttgttgcccaggctggagtgcagtggcacgatctcagctcaccacaacctccgcctcccaggttcaagcgattctcctgcctcagcctcccgagtagctgggattacaggcatgtaccaccacgcccgggtaattttgtatttttagtagagacggggggttt

SEQ ID NO: 133450 - DNA, 445 bp, Homo sapiens
gagaatgagatcttaaggataacaaggggaarcatctctacaaactagaatgtgtggcttatgagaggtagatcagctttaaacgtgggctgtgaaaaaagacattctaggtgtgggggcaaagaaaaaacaacgcagaagcaaaacatttccttgcttttctaggaaagagtaaacacatcagtacagctaaaggtactgaattcctgttgactacaagcagcaaagatgaaaaaaacaagatgaggccaaaatctttatgggagccttgattggttgatctgaataggggagaaacacaaagagattcagataagagatggcacagagttaagccatgacagtgcggccagaaaagccaagtaccagtaacagaggcttcagcagcgctcttaaagctcctatgctatattcgtacagccacaaaagctggctgaagccaagg

SEQ ID NO: 133451 - DNA, 451 bp, Homo sapiens
agatcttaaggataacaaggggaaacatctctacaaactagaatgtgtggcttatgagaggtagatcagctttaaacgtgggctgtgaaaaaagacattctaggtgtgggggcaaagaaaaaacaacgcagaagcaaaacatttccttgcttttctaggaaagagtaaacacatcagtacagctaaaggtactgaattcctgttgactacaagcagcaaagatgaaaaaaacaagatgaggccaaaatctttatgggagccttgaytggttgatctgaataggggagaaacacaaagagattcagataagagatggcacagagttaagccatgacagtgcggccagaaaagccaagtaccagtaacagaggcttcagcagcgctcttaaagctcctatgctatattcgtacagccacaaaagctggctgaagccaaggcttgtcctccaaa

SEQ ID NO: 133452 - DNA, 423 bp, Homo sapiens
aacaaggggaaacatctctacaaactagaatgtgtggcttatgagaggtagatcagctttaaacgtgggctgtgaaaaaagacattctaggtgtgggggcaaagaaaaaacaacgcagaagcaaaacatttccttgcttttctaggaaagagtaaacacatcagtacagctaaaggtactgaattcctgttgactacaagcagcaaagatgaaaaaaacaagatgaggccaaaatctttatgggagccttgattggttgatctgaataggggagaaacacaaagagattcagataagagatggcacagagttaagccatgacagtgsggccagaaaagccaagtaccagtaacagaggcttcagcagcgctcttaaagctcctatgctatattcgtacagccacaaaagctggctgaagccaa

SEQ ID NO: 133453 - DNA, 572 bp, Homo sapiens
gagactctgtctcaacaaaaaagaaaatcggtaagtcaatctactatttaaggggacaaatctagacctgcattagcaartcttgctcaatccagaatactcattaaactttttaataacatcttatcaagtgttccatttgtgataaagaacttaatgagccacatcaagatgaaaatcaagaaaaatatttagctgaaacactactttgtcctttatcaaacaaaatggctagataaatctcaaagtattaaggtggtcattttttttatttgacttaattttaagtgcttttcatttcccaaatcaaacataaatagggcagccctaaatttgttgcttcacatgggattctgcccccacaaaaatgtaaaataacttccagattttccagtaaaatatactaagccaaacattttgagcaacttgtccactaaaataactttaaaactattttctcaaatacctacctattttttcttttgaccctccagcaagtagattgatattttctcctggtaacaattctaattgctcggtacatttgacaaattttccagactcaaagctgc

SEQ ID NO: 133454 - DNA, 547 bp, Homo sapiens
caaaagggcattggctgtagcatgactgaggccagctcctccaggacagggctggaagctcaactcaactcacaaccagggccaggggaacgccgcccccaccccagccttgtacagatgttaggaggcagcccctctagggcaactctgactggacctctgagaggtataagggtggatgctgttagtggagggggagtgagggctggggccagacctgggcaggctcaagttttggagagggggcagggtgctatgcagaagggagtgggcatctgtgtagcagcagaggcaggtgccattctcggggtacagctaaggataggaataagcaccaatctgggggcatggccaaacctggaagacacaaaagcctcagggagagaatctaaggrtggcgggaggctggcagtttggactgagcctggttctcacgtctggggctgcgcggggcacccacctgcatctccacttcggtagccagaaaagtgaatatgtcgtgcagctcacgaatactgcgttcaagctgctggatctcactgtgccg

SEQ ID NO: 133455 - DNA, 533 bp, Homo sapiens
tgtaagtctcagctgcaaaagggcattggctgtagcatgactgaggccagctcctccaggacagggctggaagctcaactcaactcacaaccagggccaggggaacgccgcccccaccccagccttgtacagatgttaggaggcagcccctctagggcaactctgactggacctctgagaggtataagggtggatgctgttagtggagggggagtgagggctggggccagacctgggcaggctcaagttttggagagggggcagggtgctatgcagaagggagtgggcatctgtgtagcagcagaggcaggtgccattctcggggtacagctaaggataggaataagcaccaatctgggggcatggccaaacctggaagacacaaaagcctcagggagagaatctaagggtggcgggagkctggcagtttggactgagcctggttctcacgtctggggctgcgcggggcacccacctgcatctccacttcggtagccagaaaagtgaatatgtcgtgcagctcacgaatactg

SEQ ID NO: 133456 - DNA, 233 bp, Homo sapiens
aaggtatggaaaaaagacaactctttttattgttagccttgtatgcagaaaatcctaaggaacatacccacacacacacccacataccacaccccctcccagacttactagaactaagaggggggcttagtragtttgtagagtatatgatcaatatacaaaaattggttatatatatagtagcaacaaacaatacaaagatgaaataaagaaaacaattccaatcacaatag

SEQ ID NO: 133457 - DNA, 546 bp, Homo sapiens
cttactgtagcattgtagtacagttcgaagtcaggtagtgtgacgcttttgactttgttctttttgcttaggattgctttggctatttgggctttttttttttttggctccaaatgaattttagaatgctttttttttaatcctgtgaaaaatgtcattggtgttatgataggaatrgcattgactctgtaaatagccttagacagtatggacattttaacaatattgcttcttcctatctgtgatcatggaatgttttccttttgtttctgttgtctctgattctttgagcactcgtttgtaattttcattttagagatttttcacctccctgcttagctgtattccaaggtattttgtagttttttttgtggctactgtgaatgggattgcattcttgatttggctgtcagcttggatgttgttgctgtatagaaatgctacagatttgtgtacattaatttttgtatcctgaaactttgctgaagtcatttgtcagatctgggagctctcgagaggctactatggggttttcttggtataaaa

SEQ ID NO: 133458 - DNA, 546 bp, Homo sapiens
cttactgtagcattgtagtacagttcgaagtcaggtagtgtgacgcttttgactttgttctttttgcttaggattgctttggctatttgggctttttttttttttggctccaaatgaattttagaatgctttttttttaatcctgtgaaaaatgtcattggtgttatgataggaatggcattgactctgtaaatagccttagacagtatggmcattttaacaatattgcttcttcctatctgtgatcatggaatgttttccttttgtttctgttgtctctgattctttgagcactcgtttgtaattttcattttagagatttttcacctccctgcttagctgtattccaaggtattttgtagttttttttgtggctactgtgaatgggattgcattcttgatttggctgtcagcttggatgttgttgctgtatagaaatgctacagatttgtgtacattaatttttgtatcctgaaactttgctgaagtcatttgtcagatctgggagctctcgagaggctactatggggttttcttggtataaaa

SEQ ID NO: 133459 - DNA, 198 bp, Homo sapiens
tctctgccaggttttcatatctgaatgatgctgacctcataaaatgagttagggagggatccttcctcctcattttttcagaatratttcagtagcattggtaccagctcttctttacacttctggtagaatttgtctgtgaatctgttgggtcctgggcttgctttttttttttttttttggctcagagacttttta

SEQ ID NO: 133460 - DNA, 378 bp, Homo sapiens
ggcaatgggccttgttgagctgcggtgggctccacccagttcaagcttccctggccgctttgtttacctacttaagcctcagcaatggttgacgcccctcccccaaccagactgccacctcgcagatgatttcagactgtttcgctagcagtgagcaaggctccatggctgtgggacctactgagtgaggcaggaagaatcaccttgcctgctattgctaagaccttgggaaaagtgcagtatttgggcgggagtgccctgtttttccaggtagtctgtcacagcttcccttggctgggaaagggaaatcccccaaccccttgtgcttcccgggtgaggcgacgccccaccytgcttcagctcaccctctgtgggcct

SEQ ID NO: 133461 - DNA, 341 bp, Homo sapiens
cgttccaacatgcgttttggtagagacactcaaactatagcaataataattaggaataaatttaacaaaataagtgtgaaacstttgcactgaaaactaaaaaacatcactcagataaatgcctaaataaatggagagatatatcatgttaatggattagatgactcaatattgttagatgtcaattgatctacaaattaactgaaattcctgccaaaagtctagaaagattggaaaaattgacacgctgattttaaaattatatagaaatacaaaaatacctagaatagccaaaacaatcttgctaagtaagaatgaagttagagtacttaatactgcct

SEQ ID NO: 133462 - DNA, 341 bp, Homo sapiens
cgttccaacatgcgttttggtagagacactcaaactatagcaataataattaggaataaatttaacaaaataagtgtgaaacctttgcactgaaaactaaaaaacatcactcagataaatgcctaaataaatggagagatatatcatgttaatggattagatkactcaatattgttagatgtcaattgatctacaaattaactgaaattcctgccaaaagtctagaaagattggaaaaattgacacgctgattttaaaattatatagaaatacaaaaatacctagaatagccaaaacaatcttgctaagtaagaatgaagttagagtacttaatactgcct

SEQ ID NO: 133463 - DNA, 341 bp, Homo sapiens
cgttccaacatgcgttttggtagagacactcaaactatagcaataataattaggaataaatttaacaaaataagtgtgaaacctttgcactgaaaactaaaaaacatcactcagataaatgcctaaataaatggagagatatatcatgttaatggattagatgactcaatattgttagatgtcaattgatctacaaattaactgaaattcctgccaaaagtctagaaagattggaaaaattgacamgctgattttaaaattatatagaaatacaaaaatacctagaatagccaaaacaatcttgctaagtaagaatgaagttagagtacttaatactgcct

SEQ ID NO: 133464 - DNA, 341 bp, Homo sapiens
cgttccaacatgcgttttggtagagacactcaaactatagcaataataattaggaataaatttaacaaaataagtgtgaaacctttgcactgaaaactaaaaaacatcactcagataaatgcctaaataaatggagagatatatcatgttaatggattagatgactcaatattgttagatgtcaattgatctacaaattaactgaaattcctgccaaaagtctagaaagattggaaaaattgacacgctgattytaaaattatatagaaatacaaaaatacctagaatagccaaaacaatcttgctaagtaagaatgaagttagagtacttaatactgcct

SEQ ID NO: 133465 - DNA, 609 bp, Homo sapiens
tgaaaatgaaaatcagaagatatttggatgtgaaatactacataacaaaacttctgagatagagctgaggcagtactgaaagggtaatttatatgtttacatgtttatattgaaaaataggctgaaaattagttaagtgtccaccttaggaagtttagaaagagaaaaagagattgggcatggtggctcaggcctgtaatcccagcactttgggaggtmaaggagggcggattacctgaggtcgggagttcaagaccagcttggccaacatggtgaaacccctgtctctactgaaaatacaaaaattagctgggtgtggtggtgggtgcctataatcccagctactcgggaggctgaggcagaagaattgcttgagccagggaggcagaggttgcagtgagccgagattgggccactgcattgcagcctgggcaacagagcaagactctgtctaaaaaaaaaaaaaaaaaaaaaaaaaaaaaaaattggagtaaacctaaataaaataaattaaaggaaataaggctaaaagtagaaatagacattaataaactataaaacaaagaaacaataggcaagattcacaaaaccaaatgctgattctttgaa

SEQ ID NO: 133466 - DNA, 554 bp, Homo sapiens
caaccatttgtttattaggatggccaaaaaggcacatttcaaaaatgcctattaaaatattagtagtacaaataatactgctgcttaattttttctaatgagaactgataaaattcaaaagcaacataagcagataaatagwaataatatggtttatcaaattaattgtcacatgattattaaagtgagatcatgtgtgttaagtagtggtatcttaagccactgaaatatcttccttggtctggaatgagctttctatggagattaaaaagatgttaaattgaacagtcttggttaataaatgaagaagcaaagccagaaacctgtttaaagaactaacaaaaaaggtcatgaatgatctggtggttgttatattttcttgtttacccgaggagaagactatgctcaagcatgtattgaatccagtgatagccagaatgtcatccatactgctagcagccattagtaaggttggaatgtcttcctcaacaccatatccattttcttgcaacaccatcgtgtaaaggacaacaacagcaagagagacagcacct

SEQ ID NO: 133467 - DNA, 331 bp, Homo sapiens
gaagacagtctatacttttataaaaattgtgaatataataatataataattaagataatacctgaatacttacacatttcacaagtgtgaactaaaaagccccaattttaccattgcccaacaccacgcctggctagtttttgtgtttttagtagatacagtgtttcrccattttggccaggctggtcttgaactcctgacctcaagtgatatgcctgccttggcctcccaaagtgctgggattataagtgtgagccaccatgcccagccaaagcctcaataatataaagatgtaatctctccccaaatgaattaatcagagatacaccaa

SEQ ID NO: 133468 - DNA, 180 bp, Homo sapiens
actcacgaagatgctgccactctgtctscagcggcacatgagtgcaccccacagcaccattgccccggctggcacgtgcaagtatgcagaacacccccatcccactcctgccggcactgcacccctgccaacacatgcatacctgctgtgtgctgctgctgctggcacgtatgtgtgagt

SEQ ID NO: 133469 - DNA, 180 bp, Homo sapiens
actcacgaagatgctgccactctgtctccagcrgcacatgagtgcaccccacagcaccattgccccggctggcacgtgcaagtatgcagaacacccccatcccactcctgccggcactgcacccctgccaacacatgcatacctgctgtgtgctgctgctgctggcacgtatgtgtgagt

SEQ ID NO: 133470 - DNA, 180 bp, Homo sapiens
actcacgaagatgctgccactctgtctccagcggcacatgagtgcaccccacarcaccattgccccggctggcacgtgcaagtatgcagaacacccccatcccactcctgccggcactgcacccctgccaacacatgcatacctgctgtgtgctgctgctgctggcacgtatgtgtgagt

SEQ ID NO: 133471 - DNA, 474 bp, Homo sapiens
atgtaatattttaagaaatgctttaaaagattagattttacaataatgcaaagataatcaggaacataatcctgtagagaaaacgtcataaaaaattactgaaatccttaatctccctaaaaaaagaaaaagaattgtataargtttttcttataaaacgtttgtttgttttgttttgttttttgagacggagtctcactctgtcccccaggctggattgcagtggcactatctcagctcactgcaacctctgtcactcaggttcaagcgattctcttgcctcagcctcccgagtagctgggattaccaggtaaatgccaccatgcacggctaatttttgtagattacaggcatgagccatcatgcccggcctttttttctttatcttaggtttgtttacagactccacttggaacaggtaaatacaatttttgcttctttttctttctcaccatcctctaatatttgaaataa

SEQ ID NO: 133472 - DNA, 438 bp, Homo sapiens
tatatgagggtcttggtgaattagttagggataaaactggagacagagaccaaattgaaggctccgtcacagtccacgcaaaagttggaaacaaatagcctaagctagagcaaaagagaaagtttggagaggaggaaaatgattcaataaatacttagaaggtgctgyaagaaaactgtggatacagaagggacagcagggataagatgtagagattatctctactgacagtgtactgaatatatatttatttttggggacagggtctcattctgttgcccaaggtgagtgcagtgatgcaaacatggctcactgtaggcttaacctcctgagctcaagtgatcctcttgccttagcctcctgagtagctgagacccagaaaaatttttaatattttgtaaagacaaggtctgctatgttgcccaggctggttttgaa

SEQ ID NO: 133473 - DNA, 438 bp, Homo sapiens
tatatgagggtcttggtgaattagttagggataaaactggagacagagaccaaattgaaggctccgtcacagtccacgcaaaagttggaaacaaatagcctaagctagagcaaaagagaaagtttggagaggaggaaaatgattcaataaatacttagaaggtgctgtaagaaaactgtggatacagaagggacagcagggataagatgtagagattatctctactgacagtgtactgaatatatatttatttttggggacagggtctcattctgttgcccaaggtgagtgcagtgatgcaaacatggctcactgtaggcttaacctcctgagstcaagtgatcctcttgccttagcctcctgagtagctgagacccagaaaaatttttaatattttgtaaagacaaggtctgctatgttgcccaggctggttttgaa

SEQ ID NO: 133474 - DNA, 581 bp, Homo sapiens
ctaggcaaagctgaagagagaacacagcaaagtagtagatatgaggaaattatttaagagcatagcacacacaaaaaaaaaacgaggtggaaaatgagagatttagattatggaaaagatctaaaacacaactaatggtagtttcagaaacatccattgaaagaatgaagaagatataatatttgagaagaaaactggcttcaaattttacagaattgattagggtttttattgatttggacacaggaagtcaaatgagttctaatcatgattaagtaaaaatagatacttagataaaatgttgagaaactatagactaccaaaggcaaaaataaaatcttaaataatctagacagagaaagagagattaatcataattgaataaacaatagagcagattctcaattcttatcagcaacaatagaagwtggaagataattaaataaagtcttcaaagtacagagataaataaaacattcagtgttgaattctgtagccagttaactgtcactcgaacaaaagacaaatgaaagatattgtcaaacaaatacatttaagaacatatgccattttttaccagg

SEQ ID NO: 133475 - DNA, 581 bp, Homo sapiens
ctaggcaaagctgaagagagaacacagcaaagtagtagatatgaggaaattatttaagagcatagcacacacaaaaaaaaaacgaggtggaaaatgagagatttagattatggaaaagatctaaaacacaactaatggtagtttcagaaacatccattgaaagaatgaagaagatataatatttgagaagaaaactggcttcaaattttacagaattgattagggtttttattgatttggacacaggaagtcaaatgagttctaatcatgattaagtaaaaatagatacttagataaaatgttgagaaactatagactaccaaaggcaaaaataaaatcttaaataatctagacagagaaagagagattaatcataattgaataaacaatagagcagattctcaattcttatcagcaacaatagaagatggaagataattaaataaagtcttcaaagtacagagataaataaaacattcagtgytgaattctgtagccagttaactgtcactcgaacaaaagacaaatgaaagatattgtcaaacaaatacatttaagaacatatgccattttttaccagg

SEQ ID NO: 133476 - DNA, 491 bp, Homo sapiens
tcaattcagatattggatttagaaagaaagttttcaaagtatatattataaatatgttcaaattaaaaatatgataaagtgctgtctaatagagaatacgaataaggagacagaatatgtttaaaaatagaatctagaattgaaaagtacaacagttaaagtgaaaaaatcactagcgaggttcaatagcatatttgaccttgtgaaagaaagtatcagtgaacttgaagatagrccaatagaggttaatcaatctgaagaacaaaaagaaaaaagaatgaaggataataaacagatcctcagaaacttatgggataccatcaagagcactaccatatgcataatgggaattccaggagaagagagagataagaggacagaaaaatatttgaaaacataatgtctgaaaacttcaaaaatgctacaaaaaacattaatcttcagatataagaaggccaacaaatctcaagtaggataaacacaaagagatt

SEQ ID NO: 133477 - DNA, 491 bp, Homo sapiens
tcaattcagatattggatttagaaagaaagttttcaaagtatatattataaatatgttcaaattaaaaatatgataaagtgctgtctaatagagaatacgaataaggagacagaatatgtttaaaaatagaatctagaattgaaaagtacaacagttaaagtgaaaaaatcactagcgaggttcaatagcatatttgaccttgtgaaagaaagtatcagtgaacttgaagataggccartagaggttaatcaatctgaagaacaaaaagaaaaaagaatgaaggataataaacagatcctcagaaacttatgggataccatcaagagcactaccatatgcataatgggaattccaggagaagagagagataagaggacagaaaaatatttgaaaacataatgtctgaaaacttcaaaaatgctacaaaaaacattaatcttcagatataagaaggccaacaaatctcaagtaggataaacacaaagagatt

SEQ ID NO: 133478 - DNA, 491 bp, Homo sapiens
tcaattcagatattggatttagaaagaaagttttcaaagtatatattataaatatgttcaaattaaaaatatgataaagtgctgtctaatagagaatacgaataaggagacagaatatgtttaaaaatagaatctagaattgaaaagtacaacagttaaagtgaaaaaatcactagcgaggttcaatagcatatttgaccttgtgaaagaaagtatcagtgaacttgaagataggccaatagaggttaatcaatctgaagaacaaaaagaaaaaagaatgaaggataataaasagatcctcagaaacttatgggataccatcaagagcactaccatatgcataatgggaattccaggagaagagagagataagaggacagaaaaatatttgaaaacataatgtctgaaaacttcaaaaatgctacaaaaaacattaatcttcagatataagaaggccaacaaatctcaagtaggataaacacaaagagatt

SEQ ID NO: 133479 - DNA, 489 bp, Homo sapiens
aaacatcatggttttcaaatttaactgcaaatgtatcttttcattgcttcttggtgacgcccttcaccctatccatattgtcactaccaagtggtgattacttttcaggttcacatacttrttctttagaaaaatcttccctgtgccttataaagaatatgattgttggcattcaaaagccagcgaagtatacattattagcctgttgcctaactcatttctttaagaaactacactaattacccacatacttatgtttttatttcctcattatttctggagaaaacaaatactgctaacatgatatttgtaagagagaaaaaagtcttttcttgaaaagtgctgtcattgtagtactaacttatagtatcaacttctttatcaactccttatacactttttattctgagagaaataaaaaagctaaaagtgaaatgactttttttactctccatattataagcacccatcttggtaatttagggtctt

SEQ ID NO: 133480 - DNA, 489 bp, Homo sapiens
aaacatcatggttttcaaatttaactgcaaatgtatcttttcattgcttcttggtgacgcccttcaccctatccatattgtcactaccaagtggtgattacttttcaggttcacatacttgttctttagaaaaatcttccctgtgccttataaagaatatgattgttggcattcaaaagccagcgaagtatacattattagcctgttgcctaactcatttctttaagaaactacactaattacccacatacttatgtttttatttcctcattatttctggagaaaacaaatactgctaacatgatatttgtaagagagaaaaaagtcttttcttgaaaagtgctgtcattgtagtactaacttatagtatcaacttctttatmaactccttatacactttttattctgagagaaataaaaaagctaaaagtgaaatgactttttttactctccatattataagcacccatcttggtaatttagggtctt

SEQ ID NO: 133481 - DNA, 489 bp, Homo sapiens
aaacatcatggttttcaaatttaactgcaaatgtatcttttcattgcttcttggtgacgcccttcaccctatccatattgtcactaccaagtggtgattacttttcaggttcacatacttgttctttagaaaaatcttccctgtgccttataaagaatatgattgttggcattcaaaagccagcgaagtatacattattagcctgttgcctaactcatttctttaagaaactacactaattacccacatacttatgtttttatttcctcattatttctggagaaaacaaatactgctaacatgatatttgtaagagagaaaaaagtcttttcttgaaaagtgctgtcattgtagtactaacttatagtatcaacttctttatcaactccttatacactttttattctgagagaaataaaaaagctaaaagtgaaatgacttttttwactctccatattataagcacccatcttggtaatttagggtctt

SEQ ID NO: 133482 - DNA, 556 bp, Homo sapiens
caggtggggacaggactggagaggaggagggggtcccctatgagcaaagactggccaccaccccacctaacacccccacagggcccctgtggcatccctgtccagtccctgtcaccacccagtttttccctctggacccaggaattcaaagtaagcaaggaggtccgctgctccagttggctgcaaataattacaaccttaagcccaagcagcactttgggtcctggtttgggaccatgaagcgrctcggtgagactgagaggtaaggccagagcaggaattgggacagtaggattgaactctccctgggggccagcctcagaaagcctgtggccatagcctcttggccaacatcagatcctgtggtctggcaatgcctggggtacccagacctcactctggacaggccctgggagggggccctggtgagattcctggcagcctcacagccactcttctgtccgtagctacaacctatcatgccagctggaggctccatcccagttggctgggagcacaaaggccaggaagatagacatcacccaccacaggggcc

SEQ ID NO: 133483 - DNA, 556 bp, Homo sapiens
caggtggggacaggactggagaggaggagggggtcccctatgagcaaagactggccaccaccccacctaacacccccacagggcccctgtggcatccctgtccagtccctgtcaccacccagtttttccctctggacccaggaattcaaagtaagcaaggaggtccgctgctccagttggctgcaaataattacaaccttaagcccaagcagcactttgggtcctggtttgggaccatgaagcgactcggtgagactgagaggtaaggccagagcaggaattgggacagtaggattgaactctccctgggggccagcctcagaaagcctgtggccatagcctcttggccaacatcagatcctgtggtctggcaatgcctggggtacccagacctcactctggacaggccctgggagggggccctggtgagattcctggcagcctcacagccactcttctgtccgtagctacaacctrtcatgccagctggaggctccatcccagttggctgggagcacaaaggccaggaagatagacatcacccaccacaggggcc

SEQ ID NO: 133484 - DNA, 593 bp, Homo sapiens
gcttgcccagcagagctctcttgatccagctagaactggccagaactgactcactcaggaatgtgtagactttggcatcaggggctgctttaatttgcacaatttccaaatacctcttttttcttctttttctgatgagtcatctccctagacttgcattttaaagagatagatagttatcaggttccagagaagacgtggtagaacatttatatctcaaagacacagagctgagacttcaggttgagatatgataatttgcctaaaccaaaaaggaaggtgtaggtaaagttctagtcaagacaggatggccaggaaaaacaccttaaaccaarggatggcttgctttgctgatttaagccaatggcttctttatcataagacttcccagtgatttagtcctccctctcttccagtgcacagagacatacccctccttacaaattaaaaatgttctttatagatggaaatttattttacaaaaatgtttcaaaataaccagatgaaaatcatccttatgccagaaagactttatttttttattactagaaatgaaacactaagtatttgttgtattgacatacttaggctta

SEQ ID NO: 133485 - DNA, 593 bp, Homo sapiens
gcttgcccagcagagctctcttgatccagctagaactggccagaactgactcactcaggaatgtgtagactttggcatcaggggctgctttaatttgcacaatttccaaatacctcttttttcttctttttctgatgagtcatctccctagacttgcattttaaagagatagatagttatcaggttccagagaagacgtggtagaacatttatatctcaaagacacagagctgagacttcaggttgagatatgataatttgcctaaaccaaaaaggaaggtgtaggtaaagttctagtcaagacaggatggccaggaaaaacaccttaaaccaaargatggcttgctttgctgatttaagccaatggcttctttatcataagacttcccagtgatttagtcctccctctcttccagtgcacagagacatacccctccttacaaattaaaaatgttctttatagatggaaatttattttacaaaaatgtttcaaaataaccagatgaaaatcatccttatgccagaaagactttatttttttattactagaaatgaaacactaagtatttgttgtattgacatacttaggctta

SEQ ID NO: 133486 - DNA, 538 bp, Homo sapiens
cctgaagtgacctacccacctcggcttcccaaagtgcttggattacaggtgtgagtcaccacacccagccttcctcccaattttgtatatgggaaaacaactaaggcacaaaggttgtcttcccgcaaaagaccaagacttggggcttcaaatgagaggtattgtagtccttttaaacttgatatttagaagaggatgatcaagaggaagttggttatgctacttgctttcagtatacatcattcagaggtcagaagccataagggagagaaatatcyattagataagcatgtctgagttgtgggctgtgatgaggactcagttgtcaatgatgaaaaccagtaatttttggtactagaatttcacatcaaatgcccccactttactggaagtacattgaggaactttgataatcttaaagaagccagtgattttcttttgaatatttctccattttcctttattttcagccttctactagtcaaaagcggcctcgtgaaggggaagccgagggtgccgagaccacaaagcgcctggc

SEQ ID NO: 133487 - DNA, 538 bp, Homo sapiens
cctgaagtgacctacccacctcggcttcccaaagtgcttggattacaggtgtgagtcaccacacccagccttcctcccaattttgtatatgggaaaacaactaaggcacaaaggttgtcttcccgcaaaagaccaagacttggggcttcaaatgagaggtattgtagtccttttaaacttgatatttagaagaggatgatcaagaggaagttggttatgctacttgctttcagtatacatcattcagaggtcagaagccataagggagagaaatatccattagataagcatgtctgagttgygggctgtgatgaggactcagttgtcaatgatgaaaaccagtaatttttggtactagaatttcacatcaaatgcccccactttactggaagtacattgaggaactttgataatcttaaagaagccagtgattttcttttgaatatttctccattttcctttattttcagccttctactagtcaaaagcggcctcgtgaaggggaagccgagggtgccgagaccacaaagcgcctggc

SEQ ID NO: 133488 - DNA, 538 bp, Homo sapiens
cctgaagtgacctacccacctcggcttcccaaagtgcttggattacaggtgtgagtcaccacacccagccttcctcccaattttgtatatgggaaaacaactaaggcacaaaggttgtcttcccgcaaaagaccaagacttggggcttcaaatgagaggtattgtagtccttttaaacttgatatttagaagaggatgatcaagaggaagttggttatgctacttgctttcagtatacatcattcagaggtcagaagccataagggagagaaatatccattagataagcatgtctgagttgtgggctgtgatgaggactcagttgtcaatgatgaaaaccagtaatttttggtactagaatttcacatcaaatgcccccactttactggaagtacattgaggaactttgataatcttaaagaagccagtgattttcttttgaayatttctccattttcctttattttcagccttctactagtcaaaagcggcctcgtgaaggggaagccgagggtgccgagaccacaaagcgcctggc

SEQ ID NO: 133489 - DNA, 405 bp, Homo sapiens
ccctagcctgccctgcttgtgccctagatctgccccggcctttgcccytgtcttggttccagccttgactcagccctggaccttccctgaccttgcctcagccctggcactaccctggccttggcttggcatttgccctactctctctatggcctggctctggtcctgccctgctctgctcttgttctgtcctggcacagccctggccctgccgtatcactggctctggtcctgcccttatgcaggcctgcccctgcccctgccttggctttggcctggaccttggccgtacagtgaccctgccatgaccctttcctggccctggcctggaacttggccctgccaaggactcgccctggctctgtcatggccctggccctttcctggatttggatgtgtcctgtc

SEQ ID NO: 133490 - DNA, 405 bp, Homo sapiens
ccctagcctgccctgcttgtgccctagatctgccccggcctttgcccctgtcttggwtccagccttgactcagccctggaccttccctgaccttgcctcagccctggcactaccctggccttggcttggcatttgccctactctctctatggcctggctctggtcctgccctgctctgctcttgttctgtcctggcacagccctggccctgccgtatcactggctctggtcctgcccttatgcaggcctgcccctgcccctgccttggctttggcctggaccttggccgtacagtgaccctgccatgaccctttcctggccctggcctggaacttggccctgccaaggactcgccctggctctgtcatggccctggccctttcctggatttggatgtgtcctgtc

SEQ ID NO: 133491 - DNA, 405 bp, Homo sapiens
ccctagcctgccctgcttgtgccctagatctgccccggcctttgcccctgtcttggttccagccttgactcagcyctggaccttccctgaccttgcctcagccctggcactaccctggccttggcttggcatttgccctactctctctatggcctggctctggtcctgccctgctctgctcttgttctgtcctggcacagccctggccctgccgtatcactggctctggtcctgcccttatgcaggcctgcccctgcccctgccttggctttggcctggaccttggccgtacagtgaccctgccatgaccctttcctggccctggcctggaacttggccctgccaaggactcgccctggctctgtcatggccctggccctttcctggatttggatgtgtcctgtc

SEQ ID NO: 133492 - DNA, 405 bp, Homo sapiens
ccctagcctgccctgcttgtgccctagatctgccccggcctttgcccctgtcttggttccagccttgactcagccctggaccttccctgaccttgcctcagccctggcactaccctggccttgscttggcatttgccctactctctctatggcctggctctggtcctgccctgctctgctcttgttctgtcctggcacagccctggccctgccgtatcactggctctggtcctgcccttatgcaggcctgcccctgcccctgccttggctttggcctggaccttggccgtacagtgaccctgccatgaccctttcctggccctggcctggaacttggccctgccaaggactcgccctggctctgtcatggccctggccctttcctggatttggatgtgtcctgtc

SEQ ID NO: 133493 - DNA, 420 bp, Homo sapiens
gccctggccttggtcctcttatgtccctggcygtgaccctgcccctggtttttctctggccatgaccctgccccggttctgtcctatccctggccctgtctcagttctgtcctagccctggcctttcacagtactttatgcttagtaagggctccatagtgtctgtgagttgaatgttgtgttcatagtatctgccaaaacagaaagaaaaaaaacaaaatctgaagatgagaagttaaagctttgtatataatatgccttgaattgtaagtgcttgttattagttgtattacatgtaggtcatggttttgtacacataactccaaaccattgatactgttaaaagaatatatgaatatatgaaagaatatataaacgtaagaatgtatgagtatctaatgacctctccaaactaatttt

SEQ ID NO: 133494 - DNA, 420 bp, Homo sapiens
gccctggccttggtcctcttatgtccctggctgtgaccctgcccctggtttttctctggccatgaccctgcccckgttctgtcctatccctggccctgtctcagttctgtcctagccctggcctttcacagtactttatgcttagtaagggctccatagtgtctgtgagttgaatgttgtgttcatagtatctgccaaaacagaaagaaaaaaaacaaaatctgaagatgagaagttaaagctttgtatataatatgccttgaattgtaagtgcttgttattagttgtattacatgtaggtcatggttttgtacacataactccaaaccattgatactgttaaaagaatatatgaatatatgaaagaatatataaacgtaagaatgtatgagtatctaatgacctctccaaactaatttt

SEQ ID NO: 133495 - DNA, 420 bp, Homo sapiens
gccctggccttggtcctcttatgtccctggctgtgaccctgcccctggtttttctctggccatgaccctgccccggttctgtcctatccctggccctgtctcagttctgtcctagccctggcctttcacagtactttatgcttagtaagggctccatrgtgtctgtgagttgaatgttgtgttcatagtatctgccaaaacagaaagaaaaaaaacaaaatctgaagatgagaagttaaagctttgtatataatatgccttgaattgtaagtgcttgttattagttgtattacatgtaggtcatggttttgtacacataactccaaaccattgatactgttaaaagaatatatgaatatatgaaagaatatataaacgtaagaatgtatgagtatctaatgacctctccaaactaatttt

SEQ ID NO: 133496 - DNA, 420 bp, Homo sapiens
gccctggccttggtcctcttatgtccctggctgtgaccctgcccctggtttttctctggccatgaccctgccccggttctgtcctatccctggccctgtctcagttctgtcctagccctggcctttcacagtactttatgcttagtaagggctccatagtgtctgtgagttgaatgttgtgttcatagtatctgccaaaacagaaagaaaaaaaacaaaatctgaagatgagaagttaaagctttgtatataatatgccttgaattgtaagtgcytgttattagttgtattacatgtaggtcatggttttgtacacataactccaaaccattgatactgttaaaagaatatatgaatatatgaaagaatatataaacgtaagaatgtatgagtatctaatgacctctccaaactaatttt

SEQ ID NO: 133497 - DNA, 548 bp, Homo sapiens
ctgtgttgaataagggaattacttccagatggcaatggtgtaaatctactatgataacaactatatatatatatatatatatatatatatatatatatatatatatataatgaaatatgtttatagaaaatgtctggaatctttttacagtctagagtccttctcaatggccttaatttgcaaaaatagcctcaaattattttatttaattaaaaactgcaagagattaacattttctcctcataaggtccagtcaagtatttttcttttgaatgaagaaaaaaaatacattgcctgtaaaaaattaattctttgayttagtagttagcagtgaacagttgatatggtttggatgttttatcccctccaaatctcatattaaaatgtgacctgtattgttggatgtgaggcctagtgggaggtattaggtcatgggggcaaatccctcatgaatggtttggttccctcccttgggtaataagtggtaaagagtttacaggagatctagttgtttaagagtgtggcaccttccctctctctctcttgct

SEQ ID NO: 133498 - DNA, 503 bp, Homo sapiens
gattgacagtggcattaacattgtcattaaatcttaaataaacactaatttcccagtgcttgcaagartctgacctggaaaaagatgaaaaaaaggaaatactatagagttttttgttaattatcaagcttttcctttgtgttttgtttatcagatatataacgtttgaaactgaagctgataatcaaatgaaatagtttttaaaaactacttgttggagtcaaatgactactcttggcttttctttctttttttccatttccatttataatagccaaaaaaagtttcttgtcactgtttctaaataacaccatgacctcctgctcacaaattaaaatgtattgcaattctctaaataagaacaatctaccctttctaaaatttcaaattaaatgtgctttatttttagtatagtgacctaccctgcatgtataaattaaatgtaagaaacattttatgtttagtaggcttgaaaatgagactatttttcccttattttttct

SEQ ID NO: 133499 - DNA, 503 bp, Homo sapiens
gattgacagtggcattaacattgtcattaaatcttaaataaacactaatttcccagtgcttgcaagagtctgacctggaaaaagatgaaaaaaaggaratactatagagttttttgttaattatcaagcttttcctttgtgttttgtttatcagatatataacgtttgaaactgaagctgataatcaaatgaaatagtttttaaaaactacttgttggagtcaaatgactactcttggcttttctttctttttttccatttccatttataatagccaaaaaaagtttcttgtcactgtttctaaataacaccatgacctcctgctcacaaattaaaatgtattgcaattctctaaataagaacaatctaccctttctaaaatttcaaattaaatgtgctttatttttagtatagtgacctaccctgcatgtataaattaaatgtaagaaacattttatgtttagtaggcttgaaaatgagactatttttcccttattttttct

SEQ ID NO: 133500 - DNA, 499 bp, Homo sapiens
gacagtggcattaacattgtcattaaatcttaaataaacactaatttcccagtgcttgcaagagtctgacctggaaaaagatgaaaaaaaggaaatactatagagttttttgttaattatcaagcttttcctttgtgttttgtttatcagatatataacgtttgaaactgaagctgataatcaaatgaaatagtttttaaaaactacttsttggagtcaaatgactactcttggcttttctttctttttttccatttccatttataatagccaaaaaaagtttcttgtcactgtttctaaataacaccatgacctcctgctcacaaattaaaatgtattgcaattctctaaataagaacaatctaccctttctaaaatttcaaattaaatgtgctttatttttagtatagtgacctaccctgcatgtataaattaaatgtaagaaacattttatgtttagtaggcttgaaaatgagactatttttcccttattttttct

SEQ ID NO: 133501 - DNA, 586 bp, Homo sapiens
tcctccctgtggcttctgtggcaccccaccctatgattttcttccaatctctctgactggtctcaccttttcctctgggttcctctttctctacttgccccctaaatgatggtatttcccaaggaattttgttcatttctttgaccctctctactgaaggatccattcattcccatggcttcaattatgatctatatggtgataatttgataatttatgactctatcccttaaccagatccctctcataagctccgaaccacctcctagacatcttgtttggacatatcacacccaattcaaacttacctacttctcttcctgcctaaacttgctyctttactgtgtcacatctcaggggatagcacccccatccatcccctagttacccaaggcagacacctaagcatcatctttgacttttactagtttcctccacgccctcagctctcattcacaaagtcctcggaatatttaccttcttaataactctgtgatgagctacttaaaaaagatgggaaacttgatgaactattaatatttaaagaacaaacaaataaataaatataaaactatctctcagatct

SEQ ID NO: 133502 - DNA, 586 bp, Homo sapiens
tcctccctgtggcttctgtggcaccccaccctatgattttcttccaatctctctgactggtctcaccttttcctctgggttcctctttctctacttgccccctaaatgatggtatttcccaaggaattttgttcatttctttgaccctctctactgaaggatccattcattcccatggcttcaattatgatctatatggtgataatttgataatttatgactctatcccttaaccagatccctctcataagctccgaaccacctcctagacatcttgtttggacatatcacacccaattcaaacttacctacttctcttcctgcctaaacttgctcctttactgtgtcacatctcaggggatagcacccccatccatcccctagttacccaaggcagacacctaagcatcatctttgacttttacyagtttcctccacgccctcagctctcattcacaaagtcctcggaatatttaccttcttaataactctgtgatgagctacttaaaaaagatgggaaacttgatgaactattaatatttaaagaacaaacaaataaataaatataaaactatctctcagatct

SEQ ID NO: 133503 - DNA, 586 bp, Homo sapiens
tcctccctgtggcttctgtggcaccccaccctatgattttcttccaatctctctgactggtctcaccttttcctctgggttcctctttctctacttgccccctaaatgatggtatttcccaaggaattttgttcatttctttgaccctctctactgaaggatccattcattcccatggcttcaattatgatctatatggtgataatttgataatttatgactctatcccttaaccagatccctctcataagctccgaaccacctcctagacatcttgtttggacatatcacacccaattcaaacttacctacttctcttcctgcctaaacttgctcctttactgtgtcacatctcaggggatagcacccccatccatcccctagttacccaaggcagacacctaagcatcatctttgacttttactagtttcctccacgccctcagctctcattcacaaagtcctcggaatatttaccttcttaataactctgtgatgagctacttaaaaaagatgggaaacttgatgaactattaatatttaaaraacaaacaaataaataaatataaaactatctctcagatct

SEQ ID NO: 133504 - DNA, 650 bp, Homo sapiens
caattttgacttctgctgaagtatttaacttgactttgaaatgtgatctttgttgacaggtcaaagaaattcattgatcctatttatcaggtatgggaagacatgagtgctgaagagctacaggagttcaagaaacccatgaaaaaggtcagtttgtgattgattgagcacactctcggaatctcctttctggttccaggtcacagtcagatagtgatagtaagtggcaagtcgctcatgsgtgtaatccccacactgtagggggtcaaggccagaggattgctggagaccagcctgggcaacacagtgacaccctgtttctacaaaaattttttaaattagctgggcgtggtggtgcacacctgtaatcccagctcctctggaagctgaggtgggaggtcaaggctgcagtgagctgtaaatgcagcatggcatttcatcctgggcaacagagcaagaccctgttttctttaaaaaagcacaccgaaaccgtgtcttactcattctgcctttataaaattccaggcccaggttttgttgttatttaaagagtctatggcttttttggataaattgcttaaaccagacacttcacatactgacatgtgagaagcgaaggttaattacaaattagctgaacaaatttagat

SEQ ID NO: 133505 - DNA, 450 bp, Homo sapiens
ttggtttcagctaacaatcacgacaggcaacaaaacaaaacagcaatttgattctagcttgcatgtctygttagtgaagctgagtgctgttttcaggtgcacagtagtcatctgtagttttttttctaaacaagaaaactccaaatttgccttctacctcgacggacggcaaatttagacagaagccactttcttagacttaatgaatacaattctttcctacatgagtaaaataaagacatcacatttattttaagagacaagctgaccaacttgtacttaagtatattttcttaggagtttctttgatgcatatttcaataaaaattacctaaatgggatgtcactgcttacaaaaacaagatatttaattcagattcctggcattaatttatacaaagaaaagcagagcttgtatttacttaccttgtgataaaacctcatcctact

SEQ ID NO: 133506 - DNA, 450 bp, Homo sapiens
ttggtttcagctaacaatcacgacaggcaacaaaacaaaacagcaatttgattctagcttgcatgtcttgttagtgaagctgagtgctgttttcaggtgcacagtagtcatctgtagttttttttctaaacaagaaaactccaaatttgccttctacctcracggacggcaaatttagacagaagccactttcttagacttaatgaatacaattctttcctacatgagtaaaataaagacatcacatttattttaagagacaagctgaccaacttgtacttaagtatattttcttaggagtttctttgatgcatatttcaataaaaattacctaaatgggatgtcactgcttacaaaaacaagatatttaattcagattcctggcattaatttatacaaagaaaagcagagcttgtatttacttaccttgtgataaaacctcatcctact

SEQ ID NO: 133507 - DNA, 450 bp, Homo sapiens
ttggtttcagctaacaatcacgacaggcaacaaaacaaaacagcaatttgattctagcttgcatgtcttgttagtgaagctgagtgctgttttcaggtgcacagtagtcatctgtagttttttttctaaacaagaaaactccaaatttgccttctacctcgacggacggcaaatttagacagaagccactttcttagacttaatraatacaattctttcctacatgagtaaaataaagacatcacatttattttaagagacaagctgaccaacttgtacttaagtatattttcttaggagtttctttgatgcatatttcaataaaaattacctaaatgggatgtcactgcttacaaaaacaagatatttaattcagattcctggcattaatttatacaaagaaaagcagagcttgtatttacttaccttgtgataaaacctcatcctact

SEQ ID NO: 133508 - DNA, 450 bp, Homo sapiens
ttggtttcagctaacaatcacgacaggcaacaaaacaaaacagcaatttgattctagcttgcatgtcttgttagtgaagctgagtgctgttttcaggtgcacagtagtcatctgtagttttttttctaaacaagaaaactccaaatttgccttctacctcgacggacggcaaatttagacagaagccactttcttagacttaatgaatacaattctttcctacatgagtaaaataaagacatcacatttattttaagagrcaagctgaccaacttgtacttaagtatattttcttaggagtttctttgatgcatatttcaataaaaattacctaaatgggatgtcactgcttacaaaaacaagatatttaattcagattcctggcattaatttatacaaagaaaagcagagcttgtatttacttaccttgtgataaaacctcatcctact

SEQ ID NO: 133509 - DNA, 427 bp, Homo sapiens
ggggaggatgtctcactaaaaacactgaaaggacattgcttatacactggccttctgtagagagcctctggagcctcgaggaagtgtagctcctaacgcagtcggctgcactgactcaattatacatctattggaccttcscaagtgcagagctgccactgtcacttctgatcgtaacaacccaaatgcatgtctccagatagcaccagaagtaagagctggagggataaggatggtaatgcttgggtgtcagccccacagaggagaaggggagcaaaggtctgatggggggatgtgacggttcttcccaaccggggtctctgatggggggatgtgatggttcttcccagctggggtctctcatggtctctctctgactggagttggggaaggatatttggacacctggacatgcgtgtctgcatgc

SEQ ID NO: 133510 - DNA, 427 bp, Homo sapiens
aggggaggatgtctcactaaaaacactgaaaggacattgcttatacactggccttctgtagagagcctctggagcctcgaggaagtgtagctcctaacgcagtcggctgcactgactcaattatacatctattggaccttcgcaagtgcagagctgccactgtcacttctgatcgtaacaacccaaatgcatgtctccagatagcaccagaagtaagagctggagggataaggatggtaatgcttgggtgtcagcccyacagaggagaaggggagcaaaggtctgatggggggatgtgacggttcttcccaaccggggtctctgatggggggatgtgatggttcttcccagctggggtctctcatggtctctctctgactggagttggggaaggatatttggacacctggacatgcgtgtctgcatg

SEQ ID NO: 133511 - DNA, 431 bp, Homo sapiens
gtgttgttgaatttggttttctagtattttgttgaggatttttgcatcaatgtttatcaggatcttggcctatagttttttttttcttttgawgtttctttgtctaattttggtaccagggtaatactggcctcacagaatgaatttagaagcattcttttctcctctattttttgaaatagtttgggtaggattggtatttgttttcctttaaatgtttggtaaaattcagcagtgaagccatcaggtcccagccttttctttactgggaggctttttcttacagctttgatcttgttaatcgttgttcatttgttcagtttttattatttcttcatgactcaatcttggttggttgtatgtgtataaaatgtactcatttattctagttttccaaattattggcatatagttgctcacagtagactcta

SEQ ID NO: 133512 - DNA, 399 bp, Homo sapiens
ctgagccatttgctcagtatatcacgctctgtgctccctggtagccagtgcaaagaaggagagagaaggagagtgagagagagaaggagaaaaaaaatagaaaggaagaaaggagataagttacatagttactatttcatgacacaacacaactctgcaactcttcagaaagtgctacacaagcactaatgtataaacaaagtggtattgctkattttctaatcaatgtctctaggtagcctcagcctacacttcagtatccttatacgtaagtaaaatttatgtagagcatatgtattgccagaaatatttccctgccttacatatttcactttatggttcattactcacatttgttcttaaatactgtagttttaacagctgcctctagtttctatc

SEQ ID NO: 133513 - DNA, 491 bp, Homo sapiens
ccagacatagatctttcccagaaatctttgctaatgaagcttacaataaacaaactaaaaacagactctaagtgtataattgcatataattttcttttttttttaaaaaaactatattttgtagaggcttgggaaacttagagatagcaaaaccatttctttattgctagctccccataatcctaaagtcatgcctaggctgattcattgtaagatcatgaaaagcatttcccataccaggcattccccattttaaataaaattaacacattctttccccacataatatgtgtcctatggctagtttttaaatgctgactgacagagtaaataacattgtggtgattaattacggacatctcaatgtttacttgaaagtcattggamagaatcaggaactttataaatcctatctctagcaccaacttgataacagatacagctctcaaaataattgcatttttttacttataagcctcttccataaattc

SEQ ID NO: 133514 - DNA, 577 bp, Homo sapiens
cttccaggctcaagctgttctcccacctaagcctcccaagtagctagggctacaagcacatgccaccatgcctagctaatttttggtattttagtagacacagggttttgccatgttgcccaggctggtcttgaactcctgagctcgcctcaaactccctctcttttttttaatgctcactgcacttgcaattattagtttaaaatctgtacctctgtattagtgtcagttttctggttatgatattctaccatagtttggtaaaatgttactattggagtaaactgggaaaagtgtacacagaatcctttgtattattttttacaactgcatgtatatgcaaagatttctcattaaaaatttcaattgaaaacaaagaaacaaaacctgtaatccctactatttagacatggtgagtcagggactgcatgggtcttgctcattgctatatcttttctgtttggcctggcacyttggaaaagttgtagctgaattaaagttcgtagaacaaaataaatccataaatactggtatccaagagcacatagctagttagtgccagagatgattcaactgt

SEQ ID NO: 133515 - DNA, 510 bp, Homo sapiens
acagaaacaaagatgtagagagaaattgcagatcacgtaaaaatccagacgaaaacatataagttgaagagtgggagatgggttcggaaaagatgagaaaatatgggatatcttgaaagacaagtaaggaatcagtgctttatccttttatttcagttagaatacttgaacccaatcatctacatttccagcccaacaaagagatgccctatgagtacttaacaccatttttcctgtgatttcagaagactccactgcagtgatacctaaaaagagttrcagacaagtggagagtaatgtggagcctcattagatggctatgcccataagccaactgagaatactgtggggccagacatggtggctcacgcctgtaatcccagcactttggtaggacaaggcaggcagattgcttgagctcaggagttcaagaccagccttggcaacatagcaaaatcccatctctacaaaaacaaaaaattaacggagtgtgggggtgcattcctgtag

SEQ ID NO: 133516 - DNA, 552 bp, Homo sapiens
ctacttttgattttctgttctggatttcaatttcttcctgatttaagcttgaaagagtgaatgtttctaggaatttattcatttcctctaggttttctagtttgtgaacacagtttttcatagtggtctctgatcacaaacccatagttaacattataccaaatagtaaatatttgaaatctttttctctaagatctggaaaaaacacagctgttcacttttaccacccttatttaacatagaattggaagtcttaaccagaacaatcaggcaagggaaaagaataaaaagatccaaatttgaaaaaagaagtcaaattgttcctctttgctgatggcataatcttttatacagaaaaccctaaagattctaccaaaaaacagttcaaactaataaaaaattcaataaatttacagaatacaaaaaacatacaaaattttgtggaaactgtaacattcatttatcgatggatraaagacagctggaggcatcacactatctgcatgcatttggcaaggggttaacagaaaatagaagaaacttaactcaaca

SEQ ID NO: 133517 - DNA, 608 bp, Homo sapiens
tacattttgtgggttagtttatattttttaggtaggctaaatcatgaaaatcacataaggcggttagggattcctaaaactgttcttcctaggtgataatatgcagacagataacatgaaaaattatcaaaataatgcagattcccattcagtaagtcttgggtcggaattgagtacccgaatttttaacaaggtctcacataatgccattgctgctggtctgatgactagctgtagaatgggcaaggtgtagattgaacagtcccagccccttctgccctctccttaaatgtagtttaagaagacgtaattaaagctgctctgccctcttgcttgaatgacccataggctrgttgttttgcatctcagttttcttctctgaaagagaaagcaggaaggaattttactggttctgggaaacaagtaacatatccagtggaaagtatccaaaggaataatatactttgaataaagtagtgggatcctttcaggatgaagtcatttatcacaagactaaacatatgagctgttttgcttcattcactctgatcctcagactagaaatttcagtggactccaaaatgtataattatagttgatatttatct

SEQ ID NO: 133518 - DNA, 547 bp, Homo sapiens
ttgtcatgtcaataattacattaaaaataaatggtcaagttttctgattccaaaatagcagcataaagcaagctggtttcactttcccctcaaccctacaaaaccataacaaaacaagacatatatacagcactacgattattaccagcaatatccyggaacttaaatagttaattctcaagaacacagaaaaatggaaaactctgagcagaaggtgagagaactagacatccatatctgtgtggcctttgagattgaagtgggcaaccaattttcctaccatcttgaattcaccaggccagaggcttgtccctgcctcaatctaaggaaaacataatgagcactgaaagaagtaccctaaggacagccagagacaaaggggaaagtgagactaccatcctcaatggtggaaactactctataacttgggggaaggcaatgccaaaattagagttgctgttcagcagcatcacactgtacatggcaggttccacaggtcctctgggtagaaacctttagcaagccttaccactctgcctggatatcc

SEQ ID NO: 133519 - DNA, 510 bp, Homo sapiens
ggtagtaactccttattagcaacaataacactgaatgtagctgaattcaattttccaactaaaagaatgtatgaatggataaagaaacaactytatgctgcttacaagaaacccccttcacctataaaaacatacatagactgaaagtgaagagatgaaaaaagatactccatgcaactggaaaccaaaaagaaaaaaaaagcagaagtaaccatacttagataaaacagatcttaaatcaacaacagtaaaaaaaaaaaaaaaaaaaagattaaagagatcattatataatgataaaaaattaattcaacaataaaatataacatttctaaatatatacacacctaacaccaaagcacctatatttgtaaaacaaatactactggacctatgaaaaaagatggacagaaatacaataatagtggggaaatttaatcctacactcacaacagtagacacatcatcaagacaaaagaaaagtcaataaagaaacactgaacttaaatcgga

SEQ ID NO: 133520 - DNA, 510 bp, Homo sapiens
ggtagtaactccttattagcaacaataacactgaatgtagctgaattcaattttccaactaaaagaatgtatgaatggataaagaaacaactctatgctgcttacaagaaacccmcttcacctataaaaacatacatagactgaaagtgaagagatgaaaaaagatactccatgcaactggaaaccaaaaagaaaaaaaaagcagaagtaaccatacttagataaaacagatcttaaatcaacaacagtaaaaaaaaaaaaaaaaaaaagattaaagagatcattatataatgataaaaaattaattcaacaataaaatataacatttctaaatatatacacacctaacaccaaagcacctatatttgtaaaacaaatactactggacctatgaaaaaagatggacagaaatacaataatagtggggaaatttaatcctacactcacaacagtagacacatcatcaagacaaaagaaaagtcaataaagaaacactgaacttaaatcgga

SEQ ID NO: 133521 - DNA, 490 bp, Homo sapiens
aaaactcaacagtacaaaaataatctaattagaaaataggcaaaaaacttgaagagacagttcacctgagagtatgtacagatagcaaataagcacataaaaatgttcaaacgatgagtcattaaggaaatgtatgttaacagtataatgagatatctgtatatactaatcagaatgactaagataaaaaacactgataacaccaaatgctctgcaggatgaagagaaattagattattaatacactgcttgtgagagtataaaatggcatagccattctgaaaaagtttggcaatttcttttttcattataaattttattttaggtttaggagtacatgtgcrtgtttgttatataggtaaactgcatgtcacagggggtcaatatgtagattgttttgtcactcagttaataagcatagccattctgaaaaattttggcagtttcttaaaactaagcataaaattaactataaacgtagcaatcgaac

SEQ ID NO: 133522 - DNA, 454 bp, Homo sapiens
actcatgccacagtgctcctaccttctaaatgtaatgattaaatacatggataattacattaaggagccaactctggtgcctcacactcctcctcctgcctggatcacagctggagaatataagtataaattaatacatttatcgccaaatacttaacgagcatcttttgtattcagggcacagtacaaggtactttggaagctcctgagacaaattaatcaaatattctcaaggagtttctgatgtaccrtgagtaaaatatatacatataatgaaattacaaagtagaaaatgtcctacactataaaagagaaaaattctgcagggatcttgagaaatatggaattgtttttatttgaaagaaaaaaggtcttcaatgatatttttcctgggacttaatgagtgagacgtctttggatatgatctgaaagtctttccatatactattttcat

SEQ ID NO: 133523 - DNA, 606 bp, Homo sapiens
attttttttttctttccttattttaaagartctttaaagaacgcccatttttcttccattaataatgtataaaagacgtcattgacatggttaaattcccagcaccctcagttctttagaaatagaccaaacaacaggtatcatcacttaaaaactgtcttgattttgattgagtttctgttgagaaataaagtatatattttttatttttatcttttaattccatgtttccataaaatatacttgaagtcatctcatatatactcagcattaagaaatgatctggagtagtcaagtcaatcaatagttttataaagatagattggtggatgggtaagtggagtttaagggtgggtaacagattcctggaaactttccctaagtacactaattcagagaattcttttttcttctataattccccaaagcatatttatatatactagttctatttctccactttatgtactttattatatctctcaattcacggatatatacttacctaggacctacaactaaaatctacaccgaaaaagtgttaaagatatattaataatgtggcttaattaaaaaactaaataaatgtattgaagtgtgcttgtt

SEQ ID NO: 133524 - DNA, 580 bp, Homo sapiens
ttctgtctatgccttttctattcctgtgtccgttgttacttttctgatggcaattgtcacattgaactaaaattcctcaatactatgatctctgtggtcttgagttgtcacatgagttgtctgtactagaacactcacatttcttgatcttacttgggcaattcccaattataactcttaattgatcagaaatttcacagtgtaagtggcatctaaacggaatagctcgtctgcttgctctcatagtctgctacccttccgtggacsctatcacattatattatactttcctttttcttgatcaaacttgttactgtactggaggcaatgtgaaagcaagtacaatatctacaatatctaccatggcactagacattgctttctttacacctcagaaaaaaaaaatcaataatattgttagctgccctaaagaatgagtgagcaaagaaaagatgcagtgagtttgaaaattttatctcagttttctcttcttaaatacttggataagctcactggtttgttgggaatggtgtcagctagttgtctgtctccaagtcttttgtttcattctcttcctcct

SEQ ID NO: 133525 - DNA, 528 bp, Homo sapiens
ccttctctccttgtctctaccccttctctgcttttccggggacagggcaagtaccccaaccccttctctacttgtctctaccccttctctgcttttctgggagaggggcaagtacccctcaaccccttctccttcactcttagcagcaagtcccacttttctagaggggcaagtaccccaacctcatatctctgcaccccaatcccttatttccgcaccccaacctcttatatctctgcaccccaatcccttaattccacgccccaacgtcatatctctgcgccccaatcccttatttctgagccccgacctcttatttctgmgccccgacctcttatttctgcaccccatcccttatttccatgccccgacctcttatctctgtgccccaaccccttttcccacttttctggaaggtaagaacccccgaaccacttccctccatttctctactctctcttttctctaggcttgcttccttcactatgggaaccttccgaccctccattcgctcctaatgctactccc

SEQ ID NO: 133526 - DNA, 528 bp, Homo sapiens
ccttctctccttgtctctaccccttctctgcttttccggggacagggcaagtaccccaaccccttctctacttgtctctaccccttctctgcttttctgggagaggggcaagtacccctcaaccccttctccttcactcttagcagcaagtcccacttttctagaggggcaagtaccccaacctcatatctctgcaccccaatcccttatttccgcaccccaacctcttatatctctgcaccccaatcccttaattccacgccccaacgtcatatctctgcgccccaatcccttatttctgagccccgacctcttatttctgagccccgacctcttatttctgcaccccatcccttatttccatgccccracctcttatctctgtgccccaaccccttttcccacttttctggaaggtaagaacccccgaaccacttccctccatttctctactctctcttttctctaggcttgcttccttcactatgggaaccttccgaccctccattcgctcctaatgctactccc

SEQ ID NO: 133527 - DNA, 230 bp, Homo sapiens
ctattctttactattccttagcatccttaatcccagcctctcttcgctttcacttggactgaccctgacacccatcaagctcagcaaattacctaggctgtactgccrcaaagcttcacagacagcccccattacttcaatcaagcccaaatttcttcctcatctgttacctatcttggcataattctcataaaaacacacgtgctctccctgccaatcgtgtctgactg

SEQ ID NO: 133528 - DNA, 230 bp, Homo sapiens
ctattctttactattccttagcatccttaatcccagcctctcttcgctttcacttggactgaccctgacacccatcaagctcagcaaattacctaggctgtactgccacaaagcttcacagacagcccccattacttcaatcaagcccaaatttcttcctcatctgttacctatctyggcataattctcataaaaacacacgtgctctccctgccaatcgtgtctgactg

SEQ ID NO: 133529 - DNA, 538 bp, Homo sapiens
gagcaagtcacatcctacatggatgtcagcaggcaaagagagagagcttgtgctggcaaactcctgtttataaaaccatcaaatctggtgaggcttactaactatcatgataacagcatggaaaaaaacttgccctgggtcactcccacagcaggtgggagttcaaaatgagattagggtgaggacatggccaaaccacatcaccttgtatatagaaagattttaaaattcccttagaatgtgccacactatgaattaaaagtattttaaaaatycaacaaacatttatgatttaaatagaattttaatcatcatggctgacatcttgtctttggaggctttggaaaatgatgaccatgactttttcaaaagtctacccagatgttttataatatatatttcagccttacacaaataatgcaatatgtagtgtcctgccactggcctctccttagggactacagtatctggtaatagagctaggctttagtgtggttttcccagaaacctgtctaaaacatgattgggcatgacttta

SEQ ID NO: 133530 - DNA, 538 bp, Homo sapiens
gagcaagtcacatcctacatggatgtcagcaggcaaagagagagagcttgtgctggcaaactcctgtttataaaaccatcaaatctggtgaggcttactaactatcatgataacagcatggaaaaaaacttgccctgggtcactcccacagcaggtgggagttcaaaatgagattagggtgaggacatggccaaaccacatcaccttgtatatagaaagattttaaaattcccttagaatgtgccacactatgaattaaaagtattttaaaaatccaacaaacatttatgatttaaatagaattttaatcatcatggctgacatcttgtctttggaggctttggaaaatgatgaccaygactttttcaaaagtctacccagatgttttataatatatatttcagccttacacaaataatgcaatatgtagtgtcctgccactggcctctccttagggactacagtatctggtaatagagctaggctttagtgtggttttcccagaaacctgtctaaaacatgattgggcatgacttta

SEQ ID NO: 133531 - DNA, 656 bp, Homo sapiens
gtgtgatgtttggggccagactctcatgaggggacaatgtggaactgctacttgcatgctcaggaagcagaaaaggcaagactttatttttcctttttcttttgatgctttaactgaagaggaaaatatttttattttctgccacactctttsaaggatgctccagacagccatgcagagacatttgcacctgaacaaaaataaaatcaatcccaaaaagggaaggggtgctgaagtgaataaaatttcactcctaatttaatggaaatttgatggtaatgtctattttctgagacatggccgtctgaaaagctttaaaaccagctgtggcccagaagtatacacctgaagcctaacaaataaaataatagtttttgaataaaggtttttctttgctgcgtaaagctagattggcaaatatttgtattttccatgaacaaaaacacattcattgaatagtatctcgaaacatactggatagaattacaagtttaaaagctatttacacccttgtacatcaacagagcaattcttttatagcaagaatcacaaattcttagtaagtttgaatttgaggatgagaaagcaagcagagagtaaaaactaacatctctataggcataaccacagtatagactctgccaatgccagcagtt

SEQ ID NO: 133532 - DNA, 537 bp, Homo sapiens
attgaccaagaagtctctaatgttccccagcttgactaactttagatagacttcttcctgactatagccacctgacctcctttttcttttactaaagaaacttttacgttagaaaacttgtaattgtgcattctttctccatccttttgagatgtaaatcttttcccaggctcttgctagttttacaacccaggaaagtctttctcaacaacctgggagccatccttttgaaatgtaattatcaagaaagataggatccctgtctcccagcctctgtgggagggtaggagcctaacttccataagtaacaattagcacacagagacgacctcatcacattggtcagtcttacccctaatgtcctccagggcttttccactagctcacccaaagcccttaaaaatcctcctgtcttttgtttcaaagaagttgagtttaatctttctcccctaatrcagtcctaacctctattgcagtagttttgagtaaagttttccttgctgtgtctggtgcaattgtttttaagtatccaccaag

SEQ ID NO: 133533 - DNA, 613 bp, Homo sapiens
agtttccttttgtctacttaggtttatttttattcaacaagtattacattcataaccctctagcataaagcctgaacacaacaaagtgtacataagcattttttgttttttccctcatggaagtcacattttagtggtggaagagagggcaggtggcaggcaagtaacaagagaacaaataattcaaacaacatcaggataatttttgatctacaggaaacaaggaaggtgcagttcrgaatgattgcaggggtggacctcctttggataggctggttggtgaagctttcttcaggaagttggcatttgaatggggccctgaggattgagaaggagccaggcaggaaaacagcacatggaatatcttccaaaatgaggactagcaagagaaatttctctagcgcagaattttctatgcttaagaaattgtcagaaagccatggggctaaagcagaacagcaagagagagagcatcataagattggataaatagagcatgtagaacatggaaagtagctcaaatacaattccaagaagtttgaatatgattctaaagcagtgggaaatcatgaacaagattttacccacccttgagaggtatagatgtgaaaca

SEQ ID NO: 133534 - DNA, 608 bp, Homo sapiens
gtctgcagggctgtttgttgctttttgccaaccagcatcttctttcactgccttgggtcactctacccagatttgatttgggaaccacccttccttgatcttagcgcacatggttcatggatactgactcattgccagccccaggggcagtcttatgataaaaagccaacataatcagagccttatgtcttcttgccatagataattcaggatagacacttgacacatggaaggccactgagagccaagaagattcaattctgggacttttgctagaacatttaggaaagagaatattcctcctcagagcttgctaagtttataggtgatacaggaaattatttaggcatatagagtaaaagagtcctcggcagaatttcccttttawcaaaaagcagcccccaaatcatttcttttctaacaaagaggagcctgaaaaatcgagctgcagacatagaaaagcaagctggaagcttgcacgggtgaatgccggcagctgtgccaatagaaaatggctacctggaaaccagttatgttcaacatgaaggctccgtcttcccttttctttgtcaccacgtgtacagtattgaaccaggtaacatggcagt

SEQ ID NO: 133535 - DNA, 565 bp, Homo sapiens
aatgggtatcccattctctatgatgcgcttattttacatggcatgcctgtatcaaaacatctcatgtatcccatagatctatatgcctactatgtacccacaaaatttttttaaaaatttacctgtcccatggtagatactcagtaaatacgtgttgaatgtagaatgaatttwaaaaaaaaaaactgttttagtattactataacaaaaagtagacagggtaatagatgacaagcagaaaaaaatgaatgaatgaatttgaaatgcttttctctgtactgaaatccagctgggctagaaagcatttatcctttaacatgattgatgtatatataatctaactgaaatgtcaggtttaaagcacagttacaattaggtaggtatatcttacttagatatatgctttaagaagttggtatgcggaaagttattgctgtacttataaaacctaacacttgaggcacccctcatagtatgaacttgggcctcctaaaggaaacaattctcaatgctaacaactttctaaaactaattttcctcatccatcatccaatcattaataaat

SEQ ID NO: 133536 - DNA, 602 bp, Homo sapiens
ttcacagttctgaaggctggggaatctgagatcaaggtgttggctgatcaggttttgggcragggtctgcttttttgtttgcagatggctgtcttcttgtatcctcacatggcagggagcagagaaagaaccaagttttctcatgtatccacttataagggcactaatcccatcatgagcctaccacacttatgacctcatctgactttattaccttctgaagattccgcttcctgataccatcccagagtttcaacatatgaattccgagggacacaaatattcagtgcatagctgttgtacttggaggaatagaggggaaaaccccacctctctgcttcattattccagagtgaaattcctaactctttattttttttacatcgcttttgttcttcagatagctatttgacctcttcaaactcttggaagttgtcattaagagaggaacttcattcacataagtgataacgtaaattttttttatagtcattcaaaaatttgtggcacttgacattacatttaaggaatcaaactgctttttcttatctttcatagctaaatgtaatgttgaaacaagttatcataatgggaatgggttt

SEQ ID NO: 133537 - DNA, 602 bp, Homo sapiens
ttcacagttctgaaggctggggaatctgagatcaaggtgttggctgatcaggttttgggcaagggtctgcttttttgtttgcagatggctgtcttcttgtatcctcacatggcagggagcagagaaagaaccaagttttctcatgtatccacttataagggcactaatcccatcatgagcctaccacacttatgacctcatctgactttattaccttctgaagaytccgcttcctgataccatcccagagtttcaacatatgaattccgagggacacaaatattcagtgcatagctgttgtacttggaggaatagaggggaaaaccccacctctctgcttcattattccagagtgaaattcctaactctttattttttttacatcgcttttgttcttcagatagctatttgacctcttcaaactcttggaagttgtcattaagagaggaacttcattcacataagtgataacgtaaattttttttatagtcattcaaaaatttgtggcacttgacattacatttaaggaatcaaactgctttttcttatctttcatagctaaatgtaatgttgaaacaagttatcataatgggaatgggttt

SEQ ID NO: 133538 - DNA, 602 bp, Homo sapiens
ttcacagttctgaaggctggggaatctgagatcaaggtgttggctgatcaggttttgggcaagggtctgcttttttgtttgcagatggctgtcttcttgtatcctcacatggcagggagcagagaaagaaccaagttttctcatgtatccacttataagggcactaatcccatcatgagcctaccacacttatgacctcatctgactttattaccttctgaagattccgcttcctgataccatcccagagtttcaacatatgaattccgagggacacaaatattcagtgcatagctgttgtacttggaggaatagaggggaaaaccccacctctctgcttcattattccagagtgaaattcctaactctttattttttttacatcgcttttgttcttcagatagctayttgacctcttcaaactcttggaagttgtcattaagagaggaacttcattcacataagtgataacgtaaattttttttatagtcattcaaaaatttgtggcacttgacattacatttaaggaatcaaactgctttttcttatctttcatagctaaatgtaatgttgaaacaagttatcataatgggaatgggttt

SEQ ID NO: 133539 - DNA, 602 bp, Homo sapiens
ttcacagttctgaaggctggggaatctgagatcaaggtgttggctgatcaggttttgggcaagggtctgcttttttgtttgcagatggctgtcttcttgtatcctcacatggcagggagcagagaaagaaccaagttttctcatgtatccacttataagggcactaatcccatcatgagcctaccacacttatgacctcatctgactttattaccttctgaagattccgcttcctgataccatcccagagtttcaacatatgaattccgagggacacaaatattcagtgcatagctgttgtacttggaggaatagaggggaaaaccccacctctctgcttcattattccagagtgaaattcctaactctttattttttttacatcgcttttgttcttcagatagctatttgacctcttcaaactcttggaagttgtcattaagagaggaamttcattcacataagtgataacgtaaattttttttatagtcattcaaaaatttgtggcacttgacattacatttaaggaatcaaactgctttttcttatctttcatagctaaatgtaatgttgaaacaagttatcataatgggaatgggttt

SEQ ID NO: 133540 - DNA, 614 bp, Homo sapiens
ttgacattacatttaaggaatcaaactgctttttcttatctttcatagctaaatgtaatgttgaaacaagttatcataatgggaatgggtttagaatttaatcaaactttttcatgtcaaatatttcaaaaccctgatgaagccataatttgtagagtatgtcccttttactaaaacagtcatctggaagttagcttgtatgctgcaaaaacaaacaaacaaaacaaaataaatggacagaaatgaaagaaatatgagaagacagtttttgccctgcctcctggagctactcctcttcaaagtccctacttggcttggtgatcttttccccaacatcaacagaccacacttgagcccacctgccatgttctgtgggtgcctggaaaaaagtctccttcagcagttcatcagacacaatttccagaaatccaataataatacatttgcatctgactgttgacatatttgcccagatgatggaggaactccttggccacctgcagcatgccatgttgggtagtaccaggtratgctcactggatctgtcagcttagtgagttggaggaaggagaacagtcagataccactcagctaaggccagactcccaagagcc

SEQ ID NO: 133541 - DNA, 614 bp, Homo sapiens
ttgacattacatttaaggaatcaaactgctttttcttatctttcatagctaaatgtaatgttgaaacaagttatcataatgggaatgggtttagaatttaatcaaactttttcatgtcaaatatttcaaaaccctgatgaagccataatttgtagagtatgtcccttttactaaaacagtcatctggaagttagcttgtatgctgcaaaaacaaacaaacaaaacaaaataaatggacagaaatgaaagaaatatgagaagacagtttttgccctgcctcctggagctactcctcttcaaagtccctacttggcttggtgatcttttccccaacatcaacagaccacacttgagcccacctgccatgttctgtgggtgcctggaaaaaagtctccttcagcagttcatcagacacaatttccagaaatccaataataatacatttgcatctgactgttgacatatttgcccagatgatggaggaactccttggccacctgcagcatgccatgttgggtagtaccaggtaatgctcacyggatctgtcagcttagtgagttggaggaaggagaacagtcagataccactcagctaaggccagactcccaagagcc

SEQ ID NO: 133542 - DNA, 610 bp, Homo sapiens
tttcctttcatgaaagatttctctatagcatcccatgctgtttgacagcatttttacccatggtagaaattccttcaaaattggagtcatttctctcaaaccctgccactactttctcaactaagtttatgtaatattctaaatctttcattgtcatttccatgacgttcacagcatcttcaccagtagtagattccacctcaagaaacaactttttaaattcatcatgagaagcaactcctcaacctttcaagtttaatcatgagattgcagcagttcagtcacatcttcaggctccacttttaattccagttctcttgatatttccaccacatctgtaattatttcccctactgaagttttgaacccctcaaagccatccatgaggattggaatcaacctcttccaaattcccattaatattgatattttgacctcttctcatgaggtacaagttcttaatggcatctagaagggtgaatcctttccagaaggttttcaatgtactttgcccagatccatcagaagaatcatgatctttgggagctatcatcytatgaaatgtatttcctaagtaataagacttgaaagttgaaattatttcttgatt

SEQ ID NO: 133543 - DNA, 409 bp, Homo sapiens
aagcagtttaggagttgtcttattctgaattgtcccactgaggtaatttagcctctatcagttctcataaaactctttaaatgacttaattaggcagggcatggtggctcacgcctgcaatgccagcactttgggaggccaaggtggayggatcacttgagcgcaggagttagagaccagcctgggcaacatggtgaaactctattgtctctacaagaaataaaaaaaatgagctgggcgtggtggcacactcctgtagtcctagctccttgggaggctgagatggaagaatgacttgagccttggaggttgaggctgtagtgagccataatcgtgccactgtactcccgtctgggagacagagtgagaccccatccgaaaagaaaaaaaaaaaagatttaatttttca

SEQ ID NO: 133544 - DNA, 475 bp, Homo sapiens
ggattgtttgtttctgtattgttgagttttaagagtctttgtatatttyggaaacaagttctttatcagatacctgttttgcaaatattttctcccagtctggggcttgtctttccattcttttaacagtgtttttttgcagagcttttagttttaatgaaggcccacctgtcagtttttatctcatggatcgtgcttttggtattgtatctaaaactcatcgccaaacccaaggtcacctagattttcttctgtgttatcttctagaagtttagttttgtgttttacattttggtccatggtctgttttgagttaatatttgtgaaaagtgtaagctctgtatctatattcatgttttgcatgtaggtgtcctcttgttccaggaccatttgttgaaaagactatcctttgtatggtctttgctctttgattttcagagatcagttgactgtatttgtgtgggtccatttctgg

SEQ ID NO: 133545 - DNA, 520 bp, Homo sapiens
cctggctagtaggaggctgagtcaggatttgaaccagcagatcatctgaccccagagccggtcgtgggcggcacagcgggagctgcaaccgaggctcttgactcctgcctcgtcattccctgaggtccacaggacaaccagctggggacctggagccccatcctgacgtcctggggagaggtgctaggccycttttgggtctatgagctacttttgggccagtggagccgggtaaagaccatctcaaaccctgtgccaggggaggtcagactccaagagcgccacctttgggcttccagctgtgtgggctgcaccaagaaggctcagagaattagggggttcgtatttgatccttttccttccagactgggattaccagataaaacacagggcatccagttacatttgaatttcaggtaacaatttttttttaagtgtaagtacgtagccaatattgcatgagaaatactcatgctaaaaagttattcgtcatttatctgaactgcgagttcaaatttaa

SEQ ID NO: 133546 - DNA, 279 bp, Homo sapiens
ctgatgtcactctcctcgctgaagccctggtgactgtcacaaacatcgaggttattaattgcagcatcacagaaatagaaacaacracttccagcatccctggggcctcagacatagatctcatccccacggaaggggtgaaggcctcgtccacctccgatccaccagctctgcctgactccactgaagcaaaaccacacatcactgaggtcacagcctctgccgagaccctgtccacagccggcaccacagagtcagctgcacctcatgccacggttg

SEQ ID NO: 133547 - DNA, 279 bp, Homo sapiens
ctgatgtcactctcctcgctgaagccctggtgactgtcacaaacatcgaggttattaattgcagcatcacagaaatagaaacaacaacttccagcatccctggggcctcagacayagatctcatccccacggaaggggtgaaggcctcgtccacctccgatccaccagctctgcctgactccactgaagcaaaaccacacatcactgaggtcacagcctctgccgagaccctgtccacagccggcaccacagagtcagctgcacctcatgccacggttg

SEQ ID NO: 133548 - DNA, 406 bp, Homo sapiens
actcactcatcaggagccagtcctctccatacctgatctcagttacctcactcaccagtagccaggcctctccagacctggcttaattctcactacacttaattcaattaattctcactatagccctatcagacaaactctaggatacacatgaggatacagagtctcagaaaggctgagaaagtggcttgaggtcacctaggtggtaagtggtagagctaggagttgaaggcaagtctgactctcaagtccacgctckttccattgcactatctgcttttctttctccccaaagccacaatatgccacgatgcggcccaaggcctctcctccagtaccgtgctgagggctctgaacagatcagggctgaagccaagatgtcatccagtgcaatacccacatgacc

SEQ ID NO: 133549 - DNA, 488 bp, Homo sapiens
gaattcaaaggatcaactgtcagcagactcccgaggggagcaggggagggggcttttttgtttttggcagtaaaatacacatcatataaaagtgtgcatctgtaagcacaccgttcagtcacactgaagacattcatgttgtaacacaaccrtcaccaccgttcatctccagaacgttcttatcttccgaaactgaaactcagcatccattacacactgactcccccttcctcccggcctcagtccctggcagccacttttcctttctgtctctgaatttccctatccaggtacctcatgtaagtggagtcagagtctccttctgcttaaaacttcaacgtaataagtgtttcaaacatcagagcttttataatggcaggagattacatatttagagattctattacagattcttgaaaaaactagcaagggccgggcacagtggctcacgcctgtaatcccagcactgtgggaagccgagttgggtg

SEQ ID NO: 133550 - DNA, 488 bp, Homo sapiens
gaattcaaaggatcaactgtcagcagactcccgaggggagcaggggagggggcttttttgtttttggcagtaaaatacacatcatataaaagtgtgcatctgtaagcacaccgttcagtcacactgaagacattcatgttgtaacacaaccgtcaccaccgttcatctccagaacgttcttatcttccgaaactgaaactcagcatccattacacactgactcccccttcctcccggcctcagtccctggcagccacttttcctttctgtctctgaatttccctatccaggtacctcatgtaagtggagtcagagtctccttctgcttaaaacttcaacgtaataagtgtttcaaacatcagarcttttataatggcaggagattacatatttagagattctattacagattcttgaaaaaactagcaagggccgggcacagtggctcacgcctgtaatcccagcactgtgggaagccgagttgggtg

SEQ ID NO: 133551 - DNA, 580 bp, Homo sapiens
gcaacttgcttcttctccatccctatcctcagctctcagtttgaagaaaaccttcacgttgttgctgctaaccgctaatagcatgattccatatctccagcttctaatggagtttagaaaagccttatgttctctgttaatatgagtgtttatccaaggataatatgtcccttcactttcatccaaaatccctgggtgcttattaaacatccagactccaggagcccatgccaaacccactgaaatataatctttgagcatcttaaactattttaaaactccctggcaaattattttacaaacaaaagtgtgagaaccttaacctctcattcctctgcattttttttcattttgggtgtatcctcactgaacaaaacaggtggaggaaaccacttgagaagcagaatgagaataagaggtgtgtccgggggaaaggggtatgggacaggctgcttcctcaastcctagtctaagcctgggaccaaaggtgcacttaaaaatcagtagtagcatagccttgttcatgaggccaggtgactccccagggatttagaactaaagctctgcttagatttaatgt

SEQ ID NO: 133552 - DNA, 591 bp, Homo sapiens
acagcatatcatgtaaggagggaaacacaagaactacaaaagagagttagtggtgttgcaataacatggatgaaagaagatgagagcttgaaatagggcatcaacaacagagatagaagagacaatcagagtgtagagcagtcagagcttaagtgatacttagagagtatataattgtttatatactttatatgtaattgtttatataattcatctatatatcatgagtatataagtatatacttagagaatatgtaattcaattcctttgaggaattgaatgatttgaagagaagataastaaaagagatttccaagatcctgggtagcacaagtgtgataatatgggtgccattattaagataagcagcaaaagaaaagacacaaattagagaacaacatgctttctatttgagatatgttaagttgaatgtaccagcttatcccataagtgagatattctagaaagaagtcaaccagactgtagaaattatagaactgaaattcagaaaatagatcaaagatgggcatattgatattgggaatgttaaaaaaagaaactttagataaatttagcagcgattacttgag

SEQ ID NO: 133553 - DNA, 619 bp, Homo sapiens
gattttcagtttattctataattatttgttctcaattcaccttaaattcttttaataagctttttatttttgaaataattttaagtttatgaaaaagtttaaaagatagcgtagactgttcctgtatagccatcacccagttcccattaatgttaaatacttatgtaaccatttgttgaaactatgaaattaacatccatgcaatactactcactaaactataaattttatttggatttcactagtttttccaccaatgccctttttctgttccggaatccaattcagagtactacattgcaattagtccattttggagtttatctaattcattataattcagcctaggtggttgttaygttaacttgaattgtggctgatgaaggctcatactcagaaagagcagtttcttttcttgtctacggctccattttgcatgtcttattagtattactttcgatccatattctctttccatgtatttataaaattcacttctttttaaattagttaatttaatcaaactcacattatataatccataaattcacttaactgagcagctctaaacatcaggacttcacagcaaaagcagtagaatgattgttaaactagtgag

SEQ ID NO: 133554 - DNA, 619 bp, Homo sapiens
gattttcagtttattctataattatttgttctcaattcaccttaaattcttttaataagctttttatttttgaaataattttaagtttatgaaaaagtttaaaagatagcgtagactgttcctgtatagccatcacccagttcccattaatgttaaatacttatgtaaccatttgttgaaactatgaaattaacatccatgcaatactactcactaaactataaattttatttggatttcactagtttttccaccaatgccctttttctgttccggaatccaattcagagtactacattgcaattagtccattttggagtttatctaattcattataattcagcctaggtggttgttacgttaacttgaattgtggctgatgaaggctcatactcagaaagagcagtttcttttcttgtctacggctccattttgcatgtcttattagtattactttcgatccatattctctttccatgtatttataaaattcacttctttttaaattagttaatttaatcaaactcacattatataatccataaattcacttaactgagcagctctaaacakcaggacttcacagcaaaagcagtagaatgattgttaaactagtgag

SEQ ID NO: 133555 - DNA, 595 bp, Homo sapiens
tctcataaagataatacacacaaagggcttgatgaatcggtaccatgatgtctttcagttggtagatgggaatgaactgaattaaatgctgggaaatgttatttgtgcttccaaatttcttgcacttgctttatctgaagttcttgtgtcattgtgaggaaaaaattaatactgatgcaagtgacaaaaagggcrgctaaaatttgtaagagagtaaatcataattatctttatcataattatcatcgacattcctgtgctcaaacaattaaacatatctcacatattttctcttcagacctaaaagtcaatacaacaatagcagtgagcctatgcatttaaggaatacattaaatataataaaatgatgtgtatgcaagttaatatctaacagtgatagctaagctgcttctgtcttataagcaatatcttttgtgaatggtgttttcaggttatagttctctctctttttaaaagaagtcctgtaaagaaaatctctgtttcttttctgtggccaataattttggaggacactgtatgttctattgtttgtatccacctgaaacattcattaaataattgaggaatgggaaaa

SEQ ID NO: 133556 - DNA, 595 bp, Homo sapiens
tctcataaagataatacacacaaagggcttgatgaatcggtaccatgatgtctttcagttggtagatgggaatgaactgaattaaatgctgggaaatgttatttgtgcttccaaatttcttgcacttgctttatctgaagttcttgtgtcattgtgaggaaaaaattaatactgatgcaagtgacaaaaagggcagctaaaatttgtaagagagtaaatcataattatctttatcataattatcatcgacattcctgtgctcaaacaattaaacatatctcacatattttctcttcagacctaaaagtcaatacaacaatagcagtgagcctatgcatttaaggaatacattaaatataataaaatgatgtgtatgcaagttaatatctaacagtgatagctaagctgcttctgtcttataagcaatatcttttgtgaatggtgttttcaggttatagttctctctctttttaaaagaagtcctrtaaagaaaatctctgtttcttttctgtggccaataattttggaggacactgtatgttctattgtttgtatccacctgaaacattcattaaataattgaggaatgggaaaa

SEQ ID NO: 133557 - DNA, 522 bp, Homo sapiens
attgtacagctgaaggaaatggaggtctagaaatgtaagatgacttgcccagggtttcaccatcaattcgtggcagagtgtgttcattaaagtcttctgggctgcaagctaaagaaaccaacttcaactttttcaaaaaaaagtaagaactcattggaaaarcactagggtagctcacagaataaaaacaaaaggttaacaaccaagcctcaggtggagagaaaccagtgtagtatagggacagtcactgtaaggcctcctttctagaacatggccaacggagactctactcggacaccatctggtgatgtggtcaattccatgctcagcgttcaaattcccactgaagaaaatctgactggctgagcttgtgtcaagagacacttacctgggtatgtaaagactatggtttggggtttgcagagccacaacctctggcaaaacattgaagaatctcatactcaactgtggctcacaaatcagtgtttatattgtctgattttctactcacattgtctttgc

SEQ ID NO: 133558 - DNA, 550 bp, Homo sapiens
ctctactcggacaccatctggtgatgtggtcaattccatgctcagcgttcaaattcccactgaagaaaatctgactggctgagcttgtgtcaagagacacttacctgggkatgtaaagactatggtttggggtttgcagagccacaacctctggcaaaacattgaagaatctcatactcaactgtggctcacaaatcagtgtttatattgtctgattttctactcacattgtctttgctgacatgagcatcatttgaggagcttttaaaaaatagcagtagtcaggccctactcctagatactaaatgagttactctgagtagaggtgagccctgtttatttgtttgtttttatgctttactttttaaatgattctaatgtgcaacctaattatggaatctgtggggaagaagatgttgcctccagcagaagttaagtaaaaaggaaggaagcaatgaatgaaacaagacagcatccactgattggcaaagagctcagaaactatctaggcactttattcccatattttagtccaggtcagaataaccaa

SEQ ID NO: 133559 - DNA, 560 bp, Homo sapiens
tactcggacaccatctggtgatgtggtcaattccatgctcagcgttcaaattcccactgaagaaaatctgactggctgagcttgtgtcaagagacacttacctgggtatgtaaagactatggtttggggtttgcagagccacaacctctggcaaaacattgaagaatctcatactcaactgtggctcacaaatcagtgtttatattgtctgattttctactcacattgtctttgctgacatgagcatcatttgaggagcttttaaaaaatagcagtagtcaggccctactcctagatactaaatgagttactctgagtagaggtgagccctgtttatttgtttgtttttatgctttactttttaaatgattctaatgtgcaacctaattatggaatctrtggggaagaagatgttgcctccagcagaagttaagtaaaaaggaaggaagcaatgaatgaaacaagacagcatccactgattggcaaagagctcagaaactatctaggcactttattcccatattttagtccaggtcagaataaccaaggaaacctgtgct

SEQ ID NO: 133560 - DNA, 590 bp, Homo sapiens
atgagtttcatagtagatgtgttggagaaaagagagcctgggttaactgtatcttttctagtcccttcacaaaacacaggcacgcacacacatacagaaggagagagagacagagaaagagatcattcagtttgaatccatagaattgaccctgggaggtagattagaagagagaaagggaaagtggaggtggctttcttaggagctttagacatttccaggtatgacttccagataggtctggacctcagtgttccaggccaacccagtcaagttcatattggccaacatcagagagacgaagtaccagtcttaggtcaccctgcaaaaaaacctgactcccagtccagtgcccttttcactctactatgttacttctttcctagagtracctttccaagctagtccatggctcaccagagcaaattggtctcgtggcattatagttacaccagcgctttgtttccaaacgcagtgatcctctgtaatcgccaaatacctatggctttgagggacttttgaacacaaaggcagactcaccaagagaaaacaaagtctcatcaccatttaaagttttcagattctgaata

SEQ ID NO: 133561 - DNA, 605 bp, Homo sapiens
tgacctttccaagctagtccatggctcaccagagcaaattggtctcgtggcattatagttacaccagcgctttgtttccaaacrcagtgatcctctgtaatcgccaaatacctatggctttgagggacttttgaacacaaaggcagactcaccaagagaaaacaaagtctcatcaccatttaaagttttcagattctgaatacattctgaaaatggcagttagaagtgctttagccaagggccgtgtcccaggaacgtgtaggattgtgcatttggatatctgtgtctagcttcatcacttattgctgggtgatcctggataagtttacttaatttatctgtgcctcagtagcctcatctgtaagagtagaattataatagaacttaggtcataaaatttttgtgaggattaagtggaatgctgtacatgaagtacttagcacattgcttagcacaaaatgagtactcaaaaatatttactatcagtattttattcttttgttttcaggtaagtctctcttataattgtacatgctatcaaccagtgcaaattaatatggtatcaagaatatgaagaatcaaaagactaaagagtaatgacatta

SEQ ID NO: 133562 - DNA, 605 bp, Homo sapiens
tgacctttccaagctagtccatggctcaccagagcaaattggtctcgtggcattatagttacaccagcgctttgtttccaaacgcagtgatcctctgtaatcgccaaatacctatggctttgagggacttttgaacacaaaggcagactcaccaagagaaaacaaagtctcatcaccatttaaagttttcagattctgaatacattctgaaaatggcagttagaagtgctttagccaagggccgtgtcccaggaacgtgtaggattgtgcatttggatatctgtgtctagcttcatcacttattgctgggtgatcctggataagtttacttaatttatctgtgcctcagtagcctcatctgtaagagtagaattataatagaacttaggtcataaaatttttgtgaggattaagtggaatgctgtacatgaagtacttagcacattgcttagcacaaaatgagtactcaaaaatatttactatcagtattttattcttttgttttcaggtaagtctctcttataattgtacrtgctatcaaccagtgcaaattaatatggtatcaagaatatgaagaatcaaaagactaaagagtaatgacatta

SEQ ID NO: 133563 - DNA, 388 bp, Homo sapiens
tgaggagaaggaatggagttgttataaagattctggctaaagggaactgagtgatctttgcatctcaagaagtcataaaaatgggatgaatcaggagtcaggaaaagagagggagacctatggagctcacggaaacgtagagaacagccttggagcatcttgaagaggagagagaatggaagcaagatagctccaaaagaatgtctctgtcttactttggttgccacttccattaactgcccaataacttcaggtgttggaataracaagagaagccctacctatgtggactctaggtcacaattcttggctccacagctcctgctctccttacttgcagggaaatgggggttgaacagaaacaaagaagaaagtgtagaaatgaaca

SEQ ID NO: 133564 - DNA, 353 bp, Homo sapiens
aggatcagtgagcatctaaccagaaagagagaaactattctaaaagcatctaaaactggcggtgattgtaggtgatagaagagtggggaaaccaaagaggcatgacagtaggaagccactrctgtcttcccctcccccactctcctgcgcctggctgcaggaacaaggagacaggtgatgctactgcaccccatggaagagacgcagctacagcctgtaagcttcttccattctcctacctgctgggctctaggcagcaccgtccagctgacccaggggcctgggaaacctagcctgaagggctcggcgccaacctcgaccctgatccacccacccacccactaccacaacac

SEQ ID NO: 133565 - DNA, 353 bp, Homo sapiens
aggatcagtgagcatctaaccagaaagagagaaactattctaaaagcatctaaaactggcggtgattgtaggtgatagaagagtggggaaaccaaagaggcatgacagtaggaagccactactgtcttcccctcccccactctcctgcgcctggctgcaggaacaaggagacaggtgatgctactgcaccccatggaagagacgcagctacagcctgtaarcttcttccattctcctacctgctgggctctaggcagcaccgtccagctgacccaggggcctgggaaacctagcctgaagggctcggcgccaacctcgaccctgatccacccacccacccactaccacaacac

SEQ ID NO: 133566 - DNA, 458 bp, Homo sapiens
catttccttgtttctttctttccccaaartgaaagaaaacaacgatggcttagacaagaggacaatcagccgtagttcggggactaacatcccctcacctctctgtacacttgtattcattccagggtgtccactgcctctgtacttccagttttggtgtagggctagagggtaaaggaccaatgtgatgtaagaatggccactggatgggtgcagtggctcacgcctgtaatcccaacactttggaaggctgaggtgggaggcttgcttgagcccaggagttcgatacaagcctgggcaacatagcaagaccccatttccacaaaaataaatttaaaacaattaaccaggcatggtgacatgtgcctgtagtcccaggtactcggggctgaggcaggaagatcacttgagcccaggagttcaaggctgcagtgagccgtgatggcaccactgcatgg

SEQ ID NO: 133567 - DNA, 458 bp, Homo sapiens
catttccttgtttctttctttccccaaagtgaaagaaaacaacratggcttagacaagaggacaatcagccgtagttcggggactaacatcccctcacctctctgtacacttgtattcattccagggtgtccactgcctctgtacttccagttttggtgtagggctagagggtaaaggaccaatgtgatgtaagaatggccactggatgggtgcagtggctcacgcctgtaatcccaacactttggaaggctgaggtgggaggcttgcttgagcccaggagttcgatacaagcctgggcaacatagcaagaccccatttccacaaaaataaatttaaaacaattaaccaggcatggtgacatgtgcctgtagtcccaggtactcggggctgaggcaggaagatcacttgagcccaggagttcaaggctgcagtgagccgtgatggcaccactgcatgg

SEQ ID NO: 133568 - DNA, 458 bp, Homo sapiens
catttccttgtttctttctttccccaaagtgaaagaaaacaacgatggcttagacaagaggacaatcagcygtagttcggggactaacatcccctcacctctctgtacacttgtattcattccagggtgtccactgcctctgtacttccagttttggtgtagggctagagggtaaaggaccaatgtgatgtaagaatggccactggatgggtgcagtggctcacgcctgtaatcccaacactttggaaggctgaggtgggaggcttgcttgagcccaggagttcgatacaagcctgggcaacatagcaagaccccatttccacaaaaataaatttaaaacaattaaccaggcatggtgacatgtgcctgtagtcccaggtactcggggctgaggcaggaagatcacttgagcccaggagttcaaggctgcagtgagccgtgatggcaccactgcatgg

SEQ ID NO: 133569 - DNA, 565 bp, Homo sapiens
tcttctagagagtatccatttccttgtttctttctttccccaaagtgaaagaaaacaacgatggcttagacaagaggacaatcagccgtagttcggggactaacatcccctcacctctctgtacacttgtattcattccagggtgtccactgcctctgtacttccagttttggtgtagggctagagggtaaaggaccaatgtgatgtaagaatggccactggatgggtgcagtggctcacgcctgtaatcccaacactttggaaggctgaggtgggaggcttgcttgagcccakgagttcgatacaagcctgggcaacatagcaagaccccatttccacaaaaataaatttaaaacaattaaccaggcatggtgacatgtgcctgtagtcccaggtactcggggctgaggcaggaagatcacttgagcccaggagttcaaggctgcagtgagccgtgatggcaccactgcatggaaaagaccctgtctcaaaaaaaaaaaaaaaaaaaaaaagaagaagaagaagaagagtggctacagaaagccctgggagtcttgactgatta

SEQ ID NO: 133570 - DNA, 357 bp, Homo sapiens
accaatgtgatgtaagaatggccactggatgggtgcagtggctcacgcctgtaatcccaacactttggaaggctgaggtgggaggcttgcttgagcccaggagttcgatacaagcctgggcaacatagcaagaccccatttccacaaaaataaatttaaaacaattaaccaggcatggtgacatgtgcctgtagtcccagstactcggggctgaggcaggaagatcacttgagcccaggagttcaaggctgcagtgagccgtgatggcaccactgcatggaaaagaccctgtctcaaaaaaaaaaaaaaaaaaaaaaagaagaagaagaagaagagtggctacagaaagccctggga

SEQ ID NO: 133571 - DNA, 357 bp, Homo sapiens
accaatgtgatgtaagaatggccactggatgggtgcagtggctcacgcctgtaatcccaacactttggaaggctgaggtgggaggcttgcttgagcccaggagttcgatacaagcctgggcaacatagcaagaccccatttccacaaaaataaatttaaaacaattaaccaggcatggtgacatgtgcctgtagtcccaggtactcggggctgagkcaggaagatcacttgagcccaggagttcaaggctgcagtgagccgtgatggcaccactgcatggaaaagaccctgtctcaaaaaaaaaaaaaaaaaaaaaaagaagaagaagaagaagagtggctacagaaagccctggga

SEQ ID NO: 133572 - DNA, 357 bp, Homo sapiens
accaatgtgatgtaagaatggccactggatgggtgcagtggctcacgcctgtaatcccaacactttggaaggctgaggtgggaggcttgcttgagcccaggagttcgatacaagcctgggcaacatagcaagaccccatttccacaaaaataaatttaaaacaattaaccaggcatggtgacatgtgcctgtagtcccaggtactcggggctgaggcaggargatcacttgagcccaggagttcaaggctgcagtgagccgtgatggcaccactgcatggaaaagaccctgtctcaaaaaaaaaaaaaaaaaaaaaaagaagaagaagaagaagagtggctacagaaagccctggga

SEQ ID NO: 133573 - DNA, 536 bp, Homo sapiens
aagtgaaagaaaacaacgatggcttagacaagaggacaatcagccgtagttcggggactaacatcccctcacctctctgtacacttgtattcattccagggtgtccactgcctctgtacttccagttttggtgtagggctagagggtaaaggaccaatgtgatgtaagaatggccactggatgggtgcagtggctcacgcctgtaatcccaacactttggaaggctgaggtgggaggcttgcttgagcccaggagttcgatacaagcctgggcaacatagcaagaccccatttccacaaaaataaatttaaaacaattaaccaggcatggtgacatgtgcctgtagtcccaggtactcggggctgaggcaggaagatcacttgagcccaggagttcaaggctgcagtgagccgtgatggcaccactgcatggaaaagaccctgtctcaaaaaaaaaaaaaaaaaaaaraagaagaagaagaagaagagtggctacagaaagccctgggagtcttgactgattaggtaagggtttca

SEQ ID NO: 133574 - DNA, 308 bp, Homo sapiens
tagaaagagaaacgtcacaagaactacactttctctcccttcttcttagccagctacagggagaacattattaaacaatccactgcaaaatgctggcaggaagtcagctttggttacattttcaaaaaataaatgacttaaaaggtggaaatttcctgggccttttaattagctccaaaaagtctgaggagggcctccatggkgtaaaaccacagacacccacaaaggcatggccacaggtgggcctcactgctaccgtagtgcatacacacagctgttcagactccaagtgcaattcagctgcatca

SEQ ID NO: 133575 - DNA, 457 bp, Homo sapiens
gagtctaagctcttgcgtgctggtgaatgagcaccttcccctctgggctctgggaggagcctgggggtcaaccagcggcctccttgagcccttggagaactcagaatgacttctcaacatcmagacggtgacacagtctcagatgtagcccccatcctctcatggctgggcttggtccccagtcaccctctgcagtcgacagagcccctcattaaggggtccccaccgcattgtagtggctgccccagaactgggtcagaatcccacctcgctgccccatctgctctgtggcccctgggcagcttcttgacctctctgagccccctttctcttttgcaggatggcaagaataacagtccctgtgctctagggcagccatgaagactaaatggaaagataatgctgttacaattagagaacggctgagcacccgcagtgtgcaagcactgtgctgagg

SEQ ID NO: 133576 - DNA, 552 bp, Homo sapiens
cggttcagccccggtgcgcgctggaccccgccttccccgcccgggcggggcggggggaaacgctcccygggccggggccttccccgacgcgcacagccctgtagcaaatcgcaagtgcggcggcctcccggtcgtgaccatcgcaggcacagccggctcgactccggtcctcgcggccgggccggctaagttcccgcgagggaccgcctacccactctccccgccccgggaagaactgcgccgctcccgggatttttcggactcgcccagcagcttgcgagcgggcgggcagccgccggggcagagcgcaggcggaaaacgaaagcgcagcacgagtcgcggccgctttgtctcgggcgccgcgggcctgacgggggcgagtgagaacccgctggcccagaggcgacccagaccgcacaggcccctgaataagcggcgtgctcagtcactcacccgtgcgcgcacaccctcgcgctcttgtccacacattagcacacacatacatgtcttgatgcacatgcaaacccggtaaattacgcaaacagacgtgta

SEQ ID NO: 133577 - DNA, 552 bp, Homo sapiens
cggttcagccccggtgcgcgctggaccccgccttccccgcccgggcggggcggggggaaacgctccctgggccggggccttccccgacgcgcacagccctgtagcaaatcgcaagtgcggcggcctcccggtcgtgaccatcgcaggcacagccggctcgactccggtcctcgcggccgggccggctaagttcccgcgagggaccgcctacccactctccccgccccgggaagaactgcgccgctcccgggatttttcggactcgcccagcagcttgcgagcgggcgggcagccgccggggcagagcgcaggcggaaaacgaaagcgcagcacgagtcgcggccgctttgtctcgggcgccgcgggcctgacgggggcgagtgagaacccgctggcccagaggcgacccagaccgcacaggcccctgaataagcggcgtgctcastcactcacccgtgcgcgcacaccctcgcgctcttgtccacacattagcacacacatacatgtcttgatgcacatgcaaacccggtaaattacgcaaacagacgtgta

SEQ ID NO: 133578 - DNA, 563 bp, Homo sapiens
agaatgcagtcagaaaaattcaaagtatgggctacgccacatgataaatggcttgtttccttaataaataaattgcaatgagagagagagcgaggttggggagccgtgtggagaagaagaaaagaaaacagaggaaggagagggatgggaaggaagaggagggaaggagaggagaggaaccacggattaaaagcaacctcctcccagcctccatctttctcctgtgctggatgcttcctgccctcgaacatcagactccaagttcttcaggtttgggagtggggagtctagtcctcaaaaaytttttccaggctccaattctctggacagagtcaaattggttccatgtaaaggaactccctaagtcctgtctcacccagccaatgagatggctcctggctggaaggcttttcacccagccaatgagatggctcctggccccaaatgctgttcacccagccagtgagatggctccttgccccaaaggctgtggtcctgatttgggggcgtgccctgacaggtcttcaaaacagagcaggtctcgcccatatcacagcccactg

SEQ ID NO: 133579 - DNA, 563 bp, Homo sapiens
agaatgcagtcagaaaaattcaaagtatgggctacgccacatgataaatggcttgtttccttaataaataaattgcaatgagagagagagcgaggttggggagccgtgtggagaagaagaaaagaaaacagaggaaggagagggatgggaaggaagaggagggaaggagaggagaggaaccacggattaaaagcaacctcctcccagcctccatctttctcctgtgctggatgcttcctgccctcgaacatcagactccaagttcttcaggtttgggagtggggagtctagtcctcaaaaackttttccaggctccaattctctggacagagtcaaattggttccatgtaaaggaactccctaagtcctgtctcacccagccaatgagatggctcctggctggaaggcttttcacccagccaatgagatggctcctggccccaaatgctgttcacccagccagtgagatggctccttgccccaaaggctgtggtcctgatttgggggcgtgccctgacaggtcttcaaaacagagcaggtctcgcccatatcacagcccactg

SEQ ID NO: 133580 - DNA, 563 bp, Homo sapiens
agaatgcagtcagaaaaattcaaagtatgggctacgccacatgataaatggcttgtttccttaataaataaattgcaatgagagagagagcgaggttggggagccgtgtggagaagaagaaaagaaaacagaggaaggagagggatgggaaggaagaggagggaaggagaggagaggaaccacggattaaaagcaacctcctcccagcctccatctttctcctgtgctggatgcttcctgccctcgaacatcagactccaagttcttcaggtttgggagtggggagtctagtcctcaaaaactttttccaggctccaattctctggacagagtcaaattggttccatgtaaaggaactccctaagtcctgtctcacccagccaatgagatggctcctggctggaaggcttttcacccagccaatgagatggctcctggccccaaatgctgttcacccagccartgagatggctccttgccccaaaggctgtggtcctgatttgggggcgtgccctgacaggtcttcaaaacagagcaggtctcgcccatatcacagcccactg

SEQ ID NO: 133581 - DNA, 542 bp, Homo sapiens
gggtgtggttctcttaggagtcagggaccttcagcagtttacagtcagggccgttttctcacacagcccgtttaccctgcgtttgtgccaactgtgatggcaaatgcgttttgcgggggttgcgcttcacaactcaggccctaaagatcctcttagggagatctctctagctgagtagaaaacttctacccaaaaaggcggcgggttytgtgaacctgaagagaagactcagggtctctctgaaagcctttaaattactgctggaattacaagttcctattagtgagaaaagagcattaaaataacttgaaggtctattttattggcaacttagaatgcaaagtattttatttttaaacttttaaaatttgaaaacaagctagcctacattaaataatatagtttccaaagctgaatgtgctcacttggagctcagtttttctgcttgaaacacaaacacaacttcctaacactcctaggtgggaacactactgtttcatgatctgtgattggatgaactgatcgatctcagttggtaacat

SEQ ID NO: 133582 - DNA, 569 bp, Homo sapiens
atttgacttgaaaacagtcaggcatatatttgtctgtggctcattttctccaaggcatggatggcaggaattgtcagacagagttgctgctcagcgartattagactcaattgtatgacattgttctatatggtcacttctgaaaatgattctgattggagaactgcttcccaaaacattatagcaaaactctctcaccagagacttcagactcattctacagtataacatgaaatttcctgcagttgctgtcttgattctagtccttaagattagcttaatcttctctttatagacatgcaatgaatggattctgcagtataatcatttcgcatgtaggtataaaatgttactacggtaatgagataaattttataattcacataccttactcttacattagtaatgctttttaaaaacaaaactagaacaaaatagctctgtaatttaatcatatcccatacaaattactaaagtttttttgagctttatttttaaattaggtacatacaccaaacacacacacaggaacacatacaaacactggtatattttaaatatttgaaaaa

SEQ ID NO: 133583 - DNA, 569 bp, Homo sapiens
atttgacttgaaaacagtcaggcatatatttgtctgtggctcattttctccaaggcatggatggcaggaattgtcagacagagttgctgctcagcgaatattagactcaattgtatgacattgttctatatggtcacttctgaaaatgattctgattggagarctgcttcccaaaacattatagcaaaactctctcaccagagacttcagactcattctacagtataacatgaaatttcctgcagttgctgtcttgattctagtccttaagattagcttaatcttctctttatagacatgcaatgaatggattctgcagtataatcatttcgcatgtaggtataaaatgttactacggtaatgagataaattttataattcacataccttactcttacattagtaatgctttttaaaaacaaaactagaacaaaatagctctgtaatttaatcatatcccatacaaattactaaagtttttttgagctttatttttaaattaggtacatacaccaaacacacacacaggaacacatacaaacactggtatattttaaatatttgaaaaa

SEQ ID NO: 133584 - DNA, 575 bp, Homo sapiens
gagagtgtgtgtgtgtgtgtgtgtgtgtgtgtgtgtgtgtgtgtctgagagacagagagaggaagagagaaaggaaaggaggaggaggaggaagaagaggaagaggaggaggagacatttggtctagaataagttgataagatccctgaattatatgtgtctaagaattcagaaataataggagcaactagtccaataaggtaagtatttttccctatcccttctgtattatttaataaaaatattccacatagaagggagaaggtcatgttctctccctataaaacatgcccaagggacacagaagttaactaatatgggtctctaaaatgcatgttgttggttttaaaagctgtttcctaagttaacaattaaaacaattatcttatgagctgtttttagtaagatagttgctaaactgttcagmaaaggaaactatttctatctagttctaagtgaaaaggttatggagaaaggaacctgagtaatttaataccaatgagaaagatggggaatgaatagatttcagtttaaaccacagcagcagcccagacaatcgctgtgggtgaaaatac

SEQ ID NO: 133585 - DNA, 589 bp, Homo sapiens
ctgtctgtgaccttggggagtttcaagtagagatgacctgtaaaaaagtttttatattttgtatattcagttactgcttcagacagggaagttaagttaaagaaaagmaaaggtatattctctttgtaaagctttatttaatccttatcaaatcctgagtaattattcggctttctatcagcatgattttgtcagggaaattgaggtagactgtatttgcatgctcaacccaaactcatagtcattaaaggacaaattgatataagaaattagatgatctcctaaggctgttagtgaattccaagagtcggtataatttgaagtatgtccaaaactgaaaacaaaaacaaaaatgaacagatttgttaaagcaatcctttaagaattttgttgtttacctagttttaccaccccccaaccccactccctttaagtagcagaattgtgaccacaaaaacatttctttatccagatctctacacataaagtaggttggtgaactcaaatcttgagatttttcatgtgtatgatctatgctgcatgccctaaaacattgctcttgcttcaaagtccctaatagtattgggga

SEQ ID NO: 133586 - DNA, 589 bp, Homo sapiens
ctgtctgtgaccttggggagtttcaagtagagatgacctgtaaaaaagtttttatattttgtatattcagttactgcttcagacagggaagttaagttaaagaaaagcaaaggtatattctctttgyaaagctttatttaatccttatcaaatcctgagtaattattcggctttctatcagcatgattttgtcagggaaattgaggtagactgtatttgcatgctcaacccaaactcatagtcattaaaggacaaattgatataagaaattagatgatctcctaaggctgttagtgaattccaagagtcggtataatttgaagtatgtccaaaactgaaaacaaaaacaaaaatgaacagatttgttaaagcaatcctttaagaattttgttgtttacctagttttaccaccccccaaccccactccctttaagtagcagaattgtgaccacaaaaacatttctttatccagatctctacacataaagtaggttggtgaactcaaatcttgagatttttcatgtgtatgatctatgctgcatgccctaaaacattgctcttgcttcaaagtccctaatagtattgggga

SEQ ID NO: 133587 - DNA, 433 bp, Homo sapiens
tggtaatgactgaaactattaatagtttcccaatagactagattgaaatgcaattcaaatccctttagcattaayttatctgttttctatggttcaaatttgctgcttcctaccttcagcactctaagttgtgagggaaagggccaaggggaaactgtaagttcagattaaaaacaatgacaataacaaaacttatatttctctctcaaatgtggaaagcactacatgaaggtcagacgttcttaaaactatctactgatgccataagttttcaataagatgggagcctggtaatagtaagtacttaaaaaagtaaaatgataaagaaataaagaatgcaatgatgaatgaatgaaggagtgtataaatgaccaaagtgagacattgctgcctttaaagtaaaaagaccatctgccattcacaggcatatttg

SEQ ID NO: 133588 - DNA, 448 bp, Homo sapiens
gtaatgactgaaactattaatagtttcccaatagactagattgaaatgcaattcaaatccctttagcattaatttatctgttttctatggttcaaatttgctgcttcctaccttcagcactctaagttgtgagggaaagggccaaggggaaactgtaagttcagattaaaaacaatgacaataacaaaacttatatttctctctcaaatgtggaaagcactacatgaaggtcagacgttcttaaaactatctactgatgccataagttttcaataagatgggagcctggtaatagtaagtacttaaaaaagtaaaatgrtaaagaaataaagaatgcaatgatgaatgaatgaaggagtgtataaatgaccaaagtgagacattgctgcctttaaagtaaaaagaccatctgccattcacaggcatatttggtttcttatataacaaa

SEQ ID NO: 133589 - DNA, 456 bp, Homo sapiens
ggtaatgactgaaactattaatagtttcccaatagactagattgaaatgcaattcaaatccctttagcattaatttatctgttttctatggttcaaatttgctgcttcctaccttcagcactctaagttgtgagggaaagggccaaggggaaactgtaagttcagattaaaaacaatgacaataacaaaacttatatttctctctcaaatgtggaaagcactacatgaaggtcagacgttcttaaaactatctactgatgccataagttttcaataagatgggagcctggtaatagtaagtacttaaaaaagtaaaatgataaagaaataaagaatgcaatgatgaatgaatgaaggagtgtataaatgaccaaagtgagacattgctgcctttaaagtaaaaagaccatctgccattcacaggcatatttrgtttcttatataacaaatattttc

SEQ ID NO: 133590 - DNA, 322 bp, Homo sapiens
gaattctgatgtcacagtatgatttcatggagccagaaactgactgcttaccatctaatatgatgattttgcattgcattataagcatagtatatcgattccttcttgaaatatgtctttgctattatatgaatccggtatgctgtgtaacagtcctactcacacmttcaggggacatagtactaagtatttactttctatgcatctttgagatttagttgaaataccttagggacatcttttctttgctaatctccctcaagtttctgcaggtcagctagtctatacatgtatctgtacagttggcctgtaccttgccaga

SEQ ID NO: 133591 - DNA, 555 bp, Homo sapiens
taattgtaaactggcactgggaaacaaacagatttcaaggtctctatcatagctctgacaatctttggcttgtggtaagtcatagttgaagcacatatcattttcagaagaaccaagggcagctcagcgggttgaaaagagctctagattaagactaacctgttgtctagattcgattctgccttcagcaagtatggaggccaaagcaaccccatcttggatgctaatctgccatgttggcttytgattagccccagttatgggaaggcctctaaaatttccagtttatctattgttccttctgtaaccacaggtatttaccataaatcctgcccttaggtcaaataaccttgatgttgctgtgcttcagtcgtcctacacatcccttttcaaccaccctttccctgtagcataaagaagccctgggtctgggggttaaatgtttcaggggtccaccatcttgtctcatcactgcctgagacacagacatagcttttcttcaaaaatctctattaaatgtttttttctaaaaaaaaaaaactggatttctcagcc

SEQ ID NO: 133592 - DNA, 555 bp, Homo sapiens
taattgtaaactggcactgggaaacaaacagatttcaaggtctctatcatagctctgacaatctttggcttgtggtaagtcatagttgaagcacatatcattttcagaagaaccaagggcagctcagcgggttgaaaagagctctagattaagactaacctgttgtctagattcgattctgccttcagcaagtatggaggccaaagcaaccccatcttggatgctaatctgccatgttggcttctgattagccccagttatgggaaggcctctaaaatttccagtttatctattgttccttctgtaaccacaggtatttaccataaatcctgcccttaggtcaaataaccttgatgttgctgtgcttcagtsgtcctacacatcccttttcaaccaccctttccctgtagcataaagaagccctgggtctgggggttaaatgtttcaggggtccaccatcttgtctcatcactgcctgagacacagacatagcttttcttcaaaaatctctattaaatgtttttttctaaaaaaaaaaaactggatttctcagcc

SEQ ID NO: 133593 - DNA, 555 bp, Homo sapiens
taattgtaaactggcactgggaaacaaacagatttcaaggtctctatcatagctctgacaatctttggcttgtggtaagtcatagttgaagcacatatcattttcagaagaaccaagggcagctcagcgggttgaaaagagctctagattaagactaacctgttgtctagattcgattctgccttcagcaagtatggaggccaaagcaaccccatcttggatgctaatctgccatgttggcttctgattagccccagttatgggaaggcctctaaaatttccagtttatctattgttccttctgtaaccacaggtatttaccataaatcctgcccttaggtcaaataaccttgatgttgctgtgcttcagtcgtcctacacatcccttytcaaccaccctttccctgtagcataaagaagccctgggtctgggggttaaatgtttcaggggtccaccatcttgtctcatcactgcctgagacacagacatagcttttcttcaaaaatctctattaaatgtttttttctaaaaaaaaaaaactggatttctcagcc

SEQ ID NO: 133594 - DNA, 555 bp, Homo sapiens
taattgtaaactggcactgggaaacaaacagatttcaaggtctctatcatagctctgacaatctttggcttgtggtaagtcatagttgaagcacatatcattttcagaagaaccaagggcagctcagcgggttgaaaagagctctagattaagactaacctgttgtctagattcgattctgccttcagcaagtatggaggccaaagcaaccccatcttggatgctaatctgccatgttggcttctgattagccccagttatgggaaggcctctaaaatttccagtttatctattgttccttctgtaaccacaggtatttaccataaatcctgcccttaggtcaaataaccttgatgttgctgtgcttcagtcgtcctacacatcccttttcaaccaccctttccctgtagcataaagaagccctgggtctgggggttaaatgtttcaggggtccaccatcttgtctcatcactgcctgagacacagacatagcttttcttcaaaaatcyctattaaatgtttttttctaaaaaaaaaaaactggatttctcagcc

SEQ ID NO: 133595 - DNA, 569 bp, Homo sapiens
accatacgtcaagcagataaacactggtatgatttgcgtggaagttgtgtgacattgttgaaagagccttattgcttgaagcagctatggaagagaccaatgaatcaagtgcaattaaatttaagaaacaaaggcaggtgattaccaatttatgcagagggtgaaagatattattttattatctctatatcaggctttcccccaaagtttccaatcctgtgaatcctgttctacatgaatgtatacacattgctttatattgacttttgaakgtagtattagttacatttacatattaatcaatccagatgcaatgggccactgtaattacctaacgtttggaatccaaattttgctgattagaattctgaaatgatgatttattagacaagcacaatgattccaaatgatttcctcaggagaatcctcccattattaattattagctaaagttgctcccaaagagctctctgaaggaggctaggaaaaaaaaaaaaaactgcataaagaggcagagaaagatatattgacataattgtatttaacgtgctatgcatcatgaccaaagt

SEQ ID NO: 133596 - DNA, 534 bp, Homo sapiens
actttctgatttacttagaactaagcttcctatccccacattaaataataagyaaacattacttagaggttatgggtatcagtatttccactttctatgcattgttatggtaataaagccttttagtcaaggaaaatatgaagccataaaacttaatgctctatttgaggaacaattacagcaaattataagcaaccgggttgtacaaaactgcgacaaataaaaatttaaagtataataatatgctataagcgtttatataactgatactatccatttgttttaagtgtcagtctttctaaagataattaccaaaaaaatctagattcccaaaataattgtcatgttgattacttagaaggataggcttcaaataaatttgcgatgaaggatttttaatagaattctggtataaaatatattttctactcaatttcagttaatgcaatagagaatctgttgcatgcttcaaagtaactgtgtgtgtgtgtgtgtgtgtgtgtgtgtgtatttaattaattttgcaaggcaaat

SEQ ID NO: 133597 - DNA, 602 bp, Homo sapiens
tatagcaatgtgaaaatggactaatacaatcayctacctgaattgagtttgatataatttagaaaacacagaaaaattttcaaattttccaatttccaaatgtggggaggatttaggaccttaggattctagttttcacactggagtttttcaaacgttctcctaatttgaactaccttgtaatttttctctaaaaaggcactgttctaatgggcaccaagtataggtcacaatggtttatctcgagaatctaatagtccagataatttagatttctcactttctagctctactgagggaacatctaacctctctaagcctcagttctgtaattcagaagtgttgatgctaatatctacctactttgctcattcgtttgttaatctattcattcaacatttacacagcacctactgtgttccaggcactatcaatgcaacaaggaaagaaaataaatattttttctttcatgttttagatgaacacttaggataaaggataatttttccagaaaataaactattaagtaacgtaaatatcagaaaattataagacataataatataaaacataatattctattctaaagacatggtctattc

SEQ ID NO: 133598 - DNA, 640 bp, Homo sapiens
cttcagtatgtgttgcacacatgaatctaggatatcagtaaaatacatatgactcagcaacgcccatatccatttggaatcagctgagatggggcgttgctgcaaaatcagaagttttaattctctgtgtcaataatgtttcttattaatggatttacctgcgagaagaatgtgaaatagtttttgacgtctagacttaatttagataatccattatatttctgtccaataaaatgttatacacgtgtccatcaataccaaataagaattctttttctaaaaggtgttctctttattagtatgattatctgtaccttctatctaggctatttcagtttctagtttgttttttagatayatttttggtccatttgccaaacaatatatttgctagcagaaagatattcttagtgcccagattctgatgcttttatctgaataggtatgctaatttattgaagattttatatttgtttgttttattttgaaagacaaattatgctgacttttttcttctttgaaattttgttgttagctcatcaactttattttgctcaaattgagagtggcagttactactctttaattgcttgatttctttttggcacaataagggcagaataggataaatgtgttagat

SEQ ID NO: 133599 - DNA, 408 bp, Homo sapiens
gaaaggtgctccacttccactgacaccctagggcagggagccctggtaagtgcagcggggagctaaaagtccaggagcccagaartagaggccaggagtcagcccagccactaggagcctggtaaccgacagtttccttcttttttctcctaggacattggagacatcttgcacaggtacagcgaggtcctgtggtgtaccctggggtgtcttgcagaaagcatatgggggagacagtcccagaagggacctgggagggagatgttcccaatcccggggtctgtgattccagactcctccttttttctgcagcttcccaaagcctctctggatttgatagggagaagggcatctggtcagcagggaggctggccgggtatggagctgcagactgggaagggtgaattc

SEQ ID NO: 133600 - DNA, 408 bp, Homo sapiens
gaaaggtgctccacttccactgacaccctagggcagggagccctggtaagtgcagcggggagctaaaagtccaggagcccagaaatagaggccaggagtcagcccagccactaggagcctggtaaccgacagtttccttcttttttctcctaggacattggagacatcttgcacaggtacagcgaggtcctgtggtgtaccctggggtgtcttgcagaaagcatatgggggagacagtcccagaagggacctgggagggagatgttcccaaycccggggtctgtgattccagactcctccttttttctgcagcttcccaaagcctctctggatttgatagggagaagggcatctggtcagcagggaggctggccgggtatggagctgcagactgggaagggtgaattc

SEQ ID NO: 133601 - DNA, 312 bp, Homo sapiens
tccttttttctgtaacgtgaaattgtgctcgtcttccttgaaaacaggtagaggtttctgatttagagcctttttrgtaacccttcggaaactccgcacctccactggagtataccgcattctaactcttctgcccgataaggaacactaaaattcggcctttctttaccccgggtgggactcgaacccacaatccctggcttaggaggccaatgccttatccattaggccaccggggcggataacaaaacgctgtcgcttgtcttagaccagtttctccatcactccgcggtggttcctgcacagcctgcc

SEQ ID NO: 133602 - DNA, 312 bp, Homo sapiens
tccttttttctgtaacgtgaaattgtgctcgtcttccttgaaaacaggtagaggtttctgatttagagcctttttggtaacccttcggaaactccgcacctccamtggagtataccgcattctaactcttctgcccgataaggaacactaaaattcggcctttctttaccccgggtgggactcgaacccacaatccctggcttaggaggccaatgccttatccattaggccaccggggcggataacaaaacgctgtcgcttgtcttagaccagtttctccatcactccgcggtggttcctgcacagcctgcc

SEQ ID NO: 133603 - DNA, 545 bp, Homo sapiens
gtggctttaacttagtataatgttttcaaagtcatcctgttgtagcatgcattagtctgatgacattttctttttctttttctctttcttttcttttttcttttttgagacggagttttgctcttgttacccgggctggagtgcaaatggcacgatttccgctcactgcaacctctgcctgctgggttcaagcaattctcctgcctcagcctcctgagtagctgagattagaggcgcctgccaccatgcccggctaatttttttttgtgtttttagtagagacagggtttcaccatgttggcagtctgttctctgacycctgacctcaggtgatccacccgcctcggccccccagagtgctgggattacaggtgtgagccaccgtgcccggcctgtctgacgacattttcaaacccgtgtttcttaatcctttttagatccaagagatccttttggagatgggaagaattttagaagttgtctggtccaacataccttcattttgtagatgagattaaggctttaatcatgccaaacagtctatt

SEQ ID NO: 133604 - DNA, 543 bp, Homo sapiens
gatctcctttttatggctgcgtagtattccatggtgtttatgtaccacaatattttaattcactctattattgattggcatttgggttgattccatgtctttgttattgtgaatagtgctgcagtaaacatacatgtgtatgtatctttataacagaatgatttatattcctttgggcatacacccaataatgagattgctgggtcaaatgttatttctagttctaaatgtttgaggaatcaccacactgtcttccacaatggttgaactaatttgaatgtagttggttttaaatggtcgacccttgatactggaaaggagacatttgtctcactgtgacatctgcaaattagtcaattctcaagtacactggagaatacaataccccctaaagtgcagttaaactatctaaaaattcagaatatcaattgttttatacacatagccccaaagtcatttctaaagtgattaaaataaacmcctctcaaattgtgattccatcaagtgtcttcttattcatgtcctctcatgataatatttatg

SEQ ID NO: 133605 - DNA, 566 bp, Homo sapiens
tgatggtatcatcgtggtctggcctgttgtttttcctttttcatggttctatatttctgactcagttgtatgtccaccacttaccatatcacatcctggtctttcgactttctgcagttggagctgatataataggtagcttttttggtttttgtaagcgattgtcttgcattccattactgtttattcttaatgcactcaaaaccatttgtgcaactatttagtgccaggcattgtgagacatattaatgatacaataaggcacaagacagacatggtccaaactcctacagtattgttagagagattgagaagcaaactggtcatactgatagcaggtgacaaatgctgtgaggaaggagaaatggaagatgaaaygcattagatgggcatacggcctatcttcagaagcctacagaaactttgtggaaaaagcaatatctaatctgagaccccaaggatgagcagggattagtcatgtctaggaagtggctgtcttgaacactgaaacctcatcaactctaattcagttgcactggttatttctgttcctaattgctactgca

SEQ ID NO: 133606 - DNA, 566 bp, Homo sapiens
tgatggtatcatcgtggtctggcctgttgtttttcctttttcatggttctatatttctgactcagttgtatgtccaccacttaccatatcacatcctggtctttcgactttctgcagttggagctgatataataggtagcttttttggtttttgtaagcgattgtcttgcattccattactgtttattcttaatgcactcaaaaccatttgtgcaactatttagtgccaggcattgtgagacatattaatgatacaataaggcacaagacagacatggtccaaactcctacagtattgttagagagattgagaagcaaactggtcatactgatagcaggtgacaaatgctgtgaggaaggagaaatggaagatgaaacgcattagatgggcatayggcctatcttcagaagcctacagaaactttgtggaaaaagcaatatctaatctgagaccccaaggatgagcagggattagtcatgtctaggaagtggctgtcttgaacactgaaacctcatcaactctaattcagttgcactggttatttctgttcctaattgctactgca

SEQ ID NO: 133607 - DNA, 566 bp, Homo sapiens
tgatggtatcatcgtggtctggcctgttgtttttcctttttcatggttctatatttctgactcagttgtatgtccaccacttaccatatcacatcctggtctttcgactttctgcagttggagctgatataataggtagcttttttggtttttgtaagcgattgtcttgcattccattactgtttattcttaatgcactcaaaaccatttgtgcaactatttagtgccaggcattgtgagacatattaatgatacaataaggcacaagacagacatggtccaaactcctacagtattgttagagagattgagaagcaaactggtcatactgatagcaggtgacaaatgctgtgaggaaggagaaatggaagatgaaacgcattagatgggcatacggcctatcttcagaagcctacagaaactttgtggaaaaagcaatatctaatctgagaccccaaggatgagcrgggattagtcatgtctaggaagtggctgtcttgaacactgaaacctcatcaactctaattcagttgcactggttatttctgttcctaattgctactgca

SEQ ID NO: 133608 - DNA, 495 bp, Homo sapiens
aacaatactataatagtgggggacttcagcaccctactgatatcactagacagatccttcaggcagaaaatcaacaaagaaactctggacttaaactggattagagaccaaatggacctaataaacatttacagaacattctatccaacaactgcagaatatacattcttctcatctctgcgtggaacattctccaaaatgaaccatatacttggccataaagcaagtgtcagtaaatttttaaaaaatcaaaattatatcaagtatcttttctgaacacagtggaataaaattagaaatcaataccaggagatattctcaaaactacacaagtacatggaaactaaacaacttgttatagaatgacatttgggtaarcaataagattaagacagaaattaaaaaaaactgaaatgaatgaaaatagagacgcaacataccaaaacctctgggatacagcaaaagcagtgctaagaggaaagtttttagcattaa

SEQ ID NO: 133609 - DNA, 560 bp, Homo sapiens
tgagctgggaggattgcttgtgcctgggaggtcaaggctgcagtgaaccacgatcacgccccttgactccagcctgcgcaaccaaatgagatgctgcctcaaaaagagaagaagaaaaaggaatsctcttctaaaagagatgacacaggcaaatattagccacatacacttgaacatgggaaaaattaaaactgagacaacaccaccctggaccaggtaccccacattttgtttttctccctcctctgtcactaatcaactagatggtctcaggtgagccccgtcccctctctgaggctcagttttctcatctgtgagatgaggggttgtgcatatggacttcccagttctgtcatcctaaactctgtgattccacttgatcagtgtgaattcttccttgaaacctttccatgacaggaatggctttggggaatgcactggagaatggtgttgtttcttaggaaagttacctggtggaggcggtgtagtaattttagtttcctttgtggggaccacttctgctgtaatctttatgtatgttatgggtagggttgaatcca

SEQ ID NO: 133610 - DNA, 560 bp, Homo sapiens
tgagctgggaggattgcttgtgcctgggaggtcaaggctgcagtgaaccacgatcacgccccttgactccagcctgcgcaaccaaatgagatgctgcctcaaaaagagaagaagaaaaaggaatgctcttctaaaagagatgacacaggcaaatattagccacatacacttgaacatgggaaaaattaaaactgagacaacaccaccctggaccaggtaccccacattttgtttttctccctyctctgtcactaatcaactagatggtctcaggtgagccccgtcccctctctgaggctcagttttctcatctgtgagatgaggggttgtgcatatggacttcccagttctgtcatcctaaactctgtgattccacttgatcagtgtgaattcttccttgaaacctttccatgacaggaatggctttggggaatgcactggagaatggtgttgtttcttaggaaagttacctggtggaggcggtgtagtaattttagtttcctttgtggggaccacttctgctgtaatctttatgtatgttatgggtagggttgaatcca

SEQ ID NO: 133611 - DNA, 560 bp, Homo sapiens
tgagctgggaggattgcttgtgcctgggaggtcaaggctgcagtgaaccacgatcacgccccttgactccagcctgcgcaaccaaatgagatgctgcctcaaaaagagaagaagaaaaaggaatgctcttctaaaagagatgacacaggcaaatattagccacatacacttgaacatgggaaaaattaaaactgagacaacaccaccctggaccaggtaccccacattttgtttttctccctcctctgtcactaatcaactagatggtctcaggtgagcccygtcccctctctgaggctcagttttctcatctgtgagatgaggggttgtgcatatggacttcccagttctgtcatcctaaactctgtgattccacttgatcagtgtgaattcttccttgaaacctttccatgacaggaatggctttggggaatgcactggagaatggtgttgtttcttaggaaagttacctggtggaggcggtgtagtaattttagtttcctttgtggggaccacttctgctgtaatctttatgtatgttatgggtagggttgaatcca

SEQ ID NO: 133612 - DNA, 560 bp, Homo sapiens
tgagctgggaggattgcttgtgcctgggaggtcaaggctgcagtgaaccacgatcacgccccttgactccagcctgcgcaaccaaatgagatgctgcctcaaaaagagaagaagaaaaaggaatgctcttctaaaagagatgacacaggcaaatattagccacatacacttgaacatgggaaaaattaaaactgagacaacaccaccctggaccaggtaccccacattttgtttttctccctcctctgtcactaatcaactagatggtctcaggtgagccccgtcccctctctgaggctcagttttctcatctgtgagatgaggggttgtgcatatggacttcccwgttctgtcatcctaaactctgtgattccacttgatcagtgtgaattcttccttgaaacctttccatgacaggaatggctttggggaatgcactggagaatggtgttgtttcttaggaaagttacctggtggaggcggtgtagtaattttagtttcctttgtggggaccacttctgctgtaatctttatgtatgttatgggtagggttgaatcca

SEQ ID NO: 133613 - DNA, 457 bp, Homo sapiens
cgctcctacagctgataagtggtagagctgagattctsttacaggcgctaggggtcccgggctttctctctccatcaccctgctctattgtttcctgtagcagctgtgacaacctcatttagatcacgttcacaggtcaggccctggtaagcgttcttgtgaccttgcattaaggctccacagtgctccccctccctctctttgctccagacccaccagtcaccttgccattccacttgccacctgcccttgcccttgctgttccctcctgctgcaatgttcttccccatgcatgacaaggcttgtcccccaatgcctttctggtctctcctccagtgtctcctccttggagaggatgctatctgcagtagcttccactgcctctgcagactggcccttttcccctcttacccttttcctgttctaagttttttacagcatttatcacaataagatt

SEQ ID NO: 133614 - DNA, 457 bp, Homo sapiens
cgctcctacagctgataagtggtagagctgagattctcttacaggcgctaggggtcccgggctttctctctccatcaccctgctctattgtttcctgtagcagctgtgacaacctcatttagatcacgttcacaggtcaggccctggtaagcgttcttgtgaccttgcattaaggctccacagtgctccccctccctctctttgctccagacccaccagtcaccttgccattccacttgccacctgcccttgcccttgctgttccctcctgctgcaatgttcttccccatgcatgacaaggcttgtcccccaatgcctttctggtctctcctccagtgtctcctccttggagaggatgctatctgcagtagcttccactgcctctgcagactggcccttttcccctcttacccttktcctgttctaagttttttacagcatttatcacaataagatt

SEQ ID NO: 133615 - DNA, 412 bp, Homo sapiens
ttaattttattagaaggaagtcaagtttcatcattactcaatgagcaccactttwtttttatactcctccctctctacttttctggaggttggctcttctatctttgcatacttttttgtactcttctttggaaaattttagtagcagcttgtggatatctaaaaatgcccatcttcataggaaaggacatgacctaatgcccaggcgtagacagattgacagaacgttgttaacgtgtgtgcgtgacgagacacgggtgtgtactgtaagtgacccattttattgattcactcagcaaatatttattatcactcctgtattcactgataaaatgactaaatcatctcaaaccatcattttcttctacatctaaccctatgcagcttttccctggagaatatgctcacagtt

SEQ ID NO: 133616 - DNA, 414 bp, Homo sapiens
caaaagggcactgactgtcaggagacaaacaggagctgtgattgctttaagatcattcccatgcagytgtcgaagcggcgggagagagcacttgggaaagagctgctcacccattattctcagcagcctaaggtgaccttggacagcctcttaacctctgagcagtgagcgtgtgggcatggcctgtcttccagggccttgcagttccgtgcagccttggtgataaaacaacccctcagatgtggtgcaaacacaaagacaaggggacaagtgcccctcctcctccccttccccttctgtttctccttctcctttccctcttctccctcacttcccctacccctgcttctctccttctgtttctccttctcctctcccccgcctcctggatttcccctttttgtgtggttctca

SEQ ID NO: 133617 - DNA, 628 bp, Homo sapiens
gcactcatctgattttggttcttatgaaggtttttttttttttgtttcttgtatataggtagttgttaaattgatgkccttgtgggaaggacgatcagtggagccttctatttcaccatcttgctccatctctgcctctcttagcactttgaatatatcattccagtctctcctggcctgtaaggtttctgctgagaaatcaactgttagtgtaataggaatttcctttatatgtgatgtgatgcttttctcttgctgttttttgaaatctcgttttgtctttgacgtttgacagtttgacaataatatgtcttggagaaaccctttttgggttgtatctatttggtgatctttaagcttcctatatctagatgtctatatgtcttgcaagacttgggaaattttcagcttttatttagttaaataggctttctatgactttgcctatcttttcttcctgtggaattcctaaaaattaaatatttggtcacattgtggtgtgccatgtatcatgtaggcttttttcattgttttttattcttatttatttatttctttttgcttggttgggttatttcaaaagggctgtctttgaaatcagaaagtcttatgtttgatcttgtctatt

SEQ ID NO: 133618 - DNA, 628 bp, Homo sapiens
gcactcatctgattttggttcttatgaaggtttttttttttttgtttcttgtatataggtagttgttaaattgatgtccttgtgggaaggacgatcagtggagccttctatttcaccatcttgctccatctctgcctctcttagcactttgaatatatcattccagtctctcctggcctgtaaggtttctgctgagaaatcaactgttagtgtaataggaatttcctttatatgtgatgtgatgcttttctcttgctgttttttgaaatctcgttttgtctttgacgtttgacagtttgacaataatatgtcttggagaaaccctttttgggttgtatctatttggtgatctttaagcttcctatatctagatgtctatatgtcttgcaagacttgggaaattttcagcttttatttagttaaataggctttctatgactttgcctatcttttcttcctgtggaattcctaaaaattaaatatttggtcacattgtggtrtgccatgtatcatgtaggcttttttcattgttttttattcttatttatttatttctttttgcttggttgggttatttcaaaagggctgtctttgaaatcagaaagtcttatgtttgatcttgtctatt

SEQ ID NO: 133619 - DNA, 437 bp, Homo sapiens
tgataactgcaattatctgaaaactatttcaaagaaaactctttgtctcattctggcatttgctcaagggtatggctttccatcagtctctctgtctccatgtctcttttacatacatatgtatgtgtatatgcgtgcgtatgtgtacatacatccatacatatagacatattctctctctctccacacacactcacacacccctccaacctctgtggctctgagcgtcatgtgtgtaagacactgacgcgaatggtgagtgcctaggcaggggtcaaacaaaggctacctaccatgccagaggattgccacaaacacctcttaagcaagcatattccttggctcctcccagacacactgaatctgaatctctaggattctgatttcggagcccaggaatcctccsgtgcaggagttcccaggtgactctgatgcac

SEQ ID NO: 133620 - DNA, 587 bp, Homo sapiens
atattctttctcactatcaacacagagttcagagctgttctctgaagagctgtcactgacagaggaaaatacggccgtgcgaagaaaactctttgcttccatacatggacttcaaaaatctgatctggtagcttctcttagacacaatctcagtccttccctttcatgtatgcactcttttctscagtattacacaagttctttgacctcgaggttttctgaatagacatatggagaagagcaacaagataaaattacgtagagcaaaataagcacgttcgaaccagaattttaacacgtatattgaaacaatgatcaggaactgtattagtctgttcttgtatagctacaaaaaaatacatgaggctgggtaatttataaagaaaagaggtttaattgggtcacagttcatcaggctgtacagcaagcatggtgctggcatctgctgggcttctggggaggcccccaggaaacttacagtcatataaaagctacacacttttaaacaaccagatctctcgagaatgcactcaccatcaggaggactgtaccaagggggatggtgctaaaccattcatgagaaaccc

SEQ ID NO: 133621 - DNA, 284 bp, Homo sapiens
aaggaattggctcatccaatatgggaggctgatgagtcccaaggtctgcagggtgagtcagtaagtgggagaccccggagaaccaatggtgaagttccagttcaggttcaaaagccggagacctgggagggccagtggtgcagtatgagtctgaaggcaggaaacagctgatgtcccccagtttgaagrcagtcaggcaggaggaatcctgtctactctggggagggggagggttggcttttttttttattcacatcttcagtggattggatcgggcccaccta

SEQ ID NO: 133622 - DNA, 529 bp, Homo sapiens
ctgagtgggtttgcaaaacctggctccaccccttgttgtggtcctgctttgcctcttggagcccgttttcccatctgtaaaatggggccagcacagccactgagtggtcactaagggtctgtgagtatactagtattacaaccagatccccaagcattgccatcttggatttctgtttctccagacactgcccacagcaggcaacagacaggaaagaacaaggacaggacttaattaatccacagcagagaagaaagggcaggggtgtggcaaaaaaaaaaaaagaaaagaaaagaaaagaaaagaaaagaaaaagcaagatttttggagatagagacaagacatcacctccttccctcccacttcaccttaytaagggatgaaattgccaaagctctctgagatcctaaatctcttctggccatccttaaagtcctggagcctacttaatccccaagacaggcctgggctgctctgactctctgaccatcaagttaattttatgttgtactttcaagtctgaaaagta

SEQ ID NO: 133623 - DNA, 525 bp, Homo sapiens
tgggcggtcggtggtcggggctgtaatttgcacacgtgtttgtgatttagtgattccgattgtcgtgcgaggccatggagtaggtgcctggctgctccgtgtatttttgaatgaaggcatgtgaggagccccagcatcacaaggggccacataaaaacctggctaggctgggcacttggttactggcctcacactgggacacactgccctctacagacagctctcagacggcttctctcctggaagccctggtgcccagtcccttcccgcctccctggccccacgatrcctctttccccaggcagagcctaggtccttattaacctcctgaacacagggagtggcccagaatcagcccagcttagcaccccatcagtgccctgaatctgcatgtggccagggctggtggtggtcattggtgtagcctcctaggttgtgcgtgtgtgtgcgtgcgcgtgcgtgagggggtgagagaagatgcagaaccttgcctgcaccagaggtcaggtgtgtgatcattcgaga

SEQ ID NO: 133624 - DNA, 405 bp, Homo sapiens
agatctgctttttccacatggtcagccctgggaattcgcctgaacaagtcccagtttccccatctctgcagaatagggataataattgtactgacctcattcggacattrgaagaattattaataaaggagagaatttatatcaagcagttagctcaggcccagcccacaataagagctcagtaaacatcactgaccagcatcatcaggtgtttttcttaacgccctgggcaacttgggtaccaggagtgcagccctgaccctggtgatggcagctgaatggtgggcagttgttaagacagatgattagtgcccagatgatggggaggtgatgaattggtcagatggcttggtggatggatgaaagatgagtaaccacatggaccaaggggtggtcctggggctc

SEQ ID NO: 133625 - DNA, 407 bp, Homo sapiens
ctgggaattcgcctgaacaagtcccagtttccccatctctgcagaatagggataataattgtactgacctcattcggacattagaagaattattaataaaggagagaatttatatcaagcagttagctcaggcccagcccacaataagagctcagtaaacatcactgaccagcatcatcaggtgtttttcttaacgccctgggcaacttgggtaccaggagtgcagccctgaccctggtgatggcagctgaatggtgggcagttgttragacagatgattagtgcccagatgatggggaggtgatgaattggtcagatggcttggtggatggatgaaagatgagtaaccacatggaccaaggggtggtcctggggctcgcttggcaagcctacctccccagccagat

SEQ ID NO: 133626 - DNA, 538 bp, Homo sapiens
aaaagctcccaacgtgtccatggtggtacctccaacaaacacacatataacataaataagcaaagcgaaactcgtgtgcaagcccctaggcggctgctggccggctctgaatcttgaatcacatggttaagtgattattggtggggaaagcttaaagacctgtagaagaggaggaggggggcatgtccaaggtctcgaagtcagtttgggcagagcttggactcaaacctggggttctgactccaagcccagctttccttctgtcagtgggcctaaaaatagaagactgaccttttcttggtatttttgtgcttcacaaatgccagagcgttattcattagttcatcttcccaaaataactggcagaacacggccagagggcaacaggaagactctgggctgcgccccccgaccrtgaaactgggggctcctgggaagtgggggatgtgtctcaccatgggcatagtttccccccactgttggagtggcctgcctggccctgctcttggtgagtccaggggagagagcttcagagggc

SEQ ID NO: 133627 - DNA, 431 bp, Homo sapiens
tttcttcatgacctgaggctaaggagggatttctgaaataaaacaaaccctaaagcaraaagattgatatatttgtctctttcaaaattaagacattcagccaggtgcagtggctcccacctgtaatcccagcactttgggaggccaaggcaggtgaatggtttgagcttacgagtttgagaccagcctgggcaacatggtgaaacctcatctctacacacacaaaaaaaatttaactgggcttggtggtacatgcctgtgtcccagctacttgagatgctgaggtgggaggatggcttgagcccggaaggcggaggttgcagtgagctgtgatcatgccactgcacatcaggctgggcaatagagccagaccttgtctcaataataataacaacacatttagttcatgaaagacactataatgagacaca

SEQ ID NO: 133628 - DNA, 431 bp, Homo sapiens
tttcttcatgacctgaggctaaggagggatttctgaaataaaacaaaccctaaagcagaaagattgatatatttgtctctttcaaaattaagacattcagccaggtgcagtggctcccacctgtaatcccagcactttgggaggccaaggcaggtgaatgrtttgagcttacgagtttgagaccagcctgggcaacatggtgaaacctcatctctacacacacaaaaaaaatttaactgggcttggtggtacatgcctgtgtcccagctacttgagatgctgaggtgggaggatggcttgagcccggaaggcggaggttgcagtgagctgtgatcatgccactgcacatcaggctgggcaatagagccagaccttgtctcaataataataacaacacatttagttcatgaaagacactataatgagacaca

SEQ ID NO: 133629 - DNA, 456 bp, Homo sapiens
cagaaagttataaattagtagaaatgatctgaattcttcctccaagatgtaaactctggtgacattctggggtgtctgtctagattgtttcatgaagcagttacacacagcacacgtgttttctcttagtggtattttattcgtactgattcaratttcttttattgaaatgaaattcacatgacagacaattcaccctttcaaaggtacaattcagtggtgtttagtatactcagagtcatgcaaccgtcctaactgcctagttttggaacgttcccatcaaccctacaggaaaccctgcagccattagccgtcagtcctccttccctcttcccgcagcctctggcaactaccaatccactttctgtctttatggatctgcctgttgtagacgtttcatggaaatggaatcatccagtatgtgctatttggtgtctggcttattcacactgtttt

SEQ ID NO: 133630 - DNA, 370 bp, Homo sapiens
gctgccctgccaacaaaaccataacgcaggaacaaacatcacaactatgccaaataatcaatcctacaatgtccaaaattttactttaaaactggaattwccagacttcctttctgcattaaccagtttaactagacagtaacgaaatattcctactttatgctgtgatagtttgtttgtttgtttgtttatttatttatttatttatttaagacagagtttcactcttgttgcccaggctggagtgcagtggcacgatctcagctcaccacaacctccgcctcccaggttcaagcgattctcctgcctcagcctcccgagtagctgggattacaggcatgtaccaccacgcccgggtaattttgtattt

SEQ ID NO: 133631 - DNA, 390 bp, Homo sapiens
gctgccctgccaacaaaaccataacgcaggaacaaacatcacaactatgccaaataatcaatcctacaatgtccaaaattttactttaaaactggaattaccagacttcctttctgcattaaccagtttaactagacagtaacgaaatattcctactttatgctgtgatagtttgtttgtttgtttgtttrtttatttatttatttatttaagacagagtttcactcttgttgcccaggctggagtgcagtggcacgatctcagctcaccacaacctccgcctcccaggttcaagcgattctcctgcctcagcctcccgagtagctgggattacaggcatgtaccaccacgcccgggtaattttgtatttttagtagagacggggggttt

SEQ ID NO: 133632 - DNA, 382 bp, Homo sapiens
gctgccctgccaacaaaaccataacgcaggaacaaacatcacaactatgccaaataatcaatcctacaatgtccaaaattttactttaaaactggaattaccagacttcctttctgcattaaccagtttaactagacagtaacgaaatattcctactttatgctgtgatagtttgtttgtttgtttgtttatttatttatttatttatttragacagagtttcactcttgttgcccaggctggagtgcagtggcacgatctcagctcaccacaacctccgcctcccaggttcaagcgattctcctgcctcagcctcccgagtagctgggattacaggcatgtaccaccacgcccgggtaattttgtatttttagtagagacg

SEQ ID NO: 133633 - DNA, 550 bp, Homo sapiens
actaattattaaagtcatctagttatatacaccaattctcaacagacacagttttttttggaaaggcatattaaacagactaagatgtgtactacccattagccaaagataattttattgatttttctaayaagtcttcaaatgttacattctaacatcttagcaaattatttccaaatactgctggaattacatgtaactatcaggaaacaaaagggcttctcaacaacttgtgcgttctacattatctggccagtttccggacaattataatacaattgtgctccaaagtaggagagttccatgaatcaattacccctaaaatatatttctgtatatttaaggagttctaagcattgggttaaattccaaacagactctgaatacaagcatttatttagtaagagaggttagaataaatcaatcctaaattaggcacagctgccctccccccattgatcaaaaagacaggaaattacatttatttaaaaagttaatgttcctaatatattcaaatctaactaagccccaaaacggtctgacatcaaat

SEQ ID NO: 133634 - DNA, 550 bp, Homo sapiens
actaattattaaagtcatctagttatatacaccaattctcaacagacacagttttttttggaaaggcatattaaacagactaagatgtgtactacccattagccaaagataattttattgatttttctaacragtcttcaaatgttacattctaacatcttagcaaattatttccaaatactgctggaattacatgtaactatcaggaaacaaaagggcttctcaacaacttgtgcgttctacattatctggccagtttccggacaattataatacaattgtgctccaaagtaggagagttccatgaatcaattacccctaaaatatatttctgtatatttaaggagttctaagcattgggttaaattccaaacagactctgaatacaagcatttatttagtaagagaggttagaataaatcaatcctaaattaggcacagctgccctccccccattgatcaaaaagacaggaaattacatttatttaaaaagttaatgttcctaatatattcaaatctaactaagccccaaaacggtctgacatcaaat

SEQ ID NO: 133635 - DNA, 551 bp, Homo sapiens
cactaattattaaagtcatctagttatatacaccaattctcaacagacacagttttttttggaaaggcatattaaacagactaagatgtgtactacccattagccaaagataattttattgatttttctaacaagtcttcaaatgttacattctaacatcttakcaaattatttccaaatactgctggaattacatgtaactatcaggaaacaaaagggcttctcaacaacttgtgcgttctacattatctggccagtttccggacaattataatacaattgtgctccaaagtaggagagttccatgaatcaattacccctaaaatatatttctgtatatttaaggagttctaagcattgggttaaattccaaacagactctgaatacaagcatttatttagtaagagaggttagaataaatcaatcctaaattaggcacagctgccctccccccattgatcaaaaagacaggaaattacatttatttaaaaagttaatgttcctaatatattcaaatctaactaagccccaaaacggtctgacatcaaat

SEQ ID NO: 133636 - DNA, 516 bp, Homo sapiens
atctagttatatacaccaattctcaacagacacagttttttttggaaaggcatattaaacagactaagatgtgtactacccattagccaaagataattttattgatttttctaacaagtcttcaaatgttacattctaacatcttagcaaattatttccaaatactgctggaattacatgtaactatcaggaaacaaaagggcttctcaacaacttgtgcgttctacattatctggccagtttccggacaattataatacaattgtgctccaaagyaggagagttccatgaatcaattacccctaaaatatatttctgtatatttaaggagttctaagcattgggttaaattccaaacagactctgaatacaagcatttatttagtaagagaggttagaataaatcaatcctaaattaggcacagctgccctccccccattgatcaaaaagacaggaaattacatttatttaaaaagttaatgttcctaatatattcaaatctaactaagccccaa

SEQ ID NO: 133637 - DNA, 538 bp, Homo sapiens
atctagttatatacaccaattctcaacagacacagttttttttggaaaggcatattaaacagactaagatgtgtactacccattagccaaagataattttattgatttttctaacaagtcttcaaatgttacattctaacatcttagcaaattatttccaaatactgctggaattacatgtaactatcaggaaacaaaagggcttctcaacaacttgtgcgttctacattatctggccagtttccggacaattataatacaattgtgctccaaagtaggagagttccatgaatcaattrcccctaaaatatatttctgtatatttaaggagttctaagcattgggttaaattccaaacagactctgaatacaagcatttatttagtaagagaggttagaataaatcaatcctaaattaggcacagctgccctccccccattgatcaaaaagacaggaaattacatttatttaaaaagttaatgttcctaatatattcaaatctaactaagccccaaaacggtctgacatcaaatcctc

SEQ ID NO: 133638 - DNA, 472 bp, Homo sapiens
caccaattctcaacagacacagttttttttggaaaggcatattaaacagactaagatgtgtactacccattagccaaagataattttattgatttttctaacaagtcttcaaatgttacattctaacatcttagcaaattatttccaaatactgctggaattacatgtaactatcaggaaacaaaagggcttctcaacaacttgtgcgttctacattatctggccagtttccggacaattataatacaattgtgctccaaagtaggagagttccatgaatcaattacccctaaaatatatttctgtatatttaaggagttmtaagcattgggttaaattccaaacagactctgaatacaagcatttatttagtaagagaggttagaataaatcaatcctaaattaggcacagctgccctccccccattgatcaaaaagacaggaaattacatttatttaaaaagttaatgtt

SEQ ID NO: 133639 - DNA, 516 bp, Homo sapiens
atctagttatatacaccaattctcaacagacacagttttttttggaaaggcatattaaacagactaagatgtgtactacccattagccaaagataattttattgatttttctaacaagtcttcaaatgttacattctaacatcttagcaaattatttccaaatactgctggaattacatgtaactatcaggaaacaaaagggcttctcaacaacttgtgcgttctacattatctggccagtttccggacaattataatacaattgtgctccaaagtaggagagttccatgaatcaattacccctaaaatatatttctgtatatttaaggagttctaagcattgggttaaattccaaacagactctgaatacaagcatttatttagtaagagaggttagaataaatcaatcctaaattaggcacagctgccctccccccattgatcaaaaagayaggaaattacatttatttaaaaagttaatgttcctaatatattcaaatctaactaagccccaa

SEQ ID NO: 133640 - DNA, 399 bp, Homo sapiens
gccaaaatggtgaaacctcatctctactaaaaatacaaaaattagctgggtgtggtggtgcgcacctgtaatctcagctacatgggagactgaggcaggagaatcgcttgaacccaggaggtggaggttgcagtgagccaagactgcaccactgcactccagagcctgggcaataataagagcgaaactccgtctcggggtggggtgaggaagataccataaaatacctgtacycgattctagaccttactgaggattccatctacttccaccttactgtaacttttcaaatacttttcccactgaactaaatcccccccataaacatgcaacactttctaatgtattccattgaaaaatacaaaaacatataaaaaggaaaaactccatcaatcccac

SEQ ID NO: 133641 - DNA, 578 bp, Homo sapiens
aatggataattaagatttggttattatagacacttaatacttaggtagctaaggtagttttaccaataaattataktaatttaatatttcagtattgcaaaactgatgcatactcatttacaatttgacatggaatggttctgtttgttttattaaattgaacttaaagttctctgcaagaagagattgtataataaattccctgagcctcccaaattaatattttagccatagactcatatttagagcagtgtttctaatgtaatgatacaaggcccagggttattcatagtttcaccctttctcttattcctcattaaagcatgtttgaatccaggtaagaggcattacaggggaaaaccttgaatttatttttgaagggtaaatcatttccaagtggtattaaccattagtatggaaagcaacatatcctataactgctctgtgacagtgagactatctttgctgctttagagaataagtacattcctacttcattggctttagtgcaaatctcatttcctggtttatatccattacaaattagatctcaccatgagagcaaaatcccttaataa

SEQ ID NO: 133642 - DNA, 578 bp, Homo sapiens
aatggataattaagatttggttattatagacacttaatacttaggtagctaaggtagttttaccaataaattatagtaatttaatatttcagtattgcaaaactgatgcatactcatttacaatttgacatggaatggttctgtttgttttattaaattgaacttaaagttctctgcaagaagagattgtataataaattccctgagcctcycaaattaatattttagccatagactcatatttagagcagtgtttctaatgtaatgatacaaggcccagggttattcatagtttcaccctttctcttattcctcattaaagcatgtttgaatccaggtaagaggcattacaggggaaaaccttgaatttatttttgaagggtaaatcatttccaagtggtattaaccattagtatggaaagcaacatatcctataactgctctgtgacagtgagactatctttgctgctttagagaataagtacattcctacttcattggctttagtgcaaatctcatttcctggtttatatccattacaaattagatctcaccatgagagcaaaatcccttaataa

SEQ ID NO: 133643 - DNA, 578 bp, Homo sapiens
aatggataattaagatttggttattatagacacttaatacttaggtagctaaggtagttttaccaataaattatagtaatttaatatttcagtattgcaaaactgatgcatactcatttacaatttgacatggaatggttctgtttgttttattaaattgaacttaaagttctctgcaagaagagattgtataataaattccctgagcctcccaaattaatattttagccatagactcatatttagagcagtgtttctaatgtaatgatacaaggcccagggttattcatagtttcaccstttctcttattcctcattaaagcatgtttgaatccaggtaagaggcattacaggggaaaaccttgaatttatttttgaagggtaaatcatttccaagtggtattaaccattagtatggaaagcaacatatcctataactgctctgtgacagtgagactatctttgctgctttagagaataagtacattcctacttcattggctttagtgcaaatctcatttcctggtttatatccattacaaattagatctcaccatgagagcaaaatcccttaataa

SEQ ID NO: 133644 - DNA, 605 bp, Homo sapiens
agtcatttggtattaattttcagaacctgtygttctaaaaccttaatacagtttgaagattatgccagagtgaatataaagaaaaatttgtactgctttagaaagaatcacatttgatggctttgtttcgaaatgaggtctgaatatatcaaaaacatttattctaatgaggacagagtttgtgaacatctgtaaattaaactttcttctcattcctctgtgcttttattaattctgtaattcaaactgagcactcactctgttgcagacacttggctgggaagataaaggtcatttagactttgtctgatacccttgccttctactgctaaatgggttaatgtgtaattgcttcactgagcatgtgctgtgacccaggcagcacataaaacagacacaaattccaaccttttaaagcaaagattagataaagattattgatagaaggactaattggacctcactcaccttttctgtgccataaggaaagcagttaggtaaagctgaccttctttggagggaagacacaaggtcaagacatgcccatcaggatgccctttgggcctagacctgatgtgagaatgatggggcttggtagtgttctg

SEQ ID NO: 133645 - DNA, 605 bp, Homo sapiens
agtcatttggtattaattttcagaacctgtcgttctaaaaccttaatacagtttgaagattatgccagagtgaatataaagaaaaatttgtactgctttagaaagaatcacatttgatggctttgtttckaaatgaggtctgaatatatcaaaaacatttattctaatgaggacagagtttgtgaacatctgtaaattaaactttcttctcattcctctgtgcttttattaattctgtaattcaaactgagcactcactctgttgcagacacttggctgggaagataaaggtcatttagactttgtctgatacccttgccttctactgctaaatgggttaatgtgtaattgcttcactgagcatgtgctgtgacccaggcagcacataaaacagacacaaattccaaccttttaaagcaaagattagataaagattattgatagaaggactaattggacctcactcaccttttctgtgccataaggaaagcagttaggtaaagctgaccttctttggagggaagacacaaggtcaagacatgcccatcaggatgccctttgggcctagacctgatgtgagaatgatggggcttggtagtgttctg

SEQ ID NO: 133646 - DNA, 571 bp, Homo sapiens
cagctttgagtctggaaaatttgtcgaatgtaccgagcaattagaattgttaccaggagaaaatatcaatctacttgctggaggrtcaaaagaaaaaataggtaggtatttgagaaaatagttttaaagttattttagtggacaagttgctcaaaatgtttggcttagtatattttactggaaaatctggaagttattttacatttttgtgggggcagaatcccatgtgaagcaacaaatttagggctgccctatttatgtttgatttgggaaatgaaaagcacttaaaattaagtcaaataaaaaaaatgaccaccttaatactttgagatttatctagccattttgtttgataaaggacaaagtagtgtttcagctaaatatttttcttgattttcatcttgatgtggctcgttaattaagttctttatcacaaatggaacacttgataagatgttattaaaaagtttaatgagtattctggattgagcaagatttgctaatgcaggtctagatttgtccccttaaatagtagattgacttaccgattttcttttttgttgagacagag

SEQ ID NO: 133647 - DNA, 411 bp, Homo sapiens
tttggaggacaagccttggcttcagccagcttttgtggctgtacgaatatagcataggagctttaagagcgctgctgaagcctctgttactggtacttggcttttctggccscactgtcatggcttaactctgtgccatctcttatctgaatctctttgtgtttctcccctattcagatcaaccagtcaaggctcccataaagattttggcctcatcttgtttttttcatctttgctgcttgtagtcaacaggaattcagtacctttagctgtactgatgtgtttactctttcctagaaaagcaaggaaatgttttgcttctgcgttgttttttctttgcccccacacctagaatgtcttttttcacagcccacgtttaaagctgatctacctctcataagccacacattc

SEQ ID NO: 133648 - DNA, 424 bp, Homo sapiens
tttggaggacaagccttggcttcagccagcttttgtggctgtacgaatatagcataggagctttaagagcgctgctgaagcctctgttactggtacttggcttttctggccccactgtcatggcttaactctgtgccatctcttatctgaatctctttgtgtttctcccytattcagatcaaccagtcaaggctcccataaagattttggcctcatcttgtttttttcatctttgctgcttgtagtcaacaggaattcagtacctttagctgtactgatgtgtttactctttcctagaaaagcaaggaaatgttttgcttctgcgttgttttttctttgcccccacacctagaatgtcttttttcacagcccacgtttaaagctgatctacctctcataagccacacattctagtttgtagaga

SEQ ID NO: 133649 - DNA, 411 bp, Homo sapiens
tttggaggacaagccttggcttcagccagcttttgtggctgtacgaatatagcataggagctttaagagcgctgctgaagcctctgttactggtacttggcttttctggccccactgtcatggcttaactctgtgccatctcttatctgaatctctttgtgtttctcccctattcagatcaaccartcaaggctcccataaagattttggcctcatcttgtttttttcatctttgctgcttgtagtcaacaggaattcagtacctttagctgtactgatgtgtttactctttcctagaaaagcaaggaaatgttttgcttctgcgttgttttttctttgcccccacacctagaatgtcttttttcacagcccacgtttaaagctgatctacctctcataagccacacattc

SEQ ID NO: 133650 - DNA, 424 bp, Homo sapiens
tttggaggacaagccttggcttcagccagcttttgtggctgtacgaatatagcataggagctttaagagcgctgctgaagcctctgttactggtacttggcttttctggccccactgtcatggcttaactctgtgccatctcttatctgaatctctttgtgtttctcccctattcagatcaaccagtcaaggctcccataaagattttggcctcatcttgtttttttcatctttgctrcttgtagtcaacaggaattcagtacctttagctgtactgatgtgtttactctttcctagaaaagcaaggaaatgttttgcttctgcgttgttttttctttgcccccacacctagaatgtcttttttcacagcccacgtttaaagctgatctacctctcataagccacacattctagtttgtagaga

SEQ ID NO: 133651 - DNA, 461 bp, Homo sapiens
gtctcaagtaatcctcctgccttgccctcccraagtgctgggattacaggtgtgagcaatcatgcctggcctcctttaattttttttttttttttttttttttttttttgagacggagtctcgctcttttgcccaggctggagtgcagtggcacaattgtatttttagtagagacggggtttcaccatgttagccaggatggtctcgatctcctgacctcgtgatctgcctgccttggcctcccaaagtgctgggattacaggcgtgagccaccgcgcccggccggcctcctttaatttcttaaccataaatatcctccccccacttttattatggacgttctgaagcacataaaaatagggagcatagtataataaatttgtacatatttaacactcagcttctataattagaaacaaatggcccatctggtttcatctaggcctctttgctatcctttc

SEQ ID NO: 133652 - DNA, 493 bp, Homo sapiens
ttaaattcttggtctcaagtaatcctcctgccttgccctcccaaagtgctgggattacaggtgtgagcaatcatgcctggcctcctttaatttyttttttttttttttttttttttttttgagacggagtctcgctcttttgcccaggctggagtgcagtggcacaattgtatttttagtagagacggggtttcaccatgttagccaggatggtctcgatctcctgacctcgtgatctgcctgccttggcctcccaaagtgctgggattacaggcgtgagccaccgcgcccggccggcctcctttaatttcttaaccataaatatcctccccccacttttattatggacgttctgaagcacataaaaatagggagcatagtataataaatttgtacatatttaacactcagcttctataattagaaacaaatggcccatctggtttcatctaggcctctttgctatcctttcatctccaactggattatttta

SEQ ID NO: 133653 - DNA, 454 bp, Homo sapiens
tcctgccttgccctcccaaagtgctgggattacaggtgtgagcaatcatgcctggcctcctttaattttttttttttttttttttttttttttttgagacggagtctcgctcttttgcccaggctggagtgcagtggcacaattgtatttttagtagagacggggtttcaccatgttagccaggatggtctcgatctcctgacctcgtgatctgcctgccttggcctcccaaagtgctgggattayaggcgtgagccaccgcgcccggccggcctcctttaatttcttaaccataaatatcctccccccacttttattatggacgttctgaagcacataaaaatagggagcatagtataataaatttgtacatatttaacactcagcttctataattagaaacaaatggcccatctggtttcatctaggcctctttgctatcctttcatctcca

SEQ ID NO: 133654 - DNA, 454 bp, Homo sapiens
tcctgccttgccctcccaaagtgctgggattacaggtgtgagcaatcatgcctggcctcctttaattttttttttttttttttttttttttttttgagacggagtctcgctcttttgcccaggctggagtgcagtggcacaattgtatttttagtagagacggggtttcaccatgttagccaggatggtctcgatctcctgacctcgtgatctgcctgccttggcctcccaaagtgctgggattacaggcgtgagccaccrcgcccggccggcctcctttaatttcttaaccataaatatcctccccccacttttattatggacgttctgaagcacataaaaatagggagcatagtataataaatttgtacatatttaacactcagcttctataattagaaacaaatggcccatctggtttcatctaggcctctttgctatcctttcatctcca

SEQ ID NO: 133655 - DNA, 464 bp, Homo sapiens
tctcaagtaatcctcctgccttgccctcccaaagtgctgggattacaggtgtgagcaatcatgcctggcctcctttaattttttttttttttttttttttttttttttgagacggagtctcgctcttttgcccaggctggagtgcagtggcacaattgtatttttagtagagacggggtttcaccatgttagccaggatggtctcgatctcctgacctcgtgatctgcctgccttggcctcccaaagtgctgggattacaggcgtgagccaccgcgcccggccggcctcctttaatttcttaaccataaatatcctccccccacttttattatggacrttctgaagcacataaaaatagggagcatagtataataaatttgtacatatttaacactcagcttctataattagaaacaaatggcccatctggtttcatctaggcctctttgctatcctttcatct

SEQ ID NO: 133656 - DNA, 454 bp, Homo sapiens
tcctgccttgccctcccaaagtgctgggattacaggtgtgagcaatcatgcctggcctcctttaattttttttttttttttttttttttttttttgagacggagtctcgctcttttgcccaggctggagtgcagtggcacaattgtatttttagtagagacggggtttcaccatgttagccaggatggtctcgatctcctgacctcgtgatctgcctgccttggcctcccaaagtgctgggattacaggcgtgagccaccgcgcccggccggcctcctttaatttcttaaccataaatatcctccccccacttttattatggacgttctgaagcacataaaaatagggagcatrgtataataaatttgtacatatttaacactcagcttctataattagaaacaaatggcccatctggtttcatctaggcctctttgctatcctttcatctcca

SEQ ID NO: 133657 - DNA, 449 bp, Homo sapiens
tactgtatctatgttgctattggtcgaaagagatccactgttgctcagttggtgaagagacttacagatgcagatgccgtgaagtacaccactgtggtgtcagctatggcctcagatgctgccctacttcagtacctggctccttactctgactgttccatgggagagtattttagagacgatggcaaatatactttgrtcatctatgacgacttatccaaacaggctgtcgcttactgtcagatgtctctgttgctccaccgacccccctggtcgtaaggcctgtcctggtgatgtgttttacctatactcccggttgctggagagagcagccaaaatgaatgatgcttttggtggtggctccttgactgctttgctagtcatagaaacacaggccgatgatgtgtctgcttacattccaacaaatgtcatttccatcactgacagac

SEQ ID NO: 133658 - DNA, 449 bp, Homo sapiens
tactgtatctatgttgctattggtcgaaagagatccactgttgctcagttggtgaagagacttacagatgcagatgccgtgaagtacaccactgtggtgtcagctatggcctcagatgctgccctacttcagtacctggctccttactctgactgttccatgggagagtattttagagacgatggcaaatatactttgatcatctatgacgacttatccaaacaggctgtcgcttactgtcagatgtctctgttgctccaccgamccccctggtcgtaaggcctgtcctggtgatgtgttttacctatactcccggttgctggagagagcagccaaaatgaatgatgcttttggtggtggctccttgactgctttgctagtcatagaaacacaggccgatgatgtgtctgcttacattccaacaaatgtcatttccatcactgacagac

SEQ ID NO: 133659 - DNA, 445 bp, Homo sapiens
tactgtatctatgttgctattggtcgaaagagatccactgttgctcagttggtgaagagacttacagatgcagatgccgtgaagtacaccactgtggtgtcagctatggcctcagatgctgccctacttcagtacctggctccttactctgactgttccatgggagagtattttagagacgatggcaaatatactttgatcatctatgacgacttatccaaacaggctgtcgcttactgtcagatgtctctgttgctccaccgacccccctggtcgtaaggcctgtcctggtgatgtgttttacctatactcccggttgctggagagagcagccaaaatgaatgatgcttttggtggtggctccttgactgctttgctagtcatagaaacacaggccgatgatgtgtctgcttacattccaacraatgtcatttccatcactgac

SEQ ID NO: 133660 - DNA, 495 bp, Homo sapiens
agttgtaacaaatttcttggctggatttgaagcttaaactcctatggattcacatcaaatatcagttcagttttgtcactgtttgttctagtaaattagtttcatttgtaaaagagttactctcatattccttatgtacaaaaatcacataaaaaagtttccataatgcattaaaaaaaaaaaaaagaggagagttccggggaccaggcaaccgccacagttgaacgctgctgctccacggtggagtcaccgcacccccgccagcatcatggtgttctacttcaccagcagcagcgttaattcatctgcytgcgctatttacatgggaaaggataaatatgaaatagagacagggtttcaccattttggccagaatggtctcaatctcctgacctcgtgatccgcccacctcagcctcccaaagtgctgggattacaggcatgagccaccgcgcccggcccttgagttttatatctctcctactaacccataaat

SEQ ID NO: 133661 - DNA, 434 bp, Homo sapiens
ctgggtgatttctggcaagttgcttaacctctctgagcctcttatctgtaagatgaggataaaagcaatatcagycttattaagaagattacacatggtgtattgagttgaataatgttcccccaaatttatatccacctggaaccctgggaatatgaccttatttggaacctttttgggcctttgcagaggtatgcagaggtcatactggattagcgtaggccttaagtccaatatgactggtgtcctcctaagaagagggagatttggacacagagacagataaacagagagaacaccatgtgcaggtggaaagagactggtgtgacatgcccataagccgaggtgcactgaagatcgcccgcctccagcagaagctggaagaggaaaagaaggattctctcctaggccttcaggaggagtgtggccccact

SEQ ID NO: 133662 - DNA, 429 bp, Homo sapiens
agttgcttaacctctctgagcctcttatctgtaagatgaggataaaagcaatatcagtcttattaagaagattacacrtggtgtattgagttgaataatgttcccccaaatttatatccacctggaaccctgggaatatgaccttatttggaacctttttgggcctttgcagaggtatgcagaggtcatactggattagcgtaggccttaagtccaatatgactggtgtcctcctaagaagagggagatttggacacagagacagataaacagagagaacaccatgtgcaggtggaaagagactggtgtgacatgcccataagccgaggtgcactgaagatcgcccgcctccagcagaagctggaagaggaaaagaaggattctctcctaggccttcaggaggagtgtggccccactgacaccatgggt

SEQ ID NO: 133663 - DNA, 422 bp, Homo sapiens
agttgcttaacctctctgagcctcttatctgtaagatgaggataaaagcaatatcagtcttattaagaagattacacatggtgtattgagttgaataatgttcccccaaatttatatccacctggaaccctgggaatatgaccttatttggaacctttttgggcctttgcagaggtatgcagaggtcatactggattagmgtaggccttaagtccaatatgactggtgtcctcctaagaagagggagatttggacacagagacagataaacagagagaacaccatgtgcaggtggaaagagactggtgtgacatgcccataagccgaggtgcactgaagatcgcccgcctccagcagaagctggaagaggaaaagaaggattctctcctaggccttcaggaggagtgtggccccactgacac

SEQ ID NO: 133664 - DNA, 491 bp, Homo sapiens
aggcaacaaggcgaaaccctgtctctacaaaaaatacaaaaattagccaggctttgtggtgctcccagctactagggaggctgaggtgagaggattgcttgatccaaagagatagaggctgcagtgagccatgagccgtgagtgtgtcactgcactccagcttgggtgacagagtgataccccatctcagacataaatacattaaaaacaattttttaaaaaaattatttttaaaaatttaaaaggagcaatgaattggagaaggaaaggaagaaaatgaggccrggtgcagtggctcatacctgtaattctagcactttgggaggctgaggctgatcttgaactcctaatcacctgaggtcaggaatttgagatccgcctggctaacatggtgaaacctcgtctctactttgtttttagtttttttttgttttttttttttttagatggagtttcgctcctgttttccaggctggagtgcaatggcatga

SEQ ID NO: 133665 - DNA, 491 bp, Homo sapiens
aggcaacaaggcgaaaccctgtctctacaaaaaatacaaaaattagccaggctttgtggtgctcccagctactagggaggctgaggtgagaggattgcttgatccaaagagatagaggctgcagtgagccatgagccgtgagtgtgtcactgcactccagcttgggtgacagagtgataccccatctcagacataaatacattaaaaacaattttttaaaaaaattatttttaaaaatttaaaaggagcaatgaattggagaaggaaaggaagaaaatgaggccaggtgcagtggctcatacctgtaattctagcactttgggaggctgaggctgatcttgaactcctaatcacctgaggtcaggaatttgagatccgcctggctaacatggtgaaacctcgtctctactttgtttttagkttttttttgttttttttttttttagatggagtttcgctcctgttttccaggctggagtgcaatggcatga

SEQ ID NO: 133666 - DNA, 327 bp, Homo sapiens
aaagaattctttccagctttccatcctgaacctgctggtctccaggctcgttcctgcaaatatttcacagaggagtaagagccacattcttgctggctttccarttcattctcctctcttcgagtccacctcttaaaacttcttagtgctcttgcaagaaactcatgtcttttgtcagggagaatggcatggcctttgtatgacacttccttctagccagactcggatttgggggcatcatatttgggatggctgcaccgcaaacaggaaaggccacaggacagctcacaggttctctctgaacagaagcctgtgagcacgtgcctg

SEQ ID NO: 133667 - DNA, 327 bp, Homo sapiens
aaagaattctttccagctttccatcctgaacctgctggtctccaggctcgttcctgcaaatatttcacagaggagtaagagccacattcttgctggctttccagttcattctcctctcttcgagtccacctcttaaaacttcttagtgctcttgcaagaaactcatgtcttttgtcagggagaatggcatggcctttgtatgacacttccttctagccagactcggatttgggggcatcatatttgggatggctgcaccgyaaacaggaaaggccacaggacagctcacaggttctctctgaacagaagcctgtgagcacgtgcctg

SEQ ID NO: 133668 - DNA, 588 bp, Homo sapiens
tgtacctgggctcagtggtctggctaaaggagaggtgctggggccaggtgacaggcgagtctctatacggcaggcccaaaaaatggaggtgcaggcttcatctatactttgatgtgtatgcttccttctttaaacttgtgataatcagagttatagctgctttaaacttgtaaaaatcagagttatagctgcttttgaactagtacttgttgtgtgcccaggaaatggccaaatgttatcactcatccttccaagaaccacatgaaggttatattattatgtcgactttccagatgaggagactgaggctcagtggcttgtcataggtgtcaaagacaggagtccartgtaaggacttctggcttcagcacaggggattttcctaccatcccatattgccaccccatctgcaaaaatacctggatctatcttcctcctgctgattctcagctccctccaggactgaagagatgatattgattctcacttgatagaggttagaaagggcctctcccttccctagctgaatagagagggtttcctttttcttttcttttctttttttttttttaaatgggaaacttacag

SEQ ID NO: 133669 - DNA, 585 bp, Homo sapiens
atttgtgtccagtctgtacatgtaatttgtgtgcaggatagaatctggcaccatgtatgcgtctcagtaagtgtgagctagaatcatgttcaagaagaacactcatgacatgagaaaatgttgctgttagtgaaaactggagacgagaaagccatacttatactattgatgctatttttgaaaggcatagagatgtgtataacagtggctagaaaattttgcccaaatgttatcagtaggtggtgcatttttgttttcctttctaaactctgccatgatttctaaaaactaactcaatgagcactagtatgttgaattttaaaatgagaataaaatgtgactctgttaagtacaaatggccagataacatcgcgtctcagctgctttgcgtgtttaacytcagcccttatcattatttctgtgctgcctgtaagccgcagaatctgtctctgagatgctgcatttccctaagaaaggaggaggagtgagacgcctctggggtgtgtggttatttgctgttgttaatatcagggatggtcacgatcaccacagtccggaagtgcatgcagtctgctcgtaaaacat

SEQ ID NO: 133670 - DNA, 585 bp, Homo sapiens
atttgtgtccagtctgtacatgtaatttgtgtgcaggatagaatctggcaccatgtatgcgtctcagtaagtgtgagctagaatcatgttcaagaagaacactcatgacatgagaaaatgttgctgttagtgaaaactggagacgagaaagccatacttatactattgatgctatttttgaaaggcatagagatgtgtataacagtggctagaaaattttgcccaaatgttatcagtaggtggtgcatttttgttttcctttctaaactctgccatgatttctaaaaactaactcaatgagcactagtatgttgaattttaaaatgagaataaaatgtgactctgttaagtacaaatggccagataacatcgcgtctcagctgctttgcgtgtttaacctcagcccttatcattatttctgtgctgcctgtaagccgcagaatctgtctctgagatgctgcatttccytaagaaaggaggaggagtgagacgcctctggggtgtgtggttatttgctgttgttaatatcagggatggtcacgatcaccacagtccggaagtgcatgcagtctgctcgtaaaacat

SEQ ID NO: 133671 - DNA, 347 bp, Homo sapiens
tggcttgagcccaggagttcaagatcagcctgggcaataaggcgagaacttgtctctgtaaaaaaatatatataaaaattagctcagcatgatggtgtgtccctgtagtcccagctacttgggagactgaggcaggaggatcagttgggcctgggaggtcaaggctgcagtaaaccataatggtgccactgcagtcccgcctagggaacggaatgagaccctatctcaaaaagaaacaaaacaaaamcaaaaactgatccaggcacttcttatatttctattaacgttgaaaaaatgttttgagatatactgactcgaagaggagaaataaatggactctgtgattt

SEQ ID NO: 133672 - DNA, 275 bp, Homo sapiens
gaagtcaaacagtagtggaagagtatttggcttttcttggtaatcttgtatcagcayagactgttttcctcagaccgtgtctcagcatgattgcttcccattttgtgcctcgtaagtcattactctttgcttgcttggaattttcttttcttttctttttaatacttctttattaaaataccaccttccccttatatatgagagactgctaccatggaagattccagatgcatattggcaccaggtctggtagacatatattccccgtaatgacc

SEQ ID NO: 133673 - DNA, 275 bp, Homo sapiens
gaagtcaaacagtagtggaagagtatttggcttttcttggtaatcttgtatcagcacagactgttttcctcagaccgtgtctcagcatgattgcttcccattttgtgcctcgtaagtcattactctttgcttgcttggaattttcttttcttttctttttaatacttctttrttaaaataccaccttccccttatatatgagagactgctaccatggaagattccagatgcatattggcaccaggtctggtagacatatattccccgtaatgacc

SEQ ID NO: 133674 - DNA, 481 bp, Homo sapiens
ctggtgcctgcattagttaatgagttaaataaagtctttgacatgtatgtattctgtatttttgagtcagaattgtatcttcttttaaaagcagtcctttgacaccagggcccctctgctaaggaagccatagagtcgggaatctgagcctggatcagcacactctgaagggaagaaaagaggaagatgagactccaggagcacccggggmgtgcctgacccctgcgcgccatcaccctccctctgcagaggtggaggtgacaggtgagctgacacagaaagcagagagtcagcccaaatggtagatgttgctcccatggttctctgggaccacggcgggcaggaccaggtcgagcagctgagactcttgtgcttcctttgctgacaccggccccatccaaagggctcccgtcctcagggtggggctgtggagagcccgtgaagaaactcaaaaggctccaccaaaacactgcgaagaatt

SEQ ID NO: 133675 - DNA, 468 bp, Homo sapiens
ccggaaacatcttactggtgcctgcattagttaatgagttaaataaagtctttgacatgtatgtattctgtatttttgagtcagaattgtatcttcttttaaaagcagtcctttgacaccagggcccctctgctaaggaagccatagagtcgggaatctgagcctggatcagcacactctgaagggaagaaaagaggaagatgagactccaggagcacccggggcgtgcctgacccctgcgcgccatcaccctccctytgcagaggtggaggtgacaggtgagctgacacagaaagcagagagtcagcccaaatggtagatgttgctcccatggttctctgggaccacggcgggcaggaccaggtcgagcagctgagactcttgtgcttcctttgctgacaccggccccatccaaagggctcccgtcctcagggtggggctgtggagagcccgtgaagaaactcaaaa

SEQ ID NO: 133676 - DNA, 481 bp, Homo sapiens
ctggtgcctgcattagttaatgagttaaataaagtctttgacatgtatgtattctgtatttttgagtcagaattgtatcttcttttaaaagcagtcctttgacaccagggcccctctgctaaggaagccatagagtcgggaatctgagcctggatcagcacactctgaagggaagaaaagaggaagatgagactccaggagcacccggggcgtgcctgacccctgcgcgccatcaccctccctctgcagaggyggaggtgacaggtgagctgacacagaaagcagagagtcagcccaaatggtagatgttgctcccatggttctctgggaccacggcgggcaggaccaggtcgagcagctgagactcttgtgcttcctttgctgacaccggccccatccaaagggctcccgtcctcagggtggggctgtggagagcccgtgaagaaactcaaaaggctccaccaaaacactgcgaagaatt

SEQ ID NO: 133677 - DNA, 487 bp, Homo sapiens
gaattctctcccaaatgccggaaacatcttactggtgcctgcattagttaatgagttaaataaagtctttgacatgtatgtattctgtatttttgagtcagaattgtatcttcttttaaaagcagtcctttgacaccagggcccctctgctaaggaagccatagagtcgggaatctgagcctggatcagcacactctgaagggaagaaaagaggaagatgagactccaggagcacccggggcgtgcctgacccctgcgcgccatcaccctccctctgcagaggtggaggtgacaggtgagctgacacagaaagcagagagtcagcccaartggtagatgttgctcccatggttctctgggaccacggcgggcaggaccaggtcgagcagctgagactcttgtgcttcctttgctgacaccggccccatccaaagggctcccgtcctcagggtggggctgtggagagcccgtgaagaaactcaaaagg

SEQ ID NO: 133678 - DNA, 393 bp, Homo sapiens
attgattacacttaaaaaacaagcagaataattattcttggtacatacttacaaacttcatttcagtcttcaagcatttctggctctaacactatgtcattgatgtggtttttttttttgaagaatgtcttttttcattatttattacttttatttttcataaaatatcctccaatttttttcartgttgaattttgtgatggataaattaaaaattgttgacagctttgactctactctgtagtatgaaatattttattgaaaaaatacccttcctacgagtctgagagacccaggaagctcagggcaagttggctaaatggaggattttctcaactctcatgtttccatgtggagatgtgtggctctttcagcctggctatttgtgtacgt

SEQ ID NO: 133679 - DNA, 555 bp, Homo sapiens
catcccttgggacgttcttaggggctcacctgttcctagaaggtcagagctactctgccttgtaattggaaggttgtcttcctacgcacycatccttatccttcctttctttgcttttcctctgtacccatgggtattatttaaagaaacctatgaacttacttagcatggtttgtaatgaaaggcagttgtgtgtttttatgttattctggtttttttatgaagtgtaaagttgatttgaatttttctttcctctagtactgtaaaatcatgcctagatcttttggttaactggctgcacatataccttaataaccaggattcgggaacaaaggcattctgcgatgttgctctccatggaccattttactcagcctgccaagctgtgttctacacctttgtttttagacacaagcagcttttgagcggaaacctgaaagaaggtcagtgttgtgggagtgctggactggattttccttgtgttcttgtcacccttcagaatggtgattcattacttttttgagatttttataaaaactggattcagaaaactgc

SEQ ID NO: 133680 - DNA, 555 bp, Homo sapiens
catcccttgggacgttcttaggggctcacctgttcctagaaggtcagagctactctgccttgtaattggaaggttgtcttcctacgcactcatccttatccttcctttctttgcttttcctctgtacccatgggtattatttaaagaaacctatgaacttacttagcatggtttgtaatgaaaggcagttgtgtgtttttatgttattctggtttttttatgaagtgtaaagttgatttgaatttttctttcctctagtactgtaaaatcatgcctagatcttttggttaactggctgcacatataccttaataaccaggattcgggaacaaaggcattctgcratgttgctctccatggaccattttactcagcctgccaagctgtgttctacacctttgtttttagacacaagcagcttttgagcggaaacctgaaagaaggtcagtgttgtgggagtgctggactggattttccttgtgttcttgtcacccttcagaatggtgattcattacttttttgagatttttataaaaactggattcagaaaactgc

SEQ ID NO: 133681 - DNA, 481 bp, Homo sapiens
ggagaggctggcgttgctgccacccctcctgaaggcagacagtgggattcccgcctgggggcgacggcttcagctaaattcacctcctggcctgtgcggcaatggcaggcggtggctgagctgagctccgtcccacggcatcccaggctggtggccagcaggcatccacgcccaccccagcctgcacctgaatgcccgtcgctgggaccaagagcagccatggcccacccaacctgccttggctcacgtggtgcaaaatgaacaagggagtgtctgccgaggccacatgaacaagggagtgtctgccaaggccacagacagtgggggctgctccgggtgcagcattgcagaaaagccgctggttggcctagacacgtgggcacaggcagcctactcctttctctgttcacatytgctctctgaatcagtttttaaagtgaaaaaacatttcaaaagaaaattaggcaggaggttgcaaaaa

SEQ ID NO: 133682 - DNA, 408 bp, Homo sapiens
tttaactacaatgggaaatggaacagggtggaaggtatagggaagtgaagtgaatggactttgctgaggggatttttaagtrtagtcttgaaccagattaattctttacatacttaaaaataatattgcactttgggaggccaaggcgagcagatgacttgaggtcaggagttcgggaccagcctggccaacatggtgaaatcttgtctccactggaaatcttgtctctactaaaaatacaaaaattagtcaggcgtgatgctgcacacctgtaatcccagctactcaggaggctgaggcacgagaatcgcttaaacccgggaggcagaggttacagtgagctgacatcacgccattgcagtacagcctgggcaacagagagagactctgtctcaaaaaaaaaaaaaa

SEQ ID NO: 133683 - DNA, 419 bp, Homo sapiens
atggaacagggtggaaggtatagggaagtgaagtgaatggactttgctgaggggatttttaagtatagtcttgaaccagattaattctttacatacttaaaaataatattgcactttgggaggccaaggcgagcagatgacttgaggtcaggagttcgggaccagcctggccaacatggtgaaatcttgtctccaytggaaatcttgtctctactaaaaatacaaaaattagtcaggcgtgatgctgcacacctgtaatcccagctactcaggaggctgaggcacgagaatcgcttaaacccgggaggcagaggttacagtgagctgacatcacgccattgcagtacagcctgggcaacagagagagactctgtctcaaaaaaaaaaaaaaaaaacccaataataataatattgaattc

SEQ ID NO: 133684 - DNA, 408 bp, Homo sapiens
tttaactacaatgggaaatggaacagggtggaaggtatagggaagtgaagtgaatggactttgctgaggggatttttaagtatagtcttgaaccagattaattctttacatacttaaaaataatattgcactttgggaggccaaggcgagcagatgacttgaggtcaggagttcgggaccagcctggccaacatggtgaaatcttgtctccactggaaatcttgtctctactaaaaatacaaaaattagtcaggcgtgatgctgcacacctgtaatcccagctactcaggaggctgaggcacgagaatcgcttaaacccgggaggcagaggttacagtgagctgacatcacgccattgcagtacarcctgggcaacagagagagactctgtctcaaaaaaaaaaaaaa

SEQ ID NO: 133685 - DNA, 419 bp, Homo sapiens
atggaacagggtggaaggtatagggaagtgaagtgaatggactttgctgaggggatttttaagtatagtcttgaaccagattaattctttacatacttaaaaataatattgcactttgggaggccaaggcgagcagatgacttgaggtcaggagttcgggaccagcctggccaacatggtgaaatcttgtctccactggaaatcttgtctctactaaaaatacaaaaattagtcaggcgtgatgctgcacacctgtaatcccagctactcaggaggctgaggcacgagaatcgcttaaacccgggaggcagaggttacagtgagctgacatcacgccattgcagtacagcctgggcaacagagagagactctgtctcaaaaaaaaaamaaaaaaacccaataataataatattgaattc

SEQ ID NO: 133686 - DNA, 655 bp, Homo sapiens
  misc_feature (1)...(655): n = A,T,C or G
tatggtacagaatgacaaaaggttgcttggagtttaccaagatcagttgaaggtttaggcaagactgatgaaaaatcttaaaaatcaatgctgcttgcctcagtcatgttcagataaacataaggctacctataactagtaaatctcatgctntgtaacttcctcagggtgtattacgtgaatctatctttcctcagaagttatttgtggttaaaaaaaaaatccagaaaatccgggcaaacacaaacaggatttatgtgttgatcttaggacataaagaactagggaaaaattacgtttcagtaccccatttcttaagaagatggagccccagggaagaaagttttgtggtagaaaaagagaatatgtaggctaatcccagaatagttcagaaaaaaattacaagtgggaaytgaatttaaagaagtaataacaaaattgtgtgtcctggtctgagtctattggatttattttccatcttatttcttattcatttcccaagcctcattccctttgtgtagcttttccttgaagaacttttcttttgtgtgatgtgaataaaaaagtagtatgtaaggcactttcagggaaattcccactttgaaaggaaatctttcagagactgttaagataaatgactgcatccataataatg

SEQ ID NO: 133687 - DNA, 198 bp, Homo sapiens
gtcccccacagggtgcatgtggcccgggacggctttgaatgttgtccaacaataattcataaattttcttacaaccttatgagacktttttgggggatttttttttttagctcatcagctgtcattagtattaatgtattttatgtatgacctgagacacttcttcttccgccgtggctcagggaagccaaaagactg

SEQ ID NO: 133688 - DNA, 362 bp, Homo sapiens
cagcctggccaacatgatgaaaccctgtctctactaaaaatgcaaaagttactaagggatggtggtgcatgcctgtagtcccagctactcgagaggctgaggcaggagaatcgctggaacccgggaggcaaagtttgcagtgacttgagatggcaccactgcactccagcctgggcaacagagtgakactccatctcaagaaaaacaaaacaaataaaatgaaacacacatgaaacccagtggattccttagcacctaataagtatgggcccatacatatatcatcatcctcagcattactggaggttattaacagaaattggtgttaataaagtttaaataaacaggtggatttggaattc

SEQ ID NO: 133689 - DNA, 407 bp, Homo sapiens
tggatattcccgaaggagaatacagcttatgaaagtgcctgaagcaaaacagcatagctccttctaggaacagcaaatctgttcaatataaatagagtcctgttgaagttaaggggctggacartggtgaaagagccaagagagtagaagctggaactaaagatatgggctagggaaggcccaaggcaggctctgaaatgatttgtaaggcgtatttgctttaccacaggcagtggagagtgactggttagcttttcaagatgcaccattaccataatgatttccactgccagtgctctgggcttcactctgccttcactgatgtttcaatgaccattttctccattattatcttatatttgtttaataacttttccagaaggtcagtgtaaacatccagtgaattc

SEQ ID NO: 133690 - DNA, 561 bp, Homo sapiens
ttccagggatttgtagattactccagagtactctaggatttttaagagattatcagtgatatattaaacagaataggaaaaggatgaaaaaagcaagctaaaaaaatctaagatctaaaaatctaagaaggccagagggtggtggctcttgctcatacctgtaatcccatcagtctgggaggctgaagtgggcagactgcttgagcctaggagtttgagaccagcctgggaaacactgtgaaaccccatctctacaagaaatttaaaatattagccaggcrtagtggtgtgcacctgtagtctcagctacttgggaggctgaggtggggggattgcttaagcctgggagcttgaggctacagaaagctgcaaccacaccactgtactccagcctgggcaaaagagtgagacttggtctcagaaaaaaaaaaaaaaatcaagtagccaagcatccttttattcctcctcccaaggatacctttcaatagcagtcacagaagagttgatacaatactcaaatgtatccataaatgactctgggttcaataacatgatttgcac

SEQ ID NO: 133691 - DNA, 539 bp, Homo sapiens
  misc_feature (1)...(539): n = A,T,C or G
ggttgcagtcaagtggttggccagacccatagtcatctcaaagttacattgagagtaggtcttcttccaaacttcctcacattgacctgtccacagggaggcttcaggaaatggcaantggcttcctccacagtgaaccatccaaagggacagagagagcactcctggagagaacaagagaatgcccgagacagaagctgcagtctttttgtaacctaaccatggcaatttccaccaggtgtgctgtatttaattcattagtagctagccattcagtctggcccacactcaagggcataaaaagcaggaggtggaaatgattgtggagaggtcatctaagtggttacttgctcatctgtcattagcttacttctctccattgacagataatcactcaaactctctctcatacacacacaatgtgagatgcacataaagaactatctacagcccaaatgatttakgagatacttcataaatctcataaaacctgataaatgatttttacatgagttggcagttgcatgattagaccaaca

SEQ ID NO: 133692 - DNA, 487 bp, Homo sapiens
cggtccctccaggggagatttatatttaccaggtacctcagcatcttttagtctgggaataccccaagcctagctcatggcttgaagttctctggacagtttaagtgatgtggacctgggctgcaaatttgagtcagaatttacctcaactttttgggtatttttcctctttctttttattctctttttctgctcagcaccaggacaggttttatgacttgctagagatggtaatggagtggccagctttaattttgggtcccagtctaaggtagagaaggttcctcatacttcccatcttttgcaggctctgatcattgacttctatctctctgtgtgtgtgtgtaatatttcttatgtcatgttatrtgatttttattaaattgttttattttatatttatctcttttacagattataccttggtgctaactgacaacatattatttgctttatcatataatatacataaatttgtaaaaaatta

SEQ ID NO: 133693 - DNA, 528 bp, Homo sapiens
taccacgagaacagtatgggggaaaccgcccccatgattcagttatctcccaccagctccrtcccacaacaattgggaattatgggagctacaactcaagatgagatttggttggggacacagccaaaccatattacctggctaatttgtttgtatatttcgtagagacagggtctcactatgttgcccaggctgatctcaaacccctggactcaagtgatcctcccacctcagcttcccaaagtgctgagattataggcatgagccaccatgcctggctaccattctcattcatcattgaactcagactaggttccatggcctggcttagctcagggagtcaagatcatgaaaggatacatatgctgtgttaatggatttggagtttatgttgattttataaaatgggagccattgaaagactttaaggaggaaagaagtaataataattatattctggcaaaattacttcggtcactctgtgaaggatgacttagaatgggacaagacttgaagcagagagaccta

SEQ ID NO: 133694 - DNA, 320 bp, Homo sapiens
agatctatattttgtctcctgtttcctcattgactggatcaacaagatgtttctgctgagggcatgtggctctccagggtgtcatccctagagatccatatactttagtacccaagtaaatggcatccaagacaggaggaaaagtagtttttctggatcccttttttcagtaactgatttaaggaggtcaaatatgtattgcatcctttgacsattttatgcttttaccttttttctccccaaaatatttaatatcaaaccgaaagtacacagagtacagtcctggagaaaggaagagcatacttcaactagttagatta

SEQ ID NO: 133695 - DNA, 500 bp, Homo sapiens
gaattcaataaatcatctaatttaaatattaaataaattggttggcaattatgtggctcatatgaaaaaagatcaaaatgtattacttttaggccgggtgcggtggctcatgcctgtaatcccagcactttgggaggttgaggcaggtggatcacttgaggtcaggagttcaagaccagcctggccaacatggcaaaaccctgtccctacaaaaaatacaaaaattagctgtgtttggtggcacacacctatagtcccagctactctggtggctgaggcacaagaatcgcttgaaccagggaggcgsaggttgcagtgagccaagatcatgtcactacactccagcctgggaaacacagtgagactccatctaaaataataataatgatacttaataaataaataattacttttaagtgaaaacacattattgaaataaaatataaaggacagaggcagagggtagcagatggtataatagtgagaactcctgagtttaa

SEQ ID NO: 133696 - DNA, 606 bp, Homo sapiens
gacttccttaaaggacctgaatgtgcatgggccaggttttaaatgctaactctgcgatattcttcacktggaagtcatttatccttcatgagtctctgtctccctaatctgtaaactgggtgggtggggtggagcttctatacacagtagttgtgagtgtaaacagtcacttcattcattggataggtgcttattaattatcatctagatcccagagatctagcatttcacatagtactaggcatcaggcagacatgaaataaacggtgactatcatattatatttgatttgtcattcacaataataactagcattagggtgattaatggaaatttactccctgcaaattttatcctgtagcaagtttattgcttagggagttagaggaccagaagagaaatacgatactgggagaaggtagaaagttaccagcaggtagggaacccccaggagactggtattgctgttcagcaaaggggggaaaagaaacaaaggaagcttctctcttgcttcatacaaacagaattactaaggaggaagaattgacatgagctgagggtctctcccataccaggctgtttgctagagatgcacttaagccacat

SEQ ID NO: 133697 - DNA, 575 bp, Homo sapiens
tatactaaaaacaaaggctgagcccttcctaagtaccaggcacctgttacaaattttacaagcctcatctcatgatagctcccagaggaaggtgcaaccctgtggtctgcattctacagaggaggcacagagaggtgacctgggccagaacctgagcctctgggctctgcagactgtctcagaggtgctgcttcctgaagtcctctgacctgccgtccctcttcaaaatcaggataaacatcaccaatgattgcctatagggcttgggaaaactttctgggagatgtaattgttcttctctgtcttgttggggtttggttacatgaggatacattcgtcaaaaactgttgtattgtgtgatattgtacatgaattttaacctcaactaataataccttttttaaaaatgcaaggcagaaaagggtggagtagaaagggaggtagggtggtaggaaacaattggcagtggtgcagggtacgraggctggggccatgtgtggctgtggctcatgcagcactgcttgtggagagagccagagccagtgttctcagccatccgtccctcgtacttgtat

SEQ ID NO: 133698 - DNA, 521 bp, Homo sapiens
ctctgctgtgcagagaaagaaactgaggacccaagaatttaataaattcccctgtggtcatagctcccctatcatttgcaggttaaaagctttgctcatttgtgacatccacaggatgcratgatgtgacccctgcctatatgcataccccacacagctgggattaaacccaaggccacctcacaccaaatccatgttccagtgttttccaaataaacaagtgaatcaagatatttctaccacaccatgctaccttttaatgatgagataaacagggaggaaaaggccaggtatggtggctcacacctgtaatctcaggactttgggaggccaaggcagaaggacagcttgaggctaggagtttgagacgagcctgggcaacatagagaaatcctgtacctaccaaaaaaaaaaaatcttaaaaattgataggcacagagacatacaactgtagtcctaactactctggaggctgaggtgggaggatcactggagcccaggagttcaaggctttagtgagc

SEQ ID NO: 133699 - DNA, 491 bp, Homo sapiens
cacttcactttgttaactcccatggatacaggatgtatacatgttcctattaaacttctgtttggttttctcttgctaatatgtcttttggtacaaggagtcccagctgagaactcatgaagggcagagaagagaattatttttcctcccctacagcatgcattaactctcatctcaaaataactcagcagggcatggtttccttcttttatacagacgacgacattgtggttcagggcagttaggtcacttggccaaggtcattcagctaaaacttggcccaggtgggaccaacagatcaaaggaatgtgaccagccacagggaaggcagcttaattagcsaggtgtcctgcaggcagtaacaggagggttgaaaaggtgcctgcctctgtctcaccctgaagacaccttgtggattttcgctttcctaaggccacaagtcccaggtggctccctgctgtccccatttcccaattttgacaagctatttg

SEQ ID NO: 133700 - DNA, 473 bp, Homo sapiens
aaagagagagaaagagagaaagagagaaagagagggagggaggaaggaaggaaggaaggaaggaaggaaggcaggcaggcaggcaggcaggcaggcggaaggaaggaaggaaagaaaaagtaagcaagccaagagctctggaatctttgagaaaatgrgtccatcattattgcaggatctgtggttactcatccaggaattgctatctgggcagttttccagcgtccttgttggatgataatgttctttcccaaggctttatctatatagatcagcatctgtggggccatgatagaaggttagctatttttcttctaaggccttctgtttagaacctgactgtggcccccaaggaaggcaccctcacttttacctagggcagcagcattttaattctcagctaatgataccatcatgctggcatcttgtgggaattttttttttttttttttgcccctctacattgaagcctc

SEQ ID NO: 133701 - DNA, 524 bp, Homo sapiens
gaagaaggagaattgctggaaactgggaggtagaggttgcagtgagccaagatggagccactgcactccagcctgggcaacagagtgagactctgtctcaaaacaaaacaaaacaaaacaaacaaamaaaaaactaatgacagtggtggcactatttattcatgacttaccttgtgccaggccctctgctaagtgctttacatgcattaattcagggattagcaaatgaaggccactggctgtataaagtgttattggtacagccacacccattcatgtgtgtgttggctgtggctgctttagcactacaatggcagagttgaataattaaggctgagcacatacagcccacaaagcctaaaatatttcctctctatcctttttgagaaaatttttgccaagctatgaattaaaattatcttattcttacccaagcacagtgatctggggatcactgtgaccattttatataaaaataaactgggatttggaaagattaaatacttggcccaaggagacataat

SEQ ID NO: 133702 - DNA, 368 bp, Homo sapiens
ctctcttccccactccagagtgatgggagaacaaaatacttatgtaagttgcttggaacatggatggtcctcaataaccacttccttggaacaagattatttcttctgttgagaagtttgcagcctggtaggaaggaaaattcacacccagaaattatgatcaaagagggtaaaatagaagggtagataggagggtcaacagaaaaaaataggcaaaaaaggaagagctcaggaagaaggaagyatgcagtcttggtcttggagggtgaatatagtagaattgcaacatttaagagagtcaaggcaagcctagtagaagaatggcaaagttgcacagactggtcaactgtgcaagccctgacatttca

SEQ ID NO: 133703 - DNA, 575 bp, Homo sapiens
  misc_feature (1)...(575): n = A,T,C or G
agtgccaccaagcccagctaatttttgtatattaagtagagacggggttttccaccatgctggccaggctggtctcraattcctgagctcaagtgatctgcctgcttcggcctcccaaagtactgggattacaggtgtgatccaccgggcccagccttggtgattgcatattatgatttattaatattaacatagcacctttttcttaaggtgagggcctacagaacaaaggtcttgggcccacctcccttgtgcctctatgtggtttttcccattaaacattgggactttggtaggggggtgaggtaggggcaggatttagatgccaagaaaagactctgaccattagcaaaattaaatgatttgtttttaaaaaatgtcacatctaatccaagatcaatgtctgatcctccctatgtagcctgggagctaccatggaattcagtgtccanggaaataccctaaaatggtgctttagggatcccctaaggatattgttgtaccactagtaccgctggttctgattgagaagggctgtcagaggggagcattaagggagggtgtgctgctggtcc

SEQ ID NO: 133704 - DNA, 575 bp, Homo sapiens
  misc_feature (1)...(575): n = A,T,C or G
agtgccaccaagcccagctaatttttgtatattaagtagagacggggttttccaccatgctggccaggctggtctcaaattcctgagctcaagtgatctgcctgcttcggcctcccaaagtactgggattacaggtgtgatccaccgggcccagccttggtgattgcatattatgatttattaatattaacatagcacctttttcttaaggtgagggcctacagaacaaaggtcttgggcccacctcccttgtgcctctatgtggtttttcccattaaacattgggactttggtaggggggtgaggtaggggcaggatttagatgccaagaaaagactctgaccattagcaaaattaaatgatttgtttttaaaaaatgtcacatctaatccaagatcaaygtctgatcctccctatgtagcctgggagctaccatggaattcagtgtccanggaaataccctaaaatggtgctttagggatcccctaaggatattgttgtaccactagtaccgctggttctgattgagaagggctgtcagaggggagcattaagggagggtgtgctgctggtcc

SEQ ID NO: 133705 - DNA, 570 bp, Homo sapiens
atagcttcaggcacaacatcagaatttgatttcataagggacaacctgagtgtgaagaactcactatagtaatgtttcaaaagtgaaagtttggggaaatccaagccatcccactccgcttaactcccatttcccagagctcagtcccctgccatggaagggaggtctgcaaggcactggttggactcagttctactcttagccgagctagctcaggacccggtcgattgcagtttttgcaaagacaaacctgatggctatattgtaaccaatgtatctctttattctgtcttattcctgttggtactcatatttgcagccagggataaaggtccttaaatactttttgtagcatttcactgttttgcragatcagaataatagcatagagggctgtgagtgcagataacagaatatgactctgggtagcttaactgcaaaaggaagatatttcaagactactgggtagttcattagatcaaaggaagaactgaaaagtaattagggacagtatcaagggcccctccaagaatccagtagcaagagcaattggtccagtctcctttggac

SEQ ID NO: 133706 - DNA, 485 bp, Homo sapiens
gtttttcttcattgttctgctccattttcctttctcctggcttaattctctaacagattmtctctccttggtgggctctagaagcttcacttgttaccatggaaagtacagtacagcagctgctcatttctcccagttcccattagtaatcttccgaccaaaaatctttgattggccctttctgtatcacatgcccaccatgaactaatcactggagccaaggatataggttggttgctcagcctgggttacagcctgtggtcgctggggtgggggtcccttgaatgacagtctcaccaaaatcccaaaaggaaggaaggcaggacaggtaagagagtaagcaactttaccctacaaacatattgaggtctccctatcttgagccttcacatctttccccaatttctctcttccttttgcttctatttcttgatgtggaattctgagctggctattgtactgggattcagaaacacccatccagt

SEQ ID NO: 133707 - DNA, 467 bp, Homo sapiens
ttctcctggcttaattctctaacagattctctctccttggtgggctctagaagcttcacttgttaccatggaaagtacagtacagcagctgctcatttctcccagttcccattagtaatcttccgaccaaaaatctttgattggccctttctgtatcacatgcccaccatgaactaatcactggagccaaggatataggttggttgctcagcctgggttacagcctgtggtcgctggggtgggggtcccttgaatgacagtctcaccaaaatcccaaaaggaaggaaggcaggacaggtaagagagtaagcaactttaccctacaaacatattgaggtctccctatcttgagccttcacatctttccccaatttctctcttccttttgcttctatttcttgatgtggaattctgagctggctattgyactgggattcagaaacacccatccagttctgccatgtcca

SEQ ID NO: 133708 - DNA, 609 bp, Homo sapiens
cacttaaaatctgctaatctagcatgcagtatgatttagctatctttatttcagggcaccagaaaaatctgsaatgtctcttagaatgtcttcagaagctccttgtctgtgtccctgaagattccttttcttgcccctaccttcaaataaatataagtatgaagtgtcattctccaaacatgagttctcagccttctgctcttgggcttcttgccttcagagagctcatcaaatagctttaaactggggggcagcctgatataaaaggaagaacccaggcactgcatctcaggatctgatctcaaattttccaccatcacggtgtacgtgggataccagatccccacccaagggcatgttatccaccccaactcagcaccatcacctggagaataatgtcaatgaaacctgctcctcagagttgtggtgattggagtatacatagaaagggtagaggtataaattggagcaatattttagaaaacaggttggtatgattcagtaaagctgaagacaggaaaactctatgatctagtcattctttcagaggcatttgaacaagagtaactccatcttgaataggggctgggtaaaatgagaatgagacct

SEQ ID NO: 133709 - DNA, 609 bp, Homo sapiens
cacttaaaatctgctaatctagcatgcagtatgatttagctatctttatttcagggcaccagaaaaatctggaatgtctcttagaatgtcttcagaagctccttgtctgtgtccctgaagattccttttcttgcccctaccttcaaataaatataagtatgaagtgtcattctccaaacatgagttctcagccttctgctcttgggcttcttgccttcagagagctcatcaaatagctttaaactggggggcagcctgatataaaaggaagaacccaggcactgcatctcaggatctgatctcaaattttccaccatcacrgtgtacgtgggataccagatccccacccaagggcatgttatccaccccaactcagcaccatcacctggagaataatgtcaatgaaacctgctcctcagagttgtggtgattggagtatacatagaaagggtagaggtataaattggagcaatattttagaaaacaggttggtatgattcagtaaagctgaagacaggaaaactctatgatctagtcattctttcagaggcatttgaacaagagtaactccatcttgaataggggctgggtaaaatgagaatgagacct

SEQ ID NO: 133710 - DNA, 566 bp, Homo sapiens
tccaagtgatacccacatatgtcagtgttgagaagcaatggagtaagagacagccctaaattgccaacacttcctgattaccatttaaacagaccagagttagggtttttttttttatgcccctccttgtctgacatgttcttgcttaacagcctggaaaagtagaaagcacatagtacttggagtaaaacagatccyggttcatatcctgactttatcacttaccagttacacaaacttgggttacagagtgcttgatctagaaaattaattaatatctgcattctgtggatgttagaatgaattgactataggcatgtaaatctctcacacaacccagcatgaggaggttcactcagtcttgctctacccactttcccccttgtcccacaatctccctaaagagtgtcagggaagaaaatctcagcctaggcttcccatcttgccactgagcagctgagagactggctgaatgacttgccaaatgattcttttaaggcagctggctcagcaaggaaaagtccaggaatgatcccacagtctggactgagacagaactcaaggct

SEQ ID NO: 133711 - DNA, 597 bp, Homo sapiens
actcactgcttggggcagaagatataacattaacaaataacaaagagaaagtcatatatctccactcctgttgtatttccaccttctttatcagggataatgatctttaaacccaggagagttgaataaatgtagtttagaaggaactgaagtatgagataggtaaggtgatagcaggagaccatcttgttgttttaaatgagtttttgtctccaggcctaaacaaattacgtcctggagtatgaagagcctttgcagatgaaatctaagagtcactgtcagtaatctttacagggtcrtagagagttgaaaaggtgctggggcaaggtattagagacatgtactagagacgtgtagagctaggaaattagtattctaatttttcaaaatgaggtggaggaaagtgtattctgtgacctacagatctgcacgcttgattttgaaacagggtatgactagatggtgtgtcagcccttaaaaaggaagtggtgatcacgaggaaccaggatgtattcactaaagaaaagtaacagattctacatgccttcctgtgtgtgtagctttaaggactggtgacagtgaggatgtcatgtgtac

SEQ ID NO: 133712 - DNA, 560 bp, Homo sapiens
aagcttactaataattagatgccttccccggtataagtgagtttccaatctattaggggagatattcaagcagaggctgtgtcacaatctggcctggaaactctagtatctacccaaaggggtagaagattaggttgattttaggggtttgttttttcagttctatctcctacatgtggtgaccttagtttctgaaccccaaaccaagacctatgatcctataaaagactttttgtgttgcttccagatttgaaagacagtctagcaggtacaaccaccaaaatatcgtcgtttctaggagttatcagtgatgaaataatggggaaaatatatgaaattggaactttccwggaaagaggaagaagtgaaatcacactacagcaggcatttacttctctttgaatactcatgtttcaaccaagaaggcagaaactctgggtaaaatttcctttttttttttttcttgcacagcaagttttctggaactaagacttcttcctccaaaggctgagtgccaaaatataattacaaatataattataatctagctcattcacatt

SEQ ID NO: 133713 - DNA, 482 bp, Homo sapiens
ctggtgagtatgcaaggtttaatgcacctgcctttgatttctcaggcatattctcagcatacaagtcgtaatccaggagaacagttttttgtttctattttaaagttgtaacaggaaaaaaattctccgaaagacaaaatgcatttttaagtctgcaaaacttactacaggctttcatggctagaaatcctagaaccaagattcaaattcaagtctttctatttctraagattatgttctttccactccaccgtacaacttcccctagagatcattttcataaatttagttttctttaaaacagtaaattggatttgcagagtttttttcagcccctgctgctgtgtgaaacagagaaaatgtctcattgttagggtcagcagtgcctgggtaccaccggaatgtgccgggatgatttgtgtccaggtatatgtgatggtatccttctccaaaagctgtgagcacctgcatggcttgaattc

SEQ ID NO: 133714 - DNA, 365 bp, Homo sapiens
gaattccactcctttgggagtattggcatatgttaaaatacaaatatatctgtatttttctcacttttattagaagagtgcaagtttgttcaaaacaactgctggattatctagtccctgaacagccatttatatttttgttacgcttgtggtttttaaatcatcctcatttccttgatcgcatttgcttctcctggctrgaatgtgtaggagacgggtcggggagactgtgcccatttgacaggtgtgaatgcgaacagaggctgcagctggttagaccagggctgtgcaaccctagagccattgccttgaccacaaagccacagtctcctagtcctaatattaagaggtaggaggtagataga

SEQ ID NO: 133715 - DNA, 365 bp, Homo sapiens
gaattccactcctttgggagtattggcatatgttaaaatacaaatatatctgtatttttctcacttttattagaagagtgcaagtttgttcaaaacaactgctggattatctagtccctgaacagccatttatatttttgttacgcttgtggtttttaaatcatcctcatttccttgatcgcatttgcttctcctggctagaatgtgtaggagacgggtcggggagactgtgcccatttgacagrtgtgaatgcgaacagaggctgcagctggttagaccagggctgtgcaaccctagagccattgccttgaccacaaagccacagtctcctagtcctaatattaagaggtaggaggtagataga

SEQ ID NO: 133716 - DNA, 365 bp, Homo sapiens
gaattccactcctttgggagtattggcatatgttaaaatacaaatatatctgtatttttctcacttttattagaagagtgcaagtttgttcaaaacaactgctggattatctagtccctgaacagccatttatatttttgttacgcttgtggtttttaaatcatcctcatttccttgatcgcatttgcttctcctggctagaatgtgtaggagacgggtcggggagactgtgcccatttgacaggtgtgaatgcgracagaggctgcagctggttagaccagggctgtgcaaccctagagccattgccttgaccacaaagccacagtctcctagtcctaatattaagaggtaggaggtagataga

SEQ ID NO: 133717 - DNA, 365 bp, Homo sapiens
gaattccactcctttgggagtattggcatatgttaaaatacaaatatatctgtatttttctcacttttattagaagagtgcaagtttgttcaaaacaactgctggattatctagtccctgaacagccatttatatttttgttacgcttgtggtttttaaatcatcctcatttccttgatcgcatttgcttctcctggctagaatgtgtaggagacgggtcggggagactgtgcccatttgacaggtgtgaatgcgaacagaggctgcagctggttagaccagggctgtgcaaccctagagccattgcctygaccacaaagccacagtctcctagtcctaatattaagaggtaggaggtagataga

SEQ ID NO: 133718 - DNA, 401 bp, Homo sapiens
agcgttctacgaaggcttcctaaggaggctccatactaaattcagacataagtcagaaggcagcttctcccaagacactgttgatgtccagggggtgacagttccatcacaaaagggggttaaaagggtttaggggaagtttagttgtcttccttttatctctaactctaaaacccaactgctggctgaattaaaagtctcttacataatgrtcagaggagttttgagtatcggatctttgtgtacttgctttttaaattcagtcacgtcttaaatagtacttttcactctcctcctctccacaccactttatgtgtttgctagtagcttccatgaaactctatgggtgaacatgtctgcaactctttggcatttaaattttaggtttctgcccctcgtag

SEQ ID NO: 133719 - DNA, 419 bp, Homo sapiens
aagtttacatttaattttcatgccatgcagcgttctacgaaggcttcctaaggaggctccatactaaattcagacataagtcagaaggcagcttctcccaagacactgttgatgtccagggggtgacagttccatcacaaaagggggttaaaagggtttaggggaagtttagttgtcttccttttatctctaactctaaaacccaactgctggctgaattaaaagtctcttacataatggtcagaggagttttgagtatcggatctttgtgtacttgytttttaaattcagtcacgtcttaaatagtacttttcactctcctcctctccacaccactttatgtgtttgctagtagcttccatgaaactctatgggtgaacatgtctgcaactctttggcatttaaattttaggtttctg

SEQ ID NO: 133720 - DNA, 516 bp, Homo sapiens
cctctgccccgtcacatcacaytctgtgctgctctcagccaaagctcttcttaaatacactagccatcaaaaccatacaacttggctgggtgcggtggctcacacctgtaatcttagcattttgagaggccgaggcgggtggatcacttgaggtcaggaattcaagaccagcctggccaccatggtgaagccccgtctctactaaaaatacaaaaaattagccagctgtggtggcacatgcctgtaatcccagctactcgggaggctgggacagaagaaccactggaacctgggaagcggaggttgcagtcagccgagatctatgccattgcactccagcctgtgtgacagagcaagactttgtctcaaacaaacaaacaaaaaacatacaacttaactctcatacccccacgcctgtcttttctcctgttcgacttgactcctcttgggaattccgtaagtactttgagggcaaggaccacaagataaatgtcgtaaggtaaccaggaatgacat

SEQ ID NO: 133721 - DNA, 516 bp, Homo sapiens
cctctgccccgtcacatcacactctgtgctgctctcagccaaagctcttcttaaatacactagccatcaaaaccatacaacttggctgggtgcggtggctcacacctgtaatcttagcattttgagaggccgaggcgggtggatcacttgaggtcaggaattcaagaccagcctggccaccatggtgaagccccgtctctactaaaaatacaaaaaattagccagctgtggtggcacatgcctgtaatcccagctactcgggaggctgggacagragaaccactggaacctgggaagcggaggttgcagtcagccgagatctatgccattgcactccagcctgtgtgacagagcaagactttgtctcaaacaaacaaacaaaaaacatacaacttaactctcatacccccacgcctgtcttttctcctgttcgacttgactcctcttgggaattccgtaagtactttgagggcaaggaccacaagataaatgtcgtaaggtaaccaggaatgacat

SEQ ID NO: 133722 - DNA, 491 bp, Homo sapiens
tatttcctcaccatcctcccttacctcttgaccccttagaggttttaaacagccttattaagatataattcacacaccacayaattcacccattgaaagtgtacaattcattggtttttagtatattcccagtcatgcaaccatcatcacaggtttatttcttcttcttctttttttttttttttgaggtggagtctcactctgttacccaagccggagtgcaatggcacaatcttgggtcactgcaacctccacctcccaggttcaagtagttccttgcctcagcctcctgagtatctgcgatgacaggcacctgccaccatgcccaactaatttttgtgttttcaatagagacagggtttcaccatcatggtcaggctggtcttgaactcctgacctcgtgatgcacccgcctcggccttgcaaagtgctgggattacaggcatgagccactgctcccggcctctgcagtcagttttagaacattgtct

SEQ ID NO: 133723 - DNA, 491 bp, Homo sapiens
tatttcctcaccatcctcccttacctcttgaccccttagaggttttaaacagccttattaagatataattcacacaccacacaattcacccattgaaagtgtacarttcattggtttttagtatattcccagtcatgcaaccatcatcacaggtttatttcttcttcttctttttttttttttttgaggtggagtctcactctgttacccaagccggagtgcaatggcacaatcttgggtcactgcaacctccacctcccaggttcaagtagttccttgcctcagcctcctgagtatctgcgatgacaggcacctgccaccatgcccaactaatttttgtgttttcaatagagacagggtttcaccatcatggtcaggctggtcttgaactcctgacctcgtgatgcacccgcctcggccttgcaaagtgctgggattacaggcatgagccactgctcccggcctctgcagtcagttttagaacattgtct

SEQ ID NO: 133724 - DNA, 491 bp, Homo sapiens
tatttcctcaccatcctcccttacctcttgaccccttagaggttttaaacagccttattaagatataattcacacaccacacaattcacccattgaaagtgtacaattcattggtttttagtatattmccagtcatgcaaccatcatcacaggtttatttcttcttcttctttttttttttttttgaggtggagtctcactctgttacccaagccggagtgcaatggcacaatcttgggtcactgcaacctccacctcccaggttcaagtagttccttgcctcagcctcctgagtatctgcgatgacaggcacctgccaccatgcccaactaatttttgtgttttcaatagagacagggtttcaccatcatggtcaggctggtcttgaactcctgacctcgtgatgcacccgcctcggccttgcaaagtgctgggattacaggcatgagccactgctcccggcctctgcagtcagttttagaacattgtct

SEQ ID NO: 133725 - DNA, 491 bp, Homo sapiens
tatttcctcaccatcctcccttacctcttgaccccttagaggttttaaacagccttattaagatataattcacacaccacacaattcacccattgaaagtgtacaattcattggtttttagtatattcccagtcatgcaaccatcatcacaggtttatttcttcttcttctttttttttttttttgaggtggagtctcactctgttacccaagccggagtgcaatggcacaatcttgggtcactgcaacctccacctcccaggttcaagtagttccttgcctcagcctcctgagtatctgcgatgacaggcacctgccaccatgcccaactaatttttgtgttttcaatagagacagggtttcaccatcatggtcaggctggtcttgaactcctgacctcgtgatgcacccgcctcggccttgcaaagtgctgggattacaggcatgagccactgctccyggcctctgcagtcagttttagaacattgtct

SEQ ID NO: 133726 - DNA, 549 bp, Homo sapiens
actaaatgcttgtggttgaatttcagaaatctgcattcttgcagttttcagatgaatcccatgcaaattaaagggtttcttgttttgttttgttttgtttttgagacagagtccggctctgttgcccaggctggagtgcagtggcacagtctcagctcactgcaacctctgcttgctaggttcaagtgattctcccacctcagcctcctgagtagctgtgactgtaggcacgtgccaccacacatggctaatttttgtattttttttttttttttagtagagatggggtttcgccatgttggcsaggctggtctcgaactcctgacctcaggtgatgtggccacctcgatctcccaaagtgccgggattacaggcgtcaaattaaaggtttttgattgtgatgaaaaacacacataaaatcgatcagcttcatcattttaagtgtatatttcagtagtgttaaattttttcatgctattgtgaaacacatctccggaaccttttcatcttactcatctgaaactctatagctaccctttgccccctttc

SEQ ID NO: 133727 - DNA, 588 bp, Homo sapiens
ggggataaatgaaggtggaggaatgttacaaagggcttaaaatgtcttttccctgggaactctctaggagttggtccgtaatgacatttaacttgaataagtgaaataaaactaagaaaaatagcttgaaatgcaagttgttggcgtcagagagaaacctggattacggtaatagaaaagcaatttcaaaggaataatggctgacaaataggaattgaatctagtatactgcatccacatttgcaggtttctacataaagatctactgggaatgactgatttccttacggagcgggggtggtcctatggggatgattkgcacctctctcagattgcccagcctccccctgctcttctgggagactgtcagggtgctgctctttggactacctttgaaatcttgacctgtgacgaggctgtggctggtagtgatgttgccaggaagatggcattccaaggtcaccatactcccgctaaggtctaacaaagctttgtttagtatttctacttgctgggaatttctgtgtacacatgctcatttatctttttatttatttaacaataaaaccgagagtggtattctaaaca

SEQ ID NO: 133728 - DNA, 588 bp, Homo sapiens
ggggataaatgaaggtggaggaatgttacaaagggcttaaaatgtcttttccctgggaactctctaggagttggtccgtaatgacatttaacttgaataagtgaaataaaactaagaaaaatagcttgaaatgcaagttgttggcgtcagagagaaacctggattacggtaatagaaaagcaatttcaaaggaataatggctgacaaataggaattgaatctagtatactgcatccacatttgcaggtttctacataaagatctactgggaatgactgatttccttacggagcgggggtggtcctatggggatgattggcacctctctcagattgcccagcctccccctgctcttctgggagactgtcagggtgctgctctttggactacctttgaaatcttgacctgtgacraggctgtggctggtagtgatgttgccaggaagatggcattccaaggtcaccatactcccgctaaggtctaacaaagctttgtttagtatttctacttgctgggaatttctgtgtacacatgctcatttatctttttatttatttaacaataaaaccgagagtggtattctaaaca

SEQ ID NO: 133729 - DNA, 523 bp, Homo sapiens
agatctcctttgtgtgcagatattacgaggctctgttcacttcattttttcttattacatgcattattttatctgcaccagaaatcaagtatgtatgtctgtgtgtgaatttgctggtaaaaggatgaagtaatgttaaagaaaaaaattwaaaaattatctacccacacatacctggtttcattttgctcactgccttcaaattctatccatatttgtaggtcatgtatgatgatgctcatgttattttgtgtatttttactcaatattctaagtagatcaataaagtttaaaaattattgtattgtaatatgttgttacacaaacattccttcaactagttcccttccactggatgttcaggcagatgccagtgtaattttattttgagaaataacaatgcagtgaatagttccaaatatgtagtgcaaacttatataggatcaggagtggtataaaaacggaacaaaagtatgagtctttcgtggtttctgttgaattttgccatgcttttgaaaaggat

SEQ ID NO: 133730 - DNA, 507 bp, Homo sapiens
tacaggtgtgagtcactgcacctggcccttgaggtgcattattaaagcagctcccagagtgggtaactgcagctttatcctttttggggagctcaaggaaatgacattaaacacatacgttagagttatctcagctaaggggcaggtagctagaatatctactcccccaagtctgataatgagacataggttcaaagctgtccccaaggatggggggctttaatttccaggcacttgccgccagctgtgygcaagggaaacctgggatccatcagctccaatatcctgtcctcttgaggcctcggccttccaacaacatcaggagctggctgtaggttgtgttcgctctcctggcttttagccaccccaaatggcagccagggcagctgggagaatggcagccccccaccctggacgggtggggcagctttgagaaagataggtggtgagaggtcacagaaggaaagaattagctcccaaactgcatgactgacaaagatgaatgtg

SEQ ID NO: 133731 - DNA, 507 bp, Homo sapiens
tacaggtgtgagtcactgcacctggcccttgaggtgcattattaaagcagctcccagagtgggtaactgcagctttatcctttttggggagctcaaggaaatgacattaaacacatacgttagagttatctcagctaaggggcaggtagctagaatatctactcccccaagtctgataatgagacataggttcaaagctgtccccaaggatggggggctttaatttccaggcacttgccgccagctgtgcgcaagggaaacctgggatccatcagctccaatatcctgtcytcttgaggcctcggccttccaacaacatcaggagctggctgtaggttgtgttcgctctcctggcttttagccaccccaaatggcagccagggcagctgggagaatggcagccccccaccctggacgggtggggcagctttgagaaagataggtggtgagaggtcacagaaggaaagaattagctcccaaactgcatgactgacaaagatgaatgtg

SEQ ID NO: 133732 - DNA, 486 bp, Homo sapiens
aggcatcactgaaatggtcaattggttaaataagagaaggaatcaaagtgaaactggcttctttactggcagaattttgagagacttcaagatgtgaataggcatgtcagtttccaagatgatgtcacaccagagaatctgttatgagcaggatgttccgtcagcctggcacatgggaggtggcagatcctttggaacggcagctctcagatcctgagctgctaggtatcatgggatgctgagtgggcgtgctcctcctccatagaggagttattaaagccacagagttaaagtaaaatggcccgagagcaagacaatgaatatcagagagggtcacaggayatcaagtggacttgtgaccttgggagtgtaagcacctacagtggacagaggggagtttgtgagcaattttgggataggagccatgacattaatacttcttgaatctcattccctccacactcacccctccaatttagctagctt

SEQ ID NO: 133733 - DNA, 526 bp, Homo sapiens
cccaaagactgtttatcagggtcattcgaaatgtatgtggggcaactctatgtagtcaggagctccatgcatcgcggggtgtctaacacctaattgtcacctcccactaaatgccagtaacacccccgattattgtgacactcaaaaatcgccccctcgcacttcgaaagcacacccctatacacactgatcttctgttaaccctgccttgaatgacttcggtagcctgaattcccatcctggccccactgcctcatagcttcgtggccctgggcaagcccacaacccccaaacctcagtttcctcatctgtgatatgggtgcatggaggaggttaaataacagctccaatcttaaagcctccttagcgccgtgcctcacgagctgtaagtactaaatgaatgcyggctattatatataacttatattgtatattatttatgattgttcctaaaattatcactaataagtgcttcacagcaatgagctaagattctgagtgctatttcatggattttagagaaata

SEQ ID NO: 133734 - DNA, 424 bp, Homo sapiens
aatggttacatctgttttcttaatcgttcccttataatgcctgtcttatagtactgccaagaattagaagggaaggagcatgctgaggcctagataattctgatgggtttttttttttcttttttggaaaggatttaacagatattagagaaaacttagagggagtcttgggactccttgatggccacraaagggatgacttttaaagaaatcgatccagaaatgtctatgtggctgccctttctcttctcgttgtaaattttctcacagtgaacacaggtgttagagatcaagtgtttggctttctggtgctctgatgcaggaagtttgttttctcaggcaggcttctcagctcttgcacagtagcctatgggttgggacggctaccggatggcccaactccaggatggggtcatagtgcgga

SEQ ID NO: 133735 - DNA, 423 bp, Homo sapiens
gcctaatggttacatctgttttcttaatcgttcccttataatgcctgtcttatagtactgccaagaattagaagggaaggagcatgctgaggcctagataattctgatgggtttttttttttcttttttggaaaggatttaacagatattagagaaaacttagagggagtcttgggactccttgatggccacgaaagggrtgacttttaaagaaatcgatccagaaatgtctatgtggctgccctttctcttctcgttgtaaattttctcacagtgaacacaggtgttagagatcaagtgtttggctttctggtgctctgatgcaggaagtttgttttctcaggcaggcttctcagctcttgcacagtagcctatgggttgggacggctaccggatggcccaactccaggatggggtcatagt

SEQ ID NO: 133736 - DNA, 597 bp, Homo sapiens
cactttgtcaagggtgcgtgaggagagaggggaaagccctttctaaacacagattatacaccaaaggcaattaataattgtttaatccttctggagagccatttgttgtggtgatattcacatgactgtctttaacaccatgacaccaggagggtcttacttcgccagccaccaagctggggrcatcatgctgggtaattgtctgcaggtgcatttaactgaaacctttctctaagattctggagttcacagcacacaaagaaaataggcatagcatcattccagtctgtctactttctgtgactgaggtgatttttttctggagctaaatctgtcttttccacttgttctactctcattcactcactggctaattcaacagatacctacttggctcttactacctatcaatcactattcaaggcactcagtaacagcagtgaaccagagtttccaccctcagggaacttacagcagaagagcaggcaggtgatgagaaatgcccctgagtaaagttaaacaggaccaggaggatggggaatttgtggggggcaggggagctggaggaggtgcatgatattgtagtctatacatgat

SEQ ID NO: 133737 - DNA, 423 bp, Homo sapiens
gcctaatggttacatctgttttcttaatcgttcccttataatgcctgtcttatagtactgccaagaattagaagggaaggagcatgctgaggcctagataattctgatgggtttttttttttcttttttggaaaggatttaacagatattagagaaaacttagagggagtcttgggactccttgatggccacgaaagggatgacttttaaagaaatcgatccagaaatgtctrtgtggctgccctttctcttctcgttgtaaattttctcacagtgaacacaggtgttagagatcaagtgtttggctttctggtgctctgatgcaggaagtttgttttctcaggcaggcttctcagctcttgcacagtagcctatgggttgggacggctaccggatggcccaactccaggatggggtcatagt

SEQ ID NO: 133738 - DNA, 597 bp, Homo sapiens
cactttgtcaagggtgcgtgaggagagaggggaaagccctttctaaacacagattatacaccaaaggcaattaataattgtttaatccttctggagagccatttgttgtggtgatattcacatgactgtctttaacaccatgacaccaggagggtcttacttcgccagccaccaagctgggggcatcatgctgggtaattgtctgcaggtgcatttaactgaaacctttctctaagattctggagttcacagcacacaaagaaaataggcatagcatcattccagtctgtctactttctgtgactgaggtgatttttttctggagctaaayctgtcttttccacttgttctactctcattcactcactggctaattcaacagatacctacttggctcttactacctatcaatcactattcaaggcactcagtaacagcagtgaaccagagtttccaccctcagggaacttacagcagaagagcaggcaggtgatgagaaatgcccctgagtaaagttaaacaggaccaggaggatggggaatttgtggggggcaggggagctggaggaggtgcatgatattgtagtctatacatgat

SEQ ID NO: 133739 - DNA, 609 bp, Homo sapiens
cggcacatgttaagtactgtttagctatcagccataattttaaaaatagtgtttttaaaatcagtaatattattgacaaccttttctgaatattgtccaagtgctttacagggattatttcacttatcatgggaatgatcctatgagatagccactgttattattcctactttacagatgaggaaaagagaggttaattagcccaaggacacacagtttccccaagatcaaagagtcagtggtggggccataatttaaaccagggcagtctgacttcagatccacacttttgacctgggcttccctgctcaattacaaataccaaattgactccttatcttctccccagaacagcctccctttccggttttctcccctttccccaagattaccattacagcccctttctttttcacctgtgaattagcaaatgctgcacccagaatctttcctccacctctaccccattctcttcttgctgccctgactagttgaactrtcctctttatcttaacctgtcgtgacaccacctccctggtcaccgtgctcttgccttcttgccttcttgcctttccaatttatcctgctcactgacacctcagttgccat

SEQ ID NO: 133740 - DNA, 460 bp, Homo sapiens
aaaggctgagaattcagtccttgaaactaattgtgccaagtatgggcacattataacttctccagcatggactatgtggccatgatggtaggcttggcaattaaaaagacaagtggagagatgccccaaactgccgggcctcctgctccatcctccaggtttgaactacggctggttgcaaggagtgtatttgtgcttgcattagaaaattaggaacgcctgcagaaaatggctttcccacagataaaagactattaagtctcttaaatgctggaaaatgtcttcatgagcatattcagtgatttggcacttactccacatgagaacgtccctaccatgatgtccastaaagaatgggctacgtgtcccgcagacttgattacctccctgctccagcttggctctttctacaagggctgtgctggcccaaacatcaatgtctcatttaacttttgaaaat

SEQ ID NO: 133741 - DNA, 486 bp, Homo sapiens
gaattcagtccttgaaactaattgtgccaagtatgggcacattataacttctccagcatggactatgtggccatgatggtaggcttggcaattaaaaagacaagtggagagatgccccaaactgccgggcctcctgctccatcctccaggtttgaactacggctggttgcaaggagtgtatttgtgcttgcattagaaaattaggaacgcctgcagaaaatggctttcccacagataaaagactattaagtctcttaaatgctggaaaatgtcttcatgagcatattcagtgatttggcacttactccacatgagaacgtccctaccatgatgtccagtaaagaatgggctacgtgtcccgcaracttgattacctccctgctccagcttggctctttctacaagggctgtgctggcccaaacatcaatgtctcatttaacttttgaaaatcgtcctcttggcatctagacctgttgttttcctgg

SEQ ID NO: 133742 - DNA, 540 bp, Homo sapiens
ggcctcaatcccagccacttaagttggcttcaccattttcctgcccatgtgtactacaggttgayggctagagacactgtgaacatcccactacttgccactgaggctgaattttttaaaaaaaataatgatagcagaaacacctcagacagtctttcatgcagagactcaatttaacacttcagaaaatttttgttcttatgtcaagatcctaaagttcctagatagattccaagatagaagtacccaacctattgtggctctacatccaatttccattttttattagcatgtgattttcttaacatactgccattatcataagttggacaccccattttcaaggcaactgaagtgaatcagagttatagatagcagacatagggtataaattgctgctgcccaaccctgaatacattttttttcatccagtatgatgctctcctgataaataccacctgttcaatgggaatttaagacaggttgtcattttagcagtcaaactttctgttggatcacactgagtttatggtcagcttg

SEQ ID NO: 133743 - DNA, 540 bp, Homo sapiens
ggcctcaatcccagccacttaagttggcttcaccattttcctgcccatgtgtactacaggttgacggctagagacactgtgaacatcccactacttgccactgaggctgaattttwtaaaaaaaataatgatagcagaaacacctcagacagtctttcatgcagagactcaatttaacacttcagaaaatttttgttcttatgtcaagatcctaaagttcctagatagattccaagatagaagtacccaacctattgtggctctacatccaatttccattttttattagcatgtgattttcttaacatactgccattatcataagttggacaccccattttcaaggcaactgaagtgaatcagagttatagatagcagacatagggtataaattgctgctgcccaaccctgaatacattttttttcatccagtatgatgctctcctgataaataccacctgttcaatgggaatttaagacaggttgtcattttagcagtcaaactttctgttggatcacactgagtttatggtcagcttg

SEQ ID NO: 133744 - DNA, 540 bp, Homo sapiens
ggcctcaatcccagccacttaagttggcttcaccattttcctgcccatgtgtactacaggttgacggctagagacactgtgaacatcccactacttgccactgaggctgaatttttwaaaaaaaataatgatagcagaaacacctcagacagtctttcatgcagagactcaatttaacacttcagaaaatttttgttcttatgtcaagatcctaaagttcctagatagattccaagatagaagtacccaacctattgtggctctacatccaatttccattttttattagcatgtgattttcttaacatactgccattatcataagttggacaccccattttcaaggcaactgaagtgaatcagagttatagatagcagacatagggtataaattgctgctgcccaaccctgaatacattttttttcatccagtatgatgctctcctgataaataccacctgttcaatgggaatttaagacaggttgtcattttagcagtcaaactttctgttggatcacactgagtttatggtcagcttg

SEQ ID NO: 133745 - DNA, 540 bp, Homo sapiens
ggcctcaatcccagccacttaagttggcttcaccattttcctgcccatgtgtactacaggttgacggctagagacactgtgaacatcccactacttgccactgaggctgaattttttaaaaaaaawaatgatagcagaaacacctcagacagtctttcatgcagagactcaatttaacacttcagaaaatttttgttcttatgtcaagatcctaaagttcctagatagattccaagatagaagtacccaacctattgtggctctacatccaatttccattttttattagcatgtgattttcttaacatactgccattatcataagttggacaccccattttcaaggcaactgaagtgaatcagagttatagatagcagacatagggtataaattgctgctgcccaaccctgaatacattttttttcatccagtatgatgctctcctgataaataccacctgttcaatgggaatttaagacaggttgtcattttagcagtcaaactttctgttggatcacactgagtttatggtcagcttg

SEQ ID NO: 133746 - DNA, 466 bp, Homo sapiens
cttttaaggttctttttgattgaagaaatatatgtaattaatatcaaatcatatctatggcttgcagcttacccctctgcctacccctaatttctaattcctagagacaacacccctctaaactcctttggctggttttttttttctggcatttgtgtatgcatttctcaatacataattatactatcatcatactattataattttcacttataaacatttatttctcctattaaaactaaagatatggctgtcaaactrtgcacacatttattatccctttatattctaggtttatgttattgtggctataagaatctgctgtaaataattatatgaaatacgactctgatagaattttctttgtcacctatcattttgtttttccaggtgttaataattatttcttcatttgtttagtgttctatgtattttttattaaatcctatgccaaacattccaacag

SEQ ID NO: 133747 - DNA, 439 bp, Homo sapiens
ggttctcaaacacctggtggcagggggggtgtttattaaatatgcacattcttgggccccacgccagatctactactaagaacctccatgggtgtgaactataatttgtaagcaaaatgtataagcaagctcccaggrtgaattttgatttggataagagtttggggacttccttcttagcacacaaaatccagtctttattccatttaggtgtgttcaaatggtgtcatctcagtgagccctcctctgcccctcttatttaaaattccatacttccagccctgtctgacccggcactccctatagacacatgctttatttttatccagagaacttgtctgtcacttcccactattatacatgagggcagggatcgttggtcactcctactatattcccatttcctagaacagtgcctggtacacattagacatccaat

SEQ ID NO: 133748 - DNA, 439 bp, Homo sapiens
ggttctcaaacacctggtggcagggggggtgtttattaaatatgcacattcttgggccccacgccagatctactactaagaacctccatgggtgtgaactataatttgtaagcaaaatgtataagcaagctcccaggatgaattttgatttggataagagtttggggacttccttcttagcacacaaaatccagtctttattccatttaggtgtgttcaaatggtgtcatctcagtgagccctcctctgyccctcttatttaaaattccatacttccagccctgtctgacccggcactccctatagacacatgctttatttttatccagagaacttgtctgtcacttcccactattatacatgagggcagggatcgttggtcactcctactatattcccatttcctagaacagtgcctggtacacattagacatccaat

SEQ ID NO: 133749 - DNA, 420 bp, Homo sapiens
tcaaaggttgatttcagaccaccacaatcaaaggaatatcacaatgaagtgagtcacatgatttttttttttgcttttccagtacatatagaagctccrtttatactatactgcaatgtagtaagtatgcaatagtttcatgtctgaaaaatgtacataccttaattaaaaatacgttataactaagaaagtgctaacaaacatctgaatctttttgctggtaaagagtcttgccgcaatgttgatggctgcagattgatcagggtggtggttgctgaaggatagtatgcagggtactgcagcagttttttaaaataagacaacaatgaagtttgtaacatcaaacaaggatttcttttccaaaatctttctctgtagcatgtgatgctatttgatagcattttacctactgcagaactt

SEQ ID NO: 133750 - DNA, 525 bp, Homo sapiens
gcagattgatcagggtggtggttgctgaaggatagtatgcagggtactgcagcagttttttaaaataagacaacaatgaagtttgtaacatcaaacaaggatttcttttccaaaatctttctctgtagcatgtgatgctatttgatagcattttacctactgcagaacttgttccaaaattggagtcagtcttctcaaaccctgctgctgctttgtcgactaaatttctgtaatattctaaactcttttttgtcatttcaactatgttcatagtakctttaccaggagtaggttccatcttgagaaatgtctttctttgcttatccataagagcaattcttcatccattcatgttttatgatgagatggcaggaattcattcacatcttcaagccacacttctaattctagctctcgtactgtttccatcacatctgcagttccttcttccactgaagtcttgagcccctcaaagtcatccatgagggttggaatcaacttcttccaaacccctgttaatgttga

SEQ ID NO: 133751 - DNA, 525 bp, Homo sapiens
gcagattgatcagggtggtggttgctgaaggatagtatgcagggtactgcagcagttttttaaaataagacaacaatgaagtttgtaacatcaaacaaggatttcttttccaaaatctttctctgtagcatgtgatgctatttgatagcattttacctactgcagaacttgttccaaaattggagtcagtcttctcaaaccctgctgctgctttgtcgactaaatttctgtaatattctaaactcttttttgtcatttcaactatgttcatagtagctttaccaggagtagrttccatcttgagaaatgtctttctttgcttatccataagagcaattcttcatccattcatgttttatgatgagatggcaggaattcattcacatcttcaagccacacttctaattctagctctcgtactgtttccatcacatctgcagttccttcttccactgaagtcttgagcccctcaaagtcatccatgagggttggaatcaacttcttccaaacccctgttaatgttga

SEQ ID NO: 133752 - DNA, 509 bp, Homo sapiens
aatacaaaatactatagtataatacaatataatgtgtatgtttctttttaaaaccttttcagtatacgttgaaggaaacaaagacccaagtttaatagggaaatgatttttgtaataaagtgaacaaactggataggttctcttgagctggttacagctgttttctgactgaattttaattataaaagatctagccagcttctatacacactctccctgcacaaatgttaactctggttcagacaccttttctgcacccagttattctcactcataatttctttctccttgggtttttgttttattttggaacggctttttaaccttcagaagtacattttgtctggaggaccagagyatcgatgtgatcctacctgtagattcttggcaagagagaaaatgttcttattaatgcagaaagtcctacccagaaggaagaaaacgtctcacctagaaaaaagtcattatgtagttttttctgggctcatggtttcctgaagagacctggt

SEQ ID NO: 133753 - DNA, 391 bp, Homo sapiens
aaaataaccaatattcctaccaccaaaagataagcaatgtcagtatatctcctttcagacatttttagtatgtacatatgcatataattttaccaaaatagaatcataccatatacactgttttgcaacctgttttatctaatctgaatggagataatatctttctgaatcatgtatattttcattttttaatggctggagaagataccacagtgtggatgtttctctttgttttattattcccttattttggatgcttgcttggattgtttatcaggccatgaaaaaaaaaaaaaaagatgaattccccagaacattataaggaaatctagggaaagacagcastaccttaccttaaactttctggctcatgtcacaaatcagtaggttt

SEQ ID NO: 133754 - DNA, 425 bp, Homo sapiens
gggctcttaaggtcctgcctcaagaaccacttcctgagtcttagtgtatgtgtgtacacaaagaatgaaagaagtctctagagctaaaggaaggagatccgggctgggctgagaagcatcttccaggatcacggccttcccgcgggacacaccaagcccattccggatcttgctcttcctgaccatggctggcaggctgtggaggaggagcggagagcwgaagaaaggagtattcatcaggttccttattgtgctgccactagatgccaggcatgtgctaggcttgggggctgcaaggagaggaagacagcggccctgccctctgctagcaggcagaaccgagttctggccacactgtgaagaaaggcagaagcctgcggtggcagctggttaagctcagagggagggaaagggagaggagaatg

SEQ ID NO: 133755 - DNA, 384 bp, Homo sapiens
gggccatctgagagcagtgagccctccattcaaggaacatcttctgtgtcgactctaatctgtcttcaacaaagcaacaaattcctatttaaaactagttagctaaatactccagagatcaaatataatttccctttagttgygctcacactgtcacaattctaattatgacactgttgggaatactcgctttcttaaaaaatgtaaaatgcaccataaaaatttatgaagcaaattatcacaggtgtaactgttcaagggtgcagtggtctctttgtaactcagtttcctcaaccagtgcccttttacactttattttatggtcagtgtgatgcctcattgaaaaaagaatattaaaaaataatttattaagattaaattgct

SEQ ID NO: 133756 - DNA, 593 bp, Homo sapiens
cctcggcctcccaaagtgctggaattacaggcatgagccactgcacccagctaggtgactttcktaggtaccagtagtggcagcagtgggttgagttagtggccaggtcccaggcctctgggcagcatgtgttacatgggcaatagtatagtggggtggaaaaatatttgagatcccatatggaatacgctgttattagcaatggctgtgacaggctggggaggccaatccccaggccttcaggggggtgcatgaagttgggtgctaaatgtagtcatggccgaaagctgagtgggtgtgtcctcagcctccaggggaagtgcacagatgacagcagtgatggacaggccaaggtgagcccccaggcctctggacagatgcttgagcactgaaggggcagtgccaggccaagcaatgctttcctcaggctccctggtggtgtgcacaggcatatgggccactggagtcatccccaggctcctgggccttgtacttggctggcagtggagtagtggaagtggatagaaagagcctgtcttccaggcacttgtggtgtatggtggccctgctgctggaggcagcagcagggttgc

SEQ ID NO: 133757 - DNA, 593 bp, Homo sapiens
cctcggcctcccaaagtgctggaattacaggcatgagccactgcacccagctaggtgactttcgtaggtaccagtagtggcagcagtgggttgagttagtggccaggtcccaggcctctgggcagcatgtgttacatgggcaatagtatagtggggtggaaaaatatttgagatcccatatggaatacgctgttattagcaatggctgtgacaggctggggaggccaatccccaggccttcaggggggtgcatgaagttgggtgctaaatgtagtcatggcmgaaagctgagtgggtgtgtcctcagcctccaggggaagtgcacagatgacagcagtgatggacaggccaaggtgagcccccaggcctctggacagatgcttgagcactgaaggggcagtgccaggccaagcaatgctttcctcaggctccctggtggtgtgcacaggcatatgggccactggagtcatccccaggctcctgggccttgtacttggctggcagtggagtagtggaagtggatagaaagagcctgtcttccaggcacttgtggtgtatggtggccctgctgctggaggcagcagcagggttgc

SEQ ID NO: 133758 - DNA, 484 bp, Homo sapiens
tcacagatacagctcaactttaaaaagtgaaataaaatttcaatctggattacataattggattttacattttacattttgattgtttcggtataggtttgagattgrtattaccaacaaatgaacatatttgttattcaatttaaaatgctgaaaaatgaaaatatgttattttgtgtcatctagcttatgctcagtaaattcagggtaataattacacagatttaaatgtagtaataactcaagttaaaggttcactgcttctccatgacccaagtcctggatttgcggaagccattttcacaaaagatagtagatcagtgattctcatatctttctgttgatagagcaattggaaattatgatgctctgaaaaaacaccacaaattataagatgttaagaataattaaatatattattcttatgcaatcaatagcatcttatattagtggtaggcaatatccaatggctaaggttataagc

SEQ ID NO: 133759 - DNA, 484 bp, Homo sapiens
tcacagatacagctcaactttaaaaagtgaaataaaatttcaatctggattacataattggattttacattttacattttgattgtttcggtataggtttgagattgatattaccaacaaatgaacatatttgttattcaatttaaaatgctgaaaaatgaaaatatgttattttgtgtcatctagcttatgctcartaaattcagggtaataattacacagatttaaatgtagtaataactcaagttaaaggttcactgcttctccatgacccaagtcctggatttgcggaagccattttcacaaaagatagtagatcagtgattctcatatctttctgttgatagagcaattggaaattatgatgctctgaaaaaacaccacaaattataagatgttaagaataattaaatatattattcttatgcaatcaatagcatcttatattagtggtaggcaatatccaatggctaaggttataagc

SEQ ID NO: 133760 - DNA, 647 bp, Homo sapiens
cctgttttaccaggatccaagctccccttctttctatagcctcaagacaatatgtaagtttctgtaactcattgggaagttgagtcttcatactgaaggctctggggtatacatgctaaataaattcatatgtcttctcctattaatcaatctgcctcatgtcagtgatttcttagagaacctttagagggccaagtgtctaaggccccacaatagtaataccaatggtcattcgtcactgagcatctactgtgttacaggtaccttataaacattacctataaccttcactatagcccattaagatcartattattatcctcattttccagccaaggagccagaggtgttaagcaatctgtttagggttggctggacttacctggcagaagtgaaattaaaatcaaggcctgccacacactgtcttatgcttctcctgctctgccatactgcctctccatgatataatgtctatgaaagtgccatggaaaagctaaaggattagattagacagatgcacagtggtattctatccattatagtgattaataggcttcatgaaacgtaggacctgacactcagaggtgatgttgccttttccttgaatgggagttgcactatgctgttagacatataattatagtgca

SEQ ID NO: 133761 - DNA, 647 bp, Homo sapiens
cctgttttaccaggatccaagctccccttctttctatagcctcaagacaatatgtaagtttctgtaactcattgggaagttgagtcttcatactgaaggctctggggtatacatgctaaataaattcatatgtcttctcctattaatcaatctgcctcatgtcagtgatttcttagagaacctttagagggccaagtgtctaaggccccacaatagtaataccaatggtcattcgtcactgagcatctactgtgttacaggtaccttataaacattacctataaccttcactatagcccattaagatcagtattattatcctcattttccagccaaggagccagaggtgttaagcaatctgtttagggttggctggacttacctggcagaagtgaaattaaaatcaaggcctgccacacactgtcttatgcttctcctgctctgccatactgcctctccatgatataatgtctatgaargtgccatggaaaagctaaaggattagattagacagatgcacagtggtattctatccattatagtgattaataggcttcatgaaacgtaggacctgacactcagaggtgatgttgccttttccttgaatgggagttgcactatgctgttagacatataattatagtgca

SEQ ID NO: 133762 - DNA, 404 bp, Homo sapiens
tcagtttcctcttttgattcctgaatatataactagaatagacatacttgacaactggcaaaatcaccatgctggttctctgacacatggattgggagccaccatgacaacaagggctaagtggaagtccccggagctctgcttccctaccaaaatagaaaaccagaaacaatactgcatcctgggtgaatctgcaaaaaccatgccaccatcaaagagtagaaaatgcaggagaggtgatgcctatcacatccccacttaattcacctagaaaaagtagaaaagtaaaatggatctcrgaaaatcttggaaaatttttatttcaaacatgttatcaattttaaaatgtttgtgtagcttgtttttaggttttccttttactttgggtttcttttactcttttc

SEQ ID NO: 133763 - DNA, 551 bp, Homo sapiens
ttttcagctccatcaggtcatttaaggtcttctctacactggttattctagttagccatttgtctaaccstttttgaacgcttttcgattccttgcgatgggttaaaacatgctcctttagctttggggagaagtttgttattactgaccttctgaagcctacttctatcaactcatcaaattcattatccatccagttttgttcccttgctggcaaggagttgtattcctttggaggagaagaggtattctcttctcctccaaagaattttcagcctttctgctctggtttctccccatctttgtggttttatctacttgggtctttgatgttggtgacctatgggtggggttttggtgtggatgtcctttttgttgatgttgatgctattcctttctgtttgttagttttccttctaacagagaggcccctcagctgcaggtctgtgggggtttgctggaggtccattccagaccctgtttgcctgggtatcaccagtggagactgcagaacagcaaaaattgctgcctgatccttcctctggaagctt

SEQ ID NO: 133764 - DNA, 406 bp, Homo sapiens
gaattctttcagcctctacccactagccaatttcaaaaccacttccacatttttaggtttttcttttttctctttttttttttttttttttttgagacagagtcaacctctctcaaccagactggagtgcagtggtgcaatctcaactcactacagcctytgcctaccaggttacaagcaattctacatgcctacagccttccaagtagccacaactacaggcacatgccacacatgcctggctaatttttgtatttttagtaggaacagggtttcaccatgttggccaggctggtcttgaactcctgatctcaagtgatctgcccgccttggccgccgaaagtgctgggatacaggcatgaaacactgtgcccagccaatttgtagatattttttatagcagcat

SEQ ID NO: 133765 - DNA, 406 bp, Homo sapiens
gaattctttcagcctctacccactagccaatttcaaaaccacttccacatttttaggtttttcttttttctctttttttttttttttttttttgagacagagtcaacctctctcaaccagactggagtgcagtggtgcaatctcaactcactacagcctctgcctaccaggttacaagcaattctacatgcctacagccttccaagtagccacaactacaggcacatgccacacatgcctggctaatttttgtwtttttagtaggaacagggtttcaccatgttggccaggctggtcttgaactcctgatctcaagtgatctgcccgccttggccgccgaaagtgctgggatacaggcatgaaacactgtgcccagccaatttgtagatattttttatagcagcat

SEQ ID NO: 133766 - DNA, 362 bp, Homo sapiens
ctgccaactcattttatacttctgacttccattttatactttcttgtatattctatacaagaataaacttgtattgctttaagtcactaagtttgcggtaatttattattgccacaagaggagtctaatagaacagctcttagcaggcacgttcactgggaatccaacacttctctggaaggaggttataaagggagctcatggagagggggaaggagcmggaacatctacgtctccaattgcctccaaatgcctcccattccccttccctcaaagggagctaactcctcacccttccaattttcaccctccagccccttggcagcccctcgggaatccatatcccaggacccacagtgtgc

SEQ ID NO: 133767 - DNA, 559 bp, Homo sapiens
ccacaacattctttgcaatctggaagttgcctacctctctaatctcatcttttgttatttttccccttattttgtcctcttcaggcacatggytttttccttccatctctcaaatccaccatgtgcctttctgctccaggacctttgcccatgctcaccttcctgcttagaatgtcctctgcatttctgccctcctcacctcccatgcagatattcaaactcctttttcaggtgtttgctccagagttgctttctctggggaacttatccgaccctccacctgtgtaggatgcttggtatatacttgcaaagcttaggaacctactggacttgagccaggacatgagggactcatgcaaagctgcctctttccttggggttccatgttgagagagatgggcctgaaagccaccgtgagctggcaagatggggtacagttagattctttgtaagcagtgtgctgacttgccttaaaatttagcaaaactttttgaaaattctgccctgttttcattatgcttttttggggctggagctgaccaggagaggcagcaagagc

SEQ ID NO: 133768 - DNA, 559 bp, Homo sapiens
ccacaacattctttgcaatctggaagttgcctacctctctaatctcatcttttgttatttttccccttattttgtcctcttcaggcacatggctttttccttccatctctcaaatccaccatgtgcctttctgctccaggacctttgcccatgctcaccttcctgcttagaatgtcctctgcatttctgccctcctcacctcccatgcagatattcaaactcctttttcaggtgtttgctccagagttgctttctctggggaacttatccgaccctccacctgtgtaggatgcttggtatatacttgcaaagcttaggaacctactggacttgagccaggamatgagggactcatgcaaagctgcctctttccttggggttccatgttgagagagatgggcctgaaagccaccgtgagctggcaagatggggtacagttagattctttgtaagcagtgtgctgacttgccttaaaatttagcaaaactttttgaaaattctgccctgttttcattatgcttttttggggctggagctgaccaggagaggcagcaagagc

SEQ ID NO: 133769 - DNA, 562 bp, Homo sapiens
gcgaggccccggcaccaatgaaagaggcctctgttgagtaccctcaggcctgacatacctgggttcacctcctggctcggccctttctcatgcccctaatcttgggcaagtcactgtaatttcggtcctctgtgaatctgagctacctcatagggctgtatgaggatgaaatgtagcaatatatgtgaactcatgtgggcctgttccttaatcagtgttcaaaaatgagctgttcttaaaaggaaattcttggtatgtttgaaaataaggaatttcttgcagttattcattttcccgtacagtgtagggtgcgagtaaatccaaggcagtagaatgaatatagctgtttctgtgtgagcaggacggaatgtggtagaggaaggagtactgacatttattgagtgcctgctgtatgtcaggtgtcatttargtattttgcatacgttaggttattaaatgctcaccccccccccccccaaaaaaaaacacaaaaaatttccaggaaggaagacggtattacacaactgataaaaagttaaaactaaggacacccaactagaaa

SEQ ID NO: 133770 - DNA, 528 bp, Homo sapiens
tttttttttgtttgtttgtttgtttgtttgttttgagacggagtctcgctctgttgcccagattggagtgcagtggcgcaatctcagctcactgcaacctctgcctcctgggttcaagcgattctcctgcctcagcctcctgagtagctgggattacaggcgcctgccaccatgcctggctaatttttgtatttttagtagaggtggggtttcaccatgttggccaggctggtcttgaactcctgacctcaagtgatctgcctgcctccacctcccaaagtgctggattacaggtgtgagccaccactcccggtccttctcaccttttattagtaactgccatcaccatcatagctggtcttggattcattaactccatcaggttattcccagtggtggaaacagtgaatggcacacaataggtgctcagtaaatatttttgtttccttcagaaattgcctgaaagatcagatgagatgtcytaaaagtgagagctatggaaccccactttaagatgacattttaaga

SEQ ID NO: 133771 - DNA, 366 bp, Homo sapiens
agagagtgaggcaggcaggcaggcaggcagggaccaagcttgggcacagccaggaaggcaggacagggcatggtggggccaatggaatcattacccaagacgggsattttcagggaaacagcttagataaggccaggcgtacagtagctcccacctgtaatcccagcatttggggaggctgaggtaggaggactgcttgagcctgggagttcgagaccagcctaggcaacatagtgagaccccatatccacaaaaaatttaaaaaaggagtttgtgttcctgtagtagcatacttgggaggttgaggtggcagtatcacttgagcccgggagttcaaggctaaagtgagctgattgagccattgca

SEQ ID NO: 133772 - DNA, 407 bp, Homo sapiens
tgaattccagaaggaactactgagatgyaaagaagcacagcagcttttgcacacatgcgtgggattagatggaaaacaagtggattgagggtctgccaatgaaagcgacccgtactgaagtccactggctctggttgagacccagaagagtcatgcatcagaatagaggtggacaggaaatacctggcctttctagggactgagcctgcaccgacgacctcaattgcagcctgtatggaggacccgtgaccatcccccagaagtagactcccatctcttctgcagcaagataacatgccactaggcctcaattcattgctaaatattttttaacaagtatctcacatttaacaaaaagagatcagtcatatggcagcaaaatacaatgtaatatgaccaaaacatga

SEQ ID NO: 133773 - DNA, 394 bp, Homo sapiens
tgaattccagaaggaactactgagatgcaaagaagcacagcagcttttgcacacatgygtgggattagatggaaaacaagtggattgagggtctgccaatgaaagcgacccgtactgaagtccactggctctggttgagacccagaagagtcatgcatcagaatagaggtggacaggaaatacctggcctttctagggactgagcctgcaccgacgacctcaattgcagcctgtatggaggacccgtgaccatcccccagaagtagactcccatctcttctgcagcaagataacatgccactaggcctcaattcattgctaaatattttttaacaagtatctcacatttaacaaaaagagatcagtcatatggcagcaaaatacaatgtaatat

SEQ ID NO: 133774 - DNA, 395 bp, Homo sapiens
ggaactactgagatgcaaagaagcacagcagcttttgcacacatgcgtgggattagatggaaaacaagtggattgagggtctgccaatgaaagcgacccrtactgaagtccactggctctggttgagacccagaagagtcatgcatcagaatagaggtggacaggaaatacctggcctttctagggactgagcctgcaccgacgacctcaattgcagcctgtatggaggacccgtgaccatcccccagaagtagactcccatctcttctgcagcaagataacatgccactaggcctcaattcattgctaaatattttttaacaagtatctcacatttaacaaaaagagatcagtcatatggcagcaaaatacaatgtaatatgaccaaaacatga

SEQ ID NO: 133775 - DNA, 407 bp, Homo sapiens
tgaattccagaaggaactactgagatgcaaagaagcacagcagcttttgcacacatgcgtgggattagatggaaaacaagtggattgagggtctgccaatgaaagcgacccgtactgaartccactggctctggttgagacccagaagagtcatgcatcagaatagaggtggacaggaaatacctggcctttctagggactgagcctgcaccgacgacctcaattgcagcctgtatggaggacccgtgaccatcccccagaagtagactcccatctcttctgcagcaagataacatgccactaggcctcaattcattgctaaatattttttaacaagtatctcacatttaacaaaaagagatcagtcatatggcagcaaaatacaatgtaatatgaccaaaacatga

SEQ ID NO: 133776 - DNA, 410 bp, Homo sapiens
agcttttgcacacatgcgtgggattagatggaaaacaagtggattgagggtctgccaatgaaagcgacccgtactgaagtccactggctctggttgagacccagaagagtcatgcatcagaataraggtggacaggaaatacctggcctttctagggactgagcctgcaccgacgacctcaattgcagcctgtatggaggacccgtgaccatcccccagaagtagactcccatctcttctgcagcaagataacatgccactaggcctcaattcattgctaaatattttttaacaagtatctcacatttaacaaaaagagatcagtcatatggcagcaaaatacaatgtaatatgaccaaaacatgaaagactgtgaaaatgaatctggaggtgacccaagcattgaattc

SEQ ID NO: 133777 - DNA, 407 bp, Homo sapiens
tgaattccagaaggaactactgagatgcaaagaagcacagcagcttttgcacacatgcgtgggattagatggaaaacaagtggattgagggtctgccaatgaaagcgacccgtactgaagtccactggctctggttgagacccagaagagtcatgcatcagaatagaggtrgacaggaaatacctggcctttctagggactgagcctgcaccgacgacctcaattgcagcctgtatggaggacccgtgaccatcccccagaagtagactcccatctcttctgcagcaagataacatgccactaggcctcaattcattgctaaatattttttaacaagtatctcacatttaacaaaaagagatcagtcatatggcagcaaaatacaatgtaatatgaccaaaacatga

SEQ ID NO: 133778 - DNA, 407 bp, Homo sapiens
tgaattccagaaggaactactgagatgcaaagaagcacagcagcttttgcacacatgcgtgggattagatggaaaacaagtggattgagggtctgccaatgaaagcgacccgtactgaagtccactggctctggttgagacccagaagagtcatgcatcagaatagaggtggacaggaaatacctggcctttstagggactgagcctgcaccgacgacctcaattgcagcctgtatggaggacccgtgaccatcccccagaagtagactcccatctcttctgcagcaagataacatgccactaggcctcaattcattgctaaatattttttaacaagtatctcacatttaacaaaaagagatcagtcatatggcagcaaaatacaatgtaatatgaccaaaacatga

SEQ ID NO: 133779 - DNA, 407 bp, Homo sapiens
tgaattccagaaggaactactgagatgcaaagaagcacagcagcttttgcacacatgcgtgggattagatggaaaacaagtggattgagggtctgccaatgaaagcgacccgtactgaagtccactggctctggttgagacccagaagagtcatgcatcagaatagaggtggacaggaaatacctggcctttctagggactgagcctgcaccgaygacctcaattgcagcctgtatggaggacccgtgaccatcccccagaagtagactcccatctcttctgcagcaagataacatgccactaggcctcaattcattgctaaatattttttaacaagtatctcacatttaacaaaaagagatcagtcatatggcagcaaaatacaatgtaatatgaccaaaacatga

SEQ ID NO: 133780 - DNA, 368 bp, Homo sapiens
gcagcttttgcacacatgcgtgggattagatggaaaacaagtggattgagggtctgccaatgaaagcgacccgtactgaagtccactggctctggttgagacccagaagagtcatgcatcagaatagaggtggacaggaaatacctggcctttctagggactgagcctgcaccgacgacctcaattgcagcctgtatggaggaccygtgaccatcccccagaagtagactcccatctcttctgcagcaagataacatgccactaggcctcaattcattgctaaatattttttaacaagtatctcacatttaacaaaaagagatcagtcatatggcagcaaaatacaatgtaatatgaccaaaacatga

SEQ ID NO: 133781 - DNA, 395 bp, Homo sapiens
ggaactactgagatgcaaagaagcacagcagcttttgcacacatgcgtgggattagatggaaaacaagtggattgagggtctgccaatgaaagcgacccgtactgaagtccactggctctggttgagacccagaagagtcatgcatcagaatagaggtggacaggaaatacctggcctttctagggactgagcctgcaccgacgacctcaattgcagcctgtatggaggacccstgaccatcccccagaagtagactcccatctcttctgcagcaagataacatgccactaggcctcaattcattgctaaatattttttaacaagtatctcacatttaacaaaaagagatcagtcatatggcagcaaaatacaatgtaatatgaccaaaacatga

SEQ ID NO: 133782 - DNA, 395 bp, Homo sapiens
ggaactactgagatgcaaagaagcacagcagcttttgcacacatgcgtgggattagatggaaaacaagtggattgagggtctgccaatgaaagcgacccgtactgaagtccactggctctggttgagacccagaagagtcatgcatcagaatagaggtggacaggaaatacctggcctttctagggactgagcctgcaccgacgacctcaattgcagcctgtatggaggacccgtgaccatcccccagaagtagactcccatctcttctgcagcaagataacatgcyactaggcctcaattcattgctaaatattttttaacaagtatctcacatttaacaaaaagagatcagtcatatggcagcaaaatacaatgtaatatgaccaaaacatga

SEQ ID NO: 133783 - DNA, 410 bp, Homo sapiens
agcttttgcacacatgcgtgggattagatggaaaacaagtggattgagggtctgccaatgaaagcgacccgtactgaagtccactggctctggttgagacccagaagagtcatgcatcagaatagaggtggacaggaaatacctggcctttctagggactgagcctgcaccgacgacctcaattgcagcctgtatggaggacccgtgaccatcccccagaagtagactcccatctcttctgcagcaagataacatgccactaggcctcaattcattgctaaayattttttaacaagtatctcacatttaacaaaaagagatcagtcatatggcagcaaaatacaatgtaatatgaccaaaacatgaaagactgtgaaaatgaatctggaggtgacccaagcattgaattc

SEQ ID NO: 133784 - DNA, 401 bp, Homo sapiens
aagcacagcagcttttgcacacatgcgtgggattagatggaaaacaagtggattgagggtctgccaatgaaagcgacccgtactgaagtccactggctctggttgagacccagaagagtcatgcatcagaatagaggtggacaggaaatacctggcctttctagggactgagcctgcaccgacgacctcaattgcagcctgtatggaggacccgtgaccatcccccagaagtagactcccatctcttctgcagcaagataacatgccactaggcctcaattcattgctaaatattttttaacragtatctcacatttaacaaaaagagatcagtcatatggcagcaaaatacaatgtaatatgaccaaaacatgaaagactgtgaaaatgaatctggaggt

SEQ ID NO: 133785 - DNA, 395 bp, Homo sapiens
ggaactactgagatgcaaagaagcacagcagcttttgcacacatgcgtgggattagatggaaaacaagtggattgagggtctgccaatgaaagcgacccgtactgaagtccactggctctggttgagacccagaagagtcatgcatcagaatagaggtggacaggaaatacctggcctttctagggactgagcctgcaccgacgacctcaattgcagcctgtatggaggacccgtgaccatcccccagaagtagactcccatctcttctgcagcaagataacatgccactaggcctcaattcattgctaaatattttttaacaagtatctcacatttaacaaaaaragatcagtcatatggcagcaaaatacaatgtaatatgaccaaaacatga

SEQ ID NO: 133786 - DNA, 407 bp, Homo sapiens
tgaattccagaaggaactactgagatgcaaagaagcacagcagcttttgcacacatgcgtgggattagatggaaaacaagtggattgagggtctgccaatgaaagcgacccgtactgaagtccactggctctggttgagacccagaagagtcatgcatcagaatagaggtggacaggaaatacctggcctttctagggactgagcctgcaccgacgacctcaattgcagcctgtatggaggacccgtgaccatcccccagaagtagactcccatctcttctgcagcaagataacatgccactaggcctcaattcattgctaaatattttttaacaagtatctcacatttaacaaaaagagmtcagtcatatggcagcaaaatacaatgtaatatgaccaaaacatga

SEQ ID NO: 133787 - DNA, 410 bp, Homo sapiens
agcttttgcacacatgcgtgggattagatggaaaacaagtggattgagggtctgccaatgaaagcgacccgtactgaagtccactggctctggttgagacccagaagagtcatgcatcagaatagaggtggacaggaaatacctggcctttctagggactgagcctgcaccgacgacctcaattgcagcctgtatggaggacccgtgaccatcccccagaagtagactcccatctcttctgcagcaagataacatgccactaggcctcaattcattgctaaatattttttaacaagtatctcacatttaacaaaaagagatcagtcatatggcagcaaaatacaatgtmatatgaccaaaacatgaaagactgtgaaaatgaatctggaggtgacccaagcattgaattc

SEQ ID NO: 133788 - DNA, 362 bp, Homo sapiens
aagatagctataatttggagccagatttatgccagcaaaatcatttatgccgttgcctgctttgtgatgttatggttttaccaagtaagaattggaacacaggttcagaatacttattttctggtgtcctatggcagatatttttagaatgcagagcagctaaagtgctygttgtgagtcaagttcttacccagaaatagatattgactattgactttacaaaaaaatagtagctgggcttggtggcgcacgcctattatcccagctactcgggaggctgaggcaggagaatcgtttgaatgcagaggtggaagttgcagtgagccgcgactgagccactctgctccagcctgggcgacaga

SEQ ID NO: 133789 - DNA, 619 bp, Homo sapiens
gtcagaaatgcaaaagcctgaaggcatttcaaaaggccaatcttaggttaattacagcagaacctgaggaagttacaaatcttatgacctccagaataatggctgataatcatttaactaagcctgtatcttagcagaattcaggtccctctccacttcctaacctggtggcctttcattagttttacaaggctggtttagttttggggaagggctaccgtcatttaaactataaactaaatacttccctaagttagcttggctcattcccaggaatgagcaaagacagccagcctgcgaggctagaagcaagatggggtcagccatgtcagatttctcttactgtcacgatttttgcagaggcartttcatcagtagacttaagtacagacacacagaatggtgaggtagaccttattattcagttgaattacatgtcattaaagtaaaatcacatatggagattttattctttatcagctccatcctatatagtcaggctaaggaaaacaaaacaaaaacaaaaatatcctccctcttctcaagaaatccatcatctcctggcagaaggagttctgccaaaatatgaatataataccacttctagttttgagcatat

SEQ ID NO: 133790 - DNA, 619 bp, Homo sapiens
gtcagaaatgcaaaagcctgaaggcatttcaaaaggccaatcttaggttaattacagcagaacctgaggaagttacaaatcttatgacctccagaataatggctgataatcatttaactaagcctgtatcttagcagaattcaggtccctctccacttcctaacctggtggcctttcattagttttacaaggctggtttagttttggggaagggctaccgtcatttaaactataaactaaatacttccctaagttagcttggctcattcccaggaatgagcaaagacagccagcctgcgaggctagaagcaagatggggtcagccatgtcagatttctcttactgtcacgatttttgcagaggcaatttcatcagtagacttaagtacagacacacagaatggtgaggtagaccttattattcagttgaattacatgtcrttaaagtaaaatcacatatggagattttattctttatcagctccatcctatatagtcaggctaaggaaaacaaaacaaaaacaaaaatatcctccctcttctcaagaaatccatcatctcctggcagaaggagttctgccaaaatatgaatataataccacttctagttttgagcatat

SEQ ID NO: 133791 - DNA, 617 bp, Homo sapiens
aaataaggaatggatgagtgtcttgtaacctacttggagatgctttcccagccttagtgttgtccctgagaagaaggcatcaaactgttcatgcaaatttgcctatctttctgtgtgagtactttttttccattaagggaactaaaaattgaaaggaaaagcacttgaggtataaaaatmatagaattttaaagctatatggaaccgtagaaatgctaatacttttgcttcaattttacaggtgagggaaaagagaatctcagtagttaagtaagaaagggtggtgtaatgaaaataatctggaagatacatacacagaatgccatccctaaatggtagattaaaagtcattttgcttttactttttatctcatttcttaagttttctacaatgagcaagtatcactttctaccaaaaaaggattatcattcaaataatatgacatggcaacagccagatctgagtgtgagtcctatttctgtcattaaatgctgagtgatctcagcaagttatttcacctctctatattttataaatgaaagcatttgtatccattttacaagagtggtgtgagtatttaacagaataaaatatggaggaagaaaagcaaatgact

SEQ ID NO: 133792 - DNA, 617 bp, Homo sapiens
aaataaggaatggatgagtgtcttgtaacctacttggagatgctttcccagccttagtgttgtccctgagaagaaggcatcaaactgttcatgcaaatttgcctatctttctgtgtgagtactttttttccattaagggaactaaaaattgaaaggaaaagcacttgaggtataaaaatcatagaattttaaagctatatggaaccgtagaaatgctaatacttttgcttcaattttacaggtgagggaaaagagaatctcagtagttaagtaagaaagggtggtgtaatgaaaataatctggaagatacatacacagaatgccatccctaaatggtagattaaaagtcattttgcttttactttttatctcatttcttaagttttctacaatgagcaagtatcactttctaccaaaaaaggattatcattcaaataatatgacatggcaacagccagatctgagtgtgagtcctatttctgtcattaaatgmtgagtgatctcagcaagttatttcacctctctatattttataaatgaaagcatttgtatccattttacaagagtggtgtgagtatttaacagaataaaatatggaggaagaaaagcaaatgact

SEQ ID NO: 133793 - DNA, 378 bp, Homo sapiens
aaaagcttcaaatcagagtcaaatgttaatggagctcatgtgctcacattacaaaagaactacaatgagttgctgatgcaattggtgcaccctatagaaatgagattcttactctgaatatctgttgctctccctatgcaccatctctatatagatattaatagatattatttctatataaatatgtatctaattctcaaaggcaatgtaactgatcactacactttttttaaaaactaaaaaaaaawttaggcttaggagagataaattatataagaacctcaggaggaaaatctttatgaaatactcatgtaaattgctttatcttgttgtagtgttattacttttcagtggttatgtctgatgttaacattttca

SEQ ID NO: 133794 - DNA, 586 bp, Homo sapiens
tggctgcagtgtttccccttcatcttcgttttgaattgaaagcagatatgcagagttttctgtgttgtctcttagcatttaaatctgggccagcagctaatagaaaaaaaatactgtgctgtaaaacaaaatatgtttgctggatatggtcttcagtctctgatctgttctttctttccttgaggcaactcayctctgactcagaacttttgctcatgctgtttctctcacacaaaacattatttctactacaagcagcatcctccacttcacttagggaattcctatatatctttcagatcccagggaagctttctctcatcttccagaccagttattgtggcatgccatacattctttatgtagagtgacaggttccctaccaggttacttaagggtgcatttatctgctgagtgaaacttgaaggccagacagtgagccaggttatggtgtctagctgaggagcagatgttcctgggaacctaaatatcccaggcagtatctgtgaacctactaagaaaaatagtcatagctcttaagcacagtaagcaaagatcaagaatattagcctaaaagtagtttaaa

SEQ ID NO: 133795 - DNA, 419 bp, Homo sapiens
cctgggtcccatataaaatactatgtgtgatagtcagaataggtatacaattattagtcaaatatcttttatcctcaaaacatacaaaattccttatactctgatctaacattttagtttatttataagtggcttattactactccacctcatactgacctccacctcacaataacttagaatagtcattttattgcttatgattctaaaattmtggagcaataaaatgattcagtaatgtctaagaattaatcattttaatttctaggctcatattttaattttgatgactgatgttcagaaaatgtcttctttttttgtattgaatccaatttgttctttgttttccctttttggggtaactgttagtaaagtattgcatagccaagatttttcatcttttttctgttctcacattt

SEQ ID NO: 133796 - DNA, 525 bp, Homo sapiens
tccaagtcaagtcagcaatggtgattgtctccaaagatccccaacactagttaggttctgaattactggaagaatgaggcaaaggagatgacttacctaaaacaaagagaaacccattgaacaccaaaccatcggtggccaatattgcaagtttccaaggccaaatacacacttyggcttgattgcctgggtcaaagatcctgaaatccttatttgcgatgacattgctcctggtatttatgaggagagagaacctattcattctctgacttttagaatttgactgcatgccaccccaaatagcatatactctagctaagagcaaaactcagcatgaacagattgaaattgtctaggttcaggatttggagtagggcaaggggtggaatggagcacgttagatccatgtgaaggtttgtgaagggaacctgttattacaggcagaacattatttctgaatgcaaaggcaagagacaagtggtaagaaattaaacctatcagtgttagaaagtgtgtacataggat

SEQ ID NO: 133797 - DNA, 396 bp, Homo sapiens
gaattcaattcttattccaaataatgagaatttgtttccttcagcgtaatatcctctagtatagtctttgtgtctcttaatttacaaygcggcctacacagttcctcctggttgcattgaatctggtgtttttgtcatgatgtgatgcattactcttcaacaaagccccacaacttgtatttacaaccatgcgtaaggaagaaaaaagtgacagtcacatctgtgttcttgttcctgagagatttgttacaaaccatgattgtaaaacctcagtttcctttctatagtaaatgttgggcctgtgcatccaactctgaccaaacttttggagtgatttatagcatatctgttttgacctacccctgataatattcaaattaaagtcacggttggaaa

SEQ ID NO: 133798 - DNA, 547 bp, Homo sapiens
gtatgttccttgatgaaaagggtaattttatgctgtgtctggatatagttaaagcacctactatgttgtgtacatatagtaggtgctcagtcaattctgttaaatcaatgacagcatcctgaagatgagaaaaatctgatgaagatatcataaagaaaaatcaaaactataccttggtgtcagattcagggtaacagtataagttgatacaactaataattatttattcaactaatattttttgaacgcaaggaaatgtttcttggtgttataatgaatraaatgattaagcagacatgtctttgccctctaactgattgaaggttcatagaggtgatagtcagagaggtatattataaaatgcctgctacctactaggatattgatggctggctaaaataaagctgctaaaagtgttgtaccctaataactcaatgaatcagaaaaaattaagtactgtgagtggcatagacaaattgctgacaattcagaagagtgattactttctattagaataataagagagccttcatacaggcaagggttg

SEQ ID NO: 133799 - DNA, 368 bp, Homo sapiens
caataactcagtgtctctgagcctcacttaccttaactgtaaatatgaacagcgaggattcatacagcagccatgaagwtcaatataaggggtcttgcacaaaacttactcttcaaaagtgctcaaaaatatgtttccctctttcttcttcagtctattatatctagaatgcattagaaggcagttgaatgccaaaaaggaactcccagccattatttcacagcatatgtgtgaattgctagctttgctcttattgtaagtggctcggtttaatttctctacaactgaggggaaatgtccggcttcatagcccagaatacatgctttgtgatgtcttgatggattttattgattttatttcacaccac

SEQ ID NO: 133800 - DNA, 590 bp, Homo sapiens
aatattgctgagcattttaaagtatgaactactgatacatacagtgtggatgaatatcaaaataatctcagaaagtgaaagaagccatacaaaaataagagtacttacagtatgcttccttcacatcaagttcyagaacggtggttggcaaacatttttggtaaagggaaagatagtaaatattttaggctctgcaagctatggcatctgtcttatttatactctgctgttgcagtgtgaaagcaaccatagatgataggtagacaaatgagtgtggctgtgttccagtaaaatttcatttacagaaacaggtggttgagctagattggaccaacaggccattgttggctgatcattgttctaaaaaaatgtgaactaatttaccaggacataaaacagatgagtgggtgtggagatgggaagagggcaggaaggaggaatttcaaaggggcatgaggaaacttttaggggttatagaaatagtaattatcttgattattgcgattgtttcacaggtgcatacgtatattaaaatctaataaattgtgaattttaaatatgtgcagctaattataggtcaattataccca

SEQ ID NO: 133801 - DNA, 590 bp, Homo sapiens
aatattgctgagcattttaaagtatgaactactgatacatacagtgtggatgaatatcaaaataatctcagaaagtgaaagaagccatacaaaaataagagtacttacagtatgcttccttcacatcaagttctagaacggtggttggcaaacatttttggtaaagggaaagatagtaaatattttaggctctgcaagcyatggcatctgtcttatttatactctgctgttgcagtgtgaaagcaaccatagatgataggtagacaaatgagtgtggctgtgttccagtaaaatttcatttacagaaacaggtggttgagctagattggaccaacaggccattgttggctgatcattgttctaaaaaaatgtgaactaatttaccaggacataaaacagatgagtgggtgtggagatgggaagagggcaggaaggaggaatttcaaaggggcatgaggaaacttttaggggttatagaaatagtaattatcttgattattgcgattgtttcacaggtgcatacgtatattaaaatctaataaattgtgaattttaaatatgtgcagctaattataggtcaattataccca

SEQ ID NO: 133802 - DNA, 575 bp, Homo sapiens
gtgtgtgtgtggtgagaacatttaagatctactcttactctcttattttgagtatacaatacagtttattacatgtagtcacgatgctgtacattagatctccagaacttatttcttctttaaaactgaaactttagacctctgtttctaccaccctccatactgtggcaactaccatagtactctctgcttctatgagttcastttaaaaaaattataaaatttaaaatttttaaatatttcataagattatttaatgtcatggaaagatgttcacaacatattattatgtgagtaattaagattaacaaaacatacatatgataaaataactttctttgtttagatcaaatccaccatttcagccattttaaagtgtacaattcaatagcgtttagtacattcacaatattgtgcaacctacaccaccatctggttcctatttttatcatctcaaaaggaaaccctgcaccatttaagcaattattacttgtcattcccacctccccacagtcctggcaactgccaatgctttccgtctctgtagatttgcctattctgggtatttcgtataa

SEQ ID NO: 133803 - DNA, 542 bp, Homo sapiens
cattcagcaccccatgatggacactggagatacagagacactagatatggaaacaactataaaatagtttgatgaaaattgaggctgtaattagaaaacacgagtaaaccaaaccaagatgcagattttgggatcccacattctgaatttcagttttgtaggggtggagggaggatcagaaatttgcaatgtaaaaaattccccaggtggctgatattcacagtatagctgagaaccacaccggtgtaaagtttcccaaattgacccagtcataggagtcacctaaagcatgcatgaaacacacagagtccaggtcccagcccagaccgagagaagcagagggagcaacagtgggttaatgtgtctttctttcttcrctggtcagctggggattgctgtatatttgataaattgccctagcctaaagggaaagagctgagaagaaagcccattataaattatggggtgaatatttcccaattatactgaggactgtgttggttgtgatgttcttcttcaacatgacccgagaacaagaattc

SEQ ID NO: 133804 - DNA, 465 bp, Homo sapiens
acgtgggtgtatagattttttaaaataatgtctttatctggttttggtcttaacataatgctggtttcatagaatgagttagaaagtcttccctctgcttctatcttcttgaacacattgtacaaaattggtatcatttcttccctagatgtttggtagaattaagcaatggaattatctgtgcctggattttttctttttaggaagatttttaaccaaaaaaaattgtatttaatagatatagacccctttagattatctgttcctctttgtgtgagctttggtagcttgtgtctttcaaggaattgattgattttgatatggacagaaggcagggaaattctaggtagaagagggagggtccccrgcaagggccccaccctcaagcccaaaaacctgaaaccacagcccaaagtgagaacttacatccctgttttcccgcttgaatatcgccttttccaaaac

SEQ ID NO: 133805 - DNA, 615 bp, Homo sapiens
cccagaaattcaccaacacaattacctatgtgtattctctcctgataaagcttggatgtctttattttwttttattttattttattttcttattttattttatattttagagacagggtctaactctgtcgcccaggctggagtgcatggtatgatcatagctcactgcagcctggaaatcctgggctcaagtgatcctcctgcctcagcctcctgagtagctaggactacaggcatgcaccaccatgcacggctaattccttattttttagtagagaagcatcttgttatgctgcccagagtggtctcaaactcttggcctcaagtgctcctcccacctcagcatcctgagtagttagggttacaggtgtgtgccaccttgccaggctaattttatcttattagtagaaacagaatcttgctttgttgcctaggctggtctcaaactcttggccttaagtgatcctccagcttcagcctcccagtgggctctgaattttaaagcccttaggagaatcttgcagccaattacgccttagagtgtgatccagcatattgatcagcaaaagattggcagagtaagaggaatttaaaagactgtgcttccgttagtca

SEQ ID NO: 133806 - DNA, 615 bp, Homo sapiens
cccagaaattcaccaacacaattacctatgtgtattctctcctgataaagcttggatgtctttatttttttttattttattttattttcttattttattttatattttagagacagggtctaactctgtcrcccaggctggagtgcatggtatgatcatagctcactgcagcctggaaatcctgggctcaagtgatcctcctgcctcagcctcctgagtagctaggactacaggcatgcaccaccatgcacggctaattccttattttttagtagagaagcatcttgttatgctgcccagagtggtctcaaactcttggcctcaagtgctcctcccacctcagcatcctgagtagttagggttacaggtgtgtgccaccttgccaggctaattttatcttattagtagaaacagaatcttgctttgttgcctaggctggtctcaaactcttggccttaagtgatcctccagcttcagcctcccagtgggctctgaattttaaagcccttaggagaatcttgcagccaattacgccttagagtgtgatccagcatattgatcagcaaaagattggcagagtaagaggaatttaaaagactgtgcttccgttagtca

SEQ ID NO: 133807 - DNA, 560 bp, Homo sapiens
ctgccatatgagttacggcagctctagcaaataaacacaagatactactagatgtcaggcaatagtagactcctgagatcttgcatcttgtacctgctcagtattggccaccttcrtcatgtgtcaaaatccccctggatattaacatacatgtgttcaagttctaccccaaagaatactgttgcaattggtctggaggtgatttcctggtgattctaatgagcagccaggattgagaattatctttccagatctttgagtcattggcctttcttttccttcgggtctgggctcaaaggtcatgtccacagggaagcccccaggaacaccccatccaaggtagccactcttatgacctcacactgttttggtttcctcagagaattaaaccgccctgtcaactaatctttgatttatgtttgttcatttttttcacctcatttctttttgttgtttgtttgcttttttttttttttttttttgtttaagagacagggtctcagtctgtcacccaggctagagtgcagtggtggctcaatcatagctcactggagcctctg

SEQ ID NO: 133808 - DNA, 560 bp, Homo sapiens
ctgccatatgagttacggcagctctagcaaataaacacaagatactactagatgtcaggcaatagtagactcctgagatcttgcatcttgtacctgctcagtattggccaccttcgtcwtgtgtcaaaatccccctggatattaacatacatgtgttcaagttctaccccaaagaatactgttgcaattggtctggaggtgatttcctggtgattctaatgagcagccaggattgagaattatctttccagatctttgagtcattggcctttcttttccttcgggtctgggctcaaaggtcatgtccacagggaagcccccaggaacaccccatccaaggtagccactcttatgacctcacactgttttggtttcctcagagaattaaaccgccctgtcaactaatctttgatttatgtttgttcatttttttcacctcatttctttttgttgtttgtttgcttttttttttttttttttttgtttaagagacagggtctcagtctgtcacccaggctagagtgcagtggtggctcaatcatagctcactggagcctctg

SEQ ID NO: 133809 - DNA, 560 bp, Homo sapiens
ctgccatatgagttacggcagctctagcaaataaacacaagatactactagatgtcaggcaatagtagactcctgagatcttgcatcttgtacctgctcagtattggccaccttcgtcatgtgtcaaaatccccctggatattaacatacatrtgttcaagttctaccccaaagaatactgttgcaattggtctggaggtgatttcctggtgattctaatgagcagccaggattgagaattatctttccagatctttgagtcattggcctttcttttccttcgggtctgggctcaaaggtcatgtccacagggaagcccccaggaacaccccatccaaggtagccactcttatgacctcacactgttttggtttcctcagagaattaaaccgccctgtcaactaatctttgatttatgtttgttcatttttttcacctcatttctttttgttgtttgtttgcttttttttttttttttttttgtttaagagacagggtctcagtctgtcacccaggctagagtgcagtggtggctcaatcatagctcactggagcctctg

SEQ ID NO: 133810 - DNA, 623 bp, Homo sapiens
gaatttagtgtctgcaaattataccttaataaaaaatgaaaaaaaaaaacgtattagaaattggtcattctcctgtataaatatattggtacttattttactagaaaactaatgtgttaatatatttaccaacagataaaattagctccattggaaaaatacctgtgatttttaataatgggttaaagtcatcgactttggaatccaactgaccttaggtcagatgttggcccagccacctaaaagtaccacctgtggcaagccacttcactttgcttagcgtcattgttctagctgcaaaataggactcagagtgcttatatagctaggtcaattgcctggaagaattctgttattggtcttgatagcaactgtcttaccatagtgttaacacayagtctatgatcaatcaaacatagtatggaagtgattatggtgctgctggttcttctggacttcttcaccctcagaatggtttcctgcccttcctcttctctgctctatattacaatgggggcttcccctgtgcagccgaatttcctaggattctacagttgctacctttctattgggtttggccaatggaaggtactggcaggaaattggatagcaagggaaaaagg

SEQ ID NO: 133811 - DNA, 623 bp, Homo sapiens
gaatttagtgtctgcaaattataccttaataaaaaatgaaaaaaaaaaacgtattagaaattggtcattctcctgtataaatatattggtacttattttactagaaaactaatgtgttaatatatttaccaacagataaaattagctccattggaaaaatacctgtgatttttaataatgggttaaagtcatcgactttggaatccaactgaccttaggtcagatgttggcccagccacctaaaagtaccacctgtggcaagccacttcactttgcttagcgtcattgttctagctgcaaaataggactcagagtgcttatatagctaggtcaattgcctggaagaattctgttattggtcttgatagcaactgtcttaccatagtgttaacacatagtctatgatcaatcaaacatagtatggaagtgattatggtgctgctggttcttctggacttcttcaccctcagaatggtttcctgcccttcctcttctctgctctatattacaatgggggcttccccygtgcagccgaatttcctaggattctacagttgctacctttctattgggtttggccaatggaaggtactggcaggaaattggatagcaagggaaaaagg

SEQ ID NO: 133812 - DNA, 623 bp, Homo sapiens
gaatttagtgtctgcaaattataccttaataaaaaatgaaaaaaaaaaacgtattagaaattggtcattctcctgtataaatatattggtacttattttactagaaaactaatgtgttaatatatttaccaacagataaaattagctccattggaaaaatacctgtgatttttaataatgggttaaagtcatcgactttggaatccaactgaccttaggtcagatgttggcccagccacctaaaagtaccacctgtggcaagccacttcactttgcttagcgtcattgttctagctgcaaaataggactcagagtgcttatatagctaggtcaattgcctggaagaattctgttattggtcttgatagcaactgtcttaccatagtgttaacacatagtctatgatcaatcaaacatagtatggaagtgattatggtgctgctggttcttctggacttcttcaccctcagaatggtttcctgcccttcctcttctctgctctatattacaatgggggcttcccctgtgcagccgaatttcctaggattctacagtwgctacctttctattgggtttggccaatggaaggtactggcaggaaattggatagcaagggaaaaagg

SEQ ID NO: 133813 - DNA, 557 bp, Homo sapiens
ctgtttcacgttctaggcacctgctcaggcacattcaaatttagcacctcatttagtcctcactacaacctcggagctaaatcccatcttccacattttcagcagaaactgatactagaaattatatcactgcttaaatgtctgtcactgtatcaaagagaatttttgtcactgccctgtctaaaatagcatgtacacagtcacacacacattttcacctcacctgcttcatttatatttacaatttctatcaccactcaactccaacatgtatgttatcttctttttttatttttgaaacaggggtcccactctgttgyccaggctggagtgcagcagtggtgcaatcacagctcaccgcagccttgaactcctggactcaagcaatccagcctcctgagtagttgaaactataggcacacaccaccacactcagctaatttctatttaatttttttttttgtcgagacagggtcttgctttgttgctcaggctggtccccaactcctggcctcaagtgatcatcctcccttggactcccaatgtgcaaggattgc

SEQ ID NO: 133814 - DNA, 440 bp, Homo sapiens
ctacaacccaagagttctttctcttctactacgaatagctcaagtttcccctcttcctgaagtatctcttctataagtatactgattaagtccattattgagacattttattatccccggtctctttttaaaattatgtgtacaattactaagttagcacatcgtatttctgcttgtgctagtctgttctattgaatctgtctctttcttccttctccaaaaattatttaggttctgtatactaggcactgagtttgaaagacaagccagaatgcaattttttattttgagggattcacaacaagtggaacagatggaccraatattagggcattggaatatagcatggtaagcactgtaggactggaacccagaaaaggaatcttcaactctaccctaggatgagcagagaaagaaggcttccctgaggaggtgaaatg

SEQ ID NO: 133815 - DNA, 451 bp, Homo sapiens
tctttctcttctactacgaatagctcaagtttcccctcttcctgaagtatctcttctataagtatactgattaagtccattattgagacattttattatccccggtctctttttaaaattatgtgtacaattactaagttagcacatcgtatttctgcttgtgctagtctgttctattgaatctgtctctttcttccttctccaaaaattatttaggttctgtatactaggcactgagtttgaaagacaagccagaatgcaattttttattttgagggattcacaacaagtggaacagatggaccgaatattrgggcattggaatatagcatggtaagcactgtaggactggaacccagaaaaggaatcttcaactctaccctaggatgagcagagaaagaaggcttccctgaggaggtgaaatgtaaggcagatcttgacagatgaggag

SEQ ID NO: 133816 - DNA, 460 bp, Homo sapiens
ttctactacgaatagctcaagtttcccctcttcctgaagtatctcttctataagtatactgattaagtccattattgagacattttattatccccggtctctttttaaaattatgtgtacaattactaagttagcacatcgtatttctgcttgtgctagtctgttctattgaatctgtctctttcttccttctccaaaaattatttaggttctgtatactaggcactgagtttgaaagacaagccagaatgcaattttttattttgagggattcacaacaagtggaacagatggaccgaatattagggcattggaatatagcatggtaagcactgtaggactggaacccagaaaaggaatcttcaaytctaccctaggatgagcagagaaagaaggcttccctgaggaggtgaaatgtaaggcagatcttgacagatgaggaggaggagaaaacgaattc

SEQ ID NO: 133817 - DNA, 327 bp, Homo sapiens
ctcttcccagaccttggtttytaaataccattctcagagatatgtctgagtctaaagctggggaaggaaatacaaaatatgagactagagtattttatagtgccagaaagtaagagagtggtaataaagaaaaaaaaaggcaaggggatacgaagggaaccccagagccaactggaaagaaactgcagtgccaaagactggaacaatttgagaaacaaaataaataaagtagcattggaataaaacctaaagtataaaataaacatacacaagtttttgctgataataaataaatgagaaaaaagagccaaatattcctcacagaac

SEQ ID NO: 133818 - DNA, 396 bp, Homo sapiens
cagtacatgatccaggggctaaaaataagaccagaaaggttcattattacccatttcttgcctctgatttctaattgtagattcatcatcaagctctacaagatggcctttggcagctaaccaagctcacatcctcccaagttcaagtgcaaaagtgaagatagcatctcacccacaaaggttcaagtaattgtcatgggcctgaargcctctgcctccaattaatcccatgcccatccctgaactaatggctgtggtcagagaatgggacgtactgatttcctcacccatgggtctgaaggttaagagaattaggtactcctccaaagaaacaaaatgcattcagggtatttttatcagaataggatgagagggtttgagatgggaatagcagag

SEQ ID NO: 133819 - DNA, 397 bp, Homo sapiens
gctgctcttttcctccttacgctcagcatttagcacagaaactcgcacagaacatattcccagtaaatgtttgctggattgactgtcagtagtatgcccataggcatgggctcagaaggaccagttgtattgtatcttctcaattccacatctggggactttacactggtagcatgaaattggccatcgtgggaatatttgcagaagggaatacaaatgctgtaaaatcagagcccgtttccttatcctgacccacccakagagccagttgttaaacacctagcggcacaccattgcgtgagcttcccagatgaacgatttcaacacaggagtatcaaatgtatatctgctattgctagtctggtggtaagcacaaactaagcagagaagttagaga

SEQ ID NO: 133820 - DNA, 565 bp, Homo sapiens
tgggaacagggtgtggggagggcattctcaggattgtgcaaggagcaaagcagaccagggcctttgggtttctcctttgaaaagaggtgatggagtcaaaatcccaggttttggaggagcaaagcagttcgaaggggcggagtgcaggtgggtcaccacttctctgcttcttccaatctctcaatcagctgaaaaggaaactgagataaacactcatgtttggagggcaaaccaccaatttgcatagatttaggcaggaaagagcccttttggctctcttcctctttggcttgcttccaaaggctcttgaagagcytctctcatgtagacccctacgttagggtagacttttgaacccaccctctggttggctttgggggaaagaagacaggagtctgaaacacccatcccatgcacttcacagttataccaaagacctggtgtgagcatttggagcaaatgcactgaaaacccactcatccttggctagttcttagatgagtccattaccaagccaggcagaatttctcatgaaagggggctctgggttatcccaaggagtggg

SEQ ID NO: 133821 - DNA, 555 bp, Homo sapiens
tttttctctaaaatggagaacatcttatggaaagaaaaagtagctactttccccctaggggaaagcagtaggccaggagaatggacagaggcaatgaatttgtaactgttaagagaaaggttcattcccaataacacaggtcacataatggtctttcagagaaagccaatctctgtttcctgtgtctaggctgcaggaaatctcaccttgcctgtggtcaatcttgggtcaaataagctcygccaaaaagagaagggatttttctccttgagctgggggcacttctttttgaaaggttttgctttcttaggcaggtaaccaacaggcttttgaatttggtaaaatgtcttcaattgcacacgttcaaagaggcagatgggtttttagacctcataagttttattacttctttcttctgagctctgtatccttaggcaagtggctaaccctctctgaatccctgtttcttcattttgaaaaagtaggagctctatggaggtctctgagtcccttcagttcttactcctgggcacagagccagcattgtctcactct

SEQ ID NO: 133822 - DNA, 512 bp, Homo sapiens
gaattcagaccccaaaccatatttgggtttgagaaggtaccagaacttccatagaaactgcaactatcctatgaagaggaccgagtctgggatgggagaagaatttagccttctccccagggccagctgatctcctgtgatgagaagtatttcaaatcaggctgtctgagttcagatgtgccagggaagtcagactcctgtagtctccgaggaacccttttaattttcagtttattttgcccttcttattgagtatttagtatgggttgtgttgttctaaacagtttacttgactgtaatcctgcccaaaattttaggaggtactattctgttatccatgttttacaaayaaataaaacctagggagtttaggccctaagtgatgacagtggaatttgaacacaggtcatccttcatcatagccagcactctttcaactacagctgtgtctcctaaatgcactttattcaccatgtagggcattcccagtccctcaatggcttcagtcattg

SEQ ID NO: 133823 - DNA, 538 bp, Homo sapiens
cggtaacttccaataaagttggtgggtgttacattaatgactagactcttagtcacctcaaaggaatgaaaatcagatgacaccaggatggtggagggaggggagatattagcaattctgattacagatatgaatgtaatttcaggggcgttttataattgcttttatgctttgattaagtgcctcacgtaatactgggctacaagatgggacgctggagagacacaaggaaacccaagattatttactagccttaatgccagtgccctgagaaggccgaagagggcatatgtttgatcatcaaatgcaacacaaaacctttacttctcagcttgccctgtgtgctttaacactcacaaacaacctgcaaacacactgctgcatatgtgtgtagcaaataccagtttasggttagttatagaaattcccaaagaattaagggcattttctaaaaaggttaaggggtggaggtgtcggggactggtaataagtccaaaagctctgtatcatctgcatttgccatctcattcctattcca

SEQ ID NO: 133824 - DNA, 574 bp, Homo sapiens
tgaggtctccttcttccatgacagtcattactgcctccccagttagagataataagcttgaatttcccaagcagatgtgagttgctcaagtcttgactattcttgtaaaggccatccaaaacccagagtgatgttctcgaggaaggtactataagactaaatcttcattaccattcccaatggacgtacaaagaggtccctaataaataaacttgctgagtgsacaactctggcccagacctttaaccccatttcctcacatagcatttctatcgcctacatttaggctgcgttgcccctgagcaactcactggactcattcataagaaaggaggtggaatttggccaatcagtgcttggctagtgattgcctaaataaacaaatagtgcagttagttaaaatgagtcaaacccttggttaacccattcagttttgttttgttaagaacttacaatattacttttttaaattaaagactttttttattgtgagaaaactgtacattcaaaagcagttgtaagaaataatgcaaagagattccatgtagactttacctcgttttccccaatggta

SEQ ID NO: 133825 - DNA, 393 bp, Homo sapiens
ggtttcccaccataatctcaccacaggggccacgctgatcaatgaacaatggctgctgaccacggctaaaaatctcttcctgaaccattcagaaaatgcaacagygaaagacattgcccctactttaacactctatgtggggaaaaagcagcttgtagagattgagaaggtggttctacaccctaactaccaccaggtagatattgggctcatcaaactcaaacagaaggtgcttgttaatgagagagtgatgcccatctgcctaccttcaaagaattatgcagaagtagggcgtgtgggttacgtgtctggctggggacaaagtgacaactttaaacttactgaccatctgaagtatgtcatgctgcctgtggctgaccaatacgattgcat

SEQ ID NO: 133826 - DNA, 393 bp, Homo sapiens
ggtttcccaccataatctcaccacaggggccacgctgatcaatgaacaatggctgctgaccacggctaaaaatctcttcctgaaccattcagaaaatgcaacagcgaaagacattgcccctactttaacactctatgtggggaaaaagcagcttgtagagattgagaaggtggttctacaccctaactaccaccaggtagatattgggctcatcaaactcaaacagaaggtgcttgttaatgagaragtgatgcccatctgcctaccttcaaagaattatgcagaagtagggcgtgtgggttacgtgtctggctggggacaaagtgacaactttaaacttactgaccatctgaagtatgtcatgctgcctgtggctgaccaatacgattgcat

SEQ ID NO: 133827 - DNA, 602 bp, Homo sapiens
gctttacgaaatgccatgtgaaccttcacagtgctgtctgactgaggagtatggctggacagatattttgtggaggaagggctcatcccagaggcaggactctctaccagatccycggctactgactctctgaagccaggactttgctcatgtctccctcttcttgaacccttgttcttacatattctgttctgcctcttgcgtctctgttgagaccttcatttcttcatgccttgtctactgccatctgcccaggcaactccttttttgtattcaaaactcctgccatctgcttttcaaagtaggacttctcttggtgacagctgtgcctaaagaaatgattgtagtgaaaacaaaaacttggtcagagcttctagtgatgttttgtgccttccctcagtctactatcagagcaccttgcagattcccaagaaacacctaacaccacacctcaaatgggtgactaaggtagcaagtatcaagtcaggtgtgcaaaaagagaaagtaactctttctattactcagtgtttttgtttagccccattttcaccaaatggcagaaaacacaatcttagttatttctgagaaagcaccacgacttt

SEQ ID NO: 133828 - DNA, 415 bp, Homo sapiens
ttgctcctgcgccaaatggagcttctcccctgtgttctcgttgtgatttcccatttcctcctcatagagaatcacctgtaggtgtaggaataaatccacattgagcccatggaagcacgtaatgaggaaaggatgcggttgtaagattccctgcagagaagtcttgtatctgaaccagaagaccagatgaacagaagagaggctgcacagatctaaaagctacagtatgtaatatcaagatgctaatgattggaaacaaaaaaaggtggccctagttagaggtaagctccttcaaggcaggatcatatccatttcccattctgcccagcatgtggcagaaactcaatraatacttgctagttgattaataggaatgaatttgtatagctctgttttttaagggcttgaaatgctg

SEQ ID NO: 133829 - DNA, 568 bp, Homo sapiens
tttgaatcctgaagtgacctccccccaagcccacccacagggacattttctggcttcagcatttgaatgagrgtctgagaacccagaggtgtaggcagaggctgggcgggcctgaggaggccgggaggatttgctctctttgttcagagccaacaactacaggctcagtgtttttaaatgtttgaatcaacagagggactgtttatcactattttaaataagaaacgtaattaaaggttagtgagtccccagagctcctggccacgatgtcaaaggcttccttgacctggagcggggaacagaatgaaaagtgaccacagacacactccacttcggtgtgctctgccacagatcccgcctgatgggtgctcccaccaaggcccacaaaagattctgtggctaatggaatggcatttcacataggtccacgtttttctcattcctaggtggcttttctttctaaacttgggaacatggagattctattttaagagcatgaattactgtccaattttaatgtaactaatgcaaaccaaaaaccaactttgaactgaggaaaggaaacaaa

SEQ ID NO: 133830 - DNA, 511 bp, Homo sapiens
ttagaatggaccaattgaagaagaaagaaagaataagtgatctgacaaaatgtagtcactcccaagagtccgcctacactctaatattctcaaacctgctccaatccagacctcaactctgagttctgggtctgaagatccaaattctgtctggacatgtctatgcaaatgtcccccaacaccacaaactctgccttcacccattcacccacccccactgccagtgagcaacttcactagccatacagttacctgaaccaggagacctctgaataaattcctggtccattttcctttttgttttttttgtttttgagacagaatctcgtgctctatcgcccaggctggagtacagtggtgctatctcagctcactgcaacattgacctcctgggttcaagcgattccctggcttagcctcctaagtagctgggactacagrctcacaccaccacacccagctaatttttgtgtttttactagagatggggttttaccatgttggccatgct

SEQ ID NO: 133831 - DNA, 558 bp, Homo sapiens
ctgagatctcaccattgcactccagcctgggggacaaaagcaaaatcccatctcaaaaaaaataaaaataaaaataaacaaataaacatgacatacattttactccagaatacatctacctttgttcagtttatacaatttttaaattgctttctggtgcaatcacctaattctctttgaaaagcagaatctggcctgctgagaagccagataaaaggctcagcccttgaagccatcattctgcaggaagcatcctgagactttaccacgagatggcagccgctgcctagagatgctacaagcagccgaggccacctccgtaacacctcgcaataagctcacagaatactagagggccctgagaactgttggtaggggcaggggctgcatccgaaaacatctcctggtcaggggccgtcctccccatgcaacaacaggtacacactcccrccctcattcacttcaagagtcctgttatcttccacacagctgtgcctattatacatacgcacacatacacatgcacataaccaccctgcacaagatgtccaagctgag

SEQ ID NO: 133832 - DNA, 508 bp, Homo sapiens
atagtgtggcctcctcaaaacaatcattacacacaaaatgagttatcttttcatatttcttaaatttttttttttttttgagatggagttctgctgttgttgcccaggctggagttcaatggcatgatcttggctcaccacaacctctgccttccaggttcaagtgattctcctgcctaagcctcctgagtagctgggattacaggcatgtgtcaccatgcccggytaattttgtatttttagtagagatggggtttctccatgttaatcaggctggtctcgaactcccgacctcagatgaaccgcccgccttggcctcccaaagtggtgggattacaggcgtgagccatcgcgcctggcctaaaattgtttaaataattacaaatttgttaaaacagacctgggatgatgccagagcctgctcagcttacccggccactcttcaagacttcgctgttctcacccagggctagttctgcagatgccttgcaaaattcagccagtcccc

SEQ ID NO: 133833 - DNA, 508 bp, Homo sapiens
atagtgtggcctcctcaaaacaatcattacacacaaaatgagttatcttttcatatttcttaaatttttttttttttttgagatggagttctgctgttgttgcccaggctggagttcaatggcatgatcttggctcaccacaacctctgccttccaggttcaagtgattctcctgcctaagcctcctgagtagctgggattacaggcatgtgtcaccatgcccggttaattttgtatttttagtagagatggggtttctccatgttaatcaggctggtctcgaactcccgacctcagatgaaccrcccgccttggcctcccaaagtggtgggattacaggcgtgagccatcgcgcctggcctaaaattgtttaaataattacaaatttgttaaaacagacctgggatgatgccagagcctgctcagcttacccggccactcttcaagacttcgctgttctcacccagggctagttctgcagatgccttgcaaaattcagccagtcccc

SEQ ID NO: 133834 - DNA, 634 bp, Homo sapiens
gtacctacctcacagcactgctgtgaagattaaacagttcatatctaaagcacgagaactatgtctggccgacagtaaggattayataaaatgtcagctgtaactgccttcctactcctatactccagccagtcttgccacaggcctgcctctccagcaaggcctgaagtcactactgggtccccaccactcatgccaagttgaggtcacagctcacacgtgtccctcttacctagagcaaagacatggggtcgttcactccagtgtccatttagggaactacctcaccaagcaaattttatgaattgttcacacttccccttatcaagattaatggcacaattgcccaccgtcagtccttctgtggtcacagctaatgacttcaaccctcaacacgtttcctctgcatttgcttcagaaaatcattctgaacagcaagactgctttaatagccacttggtactaatgatgccttttaagtgcataaagagaatctctaagtaccaaacggaaggcccatccactggtgacaacagctattgacattggcaagcaacacaaggtcagaatagctgcggtacatggggacgcttactcggtctaacagtagggaattgttttaatatgctagaaa

SEQ ID NO: 133835 - DNA, 631 bp, Homo sapiens
aactggaatgatgtctggaaggggatcagggctgaagagtgtggtctttagggttggattttaacaccatggacttactgtgtcacttaaggtaagtcccctgcccaaactgagctgcagcccagatgagaatctgtaaggtgaggacagcgtcttctatttcttctgtttgctcrtgggggaatcactgggttctaatgagatctgataacatgaggaaacaggatgccctcaaactttaaaggaggatacattggtcagggtctgatttggaaaatggggcccattccagagactctaatcaatggaattgaatgcagaaaattagatacaaaagtggtggagaactgcagagccaaatagagggggcagaggcaactcaaagctggtggcagcagtgctggaaggccaatggtagtgttaccagagtccacggcctggaggcagaggttgcctagcccccaagctggagccacagagcccagtggagaagccatccaaagcaagagggggtggggtgggagagaaatgcccaggctcttcactttctcctgtcctccagcctccccacattccctctcccttctccccacagttggcccaccccatccagaagtcagttggcaaggga

SEQ ID NO: 133836 - DNA, 580 bp, Homo sapiens
ttttattagattagtaatagtggtggtgataaattggaccgagcaagagttgatgtaatgraccctcctggccccaagcacaaggctgtcatctccgtttaccttgcttcttcattctggcctgggttataagtgattgtgtgtctgtctctctcccctctggatttgtcagcacctggagggtacagcccttgtctcattcacttttctacctcccaactccccatggcaataagcacagagaggtccttaatcaacgcaccggataggatattcagtaaaacctcaattagttggaaacctcattgaactgagttttataaatgactgtccactgggaggaggacaaagcgaatgtgagaaataagctccaggataagatggtttctgttgcttttttgcttttgtctttaaagcatttttttaagagatggggtctctctgtgttgcccaggctggaccatagtggctgttctcaggtgcagtctcattactgatcatcactggagttttgagatgctccatttccaaccagctggttcatccctccttgggcaacctggtagccccccctccctcc

SEQ ID NO: 133837 - DNA, 325 bp, Homo sapiens
tgactaaatggtttcatgtgtagtttcttggtgtccgtgagattgaaatagagcttttagaggcctgagcaaaaccatctattcatttgagttaataacaactgctgacaaacactatcttttccatcttgctgataaattatgcctttcrtgatggacatctgattgtaaggctcttggcagtacttgaaggcatttaacttaaaaccattattagattttagtatagtcctcccttgataccccaatccaaaaataagaccttgaggtacctctgagatatttaagtatacgttttcttaggagaccaccctcgcaccaaagg

SEQ ID NO: 133838 - DNA, 609 bp, Homo sapiens
tctctattcttgacttccagaggccctgcatgtttccatttactcatttacactcccatcattgccttgagaagtccattcctggatcaatccactgatgccaggagaaggatgagagatgtgtgaggcagaactgcccagctaagatgtcccagccaacccagcctacagcacagccccagctgacctgcagatatgcaagtgtgcaagcctagatcagccaacctctagctgaccaccataactaatgggaaacaaactatcctggtatgacactaaagtgatgtgattgttatataacattactgtggtcccaattaatcaatacaattaacataatagatgctaatagttattgagcacttactatttgccaggccatgtattaattattccgtatatgttagccatttaattttcacagtgaccataagacactgggactgttatcctcattttacagatgaagaaactacaacacagattattgacatctgtgctgagctccaggaaccccrgaagacttgatttgggggaatggcatattgaagggtcattgacagggctgagaaggggaaaacagaaagttggaaaatagttgactatgct

SEQ ID NO: 133839 - DNA, 456 bp, Homo sapiens
ctaaaggatactttatttgctaaatgcygggatgatttacaagtttatgccatttttcagggaggaatagacaggtggaagggagtaaaggaaagcagaagagggaagtagagtaaaggcaggccacttttgtgacccaggaataccttatgtaagttcatcattttaatgattgctaaaactttaactgataattggaatcacttcaggagcagagccaggacaagggtgagctagtgaagtatctagaatgcagcatttaaggaagcactcattctcagggacatgcaagcacaggatcacctcctgagagtgagtgcctccttaaattttaaaaactaggcagtttctttacctggtcctagtcccaaccctgttgggagccttaaaaactactaatttctgagccatcccgccccccagcccacctctgatttaacgtgtctagggatcaac

SEQ ID NO: 133840 - DNA, 555 bp, Homo sapiens
gaaatggaaatgatggagttagagaaccatacaacaatggtaatgatttcagaaacatggtgttgagcagaayaaagcagacacaaaagagtacctatggcatggcatgcatctgtatacgcgaaattccagaataagcaagctaacctatgataagaaagagactggctgggaagagtgagagttcactttctggggtgacataatagtgtagatcttggctgggcacggtggttcacgcctgtaatcccaacactttgggaggccgaggcgggcggatcacctgaggtcgggagttcaaaaccagcctgaccaacatggagaaaccctatctctactaaaaatacaaaattagctgggagtggtggcacatgtctgtaatcccagccactcgggaggctgaggcaggagaatcgctcgaacctgggaagcagaggttgcggtgagctgatattgccccattgcactccagcctcagcaacaagggagaaactgtctcaaataaataaataaataaataaataaaataatgtagatcttgaacgggggttggtt

SEQ ID NO: 133841 - DNA, 555 bp, Homo sapiens
gaaatggaaatgatggagttagagaaccatacaacaatggtaatgatttcagaaacatggtgttgagcagaacaaagcagacacaaaagagtacctatggcatggcatgcatctgtatacgygaaattccagaataagcaagctaacctatgataagaaagagactggctgggaagagtgagagttcactttctggggtgacataatagtgtagatcttggctgggcacggtggttcacgcctgtaatcccaacactttgggaggccgaggcgggcggatcacctgaggtcgggagttcaaaaccagcctgaccaacatggagaaaccctatctctactaaaaatacaaaattagctgggagtggtggcacatgtctgtaatcccagccactcgggaggctgaggcaggagaatcgctcgaacctgggaagcagaggttgcggtgagctgatattgccccattgcactccagcctcagcaacaagggagaaactgtctcaaataaataaataaataaataaataaaataatgtagatcttgaacgggggttggtt

SEQ ID NO: 133842 - DNA, 555 bp, Homo sapiens
gaaatggaaatgatggagttagagaaccatacaacaatggtaatgatttcagaaacatggtgttgagcagaacaaagcagacacaaaagagtacctatggcatggcatgcatctgtatacgcgaaattccagaataagcaagctaacctatgataagaaagagactggctgggaagagtgagagttcactttctggggtgacataatagtgtagatcttggctgggcacggtggttcacgcctgtaatcccaacactttgggaggccgaggcgggcggatcacctgaggtcgggagttcaaaaccagcctgaccaacatggagaaaccctatctctactaaaaatacaaaattagctgggagtggtggcacatgtctgtaatcccagccactcgggaggctgaggcaggagaatcgctcgaacctgggaagcagaggttgcggtgagctgatattgccccattgcactccagcctcagcaacaagggagaaactgtctcaaataaataaataaataaataaataaaataatgtagatcttgaamgggggttggtt

SEQ ID NO: 133843 - DNA, 424 bp, Homo sapiens
ccacaccctccaaggtgcagctgcagctgcccaaactgcagctggggacccaggcatccctgcactcttgggggcccaggaaggccctgcctagccttgcaggcttggaaatgcctgctcctgctgccaggcttctccctgctgtcagtgcccactctgatctccaagcaaagttcagcctagcccaggcaccatgaacagcagcaggaggcagacaggttcctgggtggaagggtgtgggtcccctgtgaggccccaccttctggccacagaaggcctgaaggctggggactgggmtacaagtcccatggaccagagtgggaacttgtggtgccttttccgtacctgcccatgggcacccatggaacgattgtcatgcacatcctcccctctgagcccataaaagctccccactcagacagag

SEQ ID NO: 133844 - DNA, 424 bp, Homo sapiens
ccacaccctccaaggtgcagctgcagctgcccaaactgcagctggggacccaggcatccctgcactcttgggggcccaggaaggccctgcctagccttgcaggcttggaaatgcctgctcctgctgccaggcttctccctgctgtcagtgcccactctgatctccaagcaaagttcagcctagcccaggcaccatgaacagcagcaggaggcagacaggttcctgggtggaagggtgtgggtcccctgtgaggccccaccttctggccacagaaggcctgaaggctggggactgggctacmagtcccatggaccagagtgggaacttgtggtgccttttccgtacctgcccatgggcacccatggaacgattgtcatgcacatcctcccctctgagcccataaaagctccccactcagacagag

SEQ ID NO: 133845 - DNA, 562 bp, Homo sapiens
aaacaatcttgaaattagtattcttcaactacttgtttttaatattaaagtgagtattgttttgtaggaggaaatagacagacatcttttgatttcttcaaaagaagtattaagacattatataacagaggtttcaaattcatgaagaggagaaagaagagactgagaaactgacactataggcattactttagggtaacaagcatttagcttgcttgccaccactaaatgacaaccttgtgtgtttgggaggtactagctttctggttctcttctgataagtgggtcgcaggactgaaggctatacaccatattctccagcacttctaaaaacacatgaaaacagccaggcacggcggctcacacctgtaatcccagcactttgggaggccaaggcaggcagactgyctgaggtcaggagtttgagaccagtctggccaacatggtgaaaccccacctctactaaaaatacgaaaaaattagccagacgtgatggcacgtgcttgtaatcccagctactcgggaggctgaggcaggggaattgcttgaaccagggaggtgg

SEQ ID NO: 133846 - DNA, 607 bp, Homo sapiens
caaattaggcttttgataaacaaaatggaayaccttaagtgtaattataatgtagaacttattacatttataaaatcagtttagaggggcaaaaaagaactagactgtccttctttcaggccttgggagagacttgatgagggtaaatttagtttgcatcggaaattttctagaaaaggatggggaaatacaaagactatggagacagcagcataaagtgctgagcacaattgccggtgctgagtcctaaggaagcagaagttatgccctcagtctccattccaggaaggcatcatggccccgcaagtcgggatcaaagccagcacgcctcctgaggctaggattctttatttcagcgcagcctcatcctcagttgcctgcgtatcactagtggatggtccagatgaagtgacatcatgcattcttcaagatttccatgcccatcagaaataatcctgttccaactatcttgtatgaatacacacctgctcatgtcctggggtacttgtaaagccatttctatggttacggcatccacaaggcagtggctgggacaaaggaaagccccatcattctatgtgggtggcactgaacatcacagaaaact

SEQ ID NO: 133847 - DNA, 607 bp, Homo sapiens
caaattaggcttttgataaacaaaatggaacaccttaagtgtaattataatgtagaacttattacatttataaaatcagtttagaggggcaaaaaagaactagactgtccttctttcaggccttgggagagacttgatgagggtaaatttagtttgcatmggaaattttctagaaaaggatggggaaatacaaagactatggagacagcagcataaagtgctgagcacaattgccggtgctgagtcctaaggaagcagaagttatgccctcagtctccattccaggaaggcatcatggccccgcaagtcgggatcaaagccagcacgcctcctgaggctaggattctttatttcagcgcagcctcatcctcagttgcctgcgtatcactagtggatggtccagatgaagtgacatcatgcattcttcaagatttccatgcccatcagaaataatcctgttccaactatcttgtatgaatacacacctgctcatgtcctggggtacttgtaaagccatttctatggttacggcatccacaaggcagtggctgggacaaaggaaagccccatcattctatgtgggtggcactgaacatcacagaaaact

SEQ ID NO: 133848 - DNA, 607 bp, Homo sapiens
caaattaggcttttgataaacaaaatggaacaccttaagtgtaattataatgtagaacttattacatttataaaatcagtttagaggggcaaaaaagaactagactgtccttctttcaggccttgggagagacttgatgagggtaaatttagtttgcatcggaaattttctagaaaaggatggggaaatacaaagactatggagacagcagcataaagtgctgagcacaattgccggtgctgagtcctaaggaagcagaagttatgccctcagtctccattccaggaaggcatcatggccccgcargtcgggatcaaagccagcacgcctcctgaggctaggattctttatttcagcgcagcctcatcctcagttgcctgcgtatcactagtggatggtccagatgaagtgacatcatgcattcttcaagatttccatgcccatcagaaataatcctgttccaactatcttgtatgaatacacacctgctcatgtcctggggtacttgtaaagccatttctatggttacggcatccacaaggcagtggctgggacaaaggaaagccccatcattctatgtgggtggcactgaacatcacagaaaact

SEQ ID NO: 133849 - DNA, 607 bp, Homo sapiens
caaattaggcttttgataaacaaaatggaacaccttaagtgtaattataatgtagaacttattacatttataaaatcagtttagaggggcaaaaaagaactagactgtccttctttcaggccttgggagagacttgatgagggtaaatttagtttgcatcggaaattttctagaaaaggatggggaaatacaaagactatggagacagcagcataaagtgctgagcacaattgccggtgctgagtcctaaggaagcagaagttatgccctcagtctccattccaggaaggcatcatggccccgcaagtcgggatcaaagccagcacgcctcctgaggctaggattctttatttcagcgcagcctcatcctcagttgcctgcgtatcactagtggatggtccasatgaagtgacatcatgcattcttcaagatttccatgcccatcagaaataatcctgttccaactatcttgtatgaatacacacctgctcatgtcctggggtacttgtaaagccatttctatggttacggcatccacaaggcagtggctgggacaaaggaaagccccatcattctatgtgggtggcactgaacatcacagaaaact

SEQ ID NO: 133850 - DNA, 428 bp, Homo sapiens
gtcaaaacaaggtgtttggggggacaataattagaaactctctttagcaaaaatatcacttggattatgggtttattattccaacatatattgtgatagatagaataatacactcatgatattttatggctcatctatcaagaggagctcatctattttwttattattattatactttttaagttttagggtacatgtgcacaacatgcaggtttgttacatatgtatacatgtgccaagtccaacaatgatagactggattaataaaatgtggcacatctattttctttatgccttgaatatgagctgctcatagaagttgcgtttgaccaacagaatgtggtagaaatgatatcgttcgactttcgaagctagacttgaagattcttacagctgcggttttcatctcttaaaatcgtgaccatcat

SEQ ID NO: 133851 - DNA, 428 bp, Homo sapiens
gtcaaaacaaggtgtttggggggacaataattagaaactctctttagcaaaaatatcacttggattatgggtttattattccaacatatattgtgatagatagaataatacactcatgatattttatggctcatctatcaagaggagctcatctattttattattattattatactttttaagttttagggtacatgtgcacaacatgcaggtttgttacatatgtatacatgtgccaagtccaacaatgatagactggattaataaaatgtggcacatctattttctttatgccttgaatatgagctgstcatagaagttgcgtttgaccaacagaatgtggtagaaatgatatcgttcgactttcgaagctagacttgaagattcttacagctgcggttttcatctcttaaaatcgtgaccatcat

SEQ ID NO: 133852 - DNA, 325 bp, Homo sapiens
ggcccataattccagccattttgtctgtcccagctgagatctcagacttgtgagagaggcctctcagaccatcccactcccactgagtcaccagctgactgagtatgcatgaatgagcgcagktgagaccagcaagagaactgctcaagcaactttagaatgatgaagatcataaactgttgttgttttaacccatttagttttgaggtgaattttatacagcactagctaatagaaaagtgtttacaaaattaatcttattaataaaagaaatattttaaaacatgggcaaaagagatgaggaatttaaaaagacattttgaag

SEQ ID NO: 133853 - DNA, 403 bp, Homo sapiens
ttacatgaagtacttacaaagatttctgtcttcatgcttcttctgtgataacttgagaatcatataaataacagaatttggcagcaatgtcaagtattctgttaaatatgttgaaatattgattatttaagtcagtgaccacctttcatatatttttctcgttggtcctaaatatagttcctaagtaaaatgagtatgataagaatttgaaagtaaaggcaccarcattatgtgtgtttatgttatgtacattttaaaaattatctttacttcttctaagaatctagtgaggaaagtatttctatttccatcttattaataaggaaattcaggctcagaggcattaggtagattactcagagttatacagctatgaagtggaggatttaaatggaaaggataa

SEQ ID NO: 133854 - DNA, 403 bp, Homo sapiens
ttacatgaagtacttacaaagatttctgtcttcatgcttcttctgtgataacttgagaatcatataaataacagaatttggcagcaatgtcaagtattctgttaaatatgttgaaatattgattatttaagtcagtgaccacctttcatatatttttctcgttggtcctaaatatagttcctaagtaaaatgagtatgataagaatttgaaagtaaaggcaccagcattatgtgtgtttatgttatgtacattttaaaaattatctttacttctyctaagaatctagtgaggaaagtatttctatttccatcttattaataaggaaattcaggctcagaggcattaggtagattactcagagttatacagctatgaagtggaggatttaaatggaaaggataa

SEQ ID NO: 133855 - DNA, 533 bp, Homo sapiens
tggcatacaaatattttttcccaatccgtagtttttttttcttcacactattagctgcttattttgctggacaaagccttttagtttggtatamttccattggtctatttttttatttttgtgcctgcacctctagggtcaatttttttaaaaaaatcattgcatagatttatatcttatagctttcggcctatgtttttctctagctttatgatttctggtctcatgtttaagtctaatccattttgagtctatttttctatatggtgtaaaataagggtccaaatccattcttctgcacataaatatcagttttcccaacactgtttgttgaagagatcatctttttcccattgcatattcttgggaccttgatcaaaaattaactgatgatacatgaatggattcctttctgggctctctactctgttacactggtccatgtatctgattatatgccagtgtatgctattttgattaccaaatatttgtaatctagttagtcaggacgtgtgatgcctccggtttgttct

SEQ ID NO: 133856 - DNA, 575 bp, Homo sapiens
atgctttatgacaatggtacttaagtgtgtatgtgtgtgattgtttctgtgtgttctatttatatttccctacgtaatgattttcttaaacaaaactacactccatttaccacartaaacaagccaaataagacagtctccttaaaatataggggaccatattgttacgcaatttggctattataaaaggaaagaaaccagccaggcatggtggctcacacctataatcccaaccctttgggagactgaggtgggcagattacctgaggacagaagttcaagaccaacctggtcaacgtggtgaaacccgtctctagtaaaaatacaaaaattagccaggtatggtggtgggtgcctgtattcccagctacttgggaggctgaggcaggagaattgcctgaagccaggacgcagaggttgtagtgagccgagatcgcgccactgcattccagcctgggcaacaaagtgagtctccatcaaaaaaaaaggaagaaaccatcatttaatatttgaaacaaaacgttgaattaattttgtttccagtgcaagggaacagtgaattttacggaatgatt

SEQ ID NO: 133857 - DNA, 551 bp, Homo sapiens
agtatttggaaaaatgtgaagtcctcaatgcaattgtcagaaaacaagaatgagtgaaaacaaatgaatgtccaccaccacacgcagttggaaggagcatcaacaatgtgaaactctccttttttttttgtaataatcagagaagttgggaaggggttccaatgagggaagcagtcagttataacaaagcctaaamtttctttttaatatgtctatcccagtggaccccaaacttactggaaaatagagcgttctttactctaacctgaaatactgaatgtgttgaattaggctgggtctgtgatactccattttagcaagcaacttagatgattgggacacaaacaataagaaatgttgtgtgtaattatgtgaccatgaatatctattggctgattatgtatacgatgctctgagctgagaaaaaaaaaaggaaattgggatagttggcaagctttcttatcacaaaataacatacacattttgcttttgtcctaaattcaacaaatgttaggtagacactgcttattgtttagtttgttatgcctgaa

SEQ ID NO: 133858 - DNA, 551 bp, Homo sapiens
agtatttggaaaaatgtgaagtcctcaatgcaattgtcagaaaacaagaatgagtgaaaacaaatgaatgtccaccaccacacgcagttggaaggagcatcaacaatgtgaaactctccttttttttttgtaataatcagagaagttgggaaggggttccaatgagggaagcagtcagttataacaaagcctaaactttctttttaatatgtctatcccagtggaccccaaacttactggaaaatagagcgttctttactctaacctgaaatactgaatgtgttgaattaggctgggtctgtgatactccattttagcaagcaacttagatgattgggacacaaacaataagaaatgttgtgtgtaattatgtgaccatgaatatctattggctgattatgtataygatgctctgagctgagaaaaaaaaaaggaaattgggatagttggcaagctttcttatcacaaaataacatacacattttgcttttgtcctaaattcaacaaatgttaggtagacactgcttattgtttagtttgttatgcctgaa

SEQ ID NO: 133859 - DNA, 393 bp, Homo sapiens
aactgactttttttcagagtgggatttaggttttcatccctcttgggagcacctagtataggactctgaaatattctttttcctggtaccttgagttatagaacacacaaacaagaaatctgcttatatattgatagagaatggacacaaagaaacaagatcgtcataactggaaygggaatcaaaattgcatttgacgaagggaacccctgatatggatttccctgaagcccactcactgaagaagggaatcggtattctacaaaggcactttagactttaaataaaatgttggacaatttgtcaaacattatccaatttttaaatatttcttaagaaagtaaaatggttatctttaacttttttgtaaatatttattctttttttatcatt

SEQ ID NO: 133860 - DNA, 579 bp, Homo sapiens
gtcaggtgaaaaactgaggcaagctttaaatctcttcatatttgacccatttctttctcaattacatatctaggtatcactgacaaaaattaaaccacttcagcacttttcttagaagttgattaaagcctactttgctgttattgtcaattgttcttggcaattctctcctcagttagtaaaatggatattttaaagagaagtttaattcttaaatgctatctttgatgaaataaaaattgtgctttcatagctgagttcttgtaaatgaggatgatatttttgtgtcttcctgagatagtctacccactggaaaggatcccctgccctctctcaggttaggctgatgtttgagtaatttttgttcctcctargcaaaataatgcagatgtttgttcttgtctagcatgatgaagaaaaatcagtgtcactatataagtgaaatatgtttaatttaaaaaggagtatttggagagggatcaggaagctggcttccacttctgcatcatctatagtaattttgaacagctatttttaaaaaaaaaaataaaatcaccatattccttttttcattttcaa

SEQ ID NO: 133861 - DNA, 579 bp, Homo sapiens
gtcaggtgaaaaactgaggcaagctttaaatctcttcatatttgacccatttctttctcaattacatatctaggtatcactgacaaaaattaaaccacttcagcacttttcttagaagttgattaaagcctactttgctgttattgtcaattgttcttggcaattctctcctcagttagtaaaatggatattttaaagagaagtttaattcttaaatgctatctttgatgaaataaaaattgtgctttcatagctgagttcttgtaaatgaggatgatatttttgtgtcttcctgagatagtctacccactggaaaggatcccctgccctctctcaggttaggctgatgtttgagtaatttttgttcctcctaagcaaaataatgcagatgtttgttcttgtctagcatgatgaagaaaaatcagtgtcactatataagtgaaatatgtttaatttaaaaaggagtatttggagagggatcaggaagctggcttccacttctgcatcatctatagtaattttgaacagctatttttwaaaaaaaaaataaaatcaccatattccttttttcattttcaa

SEQ ID NO: 133862 - DNA, 543 bp, Homo sapiens
ggactgggcaatttatattaaaaaaagaggtttaattgactcacagttctgcgtggctgagaaggcctcaggaaacttacaatcatggcgaaaggcaaagaagcaagcaacttcttcaaaaggcgcaggagagagagagtgaagaggaaactgccatttttgaaaccatcagatctcataagaactctctcactattgcaagaagagcatgggaaacctgcctccatgatctatcacctcccaccaggtccttccctgggaattacaattcaagatgagatttttkctggggacacagagccaaactatatcacccttatagctcattttatcaaaacaaacaaacaaacaaaaaaaaaaaaaaggcaagacaatctcttgccaaatcattgttccagatttgagtatgtggcttaggtagaagtaggaggatgtataacttctctttgggagtaataatgcaaactcctcttgggaaacaaaccttcttaggtaacgtaatggttcttctggctatgtagaataatttctgaagaacaattt

SEQ ID NO: 133863 - DNA, 568 bp, Homo sapiens
ttgcaccactgcactccagcctggtgacagagtgagactccatctcaaaaacaaaaacaaaaacaaaasggttacccagagccagggcccttctgtgattctcaggttgaatttgaagacatgggtattaagaaagggctcgttgttgtacattgtgctgtaataccacttggttaaatttgtagattttgtccctctccgttatcaatcaccatattcttctcagccttggcataagtataattttatgatacaccacaataaaacagatttgtttggtatgatcactgtacttcaaacttaattgagaattgctctatgatatcaggcaataaagtcgttgtgataaataataaagagcagagtgggagaggaactgagatagataatcaagggaataaaactatgttttcatttggagattgatggaccttgaggtgctaaaacatgcagggagagaaatgtttcctggtgataaaggcaaaagaaaataaagccttatggtgactgtggtaaaatagcagataagataaaaaagaaatagacctccatgagtacaacgaggaaa

SEQ ID NO: 133864 - DNA, 568 bp, Homo sapiens
ttgcaccactgcactccagcctggtgacagagtgagactccatctcaaaaacaaaaacaaaaacaaaagrgttacccagagccagggcccttctgtgattctcaggttgaatttgaagacatgggtattaagaaagggctcgttgttgtacattgtgctgtaataccacttggttaaatttgtagattttgtccctctccgttatcaatcaccatattcttctcagccttggcataagtataattttatgatacaccacaataaaacagatttgtttggtatgatcactgtacttcaaacttaattgagaattgctctatgatatcaggcaataaagtcgttgtgataaataataaagagcagagtgggagaggaactgagatagataatcaagggaataaaactatgttttcatttggagattgatggaccttgaggtgctaaaacatgcagggagagaaatgtttcctggtgataaaggcaaaagaaaataaagccttatggtgactgtggtaaaatagcagataagataaaaaagaaatagacctccatgagtacaacgaggaaa

SEQ ID NO: 133865 - DNA, 568 bp, Homo sapiens
ttgcaccactgcactccagcctggtgacagagtgagactccatctcaaaaacaaaaacaaaaacaaaagggttacccagagccagggcccttctgtgattctcaggttgaatttgaagacatgggtattaagaaagggctcgttgttgtacattgtgctgtaataccacttggttaaatttgtagattttgtccctctccgttatcaatcaccatattcttctcagccttggcataagtataattttatgatasaccacaataaaacagatttgtttggtatgatcactgtacttcaaacttaattgagaattgctctatgatatcaggcaataaagtcgttgtgataaataataaagagcagagtgggagaggaactgagatagataatcaagggaataaaactatgttttcatttggagattgatggaccttgaggtgctaaaacatgcagggagagaaatgtttcctggtgataaaggcaaaagaaaataaagccttatggtgactgtggtaaaatagcagataagataaaaaagaaatagacctccatgagtacaacgaggaaa

SEQ ID NO: 133866 - DNA, 675 bp, Homo sapiens
gtaaccatacctatgaatggcattagagccaactcaggaagatcaaatgtaggtagggaatcactccaaaaaccagttagctggtgttgagtaaagaatatgaggtaggttgtaggacttagaatatcaggtagatattctattttaccaggtaaattaaaaacttgagtcaaagagcagattcgaagactttttttttaattttgcagataaaataaaacaagattccaagtggtctacagccagggattacataaataaagaagctcaacagcttgtaggtcagtatccagatagtccagtrcaatttagttgaagttcacggcaggattaaaagcctggagatataaatcatataaaggaaagagagagtatggtaaagttttataactgcatgtgttggggaaggagaagtatggtagatgaaggcagtctgtgattgagtctgcaagtgaaccctacatctggtatttaactgtggcagcagagaaagacagtgagctagttgccttcatcagcttgattttttttgttcttcgcattttattacgcattctgaacactgtctcaggaatgaaaagtgagaccatggagtgcaaaattgtttccctgtccaaacattctatcagttttgatcatactttgatgttgaaaataagtaagtccaatccattt

SEQ ID NO: 133867 - DNA, 675 bp, Homo sapiens
gtaaccatacctatgaatggcattagagccaactcaggaagatcaaatgtaggtagggaatcactccaaaaaccagttagctggtgttgagtaaagaatatgaggtaggttgtaggacttagaatatcaggtagatattctattttaccaggtaaattaaaaacttgagtcaaagagcagattcgaagactttttttttaattttgcagataaaataaaacaagattccaagtggtctacagccagggattacataaataaagaagctcaacagcttgtaggtcagtatccagatagtccagtgcaatttagttgaagttcacggcaggattaaaagcctggagatataaatcatataaaggaaagagagagtatggtaaagttttataactgcatgtgttggggaaggagaagtatggtagatgaaggcagtctgtgattgagtctgcragtgaaccctacatctggtatttaactgtggcagcagagaaagacagtgagctagttgccttcatcagcttgattttttttgttcttcgcattttattacgcattctgaacactgtctcaggaatgaaaagtgagaccatggagtgcaaaattgtttccctgtccaaacattctatcagttttgatcatactttgatgttgaaaataagtaagtccaatccattt

SEQ ID NO: 133868 - DNA, 470 bp, Homo sapiens
agaagagcaagtcaggtacttaaaataggagggggatttgatgcactgttgctagattggaaatggaggggccacaaggaaaggaccagagagtggcctctaggagtggagagcagcacccagcagacagccagcagggaaacgggggcctcaacctacagctgaaaggatggaatcgcccccacctccatgagcttggaagtgggttctttcctggaacttctggatgagtgcctggccccctcacaccttgatttcagcctttccaggtcctgagcrgggggcctggtagagcctgcctggacttctgacctatggaactgtgagatgataaatggatgctggtttatgctgccacattgtgtggtcatttgttacgcagcaacagaaaactaatacagtctcctaactggggccagttaccaaaagaagacatttcggcggcagaggggagtctccatgactaactt

SEQ ID NO: 133869 - DNA, 530 bp, Homo sapiens
tggtttaattaaaaaaatagtgcatatacatgatttattggttatgtaacagataaattcaagggattcataatttgcattcaggaacagctggatccaggagcacaaatggtgtcatcagggctgcatttctttctctctgccactcatctcatgtggtctttattctargcaagctatctccatgtgatggtttagagaagctccagtcttcctttctatttgcttagcaatcccaggggaatgaaacttttatcaagagtttggagttggagggtcattggactacctttggtctgtgtagaaaccaatccctgtaccagggaagagttgtactggttggccagatcttggttatggtatcacggcagtgccaggaaatgggaacaacttaaatcatgcagactgagagttgggaaaaggggagggtggatttacaaaggaaaattgagatgctgttacccaaattctggacaagcaaatcaacagatgtccattctaactgccccactctggtggacagccatcag

SEQ ID NO: 133870 - DNA, 537 bp, Homo sapiens
agtaagaggcagacttcaagaagatagggctttttctcttatacctgtactatgcagcactgtccaattcactccaaaatgtatagaaatkgggatgaaatttgtcacaactgtagagtacaactgtggctatattgttttattttttccttaaaataagaacatgtgggagttcccacatgacatatttgcatgaaactcagtatctactttaggggctccaccccacaccccatgaattggccaagaaaattagaggcttatgcataagcttatccattcaggcagagagaacttgaggtgatggcagttggttgttgccattgcctctcaccaccacaatgctgtcactgtggaacactgggctgcagtccaacggccaagcctggtccacgtggagcatcttccttccatgatctgctggtgccatacttggctgaggacattgcgacttaatgttcagtacatttggtcccaaacacaactgcggcgggaatggatggcacaggtgatttgagcatttgtccttttcagact

SEQ ID NO: 133871 - DNA, 390 bp, Homo sapiens
gggagagaaagagagaaagagagagagagagagagagagagagagaaatatataacttaactcttcagcagggcatcctcagtactcttactaggaaattctttgtcttggcaatacttccttatatctaccaaggtgatagttgggtgaaaaagagcttgttgtggggtgggcgagaatgaaaacaaacagaaaattcagaacaatgcacaaagaagataccatcaaaacactcaaatataatattggcttgccaaacatagtggaaattgtagctctaggcctaaatattgtcagctttatagggtggaactagacatgcagagtagagtatcgctatatgtctataaatgttggagttttraaaaatgtagtcagcctttctacatg

SEQ ID NO: 133872 - DNA, 531 bp, Homo sapiens
agaaaaaaacttcccagctactgtataaatacttcatcagcrctaaaaaatatcaccttgtgaattctagatttaaatgtgtgtggtgggcaacatttaatgtcaaatgttggtatctggggaagtagacttttataaattgtgacaggttgtggctacacattttatttttgtccctgggtaaaagctttcaatctgaggtgaagattttttttttttttttttttttttttttgagacagggtctcaccctgtcgcccaggctggagtgcagtggcatgaacttggctcactgcaacctcggcctcctgggttcaaacaattctcgtgcctcagcctcctgagtagctgggattacaggcacacaccactatgtccagctaattttgtattattagtagagttggggcttcgccatgttggccaggctggtcttgaactcctgacttcaagtaatctgcctgcctcagcctcccaaagtgctgagattacaggcatgagccaccacttccagcctaaagtttgttcttt

SEQ ID NO: 133873 - DNA, 571 bp, Homo sapiens
gggtcattggatgtcatagtgagaggagccaaacccacttccaccctttgattcctggccccacataatccgaagttaaaaccaggtactgtgatgactcacctgatttttgattcttgtgatggtgctttttgtttgtggttagtttttaaaatttggtgttctcgtgggggtatgggaagggcgaatggtgcaggcttccattggccatcttgcttgccccctccaatgtaatctggctgtaggataagcagcatgagaaattggctgctgaatcaaagcacagattgcatcctgtagctagaactccatcctttctgggtgctgtctcctcaaaggctttgtaatgaagccttcagtagactattcctccattctgttaggccagctcstcctagatgattgagtgtgtggcagagccagtgaattccatgagtctgagccaaatgatgcatttatgttttgtgagaggcatttcttgttcaggagcaatgtaggggcaatgttgtgacactgaataaagcattccttgaattcataaatggtggtgctagcaaaagcattatggaga

SEQ ID NO: 133874 - DNA, 509 bp, Homo sapiens
agaaaagtcatgacattaagaaaaactgaatccattaatatgtactgtacattgaggtctgcagctgcagtgtgtccaccatttcaagataaatgaatctagtgtaaggaccattgttaaaaaagaaaatgaaatttatgaagccatcaccacagctatgtcaccatgtccaaaaaccttgcatttttttgtgaaatatctttttatctcatattgaaattgcagctttatgtgggtagaggattgctagaagaaaggtataactatagaccctactgtgacttgagaaaaagcagagtcattayatgacaacataaaccaaaaggaaggtgaagaggccaggtacactggctcatggctgtaatcccaacactttgggaggtcaaagcggcctgatcacctgaggtcaggagggagtttgagacctgcctggccaacatggtgaaaccccatctctactaaaaatacaaaaattagctgggcattgtggcacatgcctgtaatcccag

SEQ ID NO: 133875 - DNA, 509 bp, Homo sapiens
agaaaagtcatgacattaagaaaaactgaatccattaatatgtactgtacattgaggtctgcagctgcagtgtgtccaccatttcaagataaatgaatctagtgtaaggaccattgttaaaaaagaaaatgaaatttatgaagccatcaccacagctatgtcaccatgtccaaaaaccttgcatttttttgtgaaatatctttttatctcatattgaaattgcagctttatgtgggtagaggattgctagaagaaaggtataactatagaccctactgtgacttgagaaaaagcagagtcattacatgacaacataaaccaaaaggaaggtgaagaggccaggtacactggctcatggctgtaatcccaacactttgggaggtcraagcggcctgatcacctgaggtcaggagggagtttgagacctgcctggccaacatggtgaaaccccatctctactaaaaatacaaaaattagctgggcattgtggcacatgcctgtaatcccag

SEQ ID NO: 133876 - DNA, 512 bp, Homo sapiens
tatatttttggatctaggagtggaaagtttggatcatataagaggtgaatgcttaagtgataaaaaaaaaaaaaaaaaaaaacctaaaattttcccaaagtgattatactatattcccaatagtggtatgtgaattctgattgctctgtattatcagcaayaatttagttttttcaattctttaaacttaagacattgcaatgtatatgcaaatgtaggtctttatggttttaatttgcatttcttgatacaatattaatgatgttaagcatcctttaaggagtttgttggctatctgcatatcttcatttctgaattgtctgttgaaatgttttgcccattttattgtattgcttggtcttttattactattacagggattatatattttggacaacaaccctttgtcagatatgcctattataaatattttcacccattctgtggcttaccttttcattgtcttaacagagttttcctaagataaaataatttattttgatacatttcaa

SEQ ID NO: 133877 - DNA, 605 bp, Homo sapiens
taatttttctgtattacatctaggcctttaatctatatagaatttatttctttgtaagatattgatttaatttttcctgatgtaaaaaagggtctcagtatcttttgttggtcagttctgtccattcccagtgatttgaaatgcactgtgtttcccaattccaaatgcgtaattagaatttcttgatttcagttgtaaaggactcagcttaatgagcataaacaaagttgggtaatttttaaggagagtaggcttttcctcaggaccacagagcaggtggctgtgccttgggaacaactatttacaggaactcaaataccatcaggtttcattctctttcttttttcctttgtcttcatttctyatttctttttcatatatcggcttcattgttctttctcactgtacactttttctgagtggttcctgagtgtttcatctactcagaaatcacttttttggttaccagttgaaaaatctcagatttgtgtcagttgaccttcactgtgttctggaaatgaagtcattaaaaacatagccagccctgaccataaccatgtggatgaaaggctaattcttctttagaaaaattagatagcttaggt

SEQ ID NO: 133878 - DNA, 522 bp, Homo sapiens
agatctcttattcactgcatgtgtgtatgtgggtaggtgagtgagagtgagaaagataatatgcccggggttggatgtctgttttcatttattattaagtagaagaagatgctcacatacttgtaggtacagaagcttcaacatagcagtctttcacagtgtgagttatgatagacgcaatctaagagtraattataaaagtgatagggccggaacagacttttattaaattttgggtaatattgtagattagaaaagtaaaatgtgttacctctacttatctttaaacattcactctatttaatgtattcatcagacctcaggaagcttgcaagtatattctgaagttacaaatttgtattttctttgtaagtaatatttagtaatattttcctttataaaaaacttttaaagtctaaaaatgccactgtgtgtcaatgtcctgtatcacctctctctcaattttcgttctctttcttctaataactatttctaaggaaactatttttacaaattattcca

SEQ ID NO: 133879 - DNA, 595 bp, Homo sapiens
tatagtgaaaatctttggaggcctgtatgtatgtatgtatgtgtgtgtacatgtatgtgtatatatttatatatatatttttggaggaagatacatatttttcaaaaattaaggattagttcattcccttcaattctaataggccataaatcactctgaattgttatgcatctgtcccaccattatattcacatttcctggtggacatgatctttataaataaataaaacatttcaatccagcctctccctccccatcttcatgttcctttcccactgctactttccctacttctttcatagttggaaaaagagaaatcccctagaagtgggagtggagcagacaggatgggctagcagtttctgccttccttctctttcctccatcatgacagagaacagctcccctgtgctctcaccagccacagtagcagtggttgcacctgctgtatcttaaggtgtgaattgtggcctttgccatttcaccaggatgttgccyaaaaatagagctactggtggagttaagtcaagccacatggcttcctgaacatcggggctgtgtgtgtgttgccagcttggcactgaaaatgctctat

SEQ ID NO: 133880 - DNA, 520 bp, Homo sapiens
ctataagtcaaaaatttttctatgaaaaagtcttgtaaaaatctcaaaactctcattgggattacttgtatacatgtgtcttttttcacttttgtttaatgaaagtagattctagtcactaccaaagtgagtttatgagaagcaggaaaaaaaaaaagccactcttgtggacctgtccagtttcatagctgttagtgagatttagactcgtattcatgatgcggtttgagaaaaaaatcatttgtatgctttaaaggtagctatatggacaatcattcctctaaaatctgcaatattctggmagtatagtgacagaatcaataaaatataatggagcaatggaataaaatagatttgtataattctggaacaaaagaaatataccctatccatcttttaatactggtccagtagaattcgtcccttatataagactgattttttatcttgtgaagcaggaagtggagaactaagtagaatgtaatgctaagacagtacacactaagtcacaacgaaacac

SEQ ID NO: 133881 - DNA, 606 bp, Homo sapiens
gtatatgctgccaacaattactaatgacactttyatcacaataatgagttgtaaatcaggtggttttttctttatgcaatagatttaattgaagaaatgttttcacagattcctttactgtcaattaatctatgcatcccatgttttaaggaattttgtaatttaaataatccttgcgagtaaatcaagttaaggaagagaaaagcaatactaggagctagcaactgtgctgagaccattttctgtatcatatgctttcaattaatcctcaaaaaaatcctatgaaggaggggactggagtaaggcaattggcccaaagtcatacaaagtcattcaataacaatcaggatctgaacccattttctgatgtcaaaagtagggcctctaacagctatgcatgtgtcttctcaaatagtgtagtaaataaaaacagtcctacccacttggaaaacagaaaattccttgggccacccatccaccactaattgccatggtaaaataaaaagaattaagcaaaaacttaatagctgttatttttaaaggcatatcaaggacaaaagagaagtaacatgaagcattagaaacagcattcatttgaaattaaag

SEQ ID NO: 133882 - DNA, 517 bp, Homo sapiens
  misc_feature (1)...(517): n = A,T,C or G
nnnnnnnnnnnnnnnnnnnntcccttttattattgagatgacaattgtttctggttggcagctggagcagctctttcttgcagcaatgtaagaaccaagcttttgctgttggcatgtgggtcacctgcatcttctaggcatgcccttatattagttaatttgttagcttgcttgaatcacagtcgagaacccttcagctttggtttgcagcaataaattcaactgacagctgaaatttggaacgctcacttaatattgattctgaatgtaataacaagcgacatgaccttttgcatggtgtaaaatatggccgccacaacatctgtgccacagttcttgctgtttagtaatatgctgtaacagcatggagctggcattaaagctaagctttattatcaagcagatcactccatctctctggcttcatttaaaaaaaaaatgctttcagcttctggagccgaaatcktgtctaatactccttgccattttcaggacctaatttaccctgcaataagag

SEQ ID NO: 133883 - DNA, 587 bp, Homo sapiens
gttgggaaaataaacttctggcagatgggatcactagacactgggaagacagaaagtagctttgaatttcccatgtgaacattctagccatacaattgtgaatttagtgaacaacaaactctgtctttactggggaaaaaaaaactagcaaacttcaggtttagacccacaccaagctctaataatcccacaggcatcctgggttcactggccattgtcttgaaagccatccctcaatggacacaatccttgtattcataggcaatagcctgggtattactattcaagtttgatcatttctctgcaagtccagtgactaaatacatattttaattgagcccaggagtgttgatttgcagacatagtatagaaaaaaaatcacaggaaaaatgggaagttgaaggagccttttacctttgaatggaatacgatacttacaaaacaccaataacaattttctactggggaaaagcctgcggcaagaataaccagtttagtttttaagtggcractggacagaaaaacaagaaaacaaaactgccatagtaagccaggtaaggtagtttaactggataaaatctaatgca

SEQ ID NO: 133884 - DNA, 537 bp, Homo sapiens
gttttcaagttaaacgatcatatcgccaayaagcagtgacagtttgacttcctctttactgatttagatgacctttatttctttctcttgtcttattgctctggctaggacttccagtactacattgaagaggagcagtgagagtgggcatacttgtctcattctggttctcagagggaatgtgttcagttttatgttggctgtgggtttgtcatagatggcttttattacattaaggcctatgtcccttgtatgctgattttgctgagggttttaatcataaaaggatgctggattttgttgaatgctttttctgcacctactgagatgatcatgtgattttttaaaaaattctgtttatgtggtgtgtcacatttattgacttgtgtatgttaagccattcctgcatccctgatatgaaacccacttgatcatggtggattatctttttgatatgctgttggattcagttagctagtattttgttaaggatttcagcatctgtgttcatcaatgatattggtctgcagttttctt

SEQ ID NO: 133885 - DNA, 537 bp, Homo sapiens
gttttcaagttaaacgatcatatcgccaataagcagtgacagtttgacttcctctttactgatttagatgacctttatttctttctcttgtcttattgctctggctaggacttccagtactacattgaagaggagcagtgagagtgggcatacttgtctcattctggttctcagagggaatgtgttcagttttatgttggctgtgggtttgtcatagatggcttttattacattaaggcctatgtcccttgtatgctgattttgctgagggttttaatcataaaaggatgctggattttgttgaatgctttttctgcacctactgagatgatcatgtgattttttwaaaaattctgtttatgtggtgtgtcacatttattgacttgtgtatgttaagccattcctgcatccctgatatgaaacccacttgatcatggtggattatctttttgatatgctgttggattcagttagctagtattttgttaaggatttcagcatctgtgttcatcaatgatattggtctgcagttttctt

SEQ ID NO: 133886 - DNA, 537 bp, Homo sapiens
gttttcaagttaaacgatcatatcgccaataagcagtgacagtttgacttcctctttactgatttagatgacctttatttctttctcttgtcttattgctctggctaggacttccagtactacattgaagaggagcagtgagagtgggcatacttgtctcattctggttctcagagggaatgtgttcagttttatgttggctgtgggtttgtcatagatggcttttattacattaaggcctatgtcccttgtatgctgattttgctgagggttttaatcataaaaggatgctggattttgttgaatgctttttctgcacctactgagatgatcatgtgattttttaaaaaattctgtttatgtggtgtgtcacatttattgacttgtgtatgttaagccattcctgcatccctgatatgaaacccacttgatcatggtggattatctttttgatatgctgttggattcagttagctagtattttgttaaggatttcagcatctgtgttcatcartgatattggtctgcagttttctt

SEQ ID NO: 133887 - DNA, 633 bp, Homo sapiens
acctttttcatgtgtaatacccctctgctgggaacaatcaacttttctacatgcatgtcatgtacttgattgcaaacaaatcactcacttaccatgttcgtcaagtaaaatattgtcaggcttcatatccctagaggagtaaaaagaaaaaagaaagttgctcacaataaaacgaacagaactaaggggtaggggcaaaaaggcttaagaaagctaactggagttgaaacagtgtactagcttctcaatactcatcttctcattcaattctcacagtaaatttatgagacagaaaatccccaatttttaaatcagaaaactgaagcttaacccaaggtcacaggctagtaaatggaagaaatgggctctgaaccaaggcctctctcattcaaaaactcagactctaaacttcctatagcatgttgtatctaagcatgtagatattggtccattggatcatataaagcatttacattgccataaagtaatgttagtagtattaagcatcattttcttgygtaactctagaattgcacagatgatgtgagcttaaagactataaatgggaaaaatatggttgataatgtagttatataaccaccccctgtctccttttgcctcctcacatccaca

SEQ ID NO: 133888 - DNA, 572 bp, Homo sapiens
gattatgttggctacagttggttctttaaaattccatataaatttcataagtagcttttcaatttgtattttaaagctgctggtatgtatattgggtacatggagtctatagattaattcagggataactaacatctttttaaaatatcaaatttccaattcatacattttatatatatatatatatatatatatgtgtgtacatgcatatacatatatatgcgtatacatttccttatttatgtagatattccttaatttctctctttggttttagtttttcatgtagaggtctagcgtatttgtctttagactgatgactaggtatttgataagattacaagtggtattatttatcaaaattgtatttcttgctagtttgrtgcttatatactaaaatacaattgattattaatattgactttgtgttcagtgacctggctaaattctcttattaattatactagttgtcccataggttttcttggattttcaatatttacattcatgtgatttactaatagtggcaggttcatttcttccctttcaatcttgccttttctttccatgca

SEQ ID NO: 133889 - DNA, 594 bp, Homo sapiens
tgtgaagttcatgttgtctaataaacagaaatactgcatctacataattagctcgagtttatgccagttatatgaagatgtaagtttttttttttttttttttgagacagagtcttgatctgtcgcccaggctggagtgcagtggcacaatctcggctcactgcaagctccgccttccgggttcacgccattctccttcctcagtctccggagtagctgggactacaggcgcctaccaccacaccaggctaatttttttgtatttttagtagagacagggtttcaccatgttagccaggagagtctcgatctcttaaccttgtgatctgcctgcctcggactccgaaagtgctgggaatacaggtgtgagccaccgcgcctcgccgaaaatgtgagtttcaataaaataattatatatacatttagagctaatgtatrtatctgcttgtatattttcaaaggttatttaaaattgccataaactactaaggcttacttaagtttaaacaaacccccaaacactttgtatttagaattatgaaataaagatgaaaagttcctagagttagccagattggactaaaaaaccaataa

SEQ ID NO: 133890 - DNA, 443 bp, Homo sapiens
tagcaacaaccaaaacagactaaaagctctgctctcaaggggcttacattctaatagaatgagacagacaataaataagtaaaatatataacagtaatttgtcacatagtratatcaaggaagtatagagcaaacagacacactagaagagggatggggtgctggggtggagagtaggtgctgttattttaaacagggagagtatggaagccttactgataaagtgaattttgagcaaaactctaaaggaggtaaggctatggggacacaatactacaggcagagaaataaagaccaaaagtcctgatgtgaagcatgcttgtgtctaagaaacatcatcaaggctggtgtgtttagagtaaactgaatgagaagaaaaacaggagagcatcacagaattatttaggtcactggtggtgaaaataaggacctgggcttctact

SEQ ID NO: 133891 - DNA, 449 bp, Homo sapiens
aaccaaaacagactaaaagctctgctctcaaggggcttacattctaatagaatgagacagacaataaataagtaaaatatataacagtaatttgtcacatagtaatatcaaggaagtatagagcaaacagacacactagaagagggatggggtgctggggtggagagtaggtgctgttattttaaacagggagagtatggaagccttactgataaagtgaattttgagcaaaactctaaaggaggtaaggctatggggacacaatactacaggcagagaaataaagaccaaaagtcctgatgtgaagcatgcttgtgtctaagaaacatcatcaaggctggtgtgttyagagtaaactgaatgagaagaaaaacaggagagcatcacagaattatttaggtcactggtggtgaaaataaggacctgggcttctactgagtgtaacggga

SEQ ID NO: 133892 - DNA, 463 bp, Homo sapiens
gaattctttctttgacgtgttcagcttccttcctttttgggtaaatgcatagtaattgatctgagccattctgtgaaacaaatgactggatattgttttygttcagaatagatataagtagcatcaaaactttggaaagaactgcagtgctagaagaaatgagaagtgataaaaaatgaaccgtgtctacttggcctcttatgcatgttgggtgagatgataataagagctttgcaaatgtacactgggtcactttagctctgaagaatattttactcaggataaaaaggttttaaactattcaataaatgggctgcttctttagtgactcttcctaatttggataatttttgtaagactaataaatcttaacctgagtttgaccagatattaaaagactggcttaaattatgagacagtatgaattatttcactttccaagttctttctgtgaaatattaat

SEQ ID NO: 133893 - DNA, 554 bp, Homo sapiens
  misc_feature (1)...(554): n = A,T,C or G
gttaaacagagttcataaagtgagacaatgtgttgatgttcactctttgactaatcgttgtctttctacgcaagtttaggactgtgaaaggctttgaaaacagaccgcagcctttagttaattgaatcaagaactgtttgagacccagaggtagtcacactgacacatacacaaacagatgatggatcagtgatgaacattagctgatgatcatgataacgacacaatcttgactgaaggatcattatgcaccaggttttccagagttttacacacgttgtctcatttttctcacamcagtcctctgcagtaggtactcttactcatttcagatttgaggatgtgatggaatgggaaccagggcgcatgctgccacttgcagttggcagtgagctgtgtatatttaatgttttggctgcttcctttctgccctccccagttgtccaattccatcttccctttccttctctcagagccacctgccagccccctcactccttccttttccttgttctcagaactcttatgtttnnnnnnnnnnnnnnnnnnnnnnn

SEQ ID NO: 133894 - DNA, 554 bp, Homo sapiens
  misc_feature (1)...(554): n = A,T,C or G
gttaaacagagttcataaagtgagacaatgtgttgatgttcactctttgactaatcgttgtctttctacgcaagtttaggactgtgaaaggctttgaaaacagaccgcagcctttagttaattgaatcaagaactgtttgagacccagaggtagtcacactgacacatacacaaacagatgatggatcagtgatgaacattagctgatgatcatgataacgacacaatcttgactgaaggatcattatgcaccaggttttccagagttttacacacgttgtctcatttttctcacaccagtcctmtgcagtaggtactcttactcatttcagatttgaggatgtgatggaatgggaaccagggcgcatgctgccacttgcagttggcagtgagctgtgtatatttaatgttttggctgcttcctttctgccctccccagttgtccaattccatcttccctttccttctctcagagccacctgccagccccctcactccttccttttccttgttctcagaactcttatgtttnnnnnnnnnnnnnnnnnnnnnnn

SEQ ID NO: 133895 - DNA, 514 bp, Homo sapiens
gttgctaaaaaagagtttttatttgtgaaagtgtaaaatttgttagtgtgcaagttctgtataacaaacttaggyttttcctaatgatccttctgttactcaaaatttatgtacatgtttttaattttttttgaatttttacatcagttaaaatatattttgctttaagcaaataattctagtttggcctgaaacaaaaagtcacgctaatatatctgtcttttatttccaactatttttagtaattaagcagttaataaatatagcaataattaagttaaagtaggatatatctacacctagtatctttttcgtttcttttctgaagtagggagaaaaactctagaaaaataccaattgctactttgatatgggtaatgtataccaaaattgtctatgctgttcattgtcagtttatagaagataaccaaatatgtaaaagtatattaattactttccataaaattagtttgtactaacattgctactatcaataactgttttattccagtca

SEQ ID NO: 133896 - DNA, 346 bp, Homo sapiens
atcatatttgaaatatataacaaatataaagtagaagcttgtataatgttactacataagtaatattttaataccatrtgtttacaaattgtgcaatgttcctgtgtgttatttcacttttgaactgctataaagaaataccagagactgggtaatctataaagagaagatgtttaattggctcatggttctgcaggctgtacaggaagcatgatgctggcatccacaaaccttttagtgaagcctcaggaagctcttgtcacgtgatacaccagcttcctcttttccttcatcccaaagcagaagctggtgtatcacgtggcaagagtgggatcaagagagagaa

SEQ ID NO: 133897 - DNA, 589 bp, Homo sapiens
ttgtaatccataaagtctttgacttctaacttgtaatgctattaatttatcaggcagtcttagtccattgtgttgctagaattgaatacctgagactgggaaattataaagaaaagaggtttwtttggctcatagttctgcaggctgtacaagaagcatggcaccaacatctgcttatgttgaggacttcaggctgtttctactcattgaggaagatgaaggggggccagtgtgtgcggagatcacgcagcaagaaatgaagaaagagagagagcatggaggtgccaggctgtttttaacatccagctctcccaggaaagcatagagtgaaaactaacttactaccacaaggagagcaccatgctactcatgagggatcctctaccatgacccaaacacatcccacattggttaccatgaagtttggagaggccaaatatccaaaccacagcacaagcacataagaaaggctaaggacttaaggagatttatgattttcttggcaaactgcagtaattagataaacagaagtttatataacattattcctatgcataatgttattagtttctctgaaattgtaaatgct

SEQ ID NO: 133898 - DNA, 589 bp, Homo sapiens
ttgtaatccataaagtctttgacttctaacttgtaatgctattaatttatcaggcagtcttagtccattgtgttgctagaattgaatacctgagactgggaaattataaagaaaagaggtttatttggctcatagttctgcaggctgtacaagaagcatggcaccaacatctgcttatgttgaggacttcaggctgtttctactcattgaggaagatgaaggggggccagtgtgtgcggagatcacgcagcaagaaaygaagaaagagagagagcatggaggtgccaggctgtttttaacatccagctctcccaggaaagcatagagtgaaaactaacttactaccacaaggagagcaccatgctactcatgagggatcctctaccatgacccaaacacatcccacattggttaccatgaagtttggagaggccaaatatccaaaccacagcacaagcacataagaaaggctaaggacttaaggagatttatgattttcttggcaaactgcagtaattagataaacagaagtttatataacattattcctatgcataatgttattagtttctctgaaattgtaaatgct

SEQ ID NO: 133899 - DNA, 589 bp, Homo sapiens
ttgtaatccataaagtctttgacttctaacttgtaatgctattaatttatcaggcagtcttagtccattgtgttgctagaattgaatacctgagactgggaaattataaagaaaagaggtttatttggctcatagttctgcaggctgtacaagaagcatggcaccaacatctgcttatgttgaggacttcaggctgtttctactcattgaggaagatgaaggggggccagtgtgtgcggagatcacgcagcaagaaatgaagaaagagagagagcatggaggtgccaggctgtttttaacatccagctctcccaggaaagcatagagtgaaaactaacttactaccacaaggagagcaccatgctactcatgagggatcctctaccatgacccaaacacatcccacattggttaccatgaagtttggagaggccaaatatccaaaccacagcacargcacataagaaaggctaaggacttaaggagatttatgattttcttggcaaactgcagtaattagataaacagaagtttatataacattattcctatgcataatgttattagtttctctgaaattgtaaatgct

SEQ ID NO: 133900 - DNA, 530 bp, Homo sapiens
tccaggggaaagggttgtccccctatatgggacagttttctgtacttaaagaatgtgaggcccttaatgcctttgttcctagctgtatattatagttagttctagaaaaaaggaaaaaatctcattttgtaccttgtatcatctttttacaattgtttctaagtttttattgttccacacaatgctgttctgaatatactatgccaaccttcttgtacacacgagtatttataatgaagatatctagaagaggatctgctgagtcataaggtgtgcacattttctgttttaatagatactgccaaattgccttccaaagtgactctaccaattcacactctcataacacrgcaagaaattacttcccctaaaccttatcatttttgacattaaaggctttttatcttatgtgtgaaaaatagtatctcacttttaatttgctttttcccgatttttatgtaacaatgagtactttttcattggctccttctttttttctcctcttgcgatgtttatctttttacatatgt

SEQ ID NO: 133901 - DNA, 608 bp, Homo sapiens
gctgctgcaggggttgggagtctagtttcccaggtaactaaccatcctttgggctaacgacactctatagaaggggcacatagaacagccagcatgcatagtagctagagaatgcgtttaacaacctggtaaagagagtctgggtggttcatcaataaaccccaataaatctaggggccctctctggttatggacttgcctgtatctccttttagtgaactcaatgtttatattatattttttgaaagcatgttattagtacatacaaatgtagaattgttctattttccaaataattattttatcattaagaaatgcctttgctatgctttttttcttaaatatatattgtctgatatattagtaaagccattgaggatttatttctgttagtgacttgatggaatcacttttccattgttttacttccagccattctatattgtgacttttaaattatgtttattatargctgcatatacttgggttttactatctagtctgaaaatctttttctcttaattgaaataagtgtgtacttaaatattttattgagtgagattcacaacataaaatttaccattttaaagtgtacaattaaatgcatt

SEQ ID NO: 133902 - DNA, 328 bp, Homo sapiens
ctccaatttttgatagaaataggtgggtatctgaattctatggtttagaacaaataraaatttctgctatttttggcttcaggtttattactcaataaattatggatttgctatggtcttaaagttagaaaaatttaatcagtgtaaaacaccaattccaaagacagttattttcaagctcttttcccatttggttgacaggaacccaattcttgaagaggtttttcatttcagcatcaggtcctctaataattaaagtgatgcttttgcagcagatcttccttcacacccaagtacattaccggattttagcaccaatcaaataatg

SEQ ID NO: 133903 - DNA, 539 bp, Homo sapiens
tttttgaaacccactaatttccccaattatttgttaaatataccaccctttctaagtttatttgtgatttttctttttaatcatatgccatataggaaattaggttgaaataaggtgaaaaccaaaaattatattaatatataattygctcttctttcaattttaaaacctcaaaaaattaaagaatagtaaagtgaacatcaatatggtcctctcttaggttcaataactcttttctcggcttgatcctagtccccattttatctcaaggagaagagaaagactctgtatcccaaggagagagtagaatcacaaaactgtatttttccagatcttttttcaacaacgaaagatgcattacaaactagctgtgtaccttgagcaattcatatggactggtgtcatgagaatagcactgaaatctgacttggagccttataatgtagatcagactttgtcccttactcttactatgaccaataataaagtcattgatcatagacttctgtttttcattatgtcaaatggggagcaaataa

SEQ ID NO: 133904 - DNA, 539 bp, Homo sapiens
tttttgaaacccactaatttccccaattatttgttaaatataccaccctttctaagtttatttgtgatttttctttttaatcatatgccatataggaaattaggttgaaataaggtgaaaaccaaaaattatattaatatataatttgctcttctttcaattttaaaacctcaaaaaattaaagaatagtaaagtgaacatcaatatggtcctctcttaggttcaataactcttttctcggcttgatcctagtccccattttatctcaaggagaagagaaagactctgtatcccaaggagagagtagaatcacaaaactgtatttttccagatcttttttcaacaacgaaagatgcattacaaactagctgtgtaccttgagcaattcatatggactggtgtcatgrgaatagcactgaaatctgacttggagccttataatgtagatcagactttgtcccttactcttactatgaccaataataaagtcattgatcatagacttctgtttttcattatgtcaaatggggagcaaataa

SEQ ID NO: 133905 - DNA, 372 bp, Homo sapiens
gggagatgagtttcctgtgttagtttccttaagtgcctcttgagtgttcaatttgccttctcgaccttccctgagaattgtggcctccaggtgcaatgaaggtgatattgtatccctggtgccctggaaattccctgagttacatggctctaaaaactggatcactgtcactttgtaagctttggggaagaccaaatctaggaatkatttcatgaattaggactttaaccacttcctgagccttctctgtattgcaggggaaggcttctatccaatttataaaggtatcaacacagaccaaaaagtattgaactcccttgacttaggcatatgggtgaagtctaactgccagtcctctccaggatagtgccc

SEQ ID NO: 133906 - DNA, 555 bp, Homo sapiens
ccgttcaccttgatatccaaataggggctggattcatattctaagaatagtgttcctgaacttggttactstactccttttctaaaggggcacagatggagaaccatgggatctaggagctaaggttgaacttcagaaaggtaaagacacaaatgatgtctatttcaagattgaagactaagcatattcctttacttcttatcccacaatctcacagaaaatctaacagatatgagcgatgtgtagttcttgatagtgtgggagataatcagacaaaaactttgagaaaaatcagaaaaccaggagatttgattaattataaaaatcagagtaaaggaaaaaagcactagacaaaataaatacaggagaaaaacacacagaaaatgaacactccaagctcaggggcaagtacaggttctagagaagataattgcttccccaatcaacatatagctttgaagtaatcccaattaataaccctaatagattgctttatggaaacgaatgtattatagaacatttagaattctgtctgcacaattaactgcctttgaa

SEQ ID NO: 133907 - DNA, 645 bp, Homo sapiens
tcttgggccttgaataaacagaagcagtagccaggcagtggtcaccgtgggccttgggtgagacccagtgctgtgcttgcatcaggtatgacccagcacagtcctggtggtggtgaccatagaggtacttgtgtcacccctagccctagctcctggaagttcagcacagagacagagactccttttgtctgggacaaagtaagggaagagaagaagagtctttgcctgataatccaaagaattatcccagatcttacctgagatcacctaggcagtacctataagagtccacaagagccatagttgttcatgggcttgtgttgtgccctaatacagatacagctgctgtgtctaaagacttaaatcacaaaaccaaagtaccttcaagtkttttggaaatccttgccaagaagggtggatacaaacaagcccagactgtgacgactacaagtaatacataattctttaatgcctagcactgaaaaacatccacaagcatcagagtcatccagaaaagcataacctaaacaaacaaattaaataaggcactagtgactagtcccatagagatacagatgtgtgaccttccaaacagagaattcaagatagttgttttgaggaaactaaagaaattcaaggtaacat

SEQ ID NO: 133908 - DNA, 570 bp, Homo sapiens
ctggtttagggaccccattttaagaatcaagaccttagacatgaagaaaattagaygtgaataaatcatttagaagtcatttctttgctttttacattttacagagccatacctagatcacacttctggttgatgtgaatctaaccagtttagagactttcagaaatattcaataaccaattaagggtcttctacacaataataatagctagtgtggcagggtaattcactgaggtgctaatttgcatgtattccctcttatttctcatgcatttgttctgagcaagtagtcaagcccattcaaatgctttgcatcagaaacttcgagacacggggtgggagggcaagagctgctggaagactcccttcttgtctcttttgaaatttgagtgattgaaaagataagattaggcattctttagtaaagggaggagagaaaaaaaagatacataggaaaaaaaattgtccccagggctgagaaaaagaggaaaatcagtgtatctcctaaatttaagcaccaggcagtctgggcaccaggtattaagctctcattctgttaatgtgcctgtg

SEQ ID NO: 133909 - DNA, 484 bp, Homo sapiens
gttatttacctctatactaaacatgtactggaattgatatcattaaattttgccttatagtatgatagggagacatttccataagcaatgtgtatctattgtagaaagattggaaaattctgaagagcacacagaataaaatagaaatygtgtaatcacacaattccaatattgctactcttatcatgttgggtttttgttctgcatctttttgtaatatgataccagtttttgatgatccactgtgttagcttgttctcgcactgctataaagaaagacccaagactgcgtaatggataaagaaaaaaggtttaattgggtcatgattctgtaggctgtacaggaagcatagtggcttctgcttctggggtggcttcaggaaacctacgatcacggcggaagatgaagggggagtgaacacctcatattgttggaacaggagcaagagagagaggggagacttgctgaacgcttttaaacaac

SEQ ID NO: 133910 - DNA, 422 bp, Homo sapiens
tttgtctggctgaatgctgctggagggattggtggggaatggagcctgaagtctcatacagccttttggaatctttataaccttcttctgctttgtgaacctcaggaccagccactgaaggaggggctctccttcctggagttcttcccttatctttccccaacatggctgggtagccatgaygacggggaggacctgtgggaagaacaaagccagccgggtgttttattctgtcactaccttccactcagtggccaaaagctttaaaatcaaacactatagttggagacatcaagtcaatactggctgcaccgactgtctctggctgaaggcagcttaaggggagtgaaggtaatgcttgttgactcaagaagaggctgaaaatctgcccaggaatcacccagtggagaaaacgatctgat

SEQ ID NO: 133911 - DNA, 658 bp, Homo sapiens
tgttattattaactaggctccagatttatytgggttttccactaatgtcatttttttgttccagactctcatctgggatattttattccatgtattggtcatgtctctttaatgtactttggtctgtgacacttctcagttttctgatatctagtctttggaaagaagtctttaaatccagcacaaattggtaagggagggggtggagcatgaataagcttatacctcttggagtggcaagtatctatgtatattatttcaaattcttctgtgaagaagattgtctttctctcttgtttatttatttattcaattatttatgtctctgtggactcatacatatttattttagacattggtgtatattttgactcctttatatttattttgcactatgagttataattcaatgcaatattataatatttattttgttactcaaattccagctttgaccactaagagctctcccagttggctcctgtgtccctttgacatgaccccattctctaattttctgatgacttcattattttcttgtactacaagatgcttcaggctcatcttataattttcctttcctggccctagagccagccatttctccagggagctttggttctatttactggagaatagtattttgaaatcaaaatct

SEQ ID NO: 133912 - DNA, 559 bp, Homo sapiens
tatacctaagagcagaattactgtttaatatttgaggaatatttgaggaaccaccaaactgttttccacagtggcagcttcattatgcattcctaccaaccatgtatgaaggcttcagtttcactgcatccttatcaaaacttgctatttttcgttgttcaaaatcattattactgtagccttcctagtggctatgaagtagtatctaattgtggttttgatttacatttccctagtgactagtggtgtttagcataatgttatgtgattattggccatttgtatatcctcttggaagacatatctattaaagtcccttacctatttttaattgagattttttggtatttttgttgtttagttattcaagtgctttatatgttctatatacaagactcaatagatttatagtttgcaaatattttctccccgccctgtggtctggctttttttttactttcttgacaatgtcctttgatgcataaaaggtttaaatttgratgaagtccaatttatctattttttattttgttgcttgtcatatatgtaacaaaccatt

SEQ ID NO: 133913 - DNA, 408 bp, Homo sapiens
tttgttgtttttattcttttttctttcctttcctcagatttggtaatctttgttagagtttgctgattatttcctctgcctgctcaaatctgctattgaaaccctctactggatttttaaactttggttattgtacttttcacctccagaatttccatttggttcctttttgtaatttctatcactttatttatattatctattgggtgaaatatcattctcatgctttcctttaactcctttcacaaggttttctttagctttttgaaatacttgttttaaaatctttgtgttttragtacagtgtctaagcttcttcagggagagtttttactttctacttttctaatgtatgtgccatactttcttgtttctttgaatgcctcctaacttttcaaacactttgag

SEQ ID NO: 133914 - DNA, 566 bp, Homo sapiens
tatggactgcatatttattgctcaaacccctgaatcttaaaagagaaagcaggaagctggaagctaatttggtgcacatagcccatttccattttatatccaggcatatttgatttgacttgggtaaccaaatgctgtagtagcaaacctctcacatggagctacaaatatgggggaaaatgttttcaagataaagaaagaaaaaggaagagataagattaaaagtacatgaggttctttgccaagttggagctgacaagatttaaacattcaagaacagtccaaattcctctgatgaccactctcccacttgcccatttatccttcattttgcctagtcatggatctgcaaccaaatrtctactcaatgaacattcatccaactaatattattatagcaaatgataggaatatcaacttcagtatataaggtcactattcacccctggacatggaggaaagaacaatatcaagattatcctcttcatgttctaaaatactatcacacatcctgaaaattaaagattataacagctctttaaatttatgaaccagtgatgagaagt

SEQ ID NO: 133915 - DNA, 656 bp, Homo sapiens
aatatagccagataaaggtattaacaggaatagaagccatagtaaacctagcgtacaaaagccaagaaaataatgccttcatggacagtaatgaaatcagaagagaataaaatacatttattttgatgtagaagattcaaataattctaccaaaatatttctatgatgattaaacctccaatattaatggaaaacaggcgacatgctgctgttttatttattttcataaacaactctytgatggtttaatagctaattatatctttatcctgaaaaagcttgtgcaggctattagcttaatacagcacttctcaactttttccaggctgacataagtgaaaacctaggaaaaactaccattatcctgctccctttcattgaatttgcattctccattgcataataattaatgtctgtattacttaaatatcatctttataaagtgcttccccacacaggacatgctgtttcctttttcctttgcctagtccgtatctatgtaaagtctcaaaatgataacagaatggggagagaactgggaaaatgtatagaccacagaactgcagttacaggaagcatcttggaactaattggaacacttattcaatcgacaaataaatattagaacctgctatgtgctaggcagtgctttagca

SEQ ID NO: 133916 - DNA, 494 bp, Homo sapiens
tccccaggggagagaattctgccagctgacggcctttgttctccacctgcaacatcacctctttcctgggtctccagcctgccagtctaccttgcagactttgaacttgacagcctccacaatcatgtaagccaattgcttaaaacctctctctgggtgtgtacacacacacacacacacacacacacacacacacacacacacacacwctctctctctctctctctcggttctatttctctggagaccccaggctaatacagatattaagaatatcttgcaccatgactattccattaataaaattccattctcattttttatttgaaggagagaaaatcattttataaatcaagaggatgtgccagtttacaacagttttgtccaaatgccaatttaccctttcttgaaaaggtactcttgaaagaagatagaaatctccaccccttccatgagccacggaattagtagggaatcccttgatcaaaactaaa

SEQ ID NO: 133917 - DNA, 568 bp, Homo sapiens
tgagataacaaattgtttagctattctagatctagaaatgcttctctttagggacaaatttttgagatagctttgcaattcctttcttttccaagaatctaaagstaaaacaaacacacagaaaatcaaaacctgcttttaatagattttcttttaggctaaaattattattagtgtgtgttgggctcaacaacttaatccagaactgagaataaactgcttctctagtgtcccattcagaaatcaggaatgagaatacatggcaggaaaatgactaccaaaatcggaataaacttgaggttggccagaaataaaaccacatacagccaactgatctttgacaaagtggacaagaacgtactgtggggaaaggacaccctttccaataaatgttgccagtaaaactggattgccatatgcaaaaggatggaattggaccccaattctcaccatatacaaaatcaactcaagatggattaaagacttacatgtaagactggaaacaataaaaataccggaagaaaccctagagaaaactcttctggatattggtctaggcaaagaattc

SEQ ID NO: 133918 - DNA, 567 bp, Homo sapiens
gagataacaaattgtttagctattctagatctagaaatgcttctctttagggacaaatttttgagatagctttgcaattcctttcttttccaagaatctaaagctaaaacaaacacacagaaaatcaaaacctgcttttaatagattttcttttaggctaaaattattattagtgtgtgttgggctcaacaacttaatccagaactgagaataaactgcttctctagtgtcccattcagaaatcaggaatgagaatacatggcaggaaaatgactaccaaaatcggaataaacttsaggttggccagaaataaaaccacatacagccaactgatctttgacaaagtggacaagaacgtactgtggggaaaggacaccctttccaataaatgttgccagtaaaactggattgccatatgcaaaaggatggaattggaccccaattctcaccatatacaaaatcaactcaagatggattaaagacttacatgtaagactggaaacaataaaaataccggaagaaaccctagagaaaactcttctggatattggtctaggcaaagaattc

SEQ ID NO: 133919 - DNA, 451 bp, Homo sapiens
aatgagaatacatggcaggaaaatgactaccaaaatcggaataaacttgaggttggccagaaataaaaccacatacagccaactgatctttgacaaagtggacaagaacgtactgtggggaaaggacaccctttccaataaatgttgccagtaaaactggattgccatatgcaaaaggatggaattggaccccaattctcaccatatacaaaatcaactcaagatggattaaagacttacatgtaagactggaaacaataaaaataccggaagaaaccctagagaaaactcttctggatatyggtctaggcaaagaattcataaccaagacatcagaagtaggcaacaaaacaaaaaataaacaagtgggactatattaaactaaaaagcttctgcacagcaaaagaaatgatcaacagaatgatcagacagcttgcaaaatggaaaaaaa

SEQ ID NO: 133920 - DNA, 611 bp, Homo sapiens
caagtttgcctcaagttggctctgaatcctcatttaaagccatggctactgtcaggcaaccatctcatcataattttctccttctaggttctggtagctgctcctagttcggttccaggaattcaaactccttcccactcttttgttagcttcagaatgcttcattatccattgaggatttccctactcttaaatagttcttttattaagctctcttgtattaaactacttgagagtgccatttgcttccctccagaacactgacagaaaaargagctaaaacttatatggttccaaatataagctaggatctgtttaagtgctttataaatgttaacctttataataactctacaggatactattataacccccattatataggtgagaaaactgaggcacagggagttaaaaaactagtttctgatcttttttgaatttttcttttctctcagtttcttttttaatttgatttctgttattcttataacaatcacagttctgctgataagtgatttagtagacttcagtttctataacttaatcaagatagcaagtcaactgatactttcattaggatttaattttgagaggtattcccatcattatac

SEQ ID NO: 133921 - DNA, 478 bp, Homo sapiens
gcactagatatcattttttcacatatcatgaaaatgaaaatccaaacagttaatagcayacttagttggaaagttgtggggaaacaggaatacagagatatttgacaatatcttttttttttttttttttttgagacggagtctcgctcaaagtgcatataccttatagagtggatactatagctaatgcttagacatgagcaatagagattttcaaagtaattcattgcatcatggttgtaagggccaaaaaactgaaacaatgttaatgtctacaaagagagtactgataaaataaattatggcaggctaggcacagtagctcacaccttcaatcccagcactctgggaggccaacgcaagaggatcacttgagcataggagttcaagatcagcctgggtaacatagttagaccccgtctctacaaaaaataaaaaataaaaatcatctgggcatgagggcacacgcctgtggtcc

SEQ ID NO: 133922 - DNA, 518 bp, Homo sapiens
ctggcatctgcttaacttctggggtggccgcaggaagttaaggtggaaggttaagggggagcagacacattgcatggccagagcaggagcaaaagagggtgagggtgagctgccacacttttaaacagccagatgtcaccagaagtcactcactatcacaaggatagcaccaaggggatagtgctaagccatttataaggaatccaccctcatgattcagtcacctcccaccaggccccaactccgacattggggatcacatttcaatctgagatttgggtgaggacacacatttaaattatattagggatctttacaccattcataaggtctctcatgatgygactgccagacccctttcagcctcatctcctcatatttcttatcttttgatacctctgactgatagaagcaatgatttctggagccctacatatgctatgagtttttccaccttcccttctttatacacaccagtccttctgccttcaatgccctttcctgttttctttgttcac

SEQ ID NO: 133923 - DNA, 571 bp, Homo sapiens
aagcttgttagagaggccaacattcaaatccaggaaatgcagagaaccctgagagatattactcaagaccatccccaagacacataatcrtcagattctccaaagtttacatgaaagaaaaaatgtcaaaggcagctagagagaaagggcaggttacctacaaagggaactccatcaggctaacagcagatctttcaacagaaaccctaaaagccagaagagactggtggcctatattcagcattcttttttttttttttttttttttgagacagagttttgctctgttgcccaggctgagtgcagtggcatgatctcagctcactgcaacctctacctcctgggttcaagtgattcttctgtctcagcctcccaagtagcagggattacaggcacccgccactatgaccagctaatttttgtatttttagtagagacagggttttgctgtgttggccaggctggtttcaaactcctgacctcaggtgatctgcctgcctcagcctcccaaagtgctgggattacaggtatgagccaccttacctggcctcatttcattcttaaagaagaa

SEQ ID NO: 133924 - DNA, 575 bp, Homo sapiens
gaggacaggttagaaatttatttactttctacttatttgattatgtatttgtgtatgtatttatttatcgcctcattctaaaaagaaatttgcagcagcaaatgatattataaaatagaatgtcaatataaaaatagaaaaccagagggaaggagagaaaaggaaattaagataagggaaataatggtatttcaataacatgcaataatacatttggtagagttctgccaaaatatttctacagcaccttgatctttgaaaatccaggcaggttttaaaaatccagaatgggttcagttctcagaaatccattmaaaaaggagaaacaaggtatgtcgcacaatttacatcagattacaaagcagatcagctagctctttaagagaggcatttttgtctcagctagcctctgataaattttttccctctattctcaacttgtgggcaacgccacccctaacaataaattcaacagcagatttgggggccagtggcttataaattctctcaaaatagacaaatggctcaagaacaaaccccagcctaagacaggaggtatgttagggataaaagca

SEQ ID NO: 133925 - DNA, 571 bp, Homo sapiens
cgttaaagagggccatcagagatttttcytaagaagaagacattcgggcaaaataataatacagtgagggaatgagcagtgtggatgtctgagggaatgcgttccaggcagacaggaaaggaaatgcaaagctcctgtggtacaaggatgtctggtacattccaggaatagccaggtggccagtagagctagaacagagtgagcaaaggggaggaataggaggccagatcatattaggccttttgggttattctaagaacattagcttcaagcattagacttaacacatttgttttcagtggagtgacatgatcttacttgtattgtaaaaggattatgctcatttcggtgtggaaattagactacaggagagcataaacccaagagttgactcatcaaagagcatgaagtaggagactattgcaataatccaggcaaaaaccaactacagcttgcattaaaataagactgatagatgttgctggattccagatgtatttctgaaatagagtaaatagaatttcattggaattaatgtgacatacgaaagaagccagaaataacttcacaa

SEQ ID NO: 133926 - DNA, 604 bp, Homo sapiens
tctttgccctcatccgtcccctgcgaggtggtagcttgttccctatattcccagctgctgtcagtggtaccaatctacatatatcctccagagccatgatgtggctgacctttctggcactgcacattgctccattcattgggtctggaatgggacctttggctgaaaaaaagccccctaacctgtttccatctggtactaggtttcttcaacacttcctcttggccagtgccagaatccctggcagtttarcccacccaagttataacagctccactcactagacacgatttatttatgtgcaactgaacaccttccttggccatcacccaatacacaaagttgctacaagaactagcctgctgagtcttcaaggcttccagacatcatctcagatttaggaaagcaacaggaaataggagggggctgcctcccaccacattgaagatcacagagcaagaaccacagctattactccatgtgcctaaatcacttcccaaaagcaaatacatgcaacttcaaaaaaatcccatcgcataaaaatacataagaacttaatcaatacttaaacattgggtagttactagatgtttaacaagctcat

SEQ ID NO: 133927 - DNA, 516 bp, Homo sapiens
tcctcatgttagggttgacaagtattgagggtacactgtgctcttctcattctctcctgggcttgcttgcatttgaagctagctgcccttttcctaccctgcagaaggctcagrattgtggctggcagacttcctggaacattgtgtcacaaacccttgttctttttattgctcagctggtccagggcatatatttgcagcaagctggcctttcaagagaatgcattatgaataaaggccactgcgatttgtttgacaccattaaagttattttgctttctctgaccagagtgagatcatcaattactttccttctctgaagaactgagtaaacatgactctaaggatcacccattacttgcagagcaatgagaggcacagaagacgctttgcctgcccttggaagtttaaatttgtattgtgggagacagaagggctaaaaaataaatcacaaatgtagaatgtgatgtgccatttaaaaaagcagcaaagataaatgtactgaacaaagagata

SEQ ID NO: 133928 - DNA, 516 bp, Homo sapiens
tcctcatgttagggttgacaagtattgagggtacactgtgctcttctcattctctcctgggcttgcttgcatttgaagctagctgcccttttcctaccctgcagaaggctcagaawtgtggctggcagacttcctggaacattgtgtcacaaacccttgttctttttattgctcagctggtccagggcatatatttgcagcaagctggcctttcaagagaatgcattatgaataaaggccactgcgatttgtttgacaccattaaagttattttgctttctctgaccagagtgagatcatcaattactttccttctctgaagaactgagtaaacatgactctaaggatcacccattacttgcagagcaatgagaggcacagaagacgctttgcctgcccttggaagtttaaatttgtattgtgggagacagaagggctaaaaaataaatcacaaatgtagaatgtgatgtgccatttaaaaaagcagcaaagataaatgtactgaacaaagagata

SEQ ID NO: 133929 - DNA, 483 bp, Homo sapiens
accaatatgacatttagttttgatcaagggattccctactaattccgtggctcatggaaggggtggagatttctatcttctttcaagagtaccttttcaagaaagggtaaattggcatttggacaaaactgttgtaaactggcacatcctcttgatttataaaatgattttctctccttcaaataaaaaatgagaatggaattttattaatggaatagtcatggtgcaagatattcttaatatctgtattagcctggggtctccagagaaatagaaccgagagagagagagagagagagwgtgtgtgtgtgtgtgtgtgtgtgtgtgtgtgtgtgtacacacccagagagaggttttaagcaattggcttacatgattgtggaggctgtcaagttcaaagtctgcaaggtagactggcaggctggagacccaggaaagaggtgatgttgcaggtggagaacaaaggccgtcagctggcagaat

SEQ ID NO: 133930 - DNA, 616 bp, Homo sapiens
ataataataagaaccattgctcagaaattgggtcccatagggcagaagtaggaaaatgagtgccttggaatggaataaacaaaaggaggagagggggcattgctttgtctgctttgaattctggccccaatcaggtatgaggtctgggttgtctccttgactgccactgttaggctttctgatttaatgcttttgtggtttcatgccctcacattattatggtggtctcacaccataatkatatctcctcccactaaatgccaggaggatctgttgaatgaaaaaaggacaatgaggtcagagctgtacaattggtcagagcaatacaaattgtggttgctggcattatgaagactgaatatgcagaactgaatattagatgctttttgggaactggaatcaaaggcattattagacttaccattgacttccacaaccttttcagctggagtctcagtgtttagtatcagtggcctggagataaataagtgtcttggtcctgggaaccaatggtccttctctaatggaccatcagtccaaaggaatgtttgtcatttggggtccacagtaaacgttaactggcaaatgctttttaataattctacagagagagata

SEQ ID NO: 133931 - DNA, 575 bp, Homo sapiens
aaaagaaggaaagaaaaggaagaaacgaaagagaaaccagtctctaatttttggttcattcattgcaacaaattgctaaatatcttaagataaaacaagaaataaaaaggcatgaataaaagtagactatgtgttccaatgatttcattattacttcagggtcatgtgaatctacagaggaagatgattcatgctgtgtattgcagagtttgtcatttgctttatgaggaagaggaatgtcacttggagagactggaataggaaagcaaagagaagtaaagacagtaaagrcagaatgaaatgaaaggagaaagccgtaggaggaatgtataagaaactgaaggaaatgtaccataaaccagacctggagctgctccagattaggactgagaacaagagagtccactgggaaaaatgacctcattctctttgccttctgtgatgtgtttggaatgatgctttcatgatgcttgaaagtgaattgcttgtctagtaacaaaagagacaaagtcagtttttcttgatccaggagcaaaacacaaacaaacaaaaacagtagaaaacaccccagaaaa

SEQ ID NO: 133932 - DNA, 591 bp, Homo sapiens
gaatctgagttggaaagatcacttgaacctgggaggcagaggttgcagtgagctgaaattgcaccactgtactccagtgagaccctgtctcaaaaaaaaaaaaaaaaaaaagagagaaaacttttgtccaataggactgagcagtgtctrgcagttttggttggagacatttgaaacactggactagcaattaggaggaggacccaatttcagaaaggttgcctggctcagtttcgcacatagcagcaacccacaagggcttacctttccgcctggtactgcctcccacaggacagtgatgaggggcattcatcccacacctaacctttagtgtggtccacactcttaacagtgctacaggcctcatctctagaaactcttatgggaacccccaaaccaatagctactggcttacataatttattcaggaaaaaaatctggcaaaggccaatattgataactttaacagctgacacaaaatggatcaattcattgaaagatacatgctaccaaaacagatggaagataaaagttgataaaatgaatagctggtctatgtttagaaaaaaaatgaatccgtaatttaaaaat

SEQ ID NO: 133933 - DNA, 407 bp, Homo sapiens
ttccctcctcctttctggtgtttagtgctggctgactgtagaacactttattcacagaagcaagtagaaaaaaatgtcactcttagttcacatgctccaacgtcagactgggagtgaccggttctggagggaagaaccaggactggctcacttgtgttctcatcagccacctccacgcacacggaggtggatttcactggtgtcaatacacrcattcacatccatgagaggccactcagaggggcagaagcaacttcacacccaccataaagccacttctgctgccagagtccccagtctccaatcaccaagaaattctccaccaaggggcaagctccagccatctaacttgtaatcagtagcatcaacattgtctgagaaatgtttattctgtccagtttaagctt

SEQ ID NO: 133934 - DNA, 407 bp, Homo sapiens
ttccctcctcctttctggtgtttagtgctggctgactgtagaacactttattcacagaagcaagtagaaaaaaatgtcactcttagttcacatgctccaacgtcagactgggagtgaccggttctggagggaagaaccaggactggctcacttgtgttctcatcagccacctccacgcacacggaggtggatttcactggtgtcaatacacgcattcacatccatgagaggccactcagaggggcagaagcaacttcacacccaccataaagccacttctgctgccagagtccccagtctccaatcaccragaaattctccaccaaggggcaagctccagccatctaacttgtaatcagtagcatcaacattgtctgagaaatgtttattctgtccagtttaagctt

SEQ ID NO: 133935 - DNA, 189 bp, Homo sapiens
aaatacggactttaaacttttagaacactttwtgttttgagactcttgttacttatgtgacattttaactattcactcttctagtgaatttttaatgtcattcaaagggtacatctttctacactgagaattaaacaaagttctcaaaaatattctcagataatttagaatttcaccttccactggcat

SEQ ID NO: 133936 - DNA, 189 bp, Homo sapiens
aaatacggactttaaacttttagaacactttttgttttgagactcttgttacttatgtgacattttaactattcactcttctagtgaatttttaatgtcattcaaagggtacatctttctayactgagaattaaacaaagttctcaaaaatattctcagataatttagaatttcaccttccactggcat

SEQ ID NO: 133937 - DNA, 189 bp, Homo sapiens
aaatacggactttaaacttttagaacactttttgttttgagactcttgttacttatgtgacattttaactattcactcttctagtgaatttttaatgtcattcaaagggtacatctttctacactgagaattaaacawagttctcaaaaatattctcagataatttagaatttcaccttccactggcat

SEQ ID NO: 133938 - DNA, 533 bp, Homo sapiens
cactaagggttcttgctacaatcagaccacccttacamaagttatttaaggcgtgctaagcatggaaacaaaacataaaaacctaacactttgagaatactattatgcacatagcccacgaactatgtaaaacattatataagcaagtctacaagacaaactgccaacaacatgaggacagaatcaaaagcttatacatgaatatacatcctgaatgttaattatctagatgttctcatttagaggcatattgtggcaatctggacaaaaagacaaaactcggctgtctgcagtcttcaggagataaatcttacatgaaataaaacccacaggctcaaatgaaagagatggagaaatgtatatcagctaaagggaaaatagaaaagagtgggtggtctctgttatgtcagatgaagcagattttaaacaaataacaatcaggaaggacacagaagagtagtactgaatgataacaggttcaattttttttaaaaagccttaactatactaaatattcattttctcaacaaagt

SEQ ID NO: 133939 - DNA, 533 bp, Homo sapiens
cactaagggttcttgctacaatcagaccacccttacaaaagttatttaaggcgtgctaagcatggaaacaaaacataaaaacctaacactttgagaatactattatgcacatagcccacgaactatgtaaaacattatataagcaagtctacaagacaaactgccaacaacatgaggacagaatcaaaagcttatacatgaatatacatcctgaatgttaattatctagatgttctcatttagaggcatattgtggcaatctggacaaaaagacaaaactcggctgtctgcagtcttcaggagataaatcttacatgaaataaaacccacaggctcaaatgaaagagatggagaaatgtatatcagctaaagggaaaatagaaaagagtgggkggtctctgttatgtcagatgaagcagattttaaacaaataacaatcaggaaggacacagaagagtagtactgaatgataacaggttcaattttttttaaaaagccttaactatactaaatattcattttctcaacaaagt

SEQ ID NO: 133940 - DNA, 494 bp, Homo sapiens
atatagatatctatatatatctccagacagatatctatatagagagatatatataactccagatakatatagatatagatatagatataactccaaatatatatatatatatatctccagatagatagatatatagatagatccatatcctggaaaataccttgaaataaattatcttaccttcaaagcaataataataatttcttgggtacccagtatgcattggaaattcttttacccactttctttctgattggaaacagactctcagacagaagttttcaagaggtttactgaagaatgcttgtcagggattaaaggaggcaggattagcagagtgagaagctggactatgagatagttgtaacggaagcctcagttggcctcacaagaagttctggagctggattgccccaatttaaggtaaaagaacaagactctcaaactttacatcaaccagtctttgagtacaggcagcccctggggagagtata

SEQ ID NO: 133941 - DNA, 582 bp, Homo sapiens
ttgcctacagatttattatttgtctccttccacgtaaacataagcttcatgagaacaagaattttatctgttttgcttattgttctttccccagtatgtaggcacatactaggtactaaaaatatttgttgaactaacagtgcttgccacatagcacagatctaacaaatggcagcttttatcattayggcatcatcgtcatcttcttcttcatcatcattatgtgccttagcaccaccatacgtagtaaacctctcactctgaaagaaaccctagaacaaaccctttcctcttcaaatcaggcccatatgtgtattctgacagcaatgacactatcttgactcacatttctccttgcattcttgcccttgcctgaccttgatttctggaactagttgttcctcataatgtttgatttctcggcttcctaaatctggcctcgccactgaatagacataaccacaggtcttctgtttgaagcttggcccacttgaccttcaggaacctgctgaaattaatcccagaattgccaagcccccacatagaaatcccacacaagctctctgtcctacaccatgcttg

SEQ ID NO: 133942 - DNA, 554 bp, Homo sapiens
ttctaagtcaaagagataagaaattgaattgttattttggtgtacatttacttaattatgaaagaatttaggaattttcatatatttatttgctcaatatattttctccaaacagtgtgtattcatacttactatgtatttttggtattagattgtcttttattaccagtctctcttacastcatgtacacagataaccgaattccagcctacaacatgtgagcagaagtaatgtgggttaccttctaccctatccctgagaaaccacccatgcatcatcctttatgcccttccctgttcatgaggctcttgtaggttacactgtgaatttcaaagcagcaagagtgagcctggtttgctgaatgctgcttgccaattacaaacactcattttgaactctgtgtgaacaagaaataaacttctcctatcattttgcattttcccagttgtttattgggacttactctagctaaaaaaaactcttcagaattaaatatagaagattaaatctaaaacatcataaacaaatggataataaatccaccaaagagaat

SEQ ID NO: 133943 - DNA, 442 bp, Homo sapiens
ttttgtgggcttggcccagggcccaactgctgtatgcagcctctgaacttggtgccctccatcccagccactccagctcctgtagctaaaagaggccacagtacagcttaggcttcctaaagaggtgcttcagagggtgcaagacccaagccttgggggcttatatgtgtaattggccctgcaggggcacagaagtcaagaattgaagtttgggaacctccacctrtatttcagaggatgtatggacatgcctggatgtccaggcagaagtccactgcagggtcagagccctcaaggagaccctctgctagggcagtgcagaagggaaatgtggggttggatcccccacacagagtccccactggggcactgcctagtggaactgtgagaagagggctactgtccaccagaccccagaatggtagatccacaacagcttgca

SEQ ID NO: 133944 - DNA, 501 bp, Homo sapiens
tgttttactgctttttttttttaagatggagtctctctctgtcactcaggttggagtacagtggtgcaatctcaactaactgcaacctctgcctcctaggttcaagmaattctcctttctcaggctcccaactagccgggattacagatgcctgacaccatgctcagctaatttttgtattttttgtagagacagggtttcaccatgttggccaggctggtctcgaattcctggcctcaagtgatccacccacctcagcttcccaaagtgtcaggattacagtcgtgagccaccacacccagccagtaatgcttctattaaaagactcagtaatgattcattgagttggaagattcagtgattccattgaatttggtatacttcatgccattaagtaaacggacataaaaaaagcttacagtattacctgcaattattgatcatagttatctagaaaatatagagatgcttttgcacactatggctagggagaaatatgga

SEQ ID NO: 133945 - DNA, 501 bp, Homo sapiens
tgttttactgctttttttttttaagatggagtctctctctgtcactcaggttggagtacagtggtgcaatctcaactaactgcaacctctgcctcctaggttcaagaaattctcctttctcaggctcccaactagccgggattacagatgcctgacaccatgctcagctaatttttgtattttttgtagagacagggtttcaccatgttggccaggctggtctcgaattcctggcctcaagtgatccacccacctcagcttcccaaagtgtcaggattacagtcgtgagccaccacamccagccagtaatgcttctattaaaagactcagtaatgattcattgagttggaagattcagtgattccattgaatttggtatacttcatgccattaagtaaacggacataaaaaaagcttacagtattacctgcaattattgatcatagttatctagaaaatatagagatgcttttgcacactatggctagggagaaatatgga

SEQ ID NO: 133946 - DNA, 476 bp, Homo sapiens
aacaccatctattttgaaagtgatttttgatacaccagatgaggatccaaattacaatccacacctgaagaacggccagaaggtttcacctggggtgagggccagcgcctcaaaggttaaagcagcagtgccaataatgagacccagctgagcaggacccagtgatacccattgggattyttttatcctttgttgcaaaagtgtggacacttttgacagcctggcagattttaattccaggagcactttatgaaatgatacactgacaaatccagaagacatttctagcagtttgccagtgatttctcactacactggtaccgaaagtgtaatctctcgaagccaaaaaactggagcaacaaacatcctgccacctctaacaagtataccagtacttgcattctacggcataaagcagggctttttcttcctcttctttgatagatgaggacatggtataaatggaagtttcagag

SEQ ID NO: 133947 - DNA, 429 bp, Homo sapiens
ataatgagaaaatgccccctcccagggtaactctgcgtttgctgaagcaaatacatctttgaagagtgcttgctgtctcttttcactgatgacagatgaggccagtcctttttatgggaaagcctgtgacctcgtaactgatatgttggtttgagaygatgtggcactttctctgatgtcactgagacagatgtcactgcctgcagcaatgggagcttggatgacagcccccaccctacttgcatgaagggctgggtggagaaaagacagccagcagatgaaatggaaaagttatttttaaactacagctataaaaagtcaaccgcaggacagatccaatggtgcctatgaagctcagtataaacttcctctttattattgtattttaaatcatcagtgatcatggctaattatggccttaatgaattc

SEQ ID NO: 133948 - DNA, 431 bp, Homo sapiens
gaataatgagaaaatgccccctcccagggtaactctgcgtttgctgaagcaaatacatctttgaagagtgcttgctgtctcttttcactgatgacagatgaggccagtcctttttatgggaaagcctgtgacctcgtaactgatatgttggtttgagatgatgtggcactttctctgatgtcamtgagacagatgtcactgcctgcagcaatgggagcttggatgacagcccccaccctacttgcatgaagggctgggtggagaaaagacagccagcagatgaaatggaaaagttatttttaaactacagctataaaaagtcaaccgcaggacagatccaatggtgcctatgaagctcagtataaacttcctctttattattgtattttaaatcatcagtgatcatggctaattatggccttaatgaattc

SEQ ID NO: 133949 - DNA, 434 bp, Homo sapiens
tgaattcccttgaccacatcagctcatggaataatgagaaaatgccccctcccagggtaactctgcgtttgctgaagcaaatacatctttgaagagtgcttgctgtctcttttcactgatgacagatgaggccagtcctttttatgggaaagcctgtgacctcgtaactgatatgttggtttgagatgatgtggcactttctctgatgtcactgagacagatgtcactgcctgcagcaatgggagcttggatgacagcccccaccctacttgcatgaagggctgggtggagaaaagacagccagcagatgaaatggaaaagttatttttaaactacagctataaaaagtcaaccgcaggacagakccaatggtgcctatgaagctcagtataaacttcctctttattattgtattttaaatcatcagtgatcat

SEQ ID NO: 133950 - DNA, 649 bp, Homo sapiens
aagtccacatgccacacatyttaaggtttctacaagtcaagcagcccaacacctgctccttccggctccctctatggccaggtttgaacagaattcttggacttcccagggctgcttgccaaaatgtggtagtataagcagaattactccaggcctcagcctgctccacaccgttggagagagacagtctcttgggtcttcttgtgttcctacacattctgctgtggatgccaagatggaaaggctctcactgctcttttatgatgggccacctctcaaggttgttatgaagctggtaacctggacagatgaggtaatgtctctccctgggcaagaagcaggtttactgattgcttgctataaaagcagtggattctccaagctcaggcttccttagctgtgacacaatccccactgagagcacagcatccacccggatctgtcctggcacctgggggcaaggagaactgatacatatatgctgctgctcactctgtctgctgagcaatagaatcctttgtctttgacccaggaatctcatatcttctataaataaggctaaattgaatccagacctgacatattgtgaaggatgtcgtgcacacaccaggcctggttcaaactccatatgcagccctcacaaagagct

SEQ ID NO: 133951 - DNA, 649 bp, Homo sapiens
aagtccacatgccacacatcttaaggtttctacaagtcaagcagcccaacacctgctccttccggctccctctatggccaggtttgaacagaattcttggacttcccagggctgcttgccaaaatgtggtagtataagcagaattactccaggcctcagcctgctccacaccgytggagagagacagtctcttgggtcttcttgtgttcctacacattctgctgtggatgccaagatggaaaggctctcactgctcttttatgatgggccacctctcaaggttgttatgaagctggtaacctggacagatgaggtaatgtctctccctgggcaagaagcaggtttactgattgcttgctataaaagcagtggattctccaagctcaggcttccttagctgtgacacaatccccactgagagcacagcatccacccggatctgtcctggcacctgggggcaaggagaactgatacatatatgctgctgctcactctgtctgctgagcaatagaatcctttgtctttgacccaggaatctcatatcttctataaataaggctaaattgaatccagacctgacatattgtgaaggatgtcgtgcacacaccaggcctggttcaaactccatatgcagccctcacaaagagct

SEQ ID NO: 133952 - DNA, 649 bp, Homo sapiens
aagtccacatgccacacatcttaaggtttctacaagtcaagcagcccaacacctgctccttccggctccctctatggccaggtttgaacagaattcttggacttcccagggctgcttgccaaaatgtggtagtataagcagaattactccaggcctcagcctgctccacaccgttggagagagacagtctcttgggtcttcttgtgttcctacacattctgctgtggatgccaagatggaaaggctctcactgctcttttatgatgggccacctctcaaggttgttatgaagctggtaacctgracagatgaggtaatgtctctccctgggcaagaagcaggtttactgattgcttgctataaaagcagtggattctccaagctcaggcttccttagctgtgacacaatccccactgagagcacagcatccacccggatctgtcctggcacctgggggcaaggagaactgatacatatatgctgctgctcactctgtctgctgagcaatagaatcctttgtctttgacccaggaatctcatatcttctataaataaggctaaattgaatccagacctgacatattgtgaaggatgtcgtgcacacaccaggcctggttcaaactccatatgcagccctcacaaagagct

SEQ ID NO: 133953 - DNA, 526 bp, Homo sapiens
acaatatgaaaaattttctaaggtatgtcacaactttgcacatctgttggctaagaagtatgatgtttaagtgtaattcatgtcacatagagtcagaaaatatgtaattcaatcaaaattaaggaagtaaggaggcaytaatagaagatacaggaggactattccactactctctttagaaacaatgtagcagaaatatacagagaatattaaatcctgcatactccttcctaatgtgttcatgtgtattataaaatataggatgtagtaatccatgtcttgctttacagtgtagaactcaatgacttgtttttgagaaaatcaggatcttcttcagagctaatatttgggaggaaagatataaacaggagttatgggctaggtgataaaccatagatatgaatacacttcatagtttaaaaagcttgtttcatgcaaatacctctagcaaatccctggggaaaaatcaatattgaaaattatctagaataatcatcttctctaaacaagagttcttagtttttct

SEQ ID NO: 133954 - DNA, 358 bp, Homo sapiens
ttgttttcctgatactaatacatttctaaatccaatggctttaattgtcatgatatgttactcttttaatgtactattgaattccatttgctaccattttactaaagcattttgcatctacattygcaagtgaaactgagttaaaagtttgtttttttaatttttgagttatctttggctgaaatttatttcataatcacttgattatataaaaccaattggtagcttccccttcatccttatactgttgaaaattttacatagaacgatgatcaattctctaaatgtttgaatggcccttcctggaaaacttctggtaaaaagctcaaatcattttttacaacagttttaaaaatta

SEQ ID NO: 133955 - DNA, 472 bp, Homo sapiens
tggcaaaataccagctttctatttccacaggaaggagttatttaaaagaatccattttcagaaacaaaaattccttgggaacctaacagaagtaatctgtcagtttctagaggagatctctataacacattcctctagttttgaggagatatttcttctcagcttacatccacagcaaatatatctgaactgtttctctcaaagattgtagatgtgtaataaggtaaytttgccaatacctttgacctaataaccaatacctaatcaccaaaataaccaaaacctaatcaccaaaataaccaaaacctagtaattttttttgagacgaagtctcactctgttgccctaataacttatgaactaccatttctgagtgcctactaactgcttatcacttcaatgacatttgctttttgaaacaatgctgtgaagtgggtattattttaaaaaattataaagctgaagcccagag

SEQ ID NO: 133956 - DNA, 596 bp, Homo sapiens
actacatcttataaaagccgaggtcataaatgatttaaaaaaaaatacaactgatacttattagcttttttttttttttttcctactgtggtcagtaaagatgtgaaattcccaagccagattttgtgttctggtgaccacaatagtcatgtcatgaactgtgtacattcctcacaccctccctggaatgtgctccctgctctgtctacacaaacrgatcagaggattcaggtatgaaatttccttgttagccaagcaactgatgagctgtttcaatccaatcaattttttttttaccctaattcagccaatgttaagcacagagagttgagtagcttcttagaaagaattggtcacttgacacaaagagacttacactgcattaaggaacccccaaagctacagaatagaatccacacactaaaatctcaacttgcatgtgcatataccatgtatcctaatgatattttcattagtgttgcaagtgccttttttatgtttttattttaaaaagactttcataatttaaaagacaaaaatggtgtctcatgcttttaatcccagcaaattgggaggtctaggtgggaggattgttt

SEQ ID NO: 133957 - DNA, 596 bp, Homo sapiens
actacatcttataaaagccgaggtcataaatgatttaaaaaaaaatacaactgatacttattagcttttttttttttttttcctactgtggtcagtaaagatgtgaaattcccaagccagattttgtgttctggtgaccacaatagtcatgtcatgaactgtgtacattcctcacaccctccctggaatgtgctccctgctctgtctacacaaacggatcagaggattcaggtatgaaatttccttgttagccaagcaactgatgagctgtttcaatccaatcaattttttttttaccctaattcagccaatgttaagcacagasagttgagtagcttcttagaaagaattggtcacttgacacaaagagacttacactgcattaaggaacccccaaagctacagaatagaatccacacactaaaatctcaacttgcatgtgcatataccatgtatcctaatgatattttcattagtgttgcaagtgccttttttatgtttttattttaaaaagactttcataatttaaaagacaaaaatggtgtctcatgcttttaatcccagcaaattgggaggtctaggtgggaggattgttt

SEQ ID NO: 133958 - DNA, 539 bp, Homo sapiens
taatatttcatttattcttctttgaactcagctcttacactcacatctactctgccatagttttataatcatttgttgactcctccattcagaaagcacttatcaaatttttactgaatacaaggtattgtgtggtgctatagaagataaaataatataagctatgatccttccctttaagtagctaatatgcagtagtctgttaatgtcccacttaaaatgcaacataataaatggaaataaccctccagatgtgctctgagcagtgctgactgtaaaatgacygctacttctcataaaccaaactccccatttctactaatgaaggctatgtttatgttggccttatcatagctatccaaccggatgccagatatccggttgctggccaagtagaaacttctatctttttttatcttatctagttaatctaggtactggtcaaattcatgtctagacctttgggtgttatcaaccccatatttcttagagaaatttggggctcaataaagttgtataacatatacttaatactacag

SEQ ID NO: 133959 - DNA, 541 bp, Homo sapiens
caactacttcataagctataatatgcaaagctcttaaaacagcacctacatacacagtaagcactcartatgtattagttgttacttttatgctcattattattagtttatctgcagttcagacagaggaatgggtggtccaccagaaggctcttgggcccagaaacctaatcttctggattatagtctctggtgtgctaggagcgaaccaagtgactatgtgaccttagataaattgttgagcttctctgaacctcactccttgtgtgtaagtaaaatggtggtggtggtgtgggtgtgtgtgtgtatgtgtgtgtgtgacaaggttttaaatgctaacatttgttttggcaccaaaagtaatcatcatcactactagttgactagaccctagataatgcaactgaaaaaaaaagaagagaaatattattaagtaaattgtactcttacagatctctcaaggaagcattaagccccatggggcatatttatgccaggatagacaaattataaaatgaattaccttgtaacatgctaccta

SEQ ID NO: 133960 - DNA, 541 bp, Homo sapiens
caactacttcataagctataatatgcaaagctcttaaaacagcacctacatacacagtaagcactcaatatgtattagttgttacttttatgctcattattattagtttatctgcagttcagacagaggaatgggtggtccaccagaaggctcttgggcccagaaacctaawcttctggattatagtctctggtgtgctaggagcgaaccaagtgactatgtgaccttagataaattgttgagcttctctgaacctcactccttgtgtgtaagtaaaatggtggtggtggtgtgggtgtgtgtgtgtatgtgtgtgtgtgacaaggttttaaatgctaacatttgttttggcaccaaaagtaatcatcatcactactagttgactagaccctagataatgcaactgaaaaaaaaagaagagaaatattattaagtaaattgtactcttacagatctctcaaggaagcattaagccccatggggcatatttatgccaggatagacaaattataaaatgaattaccttgtaacatgctaccta

SEQ ID NO: 133961 - DNA, 595 bp, Homo sapiens
aattatcataggatttgggggccaaatggtgtctatcacaatttttcaatttgccatagagtgtgaaagcagtcacagataatatgtaaatgaagaggctgtggctgtattacaaaaaaaaaaaattctcatttacggaagccagtggcagcctggatttggcctgcaggctaaaatttgcagttcactgaccactgatttagacatttcaagtaatcaaagacacatacatggttggttatgtcagatcratctgaaatccaagccagcatagtataaattagggatttcatatttagatgaagctcaataggcagccaaggcccaaatcttaaaacattattatgatcaattccaaagaatttgaattgtatcaatgagaatttgttactgagtttcaagcagggcaataatacaaacaaatctttatttacagatcaatcacaggagcaacgagagggaggtgaagctggagaacaatcaactaagaagtcattcagcaaccaggttaacaaaatatgaaagcctaactcaagagaaagtgattgtggtaattatgaggaaggttggatttgcatcttctaataggtttaaa

SEQ ID NO: 133962 - DNA, 579 bp, Homo sapiens
taatatatctatttttacaaatttacgttgtctacaaagtagcaaaatagagcagaaaaaaatcactgggttggttttaaactggcttattccatgcatttctaaatttaatattcatttgttgagtacctttttgtgtgttaaatctgtcttcaggaagtacacaatctaatggaagatactcattcaacagtggatctaatccacaactatttattctgtgtgtagaacatgccttgtatattctacacacataaacaatgaactgtaataaatattatatgttttctgaggtggtcatgtattgtgagtggggatgagtttaatttagtgtgttgtaacagtgcctgggtgggatgccttcttgccctcrgagactggatagaggaaccagaaataatttctaaaacgacagaatttacaggatgaattcttgttcatatgaccttagagaactaactcaaccattttgagcctaaaataatttatagggaaaaggataagatttaacacagaccatacaagttctcttatgaattcaaaatataaattttataaatttatgaaaaaagaagaaat

SEQ ID NO: 133963 - DNA, 534 bp, Homo sapiens
gcagtttggaagttaaatgcaagatggagtcaattaggtaagctctcttttactatcataattttcacactgttatagtttttgcaaaggcagtttcagcttgaaaaaaaattaagaagtttataaaattaacattatcttagtaygtgacctaagaaaaccttcaaatcacttttttaaaatgtaactttaaacattttcaaaactttttaaaataagtaattttagtatgtgagagaaatatgttgtaattcagtttccacaggctaaattatttccccaaattataactagaatttccaaatcaattgcttctcaacttggcaatcaagtggatgcccaagcatattctgaaaggctgttaatgtctctaaagttttaatcagtgctttatttgtaatgatggcatatattatgagtgtaatctgcattgtctaggtacatttgtaacgcaatacagtcactcagttttagtgcgtttatttgcatctggacctgggacaacattttcacccagtgagaccccaattatct

SEQ ID NO: 133964 - DNA, 534 bp, Homo sapiens
gcagtttggaagttaaatgcaagatggagtcaattaggtaagctctcttttactatcataattttcacactgttatagtttttgcaaaggcagtttcagcttgaaaaaaaattaagaagtttataaaattaacattatcttagtatgtgacctaagaaaamcttcaaatcacttttttaaaatgtaactttaaacattttcaaaactttttaaaataagtaattttagtatgtgagagaaatatgttgtaattcagtttccacaggctaaattatttccccaaattataactagaatttccaaatcaattgcttctcaacttggcaatcaagtggatgcccaagcatattctgaaaggctgttaatgtctctaaagttttaatcagtgctttatttgtaatgatggcatatattatgagtgtaatctgcattgtctaggtacatttgtaacgcaatacagtcactcagttttagtgcgtttatttgcatctggacctgggacaacattttcacccagtgagaccccaattatct

SEQ ID NO: 133965 - DNA, 534 bp, Homo sapiens
gcagtttggaagttaaatgcaagatggagtcaattaggtaagctctcttttactatcataattttcacactgttatagtttttgcaaaggcagtttcagcttgaaaaaaaattaagaagtttataaaattaacattatcttagtatgtgacctaagaaaaccttcaaatcacttttttaaaatgtaactttaaacattttcaaaackttttaaaataagtaattttagtatgtgagagaaatatgttgtaattcagtttccacaggctaaattatttccccaaattataactagaatttccaaatcaattgcttctcaacttggcaatcaagtggatgcccaagcatattctgaaaggctgttaatgtctctaaagttttaatcagtgctttatttgtaatgatggcatatattatgagtgtaatctgcattgtctaggtacatttgtaacgcaatacagtcactcagttttagtgcgtttatttgcatctggacctgggacaacattttcacccagtgagaccccaattatct

SEQ ID NO: 133966 - DNA, 594 bp, Homo sapiens
ctatttctctcatcagaggtcacaactttggttaatttccaatgaattttgagtgaatgtttgcttgagaaaagtttataacttaaaatttagcacattatttatataggtcaacaaaaactgttattttcccttaacgatatataggaaatctcccatttcaatttgttacagtgtgctggttttttattgtcattttattttattttattttttaatttttaatttttgtgagtacaagtagttgtatatatttatggggtacatgagatattttagtgcaggcaaccaatatgcaataatcgtgtcatgggaaatggggtatccattcctataagcatttatcctttgtgctacaaacaatccaagtatactcttttagttattccaaaatgtacaattaaattattttgattatagtcccccttttgtactataaaatactaagtcttacttrttctttcaaactatttttcttgtacccattcattatactcacctcccattttaccccttctaattatcctttccagcctctggtaaccttccttctgccatctctgtgtgttcaactgttttgatttttagacccca

SEQ ID NO: 133967 - DNA, 496 bp, Homo sapiens
gctgggactgtgctggatgagacctggagccagcacaagggtctcacttaaggctcactgcaaccaatacttggctactgcctatgttcactcaaggccatagggcactgcaatcagcaggtgatgaagccagccaggtttgtatcctcttcagggcagcaagttgccccaggccatgggtaggtccagagatactcctgggatccagggattacagtcaaaaaccttagaaatttgccttatgttctattctactgtgggtaacctggcactcaaaccacaatacaaagttattcccactcttctctccttttccacaggcagaggagcctctccctatgggtatcatcaccactggctcatrggcattctgccagaccacccctgatgttcacttaaagcccaagggctctttagtcagcttgtgatgaatactgccaggcctgggactcaaccttcagggaaatgacatcccctctggcccagagcagcctag

SEQ ID NO: 133968 - DNA, 509 bp, Homo sapiens
tgcatgctctcttaacctttcagtgcccaakactggaaactgttctctagcatgcatctgagcagggttcctatttaaaaatctatacaacatagtcagttgtaatacagggaacttttttatacccaagcttttctattgaattaagattttgtgctagcttttttctaggagcattgtgtatgtgtgtgtgtccacatgtatacaactagttgctcacacagacgctacctgaacaatcacacaggcaagttgtagaaattgagcctggagagtgctaagagagtacctgagagggcactcacagaaggctatcaagggcaaatgaagtggccttgactttgtcagtaatttgtctcctctcaatatttaaaaatagatttgagtcaatatataacatcagaatgttcattaatcacctatctggatggttctggtcataacatgtatttatttcaaactcaagttgttaataagaagtactaaaacaaatgtagatgtggaatggt

SEQ ID NO: 133969 - DNA, 184 bp, Homo sapiens
atgagagagttcctggtgttcgtcatctctgcaaatasctagtactgttggacttttaaattgtgaccagttgattgaatggtatctagtgtagttaattcaacagatatttaagtacccattgttccagctattggcttagaggctggacatagagtggtgaacagaacagatatagacacct

SEQ ID NO: 133970 - DNA, 558 bp, Homo sapiens
tctaagtccttacttaaaaaaaaaaaaagtctaccgccaggacatagcatagttctagaacctggaatataggaagcatttcacaaatacttaatgaggaatattagtacccaatctccccccgaacrtatctgttccacttactagggtatggttgtaaaatcagagctttctaaagtgtggtctggagacctctagtggttgtctgcagttcagtataaggtcaaaatattaaggatgacaaattaggaaagagccaaataataggtcacaggttaaggcctgagatgagtgaaaaaagtgggtgctatggtagaggaataaactaaagaagtttaaaaatgaaagattcatttaaagtgtctaaattagaagataaaaatgcaatctttttttctccaacaaactgatgccaaaagaaaaaaaatgcaatcgttttacccgaatgtaatacatatgaagacagcaactgtttcctaataatcaactgtattgcaaagtacaaccactctagttcatatcccccctcataccactacttagttttaaaaaaaaatt

SEQ ID NO: 133971 - DNA, 558 bp, Homo sapiens
tctaagtccttacttaaaaaaaaaaaaagtctaccgccaggacatagcatagttctagaacctggaatataggaagcatttcacaaatacttaatgaggaatattagtacccaatctccccccgaacgtatctgttccacttactagggtatggttgtaaaatcagagctttctaaagtgtggtctggagacctctagtggttgtctgcagttcagtataaggtcaaaatmttaaggatgacaaattaggaaagagccaaataataggtcacaggttaaggcctgagatgagtgaaaaaagtgggtgctatggtagaggaataaactaaagaagtttaaaaatgaaagattcatttaaagtgtctaaattagaagataaaaatgcaatctttttttctccaacaaactgatgccaaaagaaaaaaaatgcaatcgttttacccgaatgtaatacatatgaagacagcaactgtttcctaataatcaactgtattgcaaagtacaaccactctagttcatatcccccctcataccactacttagttttaaaaaaaaatt

SEQ ID NO: 133972 - DNA, 558 bp, Homo sapiens
tctaagtccttacttaaaaaaaaaaaaagtctaccgccaggacatagcatagttctagaacctggaatataggaagcatttcacaaatacttaatgaggaatattagtacccaatctccccccgaacgtatctgttccacttactagggtatggttgtaaaatcagagctttctaaagtgtggtctggagacctctagtggttgtctgcagttcagtataaggtcaaaatattaaggatgacaaattaggaaagagccaaataataggtcacaggttaaggcctgagatgagtgaaaaaagtgggtgctatggtagaggaataaactaaagaagtttaaaaatgaaagattcatttaaagtgtctaaattagaagataaaaatgcaatctttttttctccaacaaactgatgccaaaagaaaaaaaatgcaatmgttttacccgaatgtaatacatatgaagacagcaactgtttcctaataatcaactgtattgcaaagtacaaccactctagttcatatcccccctcataccactacttagttttaaaaaaaaatt

SEQ ID NO: 133973 - DNA, 517 bp, Homo sapiens
tcatagtggttgtagctctccatttaaaaatcataacattgcaaagattgactacaaaacttagaaagatttgccttccaactacaaagtaatgagaaaccaaacacacaaaacaagcacaaaaggagtgattatttaatcttttctttcctagctattcagcaggatatctgagaggaacttccatgtgcaaggtgaattaattatgactaggaactctaaaatatatatatgtataacacaaatatatgtttacatatgtatgtatatctacatatacatttcyacatatacatatgtgtatatacacacatggcaagtatggtcttcttttaggagctagaaaaatctactggggaaatgagattaatgcatagagcaaaagtaaagaattcaaaagaagatataactgtaaattgcagctccatgtctctcagcattctgggtcacccttcccttttgtatcttaacaccacttagaattcctccaagaggaggaggaaaagaaacttctttc

SEQ ID NO: 133974 - DNA, 575 bp, Homo sapiens
caagaaacacacatgtctgcactcagggcattccctaactggctgatctgcagcggttaacctgcaagacggctgcctctacttccctctcttggccaacataggctttaaaacccgagggtctggaatggtgattgtttcctaaacaacaaacccaggggtttagattgcattccaagagagggaatctctgttttcttccttaccgtgttattttattattactactgttgaagtcatttcagctactgtttcctgtttgttgtaataaatcaggtttgggcgcttggaaaaataacatgaccaggaatctagtgacagctctccagcaccttgggaagaccataaggctgattgttagtggagtcttccaaagaatttggagtcttccaaactttrttttcaaaaatggccctcctttttctttttctttttttctttgagacggagtctcgctcttgtcacccaggctggagctatctcagctcactgcaacctctgcctcccaggttcaagtgattcccctgcctcagcctccagagtagctgggattacaggcgcctgccagcacgccc

SEQ ID NO: 133975 - DNA, 594 bp, Homo sapiens
ttgcctagatataaatctctttagatgtatcctacttaaagttcattcagtttttcctcggttttgcctgtcatgtagaaccctgccctgactctccctcactcactaatactgcctagaggcagatttccctcctatgacttcagcaatgctttgcttctgagaaatgcattctttggcaattttactgttgtatgatcatagattgtattccaaacctagatggtgtagcctaccacacacttgggatatatggtatagcctactatttctaggctagagatccatatagcctgttactgtattgaatactayattagtccattttcatgctgctgataaagacatgcctgagactgggtaatttagaaaggaaacaggtttaattgactcacaattccacgtggctggggaggcctcacaatcatggcaggaggcaaggaggagcaaagtaatgtctttcatggatggtggaaggcaaagagagagtttgtgtagaggaactctcccttataaaaccatcagatctcataagacttattcactaccatgagaacagcacgggaaagacctgcccccatgattgaattaact

SEQ ID NO: 133976 - DNA, 618 bp, Homo sapiens
tagttgctctcaatttttttcttacagtaagccttcctcttaggtaatactattatcacatcaacatgattataaataagaatggagaatcaatccaagaaagacacagcrtgactacctccaaagccacttaatttggaaatagaaatgaagaggtgtacagttcatcctcagtagggttgcctatgctttgtgccttcctgaaacttttaatcactggaggctgtcataatcttccacatccacaccgtccataaagcatttgttacatattgacttattttgtattgctctttaaggatatgctatttgttcatcttttcttctcaactagatacggtctttaacctctcctatctcttcctctcagcctataaatatacaaaagtctcatcaaagaacaaactgaccaaccaaacaaaaccattcccttcacttcctgtctgctgtatttacttccttatctggttgagccctccatttcctgaaagagcaggttacactcattgtctccgcttggcactctctgttctcctggctttgagggcaccactctctcttgcttctattctacgctgtctccttttgttttcgacatttctgacaataccttttcag

SEQ ID NO: 133977 - DNA, 618 bp, Homo sapiens
tagttgctctcaatttttttcttacagtaagccttcctcttaggtaatactattatcacatcaacatgattataaataagaatggagaatcaatccaagaaagacacagcatgactacctccaaagccacttaatttggaratagaaatgaagaggtgtacagttcatcctcagtagggttgcctatgctttgtgccttcctgaaacttttaatcactggaggctgtcataatcttccacatccacaccgtccataaagcatttgttacatattgacttattttgtattgctctttaaggatatgctatttgttcatcttttcttctcaactagatacggtctttaacctctcctatctcttcctctcagcctataaatatacaaaagtctcatcaaagaacaaactgaccaaccaaacaaaaccattcccttcacttcctgtctgctgtatttacttccttatctggttgagccctccatttcctgaaagagcaggttacactcattgtctccgcttggcactctctgttctcctggctttgagggcaccactctctcttgcttctattctacgctgtctccttttgttttcgacatttctgacaataccttttcag

SEQ ID NO: 133978 - DNA, 575 bp, Homo sapiens
tgtgtacatgaccagtctccatggctaacacatacacatgcatggaacctagaagcattaaggaacaactctgaggtcattagaagctaaaaatactgaaccttcacacttgcccttgagcaagtattctttagcagaaaagccaaagggattataataaaatgaacaaacaacaagcctactcataaagcatgttatgctttatggatagygcccccccattaaaaaaaaacaaaaacaacaaaaaagcccaggatgattgccttttactattggaagggagggggaattttgcaaaaagctgctatttgtataaacctgtggacccaccaccctcaataatatacaaaatagaaagaactatttgtttcaagatggtcttgttttttatttgtttaataatagctttattgaggtaaaattcctatactataaaatttaccatttaaagtatataattaaatgatttttagatatttactatgttgtgcaagtattaccactatgtaatttttaaaaatctttagcaccccccaaaagaaaccctgttatgcaaataatcatacagagttatt

SEQ ID NO: 133979 - DNA, 638 bp, Homo sapiens
aaccacattgttgatatctaagaaactctatgagcttcttcaaaagccctcttaaaaatacaacaaaatcatgttagcaactccagattccaagttgaaatcctcccgctttagtataagaaccatcagttttgaatgagtctggatacgaaaacctattttcccattttgaggagaaaatccctttttagagactctttcttgaatggatatttgttataacatatttgggcttagggctaaaacctttggtttgtaagctgaggttttcatttgcacttaccatcaacagcgtataagttgaaaagaatctcaggtctggttgctrtcctgagctactgcaaagaagaaaccactgagaataagagcatttcaattattgtacatcacatttgctatttgctgccgttattcttctattaaaggaggataatcaactgatatgatattgtagatctcagtgcctagtgcattgtaggtcctcaatatatgttgattcttcttttctttacatatttttgaggtacagaaagaagttcttaaaatggtttttaactgtaatcattttggaaaattagctatgaagatggaaatttgtgaacaaaggagaacttgcaaatgccattttactgagcatg

SEQ ID NO: 133980 - DNA, 638 bp, Homo sapiens
aaccacattgttgatatctaagaaactctatgagcttcttcaaaagccctcttaaaaatacaacaaaatcatgttagcaactccagattccaagttgaaatcctcccgctttagtataagaaccatcagttttgaatgagtctggatacgaaaacctattttcccattttgaggagaaaatccctttttagagactctttcttgaatggatatttgttataacatatttgggcttagggctaaaacctttggtttgtaagctgaggttttcatttgcacttaccatcaacagcgtataagttgaaaagaatctcaggtctggttgctgtcctgagctactgcaaagaagaaaccactgagaataagagcatttcaattattgtacatcacatttgctatttgctgccrttattcttctattaaaggaggataatcaactgatatgatattgtagatctcagtgcctagtgcattgtaggtcctcaatatatgttgattcttcttttctttacatatttttgaggtacagaaagaagttcttaaaatggtttttaactgtaatcattttggaaaattagctatgaagatggaaatttgtgaacaaaggagaacttgcaaatgccattttactgagcatg

SEQ ID NO: 133981 - DNA, 588 bp, Homo sapiens
tcatgaaaaatattttttggacttgttaagtgagagcaaagaacaagcaggggggatttaagtgagttaagaaatggttttccagttctyacattaatttattcaggatatgaaagtgaaaaagcattcaaaacgtttgcatctaaatcttaatctggtgaaatttcttctttcaattacagttcaaaggcagttattaactactcattgtgtgagggacacaggaaaaagagtatacaatccttaatgggaataagcttccattttactttggaggcaaaaatatgcagaaacactttaagtacaagtctcctaaggataaaaatgaatacaatatttcctaacatgaagttgtcaggaaacaactgattccaagtattacctacccgtcccaggtgtcatgtgaggtcacacttcctttgatgcccaaatcacataagactgaacttccactatacctcaccaaaggatgcacaggacccctcctccacatgtttctaaggatccccagggagtgctttcgggattctgttttttgctggattttgctgtttttaaattaattcatttgtttattttggttgggtg

SEQ ID NO: 133982 - DNA, 588 bp, Homo sapiens
tcatgaaaaatattttttggacttgttaagtgagagcaaagaacaagcaggggggatttaagtgagttaagaaatggttttccagttcttacattaatttattcaggatatgaaagtgaaaaagcattcaaaacgtttgcatctaaatcttaatctggtgaaatttcttctttcaattacagttcaaaggcagttattaactactcattgtgtgagggacacaggaaaaagagtatacaatccttaatgggaataagcttccattttactttggaggcaaaaatatgcagaaacactttaagtacaagtctcctaaggataaaaatgaatacaatatttcctaacatgaagttgtcaggaaacaactgattccaagtattacctacccgtcccaggtgtcatgtgaggtcacacttcctttgatgcmcaaatcacataagactgaacttccactatacctcaccaaaggatgcacaggacccctcctccacatgtttctaaggatccccagggagtgctttcgggattctgttttttgctggattttgctgtttttaaattaattcatttgtttattttggttgggtg

SEQ ID NO: 133983 - DNA, 588 bp, Homo sapiens
tcatgaaaaatattttttggacttgttaagtgagagcaaagaacaagcaggggggatttaagtgagttaagaaatggttttccagttcttacattaatttattcaggatatgaaagtgaaaaagcattcaaaacgtttgcatctaaatcttaatctggtgaaatttcttctttcaattacagttcaaaggcagttattaactactcattgtgtgagggacacaggaaaaagagtatacaatccttaatgggaataagcttccattttactttggaggcaaaaatatgcagaaacactttaagtacaagtctcctaaggataaaaatgaatacaatatttcctaacatgaagttgtcaggaaacaactgattccaagtattacctacccgtcccaggtgtcatgtgaggtcacacttcctttgatgcccaaatcacataagactgaacttccactatacctcaccaaaggatgcacaggacccctcctccacatgtttctaaggatccccagggagtgctttygggattctgttttttgctggattttgctgtttttaaattaattcatttgtttattttggttgggtg

SEQ ID NO: 133984 - DNA, 428 bp, Homo sapiens
atgcaaatgggccctgacttaagattttttgactttgtgagagtgtaaaaccatcacaatttatgtgtaagtatggtattcagtaaattgcataagatattcaacactttattgtaaaataagctttgtgttagatgattttgcacaactatatgctaatgcaagtgttctgagcacatttaaggtagrctaggctaagctataatgttctgttggttagttgtattaaaggcattttcgactttcgacttaagatgttttcaacttatgatgggtttattggtacattaccccatcataagtcgagaagcatctgtaattaatcactatactttgatattaactctaattttataactttaaaaataagtagttaaatgcatttcaaatggaaggttttaacttatgtggttgggacaaaataagca

SEQ ID NO: 133985 - DNA, 416 bp, Homo sapiens
gagatatgtatttaatccaaagtgttagagttaagacatttctaagaagaatctttcagaaggggagagggaggtggttgtttctttctcttgaacataaatggctaaaatggacttttcgctgtccctcacttacaatacagattttgtatgtataggacatttgacctggatctcatcacattgtcctggatctcatcacattgtcctggggacacagaagtatatgctcattattttctataatataaataataagaaaactgattccaatccaaaaaccttacgtgtatackcacaacacaattttttaaaatgaacgttaaaaacctaataggacacttgaactgaacatagactgtggtgttatgtattaatactaaaacaccttgagcaactgcttaaaaaagatgata

SEQ ID NO: 133986 - DNA, 416 bp, Homo sapiens
gagatatgtatttaatccaaagtgttagagttaagacatttctaagaagaatctttcagaaggggagagggaggtggttgtttctttctcttgaacataaatggctaaaatggacttttcgctgtccctcacttacaatacagattttgtatgtataggacatttgacctggatctcatcacattgtcctggatctcatcacattgtcctggggacacagaagtatatgctcattattttctataatataaataataagaaaactgattccaatccaaaaaccttacgtgtatactcacaacacaattttttaaaatgaacgttaaaaacctaataggrcacttgaactgaacatagactgtggtgttatgtattaatactaaaacaccttgagcaactgcttaaaaaagatgata

SEQ ID NO: 133987 - DNA, 480 bp, Homo sapiens
gaattcttttctttgattatcaaggactttcactgcaggcagtgctatttcttgtgcctaagaatgtttccaaaagtcgcatcgctaatgatatttgccaagttgagtgtacacaaagtttctcatatcctgttcaagttaatcaacrtcaagcacatggggatgctttagggtgagtctatagtacaaaatgcataaaccatgtccccaggaaatttgaaaggaagcaggtgctgaatggaatttttttccttttccatgagctgtgttaattctatctccagtaggcctaatgcttgaataagcaagatgtctaatcaataaattattttcatgctcagaatttcaggtttttgtactccagcatagcttggtcttatttcttactgtatgaaagcttaacagcaatgtgatttaaggttttgttttaaatgggagatgtaagtgatttaattcatgggtacttttagaacctgatag

SEQ ID NO: 133988 - DNA, 447 bp, Homo sapiens
ccttcctccctctgtaaaggcagcaatgatgggtggagtcgttctctgatttgcataaatccgatctactcttcaccttcttatttctgcttataagaacccttctgattgcattggtcccacttgaatccagtataatctccccatctcaagatcagctaattagtaacttctattccatctgagttctgggtattaggatctggacatctgtggggaactattattctgcctagcacagggttgaagcagactaaaggaagggaagaatgagttcagggactgggctgagtgggaggcaggtcatgtagggccttgtaaacaatgtggacagggagatgggaagtcttaaggaggattgattcaccttggttgctgtgtggstagtagactcaatggcaaacaagagtggaagcaggagagcagttaatatgccactgcagaatt

SEQ ID NO: 133989 - DNA, 601 bp, Homo sapiens
gttctgtgttggagacagagaatgaaaaggccaaaacttaaaggcatatttaaacaaaatctgccaatctcttattttgccagcctatgacttctctacacacacacacacacacacacacacacacacacacacacacacatcttcaccatctcttaatctacctctacctaagccaatgttttcactgcattcttcaaatacagtgagcattttttcttattccccatacttaaaatgctgtccccaatctcttcagccatttgaatcttctccttctccttctccttctctttcttctgacggagcctcacactgtcacaaggctggagtgcagtggcacagtctcagttcactgcaacctctgtctccctggttcaagtgattttcctgcctcagcctccagagtagctgggactacaggcgcctgccaccatgcccagctaatttttgtatttttagtagagacggggtttcaccatgttggccaggatggtctcgatctcttgaccttgtgatccacccacctcagcctcccaaagtgctgggattacaggcrtgagccaccatgcccagccctgaatcttctttctttatgtta

SEQ ID NO: 133990 - DNA, 539 bp, Homo sapiens
tttcttattcttaatgcattgggaggaatagccataactacattaaataatataggaacttttgtcttgctttttactttattcttgttttaccttaaagtgtaggattgtctgattttttttttgacatagatatttttcacattatgccttatttactaagttctctttttaatttggaataagtactaaatttgtcagatgtcttcttggtatttatattagtttcctagggatgcctaaaaaaatcaccacaaatgtagtggcttaaaacaacagaatttactctctcacagttctgatggccagaagtccaaaatgaaggtcttgcagagttgacatcttctggagactctgagggggaatcccttccayggtccccttccggcctctgatggctgtcagcgatccttggtactctttgacttacagctctgccttcatctttacatcttcttctcctctgtctgtgtcttctcttctcgggacacttgtcattggatttagagcctacctggataattcacaatgatctcatc

SEQ ID NO: 133991 - DNA, 495 bp, Homo sapiens
ctttttctgccttccatctggctaagattcttaatggccatatacagggctgataatgtgttttctgacctaagtttccagtgattgtctttaacttaatacttgctgaggcatcaggaggattcagaggtttccctctctagttcctttattggctagtatcagcatcattttaatttttgtcattaatactgagtcaacaatatgccaggtagcaatatggggacctggaggaggtagtcatagttcttggctggagtcctcaggagagagttttagcaggagatttgagaagctggatcactctcaacgactattgttgtcctaggaaatgaggttgtgatgtgctagttactgtakgaggagcctttgaaaccagtttttttatcagcagggagatgggggttgattctctggccaaggggaatccaggatgaaccagccacaaggaaaaaaacctccagagacatcgtgaggccagcacgatggagagaa

SEQ ID NO: 133992 - DNA, 486 bp, Homo sapiens
gtaaattctgacacaatagaacatttgaagaaggactggtagtgccttattttgtaatctgtgccacagagagtcattaaggaatatgtgaatctatgtggggaagctcttgtgaaatctaccatcattaccaagctcratgaataaatgatatagatatggcagatggtagcaagagaagggacctacccaggaaaggagaacttatggttctagtggaggcagaggttagacaggaagtcagccatgagcaaggatgctgggtgagccagggtgaggcgtgtgctgcaagaaaaaaagtgctcactctgaaggatagcacaacagatttgtcttttgagaaaatagtctcatcagtctttgtgacggtactacactgacctttaaggcatcactacataagagtttttcatgctgacaggctgaaagaaaatgcaaatgttgaaaagaaactgagttaactgggggaaagtcgtcttaaatggg

SEQ ID NO: 133993 - DNA, 349 bp, Homo sapiens
tctaccatcattaccaagctcgatgaataaatgatatagatatggcagatggtagcaagagaagggaccyacccaggaaaggagaacttatggttctagtggaggcagaggttagacaggaagtcagccatgagcaaggatgctgggtgagccagggtgaggcgtgtgctgcaagaaaaaaagtgctcactctgaaggatagcacaacagatttgtcttttgagaaaatagtctcatcagtctttgtgacggtactacactgacctttaaggcatcactacataagagtttttcatgctgacaggctgaaagaaaatgcaaatgttgaaaagaaactgagttaactggg

SEQ ID NO: 133994 - DNA, 342 bp, Homo sapiens
taaaaatgcattttatgttcatttttaaaaaaaattttttaaatcgggatttgatcttcaatgctaccaaatcacctctagtaagacacaggtctgcagttagtttttgaagtggatccaggatggtggtctgaggttgcctgtaaagaatgaggtttttctggcctttggccaaagcaaagttaactaacggaagggataaaaattgtcttgtgtgggccaagctgatgttgctcaataggtttttttytgaattgtgaggaaaagagttgccttattttttccacttctggaatcatgagaaccagggctgggagtgaagttgcatgagtcacagcagtg

SEQ ID NO: 133995 - DNA, 542 bp, Homo sapiens
ctgccccaaatcctttggtcaagtgaagccccaggctagccctggttgcccacaagtctgatagtcccttgccaggctgctcagtgtaagtggaggctggggaagctgggctggggttatgcacagttcctggccctcaggctgaaacatccccagttctttcccactctagaagtaacagcgatgtgcaacagagactgcacatttgggtattaaaatgtgtgaatcactcacaaactggcaggtcaagacagaaccatggtgagcgctttcccttggcaggttgcattggtgcagggacttgagcagagccctaggagagaaaggagaaagggcctgaggcactgctccttcttgacrcctagtttttgtcccatagtaatatttacaccactttccagaccccgttacactttatgtcattgattctcactggtggttgtgtttcttagagaaggagaaggaattggatcccaagtccccaagggcaccaccactcttgggggctcccttgcaggggtgcctgcctgtgatacaggcac

SEQ ID NO: 133996 - DNA, 502 bp, Homo sapiens
cagagagggtaaatgatttgcccaggatcacatgacagcttagaggcaaagccaagaatagttcaatctacctgactccctcccattcatgcttctccactgcctcaagatggcatacagcttctgcatccccttctcaaatctcccaccccagaaacttacctgattatttacccatacatactgacakgtcctgaaacataaacccaccttccttggttagaattgccctggaagcagagcctggacgaggacttcagtgtagatggccttttgggaggaaatcccaagaagcaggagtgagggagtgaagagagagtgagatgcagagggaagaaaagcaatgggatgtcatggagctcattacagctgtggtagctggggcttggtctcaccaggctcctctctgaggaaccctgtaggatgcttcttagattacctcgccagctgggcatttatcctctaactcctgtcccccactggttgaagatcgcccacataa

SEQ ID NO: 133997 - DNA, 262 bp, Homo sapiens
tagggttctctatctgtttcctgttctgtagaaggtatggcaatcctagccacttgcagtgtgagaggtgatcaaggttgaccccttttatcacagattttcactctattgatggttgtttaagccctccaagaatgaggagagacagtagagtccaggttactggctcaggtgcaggtatcctaaattctgctactttgtgrcttaatgaatgtcctgtagtctgatcaatcaatccttggggaggaggagctagtaaaag

SEQ ID NO: 133998 - DNA, 376 bp, Homo sapiens
gatctgtgttgagaaagattaaatggctgtgattggttcagaaccattagtacaggtgtaagacgatgagcatttgggtggcatggatgctgtggagtctatcctggactttattcctatttccattgtctgtagtcaagctcctcacacacttattcctagattttgtaaaaacttctcatctgcctgctctggktcttgctgtttttttccagtccactgtgtaaacctttccagacaaaggttcttaaaaccttcttctcatgtggtcacatccctatccaattatcttaaatatgtctttttttttctctttttgagatagagtctcacttcatcgcccaggctggagtgcagtggcattatctctgctcac

SEQ ID NO: 133999 - DNA, 531 bp, Homo sapiens
gaattcttagtgactctgtttcatccacctagtagggattctctgttaaattgttttatctagcatctgtatcacttggggtcccaataggaaacagatggcactctcgagctgggtaattgagaagcgttcaataaagagactatttgcaaaggtgtaggcaccgtgtgatgtaaggaaaacacaasggatgtgcagagggctggcaaataacatagggagagcatcatgaccccatcacctggaggggaggggaggaagcactacgagtcctggggagtgagaggaccaccttggtagatgggccaagaagcctgagccaacctaccaggaaaaagccatgggaagaaataccccaacctctctctccctccaccctgcaatcacctgctgactcctgctgacctatctcaacctgaagccaaacaatagtgggggctagtaagtccaaaatctgtagggcaaatggcaggtatgaaagatgcggggaagagtagatgttgcagccttgagtcctcaggctggaaaccc

SEQ ID NO: 134000 - DNA, 531 bp, Homo sapiens
gaattcttagtgactctgtttcatccacctagtagggattctctgttaaattgttttatctagcatctgtatcacttggggtcccaataggaaacagatggcactctcgagctgggtaattgagaagcgttcaataaagagactatttgcaaaggtgtaggcaccgtgtgatgtaaggaaaacacaagggatgtgcagagggctggcaaataacatagggagagcatyatgaccccatcacctggaggggaggggaggaagcactacgagtcctggggagtgagaggaccaccttggtagatgggccaagaagcctgagccaacctaccaggaaaaagccatgggaagaaataccccaacctctctctccctccaccctgcaatcacctgctgactcctgctgacctatctcaacctgaagccaaacaatagtgggggctagtaagtccaaaatctgtagggcaaatggcaggtatgaaagatgcggggaagagtagatgttgcagccttgagtcctcaggctggaaaccc

SEQ ID NO: 134001 - DNA, 548 bp, Homo sapiens
tccacctagtagggattctctgttaaattgttttatctagcatctgtatcacttggggtcccaataggaaacagatggcactctcgagctgggtaattgagaagcgttcaataaagagactatttgcaaaggtgtaggcaccgtgtgatgtaaggaaaacacaagggatgtgcagagggctggcaaataacatagggagagcatcatgaccccatcacctggaggggaggggaggargcactacgagtcctggggagtgagaggaccaccttggtagatgggccaagaagcctgagccaacctaccaggaaaaagccatgggaagaaataccccaacctctctctccctccaccctgcaatcacctgctgactcctgctgacctatctcaacctgaagccaaacaatagtgggggctagtaagtccaaaatctgtagggcaaatggcaggtatgaaagatgcggggaagagtagatgttgcagccttgagtcctcaggctggaaacccaggcagaatttctatgttacagcctggaggcagaattctt

SEQ ID NO: 134002 - DNA, 531 bp, Homo sapiens
gaattcttagtgactctgtttcatccacctagtagggattctctgttaaattgttttatctagcatctgtatcacttggggtcccaataggaaacagatggcactctcgagctgggtaattgagaagcgttcaataaagagactatttgcaaaggtgtaggcaccgtgtgatgtaaggaaaacacaagggatgtgcagagggctggcaaataacatagggagagcatcatgaccccatcacctggaggggaggggaggaagcastacgagtcctggggagtgagaggaccaccttggtagatgggccaagaagcctgagccaacctaccaggaaaaagccatgggaagaaataccccaacctctctctccctccaccctgcaatcacctgctgactcctgctgacctatctcaacctgaagccaaacaatagtgggggctagtaagtccaaaatctgtagggcaaatggcaggtatgaaagatgcggggaagagtagatgttgcagccttgagtcctcaggctggaaaccc

SEQ ID NO: 134003 - DNA, 548 bp, Homo sapiens
tccacctagtagggattctctgttaaattgttttatctagcatctgtatcacttggggtcccaataggaaacagatggcactctcgagctgggtaattgagaagcgttcaataaagagactatttgcaaaggtgtaggcaccgtgtgatgtaaggaaaacacaagggatgtgcagagggctggcaaataacatagggagagcatcatgaccccatcacctggaggggaggggaggaagcactacgagwcctggggagtgagaggaccaccttggtagatgggccaagaagcctgagccaacctaccaggaaaaagccatgggaagaaataccccaacctctctctccctccaccctgcaatcacctgctgactcctgctgacctatctcaacctgaagccaaacaatagtgggggctagtaagtccaaaatctgtagggcaaatggcaggtatgaaagatgcggggaagagtagatgttgcagccttgagtcctcaggctggaaacccaggcagaatttctatgttacagcctggaggcagaattctt

SEQ ID NO: 134004 - DNA, 598 bp, Homo sapiens
aatggtatacctctgtgtcagaccctgtgtgccaagggttctttacctctggagctgatcacttaaccttcaagttgaatactggagtccagtatcaaaacaccgcatttacattaacaagcatatgcttccccattccttaatcatcagaaggaatagagttattagaaagttgctaaggtgttagaaatccatcagytgtctgagaaagttagtggaaggatgcagtagaacaacacatttaaaatgactaccacttcctggcacagagtagatattcaatatcaagtttcctctctgttgttttcctacacaagagagtggcacagagtaagtaatatctgtcctataaacactcaccatggctatccctccctgccctgctaaaagaagacatagtatatcctcccattaatttctttccccattcctacagatattcttcctatgagatggtgtcatccttatccattcctgttttcttcttctggacacctatggtttgtttctgtccgtttatgatgcaatacctcaaacaacattcagttcctcagatatgagctgactaatgaaggagaaacaaaagggcttcttcctc

SEQ ID NO: 134005 - DNA, 598 bp, Homo sapiens
aatggtatacctctgtgtcagaccctgtgtgccaagggttctttacctctggagctgatcacttaaccttcaagttgaatactggagtccagtatcaaaacaccgcatttacattaacaagcatatgcttccccattccttaatcatcagaaggaatagagttattagaaagttgctaaggtgttagaaatccatcagttgtctgagaaagttagtggaaggatgcartagaacaacacatttaaaatgactaccacttcctggcacagagtagatattcaatatcaagtttcctctctgttgttttcctacacaagagagtggcacagagtaagtaatatctgtcctataaacactcaccatggctatccctccctgccctgctaaaagaagacatagtatatcctcccattaatttctttccccattcctacagatattcttcctatgagatggtgtcatccttatccattcctgttttcttcttctggacacctatggtttgtttctgtccgtttatgatgcaatacctcaaacaacattcagttcctcagatatgagctgactaatgaaggagaaacaaaagggcttcttcctc

SEQ ID NO: 134006 - DNA, 598 bp, Homo sapiens
aatggtatacctctgtgtcagaccctgtgtgccaagggttctttacctctggagctgatcacttaaccttcaagttgaatactggagtccagtatcaaaacaccgcatttacattaacaagcatatgcttccccattccttaatcatcagaaggaatagagttattagaaagttgctaaggtgttagaaatccatcagttgtctgagaaagttagtggaaggatgcagtagaacaacacatttaaaatgactaccacttcctggcacagagtagatattcaatatcaagttycctctctgttgttttcctacacaagagagtggcacagagtaagtaatatctgtcctataaacactcaccatggctatccctccctgccctgctaaaagaagacatagtatatcctcccattaatttctttccccattcctacagatattcttcctatgagatggtgtcatccttatccattcctgttttcttcttctggacacctatggtttgtttctgtccgtttatgatgcaatacctcaaacaacattcagttcctcagatatgagctgactaatgaaggagaaacaaaagggcttcttcctc

SEQ ID NO: 134007 - DNA, 274 bp, Homo sapiens
gaattcacctcttccatcaaatatctaaacttattacaaccctgcacttacgctctccctttccaccccaaaatactctgtgagcccttactcattctacttgcacttgtatttgttggactgtaayaaacacttgagttagtctttcccctactggaccttgaggacaaggaggatgtttaatttatttatatatctcttgtacttggcacagtgacttgtttatagtaggcacgaaaaatactaattcatttccttcaaaattcctaacaca

SEQ ID NO: 134008 - DNA, 274 bp, Homo sapiens
gaattcacctcttccatcaaatatctaaacttattacaaccctgcacttacgctctccctttccaccccaaaatactctgtgagcccttactcattctacttgcacttgtatttgttggactgtaacaaacacttgagttagtctttcccctactggaccttgaggacaaggaggatgtttaatttatttatatatctcttgtacttggcacagtgacttgtttatagtaggcaygaaaaatactaattcatttccttcaaaattcctaacaca

SEQ ID NO: 134009 - DNA, 470 bp, Homo sapiens
ttttctaagaccagtaggaagaattgaggttttaaaataagatactcaattttcaaggagtttaattgttagtttgcagttaataaatgagggcaagagaacttcaactgaatatagcaagactttcaacwttgaagctccccaactccctaggatggtgggggaggggcgatttggtcagtggaggaagcaggacgctgcccatcacctgaacctaaccctagggtatgaggcatgagcaccccccactagagagagaagcagtgtcacctgggaagaggtcgttttcagttcagatctttttcagtgcaattgacactcaaagctgagtgggagtttgaggacagagctaggaattctgcagggcaccagcaaatggtttggtgagggagggctgtaaaggtgggtcagggagaaggaagcccagagcattatggggattagagggtctgtcctttgaaaggctgtgt

SEQ ID NO: 134010 - DNA, 375 bp, Homo sapiens
ttcagtgcaattgacactcaaagctgagtgggagtttgaggacagagctaggaattctgcagggcaccagcaaatggttyggtgagggagggctgtaaaggtgggtcagggagaaggaagcccagagcattatggggattagagggtctgtcctttgaaaggctgtgttgggcaataacaggaaagctggttaagtggtccagacgcttgggttctgaccgtctcctggggtatagtggctgtaccatttatctgtggcctaggggaggtttccctttaagtcagaggtcataagctagcagccacgatctagcctgcagaagaaatgttttgtttcactcacattttacaaatatacattagttgctaatattt

SEQ ID NO: 134011 - DNA, 424 bp, Homo sapiens
ttatgtaaacttctcccatataaaatgggctctttcaagggactggagtaatttttccctattttgtctctaaactgcttgacaagctaaaaaagttttacctactggggmggagtgtggtaacggatagcatcaatgacagcatactgtcctatcagaaaaatactttcttattgtttgaaaactagggtgggaagaatcatgaccccagttaaataactaattagaatattggtctatgctgaaatctcaaattgctttaagatctttctactaagagtatgctagtattactcatctcctcttaggtctagtcttagaggtgtcatccatatacctcaacagtaaagagtgttggttctgaagatgttagttgtttctcagatatttgatattatgacactgtaggcagtcatatcctgac

SEQ ID NO: 134012 - DNA, 251 bp, Homo sapiens
acatcagcatttttaacctttaagcatcccgtcatagaataatcccaacattatgaaatcactagattttattcttggccagaacggcaagtaccatgagtaatggaatcccattcataattgtttttattcctcacagaaggcaatactgaagacatttaaatcagtctgagtacttgacttttgcttaactaaatyatttaggaataggttcaagattgaactataggggaaaactataggattcatcc

SEQ ID NO: 134013 - DNA, 549 bp, Homo sapiens
ctttttaatgtatcctatgaaagaaagttctattaaattatgacatgccatggattgtataatacatgccaatttcaaggattttaaaaggtaaaaaaaagtttgtcttagaatcaatgaatataataattattttgttagcataaaagtaatgtatatttgttaaaaacckgaaaaatactgagtattagctgaaatatggttgcaggtaacagaaaagcttgattatgtaagaaaaatgtgtgtaactgaaaatccagaggaagaacagagggtagagttgatttaattcaggaactaatggctatcacaacagcagtttctttccatctccctgctatgtctcccattgtgtcagccttcttgagacaagcttctttcgtggtatctgttccaggtttcccatctgcaccccctacactacaatggagacagaaattctatcctagcattctaagtaaaaaatctttttttttttttttttttgagatgaagtcacactcttgtccctaggctggagtgcaatggtgcaatcttggctcactgcaa

SEQ ID NO: 134014 - DNA, 549 bp, Homo sapiens
ctttttaatgtatcctatgaaagaaagttctattaaattatgacatgccatggattgtataatacatgccaatttcaaggattttaaaaggtaaaaaaaagtttgtcttagaatcaatgaatataataattattttgttagcataaaagtaatgtatatttgttaaaaacctgaaaaatactgagtattagctgaaatatggttgcaggtaacagaaaagcttgattatgtaagaaaaatgtgtgtaactgaaaatccagaggaagaacagagggtagagttgatttaattcaggaactaatggctatcacaacagcagtttctttccatctccctgctatgtctcccattgtgtcagccttcttgagacaagcttctttcgtggtatctgttccaggtttcccatctgcaccccctacactacaatggagacagaaattctatcctagcattytaagtaaaaaatctttttttttttttttttttgagatgaagtcacactcttgtccctaggctggagtgcaatggtgcaatcttggctcactgcaa

SEQ ID NO: 134015 - DNA, 540 bp, Homo sapiens
ggaaaggaggagttatgaatatacctgtttggtatctcagtaagaacatattttgtattctatatttactcatactcccagttatgagacaaaactaaatgtgtgcttgtgagtgatgaacagaatggatgttcttggagaacaaaggaaacacatggtagcatgtgagtgttcctccaaagcacagttgatttgggagtttcagggcccaactctcccatcactgcagatattgttctctatccattatcctcatttacagaaatcctgatccatatccccagagccaacatayagctcacagcagctagatttctctgagacaattaagtggcttttttcccagttgctcttcccagaatttagacgggagaaaaacattttgtgaaatgttaatactctaatggcaagaattaatttgtggatgtggttaaatgctatcttagcaacgccttgaaatgtagcgtatgattagcacttcaccggtacagatattcattgcctttaagaaattcattttaatgtctcttgttctattat

SEQ ID NO: 134016 - DNA, 587 bp, Homo sapiens
tctctaatacttttctagtattttctgtcttttcatcttttgctttataccctgtgatactctcagccacactaagtccaaktgatttttgatttaattatatttttaattcgccaaagctcttgcactttctgattacctcttattcatagcaactctttttttctgggaggagtggggccgtgaagtttaagggatgcaatactttttgtctgtttaaggatatttattaaacgttttcttctattctctgaattacttcatctaaattagctattttatttctttttcaatttttgctcttatttagctggcaatataatcctatgccctttccatcttccagaactttgtccatttctggtccccattcatgtttctgtaagtgtcatggatttgctctcctttttaaattttgttatttcagttgaagagctgggaagatgggagcaaaactgtatttagactgtcatcttaaaactcacgaatttttctagaatatacttgcatcatgttcaacatttccctcattgtctaaaatataaagcttaagtaatggtctggtatttgggactctgcacagtttg

SEQ ID NO: 134017 - DNA, 587 bp, Homo sapiens
tctctaatacttttctagtattttctgtcttttcatcttttgctttataccctgtgatactctcagccacactaagtccaattgatttttgatttaattatatttttaattcgccaaagctcttgcactttctgattacctcttattcatagcaactctttttttctgggaggagtggggccgtgaagtttaagggatgcaatactttttgtctgtttaaggatatttattaaacgttttcttctattctctgaattacttcatctaaattagctattttatttctttttcaatttttgctcttatttagctggcaatataatcctatgccctttccatcttccagaactttgtccatttctggtccccattcatgtttctgtaagtgtcatggatttgctctcctttttaaattttgttatttcagttgaagagctgggaagatggkagcaaaactgtatttagactgtcatcttaaaactcacgaatttttctagaatatacttgcatcatgttcaacatttccctcattgtctaaaatataaagcttaagtaatggtctggtatttgggactctgcacagtttg

SEQ ID NO: 134018 - DNA, 643 bp, Homo sapiens
gtaggtattttacctgcatgctacagatcagaggattgaactgagcaagtttaagtcatgtgtccactttaaaggcaagggcttttcttccaataaaatgttgaggtaattgagttttactgtctttgaaaaggagcagggagctgtagcaaaagcagtgaaattgagttttactgtcttagcactcaacaacattcactgactactatgtgctaaacactgctctaggtgcaaggaatatagcactgaacaaactccaaatcyctgctttcatggagcttatgtttcagtggaggcaaatagacaataaataaaattaataaggaaatctggaactaaatgtgataagggcgacagaagaataaagtagggaagaggaaaaactagtgaattaggttgcaatttaaaatagcatgcttagaggacattttgtgtgtgtgtgtgtgtgtgtgtgtgtgtgtgtgtgtgtgtgtttattgaggtttaacaaaaaagctagttaccactaccacttctgcttaaagcctattatttctctccattgccttcataaaattcttatgtacaaagcttttcataacagtttacctcttcagacccatttcatatgactcccaataaagtatacttcaggtccacgggc

SEQ ID NO: 134019 - DNA, 523 bp, Homo sapiens
cattataaatcacttgaagatgaaatgacttggtacatatttaacttatcacagagctcagcatgtggtacattctctattaaggatagttgatcagagcaacttttcaggatgatgtgccagcatgggctagtaggaagaaccctgggctattggcaatgtggccatttgagaaatcaaatctatttataaatatctgtgccaattgcaatgctttactgccatagaaatgaagtagtttgtrcttctcatttcttgcccaggaataaatgtgtctatgtcaggatggccacttgatggtgagattctgcagacataattattgaggtaaagaggaggctacaatcagtattttagtcacataaaaagatattcttttgtagctatccttggacaaactgccaatgagtataattagtttctgtccggatctttattttgatttcccccgctaggaggggaaattctcactgtcatgtgtacctaatgcaaaattcctccacagatactggaataatgcagg

SEQ ID NO: 134020 - DNA, 300 bp, Homo sapiens
tgagggagggtgggaggcaggcaaaaaataaataaataagaaaacttcatattagactagtgtttctcaartgttgatgtacctgtaaatcacctggagatcttcctaacatgcagattttgactcaatagatctggaatggtaccggagacttcatttctaataagctcccatgtgaggtggatgctgctgtttcaaaggctactctttgagtaacgtagtgttcaaagataatgcttgaggattcagcaaatatgaaaagatggtacagcataaggtggtataggagtggggtagaag

SEQ ID NO: 134021 - DNA, 590 bp, Homo sapiens
gctcccgtcattgcgaggctcacccgggatggatctgtttccaggctcactcaaggggccgttggtggacctcagttcctcacatgctgttggactgggggtctcakttcttcttaggctgtttgccggaggcttcccttggttccctgtcatgtggcctcctgatagggtggctcacaaatatggcagctggcttccatcagagcaagctaatgagagggcaagagatggagagcaagatgaaagtcggggtctttctataacctaatttatcaagtgacatcccattactttttgccatattccatttattacaaataagcatacttgcttacaagtaagtcactaagtccagcccacactcagtgaggagactaccaaaggcatgaatattattagacagggatcacttggggccattttaagatggctgccacagcacatatttgcctgttacctcagaatctgaatgtctatgcccttatgtaggttgccgtcactgttggtttgattaggaaggaggatcatgggaattttttggctcccagcagaaactaggattggcctaaatggttctcactgaacaactt

SEQ ID NO: 134022 - DNA, 590 bp, Homo sapiens
gctcccgtcattgcgaggctcacccgggatggatctgtttccaggctcactcaaggggccgttggtggacctcagttcctcacatgctgttggactgggggtctcagttcttcttaggctgtttgccggaggcttcccttggttccctgtcatgtggcctcctgatagggtggctcacaaatatggcagctggcttccatcagagcaagctaatgagagggcaagagatggagagcaagatgaaagtcggggtctttctataacctaatttatcaagtgacatcccattactttttgccatattccatttattacaaataarcatacttgcttacaagtaagtcactaagtccagcccacactcagtgaggagactaccaaaggcatgaatattattagacagggatcacttggggccattttaagatggctgccacagcacatatttgcctgttacctcagaatctgaatgtctatgcccttatgtaggttgccgtcactgttggtttgattaggaaggaggatcatgggaattttttggctcccagcagaaactaggattggcctaaatggttctcactgaacaactt

SEQ ID NO: 134023 - DNA, 519 bp, Homo sapiens
tagttctggattttattttttgagtgactactaagggagagaccccaagataagggctggggtcgtgttgtggggatcacatgagattatggatggcataaaaatgtgtaaatcttattcacctttcttttgacagagagtaacaacagtcagttatgaaggaacaactgtggactcaaggactttagatacctccgcctcccttgccacagtactaatgttgcaggataaatattagtaacatttcagagatgagaaatttaggttcagggaggttaagaaaccataacgtttagcgccagggattaagtagaagactgacttcaccttgtggtcttcattatttttaccatcaccatcatcatgtttattgccattgwattatggtcacaagaaagatgcattcacatggatggtaacacaaacacagtcaatatcaagttatattggtttgagttaaggtgtccactgatgacctttgcctggatatagattgtgtaggaaatacagggtgtggga

SEQ ID NO: 134024 - DNA, 541 bp, Homo sapiens
ctgaaagcagtcccaggattatttcaagtgaatgaataatgaaattgcccagcttcctaacggtttccaaattctatgactacctcagtacaatctcctgggctgattcatcagctgggcttctctcactgtgggtgaagccaccaggctcggaagcaggagcttctgcattgagtaattaaggccagtgaggacaacccagtgtcaccagggttactgaaggctgctttggaaaatgtagaaaagatatttcatccttcagacagcatcattagggtaacacacacaaaataatcaattaccaaaagcagctatttttaaataatccttcactggtgtgaaatgcctttatcacatcagaaatcattgctcttgctagaggtaagtatacacgaaacaacagggcttcttgtttggtgtatatttcttggctttaaaacaagggcaaattcaggatgatacactaagaattcaaataaatcactgttttacacaaagatgygtatgtaccatggctaacctcctaaaaacactccactca

SEQ ID NO: 134025 - DNA, 661 bp, Homo sapiens
aactgtctaggttatttcttttgttgctaagcaatgaatattaattgtggaaaatttgaaaaattttaaatacaaggatgaaaacaaaatgcatgcttaatataaaaaaaaggtatagagatatacatatttaatatttgggataattccctccaataaataatgtttctactcatctccaaacacacacacatacacacacacacacaaytgaaaattctgacttccattctgcttttccacttagatcataagtatcttgtcaagtccttaaacattaaaaaaaatggcatacagcattctttatgtccataacgtagaaggcaaaagactactattttttttctttttcgtgttgaatccccaacattcaaaacagtgcctgacaaatagtaggtgctcaataaacatctcatgaatggataaatgaaataactagaatgaacaaaggaatgaatgaatggttttccctctgaaaactgtgtcaggtaaagtggacaactcactgcttctccaagaaaccaataaatatgtcagaagcaggctccataacaatcatttctcaagtttatacaggtttagccaaacctgggtatgaaattgtcttaactcattttatcatatactttatcttctatgaatcccaaacaatgcatctcct

SEQ ID NO: 134026 - DNA, 537 bp, Homo sapiens
gctcaataaacatctcatgaatggataaatgaaataactagaatgaacaaaggaatgaatgaatggttttccctctgaaaactgtgtcaggtaaagtggacaactcactgcttctccaagaaaccaataaatatgtcagaagcaggctccataacaatcatttctcaagtttatacaggttkagccaaacctgggtatgaaattgtcttaactcattttatcatatactttatcttctatgaatcccaaacaatgcatctcctctagcatgacaactaatatccagctcttctatattgttaaaaaaacaaaacaggccaggtgaggtggctcatgactgtaatgccaacaatttgggaggctgaggcaggcagactgcttgagcccaggagttcgagaccagcctgggcatcatggcaaaaccctgtaccaaaaatacaaaaaaattagctggatgtggtgatgcatggctataattccagctatttgggaggctgaggtgggagaatcacctgagccaggaggtcaaggctgtag

SEQ ID NO: 134027 - DNA, 537 bp, Homo sapiens
gctcaataaacatctcatgaatggataaatgaaataactagaatgaacaaaggaatgaatgaatggttttccctctgaaaactgtgtcaggtaaagtggacaactcactgcttctccaagaaaccaataaatatgtcagaagcaggctccataacaatcatttctcaagtttatacaggtttagccaaacctgggtatgaaattgtcttaactcattttatcatatactttatcttctatgaatcccaaacaatgcatctcctctagcatgacaactaatatccarctcttctatattgttaaaaaaacaaaacaggccaggtgaggtggctcatgactgtaatgccaacaatttgggaggctgaggcaggcagactgcttgagcccaggagttcgagaccagcctgggcatcatggcaaaaccctgtaccaaaaatacaaaaaaattagctggatgtggtgatgcatggctataattccagctatttgggaggctgaggtgggagaatcacctgagccaggaggtcaaggctgtag

SEQ ID NO: 134028 - DNA, 462 bp, Homo sapiens
ttccaggctttcagtgattttctttttgttttgagatggagtcttgctctgttgcccaggctggagtgcagctgcgccatctcagctcaccgcaacctctgcctcctgggctcaagcgattctcctgcctcagcatcccaagtagytgggactacaggcgagcaccaccacgcctgactaattttttgtatttttagtagagatggggtctcaccatgttggccaggctggtctcgagctcctgacctcaggtgatctgcccgccttggcctcccaaagagctgggattacatgtgtgagccaccgcgctcagccaaatttttttttttttttaatctaagccatgggcttaactgcttaaaaaaaaaattgtcttatgcaagtttcctctttaagaggcaagggagcataaggaggaggaagagaactaatatgtaagcaaggtctagaataggtgtttgt

SEQ ID NO: 134029 - DNA, 593 bp, Homo sapiens
aagcttgtgggcgttatttatatcctactgctcaaggtcatcaccaaagtctcatttttcacaaaaarcaatttgcaacctctggcataaatgggttaagacacacaaaaagtataaataacaatataataaaaagttttgtacctaccactcagctaatgaaataaagccagttaaatacagttgaaacctcctggtaacctttctctgatcatacgtccccttctcttggcagacatagtcactatcctaaatttgataattcttttgaatatatttttccagaacaaacctaaacaattccactgaattctcttcactttctagctcattactgtatatataataaaaagaaatggtattttgtccaataattttcctgaaataaaggacatttataaactgtctagctagtcactacataggtaataagaaagaaatagtattttgcctaataattatactggaataaaggacatttatgaactacttagggaaaggaaatatagctgtcccttttaactccggtgtctggaatgtagtagatgctcaataagtttctgcttaattgaattgaattaaatgtgttcagt

SEQ ID NO: 134030 - DNA, 487 bp, Homo sapiens
gtaaggaagagatgctgtacaatcctagtccctggtgatggtgtagcagtgcctataatgatggcatgtggtggtgcttgtcttgaattgcaggccatgttattctgagcagtattatatgtctactcacgaaagttctaggtataagccacayccattcaaatatactcaggttaaaccagtagtgctagtaatctaattgtggacaaagtcaaagatgggccaaccatatgctgaatctgagctatggcatgtgttgtcagaatatagttccaataaatgcaaaaaggttatttatgcctttgggaagctgaatagatttatagaccacatagaagttggatttttgccaaccttctgctatctaacttcttaattttaacgtagttgaatttatcaatcttttatggttagcactttttatgtcttgtttcagaaagccttttttttcccactctgatgtcatgaagatattctcctttgttat

SEQ ID NO: 134031 - DNA, 583 bp, Homo sapiens
tgattttcctggaacttagagtcaatttctaagcatatgttttagccactcttttgccctaaccaaactttattatagctttttaatgaatcttggtattggccaggacacatccctaaaagtgtccttctgcaaaagtgtctcaagagtgtcttggcttttcttgggctgttttcttccgtatacattttataatcatctttcaaggtttcacaagaatactgttgagatttgatttgagttttatcaaacttatagrctgattaaaagataatgccatcattaggacattgagcctgagtctttctatctgtaaatatagtaactctttccatttatttagttcttatttaatgtctttcaatacagtttataattttcttcaaagggcatgcactctttttagattgagttttaggtggtttatatttttgtaattgccattgtaaatgttatctttaaaattatattttctagctatatattaattttcatcatatgctacctgtatttcttattctaaatggcaaatagtcaggagaggaggaaaatcatgggtgtttttgaatgcttactattaaat

SEQ ID NO: 134032 - DNA, 558 bp, Homo sapiens
agatctatcagaagaatcactatttatggcagctatagccttatgaaatgtatgtcctaaataataagacttgaaagtcagaattactccttgatccatgggctgcagagtagatgttttgttagcagatgtgaaaacaacattaatttccttgtatgtcttcattagaactcttgggtgaccaggtctgttgtcaaggagcagtaatattttgaaaggaatctttttttctgagcagtaggtctcaacagtggacttaaaatactcagtaaaccatgstgtaaacagatgttctgttattcaggcttcattgttccatttttagagtacaggcagagtagatttcgtataattcttaagggccctagaattttcacaatagtaaagtagccagctgcattcacccctaacgatagagtcagtctgtcttttgaagctttgaaatcaggcattgacctctcctctctagctgtgaaagtcctagataacaccttcttccaatataaggctgttttgtctacattgaaaatttgttatgtggtataaccaacttcatca

SEQ ID NO: 134033 - DNA, 594 bp, Homo sapiens
ataataatgaaaacatttttaaaaattttgtttccaattcatcataatacacattagtgagggaactattcactgttaccactattatttaatgatagaaataatattttaagactaaaagggcacaaaagtcattaaatcggaataaaatcaatttctttccaagtcaaatcaattgttgaccttataacatctgatattcatgaatatattcattttcatttttaaaatttatcattaaactaagcacagtgtctcctagggaagtagtcacagtagcctaagggaactaatattcataaactccgtcttttaaattagatggatctcatatctataagtagtatacagagakttgaactctttagagattccagtatttagagattaagttatttagagattaggtttgaggttttaatgtaacaccaaacagtatagtttgtagatgtgatagaagtcgtaggcctttgttatatctctaattggccaaaccagagagaaatagaatgcatgctgagataaatgtaatcactcacaaagcagtttcttgcttaaatcattttgtttaaaagacactcaccaggggaaaaa

SEQ ID NO: 134034 - DNA, 586 bp, Homo sapiens
ttttgtcaaaatcacctagagtgtctgtttaaaatcaaattgctgacttcatccctcagaacttctgattcagtagttctggtattggrtctgagaatattcatttctaacaactttccttcccgggtaatgctgatgatccaaggacctcatttttaaacatcacttgtttacaaatatctaaaggctatcatttcaaaatttatctattgatttctccagttatccagatgttttatttttatcaaagactgtaaatgttaataatttttccccaccactttagctagtaccatgttagtaaaagcctccttcaaatttcagctgggacaacagcaatgacgatattactagactttctgtttctaattttgccctctgccaataatgtttcattcacagccaacataagcttttaaaaagatacatcagaattttatttatatttcccaaacttctcattatattgtaaacaaaatctacaaaagtttccatatcctcactctgtttacctctcaggtatcattttcttctacttcttcattccttcacgtggcttctaatgagctctttgaacctgccaagc

SEQ ID NO: 134035 - DNA, 586 bp, Homo sapiens
ttttgtcaaaatcacctagagtgtctgtttaaaatcaaattgctgacttcatccctcagaacttctgattcagtagttctggtattgggtctgagaatattcatttctaacaactttccttcccgggtaatgctgatgatccaaggacctcatttttaaacatcacttgtttacaaatatctaaaggctatcatttcaaaatttatctattgatttctccagttatccagatgttttatttttatcaaagactgtaaatgttaataatttttccccaccactttagctagtaccatgttagtaaaagcctccttcaaatttcagctgggacaacagcaatgacgatattactagactttctgtttctaattttgccctctgccaataatgtttcattcacagccaacataagcttttaaaaagatacatcagaattttatttatatttcccaaacttctcattatattgtaaacaaaatctacaaaagtttccatatcctcactctgtttacctctcaggtatcattttcttctacttcttcattccttcacrtggcttctaatgagctctttgaacctgccaagc

SEQ ID NO: 134036 - DNA, 569 bp, Homo sapiens
acattctgagcagggaagaagaccctcatccttgaatctcaaagtcatattgtccaaatggatggccccaaaatgcttatagcatttctagttgggtgaaatgatctagaatgattgtaaatgtcttatttatactattgtgaattacttgaattttcttcgggaaatgttttaagtctatacttcaaatgaaaatgcatgcattttataattactaaagaaaaaataactaacygattaataggaaatgatttaatataccctttctgggtctgtaatttatattttaggtgaaaggtattagaatatgtgaaagtatttgactatataaaggaaaataaaaatattgactatattaatataaatacatttccagcagaagggatgcaccacgatactgaatttaacaataagaatatagtttctatttcatattagagtcactaggattctaattgcaatgcaagtgaagttaaatctattacattatataaaagtaaactatatcctataatgcaaaatcactagacttctttcctttgaactttttcattcagctttccccaaaa

SEQ ID NO: 134037 - DNA, 567 bp, Homo sapiens
tcagggtatttattctgaaggcagaagtgggtatattcctctattgaaggccacagttcctgttaggcaggcaggcttctcttatagctgcagacctcactgagttccagtaactacactcaacctttgcccctgaagtttgggggggacagtgacttccagatgtcactagttcaaaatgcccatcatcccttcttggtttctcttaaccctgcatacacctttgtagacagtcctttttctctttagtcaccccagctgagtgtgccatccattttctgctaggatcctggctgattcagcagggagaaaaagaaactaattaaaaatttaattgatatcmtcagagaataaaatactcataatataagaactggctgctcagagaaagtaacaatctgagaatacaaaagagttattgaaagttaaaaacatggctgctaaataaacatgtcaatagaagaactgaataatagaactgggctgaagggcaaatttgtaatttggaagataagttcagggaactctccaagatataaagtaaaaagacaaaaaagaaacggtata

SEQ ID NO: 134038 - DNA, 620 bp, Homo sapiens
cctgaggagccagggtcctaacatccttaaaagctgtgtcctagtcttaggactcctgttcttgtctgtgggccactgttgtaataaaggattcacctaattacacctagatgactagcaaatttttcctcaagactattgtcacttggcttccagagaatattttgtgcaaagtactggtcagtgcttgaagggcagagagatggaatttcacttactttaaagaactgattatttgaatgtttttgtacctacttgacaataaatctgtcgtatgctggattttgtcagaaactggctttcctgtaacatcccacctggtatgttagagagagagaaaatagagcttatagctacttctaatgtggggaaagagggagagaagcgagggtactagaaaatcaactgaaagagcctaaaaatggtgaatggaaaaactgcctaaatgcactttaccaaaattatctttttagtattattgggaatatcaatccaaatttttcttacaaatgtgccragcatctactatgaactgcaggtgttgaagaaatgattagtgtcctacatatgagttcctatttgaaagacttcaaatatttcttgaaagcattgaggaatta

SEQ ID NO: 134039 - DNA, 620 bp, Homo sapiens
cctgaggagccagggtcctaacatccttaaaagctgtgtcctagtcttaggactcctgttcttgtctgtgggccactgttgtaataaaggattcacctaattacacctagatgactagcaaatttttcctcaagactattgtcacttggcttccagagaatattttgtgcaaagtactggtcagtgcttgaagggcagagagatggaatttcacttactttaaagaactgattatttgaatgtttttgtacctacttgacaataaatctgtcgtatgctggattttgtcagaaactggctttcctgtaacatcccacctggtatgttagagagagagaaaatagagcttatagctacttctaatgtggggaaagagggagagaagcgagggtactagaaaatcaactgaaagagcctaaaaatggtgaatggaaaaactgcctaaatgcactttaccaaaattatctttttagtattattgggaatatcaatccaaatttttcttacaaatgtgccaarcatctactatgaactgcaggtgttgaagaaatgattagtgtcctacatatgagttcctatttgaaagacttcaaatatttcttgaaagcattgaggaatta

SEQ ID NO: 134040 - DNA, 655 bp, Homo sapiens
agcattttatatttataagaaagaatatatgtgtgtatatatatatttgattcaaatttatgctccagcataagaaattccaagtttttctgctaagcaattccatttatatctatgttgaatgtccttgccatttcctccagtctacatcccagctgttctcatcactacccacattcaaaaactctctcttcatatgcatttttagttataatttcttctccagaaaggaatgtgcaataatccgagtaatgtcttcatattcacaccataacatgataaaagaaggaaggaataaaggaaagaaggaagggagggaggagaaagacaagaaggaagggagggaaacagacaggaagggagagagaaagaggaagtttgcatctaaacttttattcaagaaattgatttttttaatgtggccaatacttctcttaaaataatttatatagagagtaaatatgtctaagattcaaacacaatataataagggtagagtggacatttcttcacaatttggcataacaataactgcaaacaattttcaacaaaagtatttagcacagtattatttattaatgcaagttattgaaaacatttaaaacatttcaaatgtgtcagygtatgtataacaagggcagtagaagcaaaattt

SEQ ID NO: 134041 - DNA, 510 bp, Homo sapiens
agtaatttatttgcaatgctgaagacattctgcggtttggaagcatttccaratagtggagtgaaacattatataacaatccaagagattaaaggcctgaataatgcagtatattaaaagtatttccttctgggacttgaatcccctggctcccaaccagtactctgcatttctaactacttatatgtgaacagttgctttaagcctcacacattttagataagccagggcatagtatgtgttcatgaaatatatgtttgaataaattttaatttcttgtatgtttccatctcatgaatatccacaaaatggttattaaagaacagaagacaaccattttagcaagacttgaactattatgatcaagcacgccctgaaactttttactgtgtagcctctttctcagagcaactgtagattactgctttcttttctactgactccctcaagtccttaccaaagaaatgattattttcactaagaccagggcacaagaatcacagaattgtg

SEQ ID NO: 134042 - DNA, 612 bp, Homo sapiens
ccagacttggttaaatatgcattctgttaatgttgtgtttctgactttctttcctttccttttttgttattgttattatttctatttttaaaaatgtaagactttacttgctttgacactgaggaagggaaggtgtaagagtgagaagagaggggaaaattccacaaagcattttttaaaaagcttttccaatagaaatataaaatgtaattaggtatgtataattatattcttaaatataatttattattaagcatattattaaatataatatatagatgattctttatattattaaatataacatatacatataattctacaagttattcttcattttaaaatamtaatatttagaagtgaactaaaaattcatttaacttgtcatttttataagctacctttcttagaaaaaatatcagtagtaacattaaaatacattttacttgatgactgaaggcatacaaatgcatgaaaacatttaaatattttttatattaagtataattgaaaaatgagaatgcataaacgaggtgaacatttttatatacctgcattgtggcaatttcatcactttttttacagttctttgtttacgtgaatattgttcca

SEQ ID NO: 134043 - DNA, 608 bp, Homo sapiens
gttctttgtttacgtgaatattgttccaaatgaatccaagatctagggaaatacaaacgatatcttgctcatcctcgaattttcaacatctagcaaaatttgggggaataataggttcttaattaaggatatacaataaattttaacatcatagcaaaattgagtggaaagtgtagagaactcccatacaccctctttctccacagaggcacaactgccagctatttgacttcccacaccagaarggtgcattggttacaattgatgaacctgcactgacacatcattatcaccccaagtccgtagttcacactagggttcgctcttggtgttctgcattctgcgggtttgggcaaatgtataatgacatggctccatcattgcactatcatacagaacagtttcactgccctaaaagtcctctgtgctgtgactattcttctctcctcctgcaaaccctggcaaccactaatcattttaccgcaaaatttagccttttccagacttccctgtagttgtagtcatacagtatgtagcgttttcagactgatatttttcacttaatgatatgcatttaagctttctctatgtctttttatggcttgata

SEQ ID NO: 134044 - DNA, 508 bp, Homo sapiens
aggcatatacctagacttattttttggcatgcggacttccatttgtcccagcactgtttgttgaaaagactatctttgcttccttgtattgcctttgttcctttgtcaaggattagttgactctatgtatgtgggtctatttctgggctctctattgtgttccattaatgtatttatctatcgttttgccagtgccatactgtcttgattactgaagctttactgtagtcttgaagtctagtagtgcaggccytcccattttgtttctcttcttcaacataaaattggctcttctgggtcttctgcccctccatgtaaacattagaaacagtttgtcaaaatccacaagataacttgctggaattttgtttgtaattttattcactctataaatcaatttgtgagaatttatatcttgataatattgagtctttctagctataaaagtgaaatatctcttcatttgtttaattctttttgttatctttcataagtgttgtgcagtttt

SEQ ID NO: 134045 - DNA, 508 bp, Homo sapiens
aggcatatacctagacttattttttggcatgcggacttccatttgtcccagcactgtttgttgaaaagactatctttgcttccttgtattgcctttgttcctttgtcaaggattagttgactctatgtatgtgggtctatttctgggctctctattgtgttccattaatgtatttatctatcgttttgccagtgccatactgtcttgattactgaagctttactgtagtcttgaagtctagtagtgcaggccctcccattttgtttctcttcttcaacataaaattggctcttctgggtcttctgcccctccatgtaaacattagaaacagtttgtcaaaatccacaagataacttgctggaattttgtttgtaattttattcactctataaatcaatttgtgagaatttatatcttgataatattgagtctttctagctataaaagtgaaatatctctkcatttgtttaattctttttgttatctttcataagtgttgtgcagtttt

SEQ ID NO: 134046 - DNA, 611 bp, Homo sapiens
gaacttgaactttacaaaaaaaaaaaaaaaaaaaaaaaagcatttgcttctaacatcaaagtgtaaagagtccaaaattactcttgaaaatctcttaaatcatcctaaagttataacacatagataatagacacaatttcttcctcgtttagaatagattgctatttcctcagctgaaccctagatgatgtaaacattttgcatttaaatgccatggtgtattttttaaattccatatctgtgaytattagcatttcattgagctaatgagatactccagaatgggacttggattgagaccaactgaggagacagcagtttcacatttgccctctcccttcactctgggtcatacactcattaaatgaaatgatcagaagaaaattatacctaatatttaaatattttttcctagcaagtatagtggagtttatgtacattaaacctacaaatttgatataaccccactatataatattttaggttcattctgattatattaccaagtagaatttcccaattatttcctaaatagaagttaattagcagaaatgcatggtcaaacattcttttttctttcacaactgcattatctgttagaggctgtaaat

SEQ ID NO: 134047 - DNA, 458 bp, Homo sapiens
tagtgagattctgatttctaaaccccagtgctctttctatctcattttgatgttctcctgctaaccagctttctaggaatcggtcacaatttgatatacacataacatctgagaatgaaacctagtcttctaagtcctatcagaattccaacaaggtttctcttattttgtaatcaactgtgggtgacaacttagtgtcagtgactattaatgatggctcagtaatcatttttaatttttacattccatctggatatacacagtctactcacacaaacttaagtaatgcctggatttttcatccatgaatttccttcagcagaattttaattaggaaactaccagtgttgccattattgtcataattgccgttttaatggtcaggtaaagttmaacattttctagtcatgtgccctaaccattataagatgacctatctcccctttggcttctcttct

SEQ ID NO: 134048 - DNA, 482 bp, Homo sapiens
catttctagtaatgttgtggattaggaacctgagtagacatctactggagaaagaacaatcctgaataaatattaatgaccttaaataaactgaagagttgcaggaaagcaaggaattctcaggttgaaaaaactaatcaaaggcagaaatccagagaaacaatcaaacaaacaaacaaacaaactcataagcgtatttactgggcctgagaagttgggctgcgttttgaaggactctcaaggtctagtggaaaaaagtatccaaggcctatgtaaggtatgaaatctattaggttggtgcaaaagtaattgcaattacttttgcatcaacccaatactatgaatctttacttcataaaactaaagtgtgcataacagtgatccagaaataatctctgccacactcaagtaggactactgcaggagaaatcagctagcacaaaatrtgggactgagatgaaggggaaaatatcatgagtgaa

SEQ ID NO: 134049 - DNA, 573 bp, Homo sapiens
cagccgtggctaaaaagggtcccatatatctctcaggctgctgcttcagagggtccaagccataagccttggcagcttccgtgtggtattaagcctatgggtgcacaacaggcaagagttgagcctggggagcctccacctagatttcagaggatgtatggaaatggctggatgtycaagctgaagtctgctgcagggacagaggcctcgtggagaacctctacttggtcaatgtggaggggaaatgtggggttggagcccccaaacagagtcctcactggggcactgcctagtggagctgtgaaaagagggacatgatcctccagaccccagaatggtagctccaccaacagcttgcaccatacacctggaaagccacaggcactcaacaccagcccttgagagcagccatgggagctgagccttttggaaccacagtgacagagctgcacaaggccttgggagcccaccctttgcatcagtgtggcctggatgtgagacagggagtcaaaggggattgtcttggagctttaagatttaatgactgctctactgggttttggacttgcatgg

SEQ ID NO: 134050 - DNA, 456 bp, Homo sapiens
gagggcctaaaactgagggttaaagagaccctgagaataaaaaccttccagaaaactactgcccagactgagcacaaggtaaatatgcagggatttgaagctgatgatatactaaargtaaccagagtaacaacatcactcaaactcagctcaactcctagtgagattaacttaaccagccactttgtagatccttctcttagcaaaagagaaggtgttctcatttccaagcctaaatattatttatcttagtctccactgtcacatacagaatgaccagcttttaagaaaaaattgtgagacactcaaaaaattaagaaaaagaaacaagccactgtcaagggacaaaataccagcaaaaccaggctcaggaacgaaccagatgttggaactaacaaagagggaatgtaaaataaatattattagtatgttaaacatactgatggaaaaggtgga

SEQ ID NO: 134051 - DNA, 573 bp, Homo sapiens
cagccgtggctaaaaagggtcccatatatctctcaggctgctgcttcagagggtccaagccataagccttggcagcttccgtgtggtattaagcctatgggtgcacaacaggcaagagttgagcctggggagcctccacctagatttcagaggatgtatggaaatggctggatgttcaagctgaagtctgctgcagggacagaggcctcgtggagaacctctacttggtcaatgtggaggggaaatgtggggttggagcccccaaacagagtcctcactggggcactgcctagtggagctgtgaaaagagggacatgatcctccagaccccagaatggtagctccaccaacagcttgcaccatacacctggaaagccacaggcactcaacaccagcccttgagagcagccatgggagmtgagccttttggaaccacagtgacagagctgcacaaggccttgggagcccaccctttgcatcagtgtggcctggatgtgagacagggagtcaaaggggattgtcttggagctttaagatttaatgactgctctactgggttttggacttgcatgg

SEQ ID NO: 134052 - DNA, 580 bp, Homo sapiens
caaaccaaggctgtgtctggatgaccctaagccctgtgattttgtcattctagtctacttacatagggtttcacatattgtttcatggaagggttttataatcgtatgagcctagacatgcagttctcatgttatatcacaaggaagtttttgtatcacagcttttcagttcagccaatttacattttcttgcacttgtttatcataaacttccttttaggagagwttcagcagatcataatgacccagagaaagaaacaacagaaacccaaccaaccaaaggctctgcactgccacgtagtgcctatgcctatcataggaaccagagataaatgatgatctacaggagatcttcaattttgctcatgtacctcctaaaacaatattttaaaactctatatgtacttactgacacctaaaaatttttaccacagacttaagtaattgtaaaaatacaatgcaggcaaatagaagataatattttaaaattagactatttgggggctggattttgagattagtggaataaggatgtaaaaagtccttttctcccaaaacaatgacaaaactcaaaaaaagt

SEQ ID NO: 134053 - DNA, 580 bp, Homo sapiens
caaaccaaggctgtgtctggatgaccctaagccctgtgattttgtcattctagtctacttacatagggtttcacatattgtttcatggaagggttttataatcgtatgagcctagacatgcagttctcatgttatatcacaaggaagtttttgtatcacagcttttcagttcagccaatttacattttcttgcacttgtttatcataaacttccttttaggagagtttcagcagatcataatgacccagagaaagaaacaacagaaacccaaccaaccaaaggctctgcactgccacgtagtgcctatgcctwtcataggaaccagagataaatgatgatctacaggagatcttcaattttgctcatgtacctcctaaaacaatattttaaaactctatatgtacttactgacacctaaaaatttttaccacagacttaagtaattgtaaaaatacaatgcaggcaaatagaagataatattttaaaattagactatttgggggctggattttgagattagtggaataaggatgtaaaaagtccttttctcccaaaacaatgacaaaactcaaaaaaagt

SEQ ID NO: 134054 - DNA, 580 bp, Homo sapiens
caaaccaaggctgtgtctggatgaccctaagccctgtgattttgtcattctagtctacttacatagggtttcacatattgtttcatggaagggttttataatcgtatgagcctagacatgcagttctcatgttatatcacaaggaagtttttgtatcacagcttttcagttcagccaatttacattttcttgcacttgtttatcataaacttccttttaggagagtttcagcagatcataatgacccagagaaagaaacaacagaaacccaaccaaccaaaggctctgcactgccacgtagtgcctatgcctatcataggaaccasagataaatgatgatctacaggagatcttcaattttgctcatgtacctcctaaaacaatattttaaaactctatatgtacttactgacacctaaaaatttttaccacagacttaagtaattgtaaaaatacaatgcaggcaaatagaagataatattttaaaattagactatttgggggctggattttgagattagtggaataaggatgtaaaaagtccttttctcccaaaacaatgacaaaactcaaaaaaagt

SEQ ID NO: 134055 - DNA, 459 bp, Homo sapiens
gtgctccactgcagccattcccacaccaaacactctgggctctacacaggctagagtcctttccctgccacctctttaagtggctctccctgccagctcagatgtccgtgggkgtcatggggtctcctgtagcaaggattccagaggcccatggcgagagtgggccactccttgcttgtttaacacagcccgtccccagtagcttctgggggtctggaattagttctggtgcttggcaaccccatgcagtgtttccaccttcctcctcctccagcccagggtctacatcctccctctgcccactctcaatgccctccctccaaagatctgcttggatctgcttgtgccagtattgatgatgtagtctcttggtgggagaagctcttcctggctgtgtttagttggctatctggttttagttttctacttgaatataagcttcttaacaagcatctcatg

SEQ ID NO: 134056 - DNA, 549 bp, Homo sapiens
atccatggagtgaggtagatatttcagagaagagacaaggactgggggctgtggcaaacagaatacatgcttagccacaaggatacagctccccctcagctccagctaaatattaccatataggaatgctaacccatctttgatcattttttccaaaagaagatgggaatttgatttttatatggaggctttccaatattatactgttgtaattaattctatttggggaggggacactgtatggatgaaagaaaatacaccygagatcagaatgttgtcatttggcagccagtttgtaacttctacatgagcacgctgtgaaacaggctgccacaatatttaaaactctgtttataattcatgcagcagaccattactgactatctgatcttctgcaacacagcagccagtttgcaacctctatgctagcgctctgtggaattaacagtcaacagttatcaaaagttcactggagtttatgcaatttaaatagcaccactgattttatctgctttcctgccacaccacaattttacatgagtttaaaag

SEQ ID NO: 134057 - DNA, 549 bp, Homo sapiens
atccatggagtgaggtagatatttcagagaagagacaaggactgggggctgtggcaaacagaatacatgcttagccacaaggatacagctccccctcagctccagctaaatattaccatataggaatgctaacccatctttgatcattttttccaaaagaagatgggaatttgatttttatatggaggctttccaatattatactgttgtaattaattctatttggggaggggacactgtatggatgaaagaaaatacacccgagatcagaatgttgtcatttggcagccagtttgtaacttctacatgagcacgctgtgaaacaggctgccacaatatttaaaactctgtttataattcatgcagcagaccattactgactatctgatcttctgcaacacagcagccagtttgcaacctctatgctagygctctgtggaattaacagtcaacagttatcaaaagttcactggagtttatgcaatttaaatagcaccactgattttatctgctttcctgccacaccacaattttacatgagtttaaaag

SEQ ID NO: 134058 - DNA, 601 bp, Homo sapiens
actttttttttcttttttttttagacacagtcttgctctgtcacccagtctggggtgcagtggtacgatctcagctcactgcaacctctgtctcctgggttcaagcgattctcctgcctcagcckcctgagtagctgggactacaggcatgcaccaacacgcctggctaatttctgtatttttagtagagatgaggtttcaccatgttggcctggctggtcttgaactcctgacctcgggggatctgcctgcctcggcctcccaaagtgctaggattacaatggtgagccactgctcccagccaaatttttacattctttttaagtcccttaaagaaaatgtggagtatttcagaaacaacattttatttatttgaacgtaattgtttaagaatttgtgataattcagacgaagactaggctgacccttatatgatcatttaaacaagaatttaataatctgggaaactttgaaactaccaaaaagtttaattgtaaatttcttgaacatattgcacacactaggtgcttattaagtaattttgtattaataaaaatcaaattagaatatttaatatatgaaaatttttacatgctatgta

SEQ ID NO: 134059 - DNA, 536 bp, Homo sapiens
ctgacacagtctacccaaatgagaaaaaaacagaaaaacaattctggtaacatgataaaacaaagttctttaacaccccttaaaggtcacactagctcaccagcaatggatccaaaccaagatgtaaactctgaattgccagaaaaagaattcagaaggtctattaaaccaaccatggaggcaccagagaaaggtgaagtccaacctaaagaaatgaaaaaaataaaaaaagatacaggatatgaatggaaaaatctycagtgaaatagatatcataaattaaaagaaaagaaaaatcacaactcctggaagtcgaggacgcacttagggaaatacaaagtgcactggaaagtcttagcaatagaatcaaatgagcagaagaaagaacttcaaagctcaaaggcaaggcttttgaattaacccaatctgacaaagacaaagaaaataatttttttaaatgaataaaacctccaggaagtttgggattatgttaagtaatcaaacatgagaataattagtgttcccaaaacagaaga

SEQ ID NO: 134060 - DNA, 605 bp, Homo sapiens
tgtgtaggaagttttatatattgaagcccattttttctaccatttatgttgtttttctactgactttttctgtcatacattgtgtttttcaagctttggagttttattttacttttttaatgctgttaaacctattaatcatttctattacaatttctggtatggatgacgtgttgctttttcccagcctaatggtttataacrtacttttattttatttttgcatttaaatatataatttgtatggaatttgatagctttaaaatttttttttcttattcttcagttttttattctaggtgaaataatttgtttttcttttttttcctttttctctctagttgtttggaagttttatatctttttctatccttctacatttattttgaaaaaccattttaatacatagataattttacagtttctacacaattctctccaaagaagatgaaacctttagctttgttttacttcatttccccctgcttttttcttacacaacctaaccctattcttaaatttcaggttttgcttaaatcatttggaattttaggttactagttttcttaccactgttttctgatggttgtatctctcctattctg

SEQ ID NO: 134061 - DNA, 605 bp, Homo sapiens
tgtgtaggaagttttatatattgaagcccattttttctaccatttatgttgtttttctactgactttttctgtcatacattgtgtttttcaagctttggagttttattttacttttttaatgctgttaaacctattaatcatttctattacaatttctggtatggatgacgtgttgctttttcccagcctaatggtttataacgtacttktattttatttttgcatttaaatatataatttgtatggaatttgatagctttaaaatttttttttcttattcttcagttttttattctaggtgaaataatttgtttttcttttttttcctttttctctctagttgtttggaagttttatatctttttctatccttctacatttattttgaaaaaccattttaatacatagataattttacagtttctacacaattctctccaaagaagatgaaacctttagctttgttttacttcatttccccctgcttttttcttacacaacctaaccctattcttaaatttcaggttttgcttaaatcatttggaattttaggttactagttttcttaccactgttttctgatggttgtatctctcctattctg

SEQ ID NO: 134062 - DNA, 543 bp, Homo sapiens
acggggtctggaaggctttcaaacctcaaaaaccatgactttgactattttgttgaatctggttacttgagccagacttctttcatagtggactaccttcaaggtttcaaattccctcttggaatctagcctctgttcatcctctccttgcctccagttgcttgacttatctatatttgactagttcctgtctttgggcactaaaaagtatatccatatggctaataaatatttgggaaggttcctaaatgtattagtcactatgacacaaatccacaatgagatatcactacatacccagaaaaatctcaaaagttaaaaaatattacactaattacaagtgttggtaaggttttagagtaactagaactctcataaacttctggcaggagtraaaattgatgcagtcacttggaaaaactgtttagtattttctactaaaactgaacatactctcaatctatgaccccccaaattcaacccttatagacccaatagcaatgcatgcggcttggtaccaacagccatgcactacattttttg

SEQ ID NO: 134063 - DNA, 543 bp, Homo sapiens
acggggtctggaaggctttcaaacctcaaaaaccatgactttgactattttgttgaatctggttacttgagccagacttctttcatagtggactaccttcaaggtttcaaattccctcttggaatctagcctctgttcatcctctccttgcctccagttgcttgacttatctatatttgactagttcctgtctttgggcactaaaaagtatatccatatggctaataaatatttgggaaggttcctaaatgtattagtcactatgacacaaatccacaatgagatatcactacatacccagaaaaatctcaaaagttaaaaaatattacactaattacaagtgttggtaaggttttagagtaactagaactctcataaacttctggcaggagtaaaaattgatgcagtcacttggaaaaactgtttagtattttctactaaaactgaacatactctcaatctatgamcccccaaattcaacccttatagacccaatagcaatgcatgcggcttggtaccaacagccatgcactacattttttg

SEQ ID NO: 134064 - DNA, 569 bp, Homo sapiens
gttctactagcagcaaacatgaattccccagacactgaaagtcagttttctaaacatttaaaaaatatatattttatttgtgttcccatgattcaacttcattctataaagtgttttacttttcgggttggctagattgtgatagctaaaaagtggaatcactggacaccagttgaatttaggtcacacaaaaggtcaacacaggcagaagctcagcaggtgtgtgggtcagtagaaagaggcctggatcgacaatgagggtatcatcttattggaaaagcaagatcgtgctcagtctcatgtccagtggatcaataccaagaataattataaggaaggctttctattccaattacagatcacatcaagtgacaaacctaggataaggttggatttttctgcatatttttctcgtgatgtaaaggmatcttagccaagatttaggatggcagactctgtcatgattcagtaatgttgaaaaacaatctctgcatccacttgactgcccattcaccactatcatgccatgatcatggaatgccgcattgtattcatgggcttggagttct

SEQ ID NO: 134065 - DNA, 624 bp, Homo sapiens
acctataagaaggcattgttggccatactataattatatatagcaattatgtgtagtgccaacaatacataaaaatcccaccctttaactacggttggtaagaaatgaaactatgcttttctgccttaggatatagtttcagtttttgaaaaattaagacattccatttttacataaaactttttctggagtatattattatggtaaggcaggtctatttccatggactgacaatacattaagaatattccaataaatatagaaagcatctctcactccagcttcctccttagctacatactggtatttcctattacatactgtataacagaaagggaaatgcaagttcaaagcaaaggttaatctttgtaatgcagaatgtcagagaagatggtttagaacaagtaccaatatatctcttgttctctttgaaaatttatttagtatttcaaactatattatattcacacatgtaytcattattctgtttaaataattaaaggtggcaagacatggtgaagtatgagcaatcagtagttttgatttaggtgaagcacccatcaagtaatggcagtagtaattgccatttgccaatgtcttggcaagttgaggtgaaaccaatgt

SEQ ID NO: 134066 - DNA, 670 bp, Homo sapiens
ttactgtgtcatatagtaattaggcataatatgaattttatttggttttactgcttttatgtaacatatccatcattgttttagtcagctgggaaagaactataggtaaacaattatccacattgtgaagcactttcatgagtattatctcattatgtatataaataggttatgatatttatttcatttcaggatagtaaaggggcatttcaaaaacaaaaaacaacatttttttaaatgagaaaaagatcctttaattccaatagggttagaaacaagtacgwtatcctcttttcctaggtaatttatcccatgcccacaggttcagttaccatctctatattaattctcaaatattcagaacagatctttcttttgaaatccaggtatgttcagccaacttcttaattgaacctccaccttggatgtctcaaaggcatctcagattcaacatattcatacatgaactcatagtatctcccatctctactaaaaggcctcattgcctggggtaaatgcccaggttttggtctcatggccaaggaaatcaaagactcagacgcacacacgcatagtgaaattggagcaaaagtttaataggcaaaagaaaagaacagctctctgtcacagagaggggtcccaaatgggttgctgagtggtagtaaaaatg

SEQ ID NO: 134067 - DNA, 583 bp, Homo sapiens
taatttattttggaggtacagaaaacacctgtaggaggctgagcacagtggctcacgcctataattccagcattttggaaggccgaggagggaggatcacttgaggccaggagttccaaaccagcctggacaacatagtgaggccccatctctccaaaaaataaaaaattaaaaattactgagtgtggtgttgtgcacctgtggtcccacagactcaggattgctggagcccaagaagtcgaggctgtgagccatgatcatgccactgcactccagcctgggtgacagagcaagactttgagagagagtgagagaaagactgagagagggaaaaaaaaggaaagaaagaaggaagagagagagagaggaaggaagggagggagggarggaaagagaaaaaaacctgttatcccagcactttgggaggccaaggtgggaggatcacttgagcccagaagttggagaccagcccgggcaataaagtgaggccctgcctctacagaaaaatacaaaaattatccagacgtgctgacaagcacctgtagtcccagctactcaggaagctgaggtgagaggatcactt

SEQ ID NO: 134068 - DNA, 622 bp, Homo sapiens
ctttttaactttggaataattactacttggccatgctgtattatatctaatacaaagtttggttttgatttgtttagatacttcagcatgacatgacaggggccatagggcctataaaataacttgcacactgagcctgagacttaggttattcatttaatttcacatcattcagccttttatgagtttgcaagagtagagttatcttmcatctgcactggcacagcactatgtttatctccagggaagctgagaatcctgttactgaccattagtaaagggaagaatgagctgtgctagctaatgatttataacctgttgtttaaaattcaaaactctcatggaacacatggtactaacttgtctctcttgtttagagaaacagacattaatcatttgctcctggcttaatagagaaaaagcctggctttagccaagtgacaaatgggataaaagacccctcagtaaacttgtatatgggctcccctgtcactgaaaactattgcacataccttggtggttcataatctaaaaccaaagtatttcctgcgagatgaagaaagcatgttagaggactacatgtgaatgattttggacttctgtgctattgcctgtgttttct

SEQ ID NO: 134069 - DNA, 621 bp, Homo sapiens
tctcttacagttttcttgctttttgtgtcccccttttccaatgttacgtgtatgtgtgtgtttttgtaatcacatttaccwgtcagtacaagaatcttaaaagagagtgttctgaatttatccctcctgctcctcgtgatattttttcattcatttcatgtagctgtcctttatattaattgaccctttcttagtgtttccaccactctgtctacattaaccatctgtatgtttacttgttccattaaagaccaatatctgtatcatgtctgagtctggttcagatgattgattcacctttttatctgtgtttcttcttgcccttctacatgctttatacttttttttaagttggacgtgtattaagcaataggaattgaggcaaacaggcctttagtgtgaagatttctgttagtatggctatgtgtttggctgtgtttaacacttgttgtagctgttaataccagacttcagatctctgtagcgtacttgtctttggctccctcttggctttggaattttccaatataatactccctccttatccttagatttgctttctgcaacttagtgacctgtgtccaaccagggtttgaaaataggtgattacaatccaataag

SEQ ID NO: 134070 - DNA, 533 bp, Homo sapiens
cctgtcagctttttccaaatcccagttgaacaaaatgtctaccagaattatgactttgtttcactatgtttttcttgaagtgacrtcttaactaattaaaagtaacctgttggatttcagttttggccctccacaagctaaaggtcagcctattaaggattttctcattgacaaggcagctttgcttctgatggatatatcttcacagaaaaatagggtagaggaaaaagaaaaaaaaaaaaaacacggttcatcatagaatctgaactttggcttagtatatttttttttcctaagcttgtggttcctgtccaataatctattaaatgtgaagggaaaagcaatacaaaccataacataaattcagagaaaacttttaaagtaattatgcttatagcacagattctaaaattgcatgcattcataattacaattgaaatactatactgcaagcttgaccaccttgagtctaatttttagaagatatttaggtctataaacaaggtttacatgttgaagaataaaagataagc

SEQ ID NO: 134071 - DNA, 533 bp, Homo sapiens
cctgtcagctttttccaaatcccagttgaacaaaatgtctaccagaattatgactttgtttcactatgtttttcttgaagtgacgtcttaactaattaaaagtaacctgttggatttcagttttggccctccacaagctaaaggtcagcctattaaggattttctcattgacaaggcagctttgcttctgatggatatatcttcacagaaaaatagggtagaggaaaaagaaaaaaaaaaaaaacacggttcatcatagaatctgaactttggcttagtatatttttttttcctaagcttgtggttcctgtccaataatctattaaatgtgaagggaaaagcaatacaaaccataacataaattcagagaaaacttttaaagtaattatgcktatagcacagattctaaaattgcatgcattcataattacaattgaaatactatactgcaagcttgaccaccttgagtctaatttttagaagatatttaggtctataaacaaggtttacatgttgaagaataaaagataagc

SEQ ID NO: 134072 - DNA, 360 bp, Homo sapiens
atgtaaagcagactatactaatgatttgtaaataaaagcaatccaccaagtaaactattgtatgccatatttgataagaagtgaaggcatcactaaacaaaaattaatttagatccacaaytaaagaaatacataattttttaatgattaatttgcaattatattatggccttggagagagttgggaatgtgattctaaatccctcctaaatctaacaatgaaaggaaacatagatgattgcccactgtgaattttatctttcaaacggccaagatttttgagaggtcccgagacttcatgctggttcttgatcttcataaaatgtttgtcttatccaactgcactactaaggtgaacta

SEQ ID NO: 134073 - DNA, 360 bp, Homo sapiens
atgtaaagcagactatactaatgatttgtaaataaaagcaatccaccaagtaaactattgtatgccatatttgataagaagtgaaggcatcactaaacaaaaattaatttagatccacaactaaagaaatacataattttttaatgattaatttgcaattatattatggccttggagagagttgggaatgtgattctaaatccctcctaaatctaacaatgaaaggaaacatagatgattgcccactgtgaattttatctttcraacggccaagatttttgagaggtcccgagacttcatgctggttcttgatcttcataaaatgtttgtcttatccaactgcactactaaggtgaacta

SEQ ID NO: 134074 - DNA, 360 bp, Homo sapiens
atgtaaagcagactatactaatgatttgtaaataaaagcaatccaccaagtaaactattgtatgccatatttgataagaagtgaaggcatcactaaacaaaaattaatttagatccacaactaaagaaatacataattttttaatgattaatttgcaattatattatggccttggagagagttgggaatgtgattctaaatccctcctaaatctaacaatgaaaggaaacatagatgattgcccactgtgaattttatctttcaaacggccaagatttttgagaggtcccgagasttcatgctggttcttgatcttcataaaatgtttgtcttatccaactgcactactaaggtgaacta

SEQ ID NO: 134075 - DNA, 515 bp, Homo sapiens
gtgggttggaaagaagagaagaaatagtggaaatagttctaaggtactaaatttaaagactgaaaacttatatgttgatatcagtatgccatatactaaaaatgttactaaagatgaaatgtataacataaagttaaaataaatgtaaaattttaaaaaagaagataatattaggagaatacagagcaagatggctaaatggaaccctccagcaataatcacttctgcaggaccattgaattgaacaactatgcaaacaaggaagcaccttcataagaaccaaaaatcaagcgatcaatcacagtagctggtttgaacatcatatcaaggaaaaaggcactgaagatggtggaaaagataatcttgaattgccaacaacacccctgccccagccactggyagtgaccacatggcacagagagagaatctatgtgcttatagtagagagagcacagtgactgtgggactttgcattcaaatgcagtgctcccttgtcacagtggaaagcaacacag

SEQ ID NO: 134076 - DNA, 488 bp, Homo sapiens
tcccacgttcgtggattgaaagaatcaatattattaaaatgtcctactayccaaagcaatctacagattcaatgcaatccctatcacaatatcaatgacaattacagaaatagaaaaaaaatcctcaaattatatggaaccacaaaagaaccagaatactcagttaccctaagcaaaaagaacaaaactagaggaatcatatcacctgacttcaaattatactacagtgttatagtaaccaaaacagcatgttactggcatgcaatgaacagtgttgggaaaactggatatccatatgcagaagaatgaaactagaagcttttcaccatatacaaaaatcaaatctacatgaattaaatgcttaaatctaaaatttcaaactataaagttactaagacaaaacactgaggaagtctccagaacattggtctgggtaaagatttcttgagcaatactccaagagcacaagtaccaaagcgaaaatggac

SEQ ID NO: 134077 - DNA, 468 bp, Homo sapiens
ttgctaactaaccatcagacaagggattaataacccttgaatacataaggagctcaaacaactatatataaaaaatctagtaaaccaattaaaaaataggcaaaatatctgagtaaacatttatcaaaagaagacatacaaattgcaagtagtatatgaaaaggtgctcaaaaatcattgatcatcagaaaatacaaatcaaaactacaatgaggtgtcatctcactccagtaaaaacracttttatccaaaagacaggcaataacaaatgtgcatgaggctgtgaagaaaagggaaccctggtaccttattggtgagaatgtaaattagtaaaagtgctatggagaacagtatggaggtttatgcatttccacatttattgcagcactatttaaaatagccaagatttggaagcagcctaaatgtctatcaacagatgaatgaacaaagaaaatgtagtacatatac

SEQ ID NO: 134078 - DNA, 563 bp, Homo sapiens
tttatgtagtctctcctgcttttgtaggcatcatacatggagagggcttttctttcccaattgttaacgcaaaaggataacagctttatctgatgcttgttacaagagaaggctacctagtttccaggctgcactgtaaatatttctgtcacattgccagaaagcaagttgaaattagttgtggttgatctgactactgtatacagcctgtgtcaaacaccaaataatcccaacggaagctcctatgtttgggggcaaaataatgccctctttatcaatttactgctcctcatctgagggatagttcttgcttctggctccacttgatcaacaaagwtgtgattatggaacctcaggtaaccacatttcaagcttttcgttataaactaatgcattcttaacaccaagctacaaagtaagatatacaagcagattatgtcagcacaaaggaccaagccaagagaaggtatacaaacatttcgattagctattggcaagtctgttacatgactaccaatttttcaacatttatccctagtcacatggaatattcccactatgaa

SEQ ID NO: 134079 - DNA, 561 bp, Homo sapiens
attattgattcaatattcttgtttgttattgtcctattcagatatttatttcttccttattcaggcttgataagttgtgagtttctaggaatttatttatttcttctaggatatccaatttgttggcatataatggatcatagtagtctcctacgatcctttgtatttctgaaatattcgttcttatgtctcctctttcatttctgagtttacttatttgagtcttcttttccttagttattctagtttaaattttgtcattattgaagtcttsaaaaaacacttcagtttttttctactatttttctagtctctaattcacgtctgctctgatttctgttattttctttcttttactaactttggtgtttgtttttctttttctagtttttgaggtataaagttaaggtgtttgaaatgtttttcttctgtaatcattttttgttagaaatgtcctttttagtactctttatgctgtatcgcataagtttttgcatggtatgtttccattttcattggtctcaatatatttttaaatttcctttttgatttcttctttga

SEQ ID NO: 134080 - DNA, 595 bp, Homo sapiens
ctgaaatagaattaaaaggagactttcttcatacttttctgactgaattcacgcagattttcggctaatctcatctgacttgttcattttaaactcacagaggctggatttgtgacatttgtgtctaatgtctggatycctaatccgctatatgcctttcccagattctacatttggtttctaataattttctaactcctcttgcattctaaaatcaatgaccaactaggattacaatgatatcactatttccatagctattttatgttttattttattttattgtgttatatttacgtttttattaaggaactcaccatcataccaagagttcacatatcctccatctgtacaatttacctctttctttagtttaatttctatcttcctatcttcttcttctatctatgactggattgacataatgaccttgtgctttgtgttgattttggcttatgacacatgtgacctaccaattctttttcttcagtctcatttactgtttcactctgctatctaatatgtatcagtatgttttatttccttttgtaatgccgaattgactcttacagatgtgaagtgacaggaaaatttt

SEQ ID NO: 134081 - DNA, 595 bp, Homo sapiens
ctgaaatagaattaaaaggagactttcttcatacttttctgactgaattcacgcagattttcggctaatctcatctgacttgttcattttaaactcacagaggctggatttgtgacatttgtgtctaatgtctggattcctaatccrctatatgcctttcccagattctacatttggtttctaataattttctaactcctcttgcattctaaaatcaatgaccaactaggattacaatgatatcactatttccatagctattttatgttttattttattttattgtgttatatttacgtttttattaaggaactcaccatcataccaagagttcacatatcctccatctgtacaatttacctctttctttagtttaatttctatcttcctatcttcttcttctatctatgactggattgacataatgaccttgtgctttgtgttgattttggcttatgacacatgtgacctaccaattctttttcttcagtctcatttactgtttcactctgctatctaatatgtatcagtatgttttatttccttttgtaatgccgaattgactcttacagatgtgaagtgacaggaaaatttt

SEQ ID NO: 134082 - DNA, 595 bp, Homo sapiens
ctgaaatagaattaaaaggagactttcttcatacttttctgactgaattcacgcagattttcggctaatctcatctgacttgttcattttaaactcacagaggctggatttgtgacatttgtgtctaatgtctggattcctaatccgctatatgcctttcccagattctacatttggtttctaataattttctaactcctcttgcattctaaaatcaatgaccaactaggattacaatgatatcactatttccatagctattttatgttttattttattttattgtgttatatttacrtttttattaaggaactcaccatcataccaagagttcacatatcctccatctgtacaatttacctctttctttagtttaatttctatcttcctatcttcttcttctatctatgactggattgacataatgaccttgtgctttgtgttgattttggcttatgacacatgtgacctaccaattctttttcttcagtctcatttactgtttcactctgctatctaatatgtatcagtatgttttatttccttttgtaatgccgaattgactcttacagatgtgaagtgacaggaaaatttt

SEQ ID NO: 134083 - DNA, 497 bp, Homo sapiens
tttcagtgcacacacagaggaaaggccatgtgaggatacagcaaggagctggccatctacaaggagagagatctcacaaaaaccaaccctgctggcaccttaaccttggacttccagactctagaactctaagaaaataaagttttgcagtttaagctactcagtctataatattctgttatggcattcaaactgactaatacaatgattaagtggtttatctagaagataacatcagacatggcctgccagacacaaatgcayatctcattgttcccctaccccatcttgtctctgtatctaatataaaacgcagattccccacatttttcctctgcccccttttgtttatgtgaaaactgtgtgcttctcaatatcccttctctttccactttaaatttggagctttcaaaatcatatttgaagaaaggcatagatctgcctcctgggcaaaagttaatttgccttaactttggcaaataaattttctgaaatga

SEQ ID NO: 134084 - DNA, 446 bp, Homo sapiens
atttttgcagtgtagtagaacctggccactccttcatttgcaaagctctgggtcagtgaactgattcaagtctgaaaattgattgatgtacttttactctctgtgattcaagtcaaatttctgttcatgaaacctacagctttttcaattatacagatcagggaaaactttattaagctatccaactatttcatctctagagacgccatgattaactagccagtcctgaagatgactgtgagatagaccatcctgactcctcyttaagctctattgtccataacagtaaccctgtccattttgtctttggtgattaagtgatccactgtcacccatatttccaaagtttctatgtgtaaattggcaaaatcatacagtcattttgatatatatatatatatatatatatatatatatatatatatatatatacagcacctcctcat

SEQ ID NO: 134085 - DNA, 387 bp, Homo sapiens
ggtatttcttaatccagtcacattgacacctaatattaagtccacaaatctacctcttgtcaactttgtagccatacacatctstttaagccatacttcatttccaaatgaagacattaagaaggtagtaaatccacctaacatgatgcaactatcctgtgtataactgacagtgcactaatgtcttccccagaatttggccttcaggatttcagcattcaggattgtaatctttcagaactgtgatttaggattttagacattatggattttagattttagagattttagactttagggatattgaccttttcggatttccatattcgagattatggcatttgggattatgatctaaatattctactcaaaaaaagctaatcattc

SEQ ID NO: 134086 - DNA, 387 bp, Homo sapiens
ggtatttcttaatccagtcacattgacacctaatattaagtccacaaatctacctcttgtcaactttgtagccatacacatctgtttaagccatacttcatttccaaatgaagacattaagaaggtagtaaatccacctaacatgatgcaactatcctgtgtataacwgacagtgcactaatgtcttccccagaatttggccttcaggatttcagcattcaggattgtaatctttcagaactgtgatttaggattttagacattatggattttagattttagagattttagactttagggatattgaccttttcggatttccatattcgagattatggcatttgggattatgatctaaatattctactcaaaaaaagctaatcattc

SEQ ID NO: 134087 - DNA, 387 bp, Homo sapiens
ggtatttcttaatccagtcacattgacacctaatattaagtccacaaatctacctcttgtcaactttgtagccatacacatctgtttaagccatacttcatttccaaatgaagacattaagaaggtagtaaatccacctaacatgatgcaactatcctgtgtataactgacagtgcactaatgtcttccccagaatttggccttcaggatttcagcattcaggattgtaatctttcagaactgtgatttaggattttagacattatggattttagattttagagattttagactttagggatattgaccttttyggatttccatattcgagattatggcatttgggattatgatctaaatattctactcaaaaaaagctaatcattc

SEQ ID NO: 134088 - DNA, 633 bp, Homo sapiens
caaaatatggatgggacctcacaaatataaccttgatttaaaaagccaagtactaagactaatgataaacaattctttatttgtaaggtacaaagaagacatattaatcttcattgttagatgccaggagagtgatgacctccatgccttcaaggggacttttaggggtggagatgcataatggtaaaagagaggcttctggggtctaagggaccaaggaaggtttctgggggatctgtccaggtataatatgcttgtgaaaattctgtgaatcacatagttattatataaacaaattatatttatacatatgctatgatatatagacagtaacgtaaagtttaaaagttatattaatcatatgacatagatgtattattcacattttagactctttcctaagagttaacatttgttaagaactgatgtccctcttctgacatagaactataaactgtagactttaagtgtacatgatacttttcaacatatctatatattgtagwtttatattaacaatgaaagcccttcttttttcttcccaggattaaatgtctaccatacaggcattagtcattccttaagattaaggaagagatatattgttttgcatctttgtaatatacagttaaa

SEQ ID NO: 134089 - DNA, 527 bp, Homo sapiens
tctaaagaactagaggttatgacttggatatattttctggggtcacacaattgaacccctaacaacagatatctgatttgtgtagggattacttgacaatcatatcctttgtgtctaattaaaattcaaggatttataaaatgtgacaccatcctaatttaatttttaagctgctaagaagaaataccaaatgtctttgaacaaaatgtatataaatratggatataatatccatggtaacttaacaataaaaacatttggactacttttctaatcacgtcctgaagcagagatcaaaataataaagtaaataggcaacaaatgtgctatgtgtactggacatatgatcaaatctggaaacaaatctattcgttttgctttaatttgggttctgatgtaaatagataccatgacaggaatttggatacaatacatttatttgtgaattgagcactggaagcactctgagacagttgagaattgagaaaagaaaagaagtaaagacaataaagaatattaataaataa

SEQ ID NO: 134090 - DNA, 572 bp, Homo sapiens
ggttgttaacatctagatttcctttctgtaatatgaggatcttaagagtacctatttgataaggttttgtgatgcataaatgaggtatcatatgaaaactcttcacacggaaactaacatatagcattttctcaataggagatgacatggagaagggataatttaaactcagataactgtaaaaacctggaaagagataaaaaaaagcgtaagtagtttgaacaagcatgaaaaatgaaagcatcaggcaagaaattctgcttataaatgtcttcatcacaaaatgattaatagttaaaaaaaaaacctaaaagaaaaactaagtggtttgttcatgtaaaagtccaatagcaagaaaacaaatgtcagtcaagcttagawaaacaagagtaaatttttttttctgtttatacttagtcctgtcatttcatacaatagctgcaaacgaactagattctagtcatttcatgattaattcattatttcaatagtttttttttttttggtgatttgggggatttactaaattgatctatgattgaacctttatctactaaagaatcatttccatc

SEQ ID NO: 134091 - DNA, 574 bp, Homo sapiens
aatgagccacaccaggaatgccaaccctgtccccacggatgcagttgctggctggggaatggaggatgttacgttcgtaggtgcgtttttaccaaaattccgctgccccttttctccttaaayggccccttggatgctgcaaaatttagaatagattccagggttttgaaagagttaattccaccagtctttgccagctgaggtttactttaatgaagggactgattatttgcagctgagtgccctacttcaccatttactgtatgtcacagtctgtggtctacatttattttttgctacttttattgtcctgtgaatataggtttgttttttactccaaaagagaatctgtttatatgattgttgaatgggaaatcaaaagaaaataacattatgcctacaactacacctccaaaataaaatatatgtttgcaagtgtgtgtcctctgttattttcatcatgattcaaaaagatttttttaaatattcactgagcatacagtggtgtgattccgtttgaactaattattttcaatataccaccttgatatacaattcaacacattactttaat

SEQ ID NO: 134092 - DNA, 400 bp, Homo sapiens
attaacatcaccatctcaaactatgtctcakgtgtgtactgttatgtttttcttccaattttcctttatttcccagctagaatataaactctattagaacaggacacttttctttcttcttcatgactttagtgcctaactaatattaggcattcaataaataaccagttaatgctttcagttgatttttgttaaatgtcagtcagttttgaattaccacaaacttgctcatgaaagcctcatcgaagcaaataaaattatcaatatatatgtctcaattggttttcctcaccccagaaatatatttaagaatattagattatggcaaagtttttgtttattgtatacttgttaccaacagtgatatttgctttaataatatagatattttacttaatta

SEQ ID NO: 134093 - DNA, 542 bp, Homo sapiens
gctgttattactaagacatatccagaattttaaactatgctttctctagctagagtgagctctgctgttaataccttatttaatgagaaattcattcaattttttcaaagatcctattaagactgtaattggtacgcttattattgaatcagttttgctccaaggccatgtccgtgtattttcattactatatatttaatgtttcccctcatcttggggaaaaaaatgctcaatttaaaatctatacttttcaaatgttcttccttttctttccacakaaatttttttccttatatattggccctgcctcttccctcaatactttattttctctttatatataagctatgtgctgtctgcttactctgaatctctggaaaatggcctattttttcaccgtgcttatgcctataatttcagatttccttccttaaatctcaaacattgaaaaaaatctaaatagtcactttctctgttttataatagaacccatggatattttggacaaaattgtccagatggtggtagtgacactacacaaa

SEQ ID NO: 134094 - DNA, 542 bp, Homo sapiens
gctgttattactaagacatatccagaattttaaactatgctttctctagctagagtgagctctgctgttaataccttatttaatgagaaattcattcaattttttcaaagatcctattaagactgtaattggtacgcttattattgaatcagttttgctccaaggccatgtccgtgtattttcattactatatatttaatgtttcccctcatcttggggaaaaaaatgctcaatttaaaatctatacttttcaaatgttcttccttttctttccacataaatttttttccttatatattggccctgcctcttccctcaatactttattttctctttatatataagctatgtgctgtctgcttactctgaatctctggaaaatggcctattttttcaccgtgcttatgcctataatttcagatttccttccttaartctcaaacattgaaaaaaatctaaatagtcactttctctgttttataatagaacccatggatattttggacaaaattgtccagatggtggtagtgacactacacaaa

SEQ ID NO: 134095 - DNA, 439 bp, Homo sapiens
aaaggagaaagtcaaatagtccttggttgcatatgacatgattgcatttctagaaaactytaaagactttaccaaactactgttagtactaataaatgaattcagtacagttgaaagacataaaagcaatgtgtaaaaatcagcagtgtttctatacaccaatagtgaactatctgaaaaaaaatcaagaaagcaattcaatttacaatagctacaaaaaaaaaaaaaaaaaaaaaaacctaggaataacccttaaccaagaaggtgaaagatctctacaatataaactgtaaaacattgatgaaagaaatagaagaggatacaaataaaattaaaggtatctcatgtttatagattggaagaattaatagtgttgaaatgttgacattacccaaagcaatttacacattcaatgcagtctctgttaaaatactaatga

SEQ ID NO: 134096 - DNA, 439 bp, Homo sapiens
aaaggagaaagtcaaatagtccttggttgcatatgacatgattgcatttctagaaaactctaaagactttaccaaactactgttagtactaataaatgaattcagtacagttgaaagacataaaagcaatgtgtaaaaatcagcagtgtttytatacaccaatagtgaactatctgaaaaaaaatcaagaaagcaattcaatttacaatagctacaaaaaaaaaaaaaaaaaaaaaaacctaggaataacccttaaccaagaaggtgaaagatctctacaatataaactgtaaaacattgatgaaagaaatagaagaggatacaaataaaattaaaggtatctcatgtttatagattggaagaattaatagtgttgaaatgttgacattacccaaagcaatttacacattcaatgcagtctctgttaaaatactaatga

SEQ ID NO: 134097 - DNA, 414 bp, Homo sapiens
tttgattaaataactaggaactatgtcacaatcaaattgacacataaaattaactatcamagtcatacagtcatgatagatactgatgagcttatagtaagtctggttcattgagaggtatttttattcatagaagtgagttatggctgtatcttcacacagacacatacagtgagagagagggagagagaaagagaggaagagagcacagatataacatgctcttgcttcagcaagtgagatatttgtatgatcaggagcaaaagcttagctatgagactcccttgatttcaagtctgagcaccatctcttactagctggcacataacttactcatttaatgtgccttagttttcttgtctataaaaatagtaccacctttgacagtgggccaattgtttttagataaacaaa

SEQ ID NO: 134098 - DNA, 452 bp, Homo sapiens
aattttaaatagaggttcacttgtctgtgacactttgaccattgggttaggaagaggattagtcactaagttttaaattgacatttcttgaagtatagattgaagatatcatttcagcataagaatcaggataccatagaaygacagtgagatttctggaatccttaaaataagtaaaagtaaataataaaagtgacatagaatagactcctataatataaaaattatttcaggttacttattttcttgagagaaatagagagtacatgctttgtttctgtttttgtccctttttaaatgctctacttgttgattagaatcaactgttaaattataatggactcagtaatagtgactgcttaacagtcactattatcatggtgtattatgctaagaggctgttatattatgtgcctttttaaaaatattgtcaatggtagattttattttcc

SEQ ID NO: 134099 - DNA, 631 bp, Homo sapiens
cctctcagcttcctatttccttccatcttggggtattctggggttagtaactactcacagaatcctactctaacatgttatcttagaagtccaggtgtgtatactcctaacccagcagacaatgcatgctaaaccaactttgctgatagtagtataattgttgatatggtttggctgtgttcccacccaaacctcattttgaattgtagttcccataatccccacatgttgtgggaggaacccagtgggaggtaacaatcatggggtggttaccctagtgctgttcttgtgatagccagtgagttctcatgagatctgatgatttgataagrggcttttccccttttgctcggcacttctctcccctgccgcctttgcttccccttctgccatgcttgtaagtttcctaaggtccttccagtcctgtgaaactgtgggtcaattaaacctcattcctttataagttacacggtcttgggtatttcttcatagcactctgagaatggactaatacaattgtgcttcaaggaaaaaccacactgcctagaagatttatgaacaagtcccaatccatttgctgtctactggaagatcttccattctcaggcattatataggaatggaaattgta

SEQ ID NO: 134100 - DNA, 607 bp, Homo sapiens
attaatttgtatgtctattccagaaatctctttatgctttggaaagtcttatgcataattttggctttttcagttcaatatgcatttaataagcaaatattcttgtgtaagatatggaatattggaaatgctgattatgtaatactgattacaagtatgaaataaaatagaggcaagaggaaaataattctcatctagggagagtatactggctattaagtattattatattatctttattttcaccatcctcagtgttattgtgaaaaaggcttagagcttccatgaggaaaggcactgttaactataaaagtcacacattcaatattatacattctatgctttcttctataattgtgtcctctcactaatttactaatttttatgtctattccaggaatcccttgatgttttagaaagtgttgtttgtaattttggtttatttaattcaatttatcagtattatkctaagtttcatggattgatgagatatataggtagataggtaggtagatagatactcatatctggataaggacatatttaaaacattactggacttcaagttcattgccagcctgaaaggtccttttgaatcctccatttg

SEQ ID NO: 134101 - DNA, 377 bp, Homo sapiens
attaaattctttccttctattttgtgtatgtggtggagggaggagggtgagcaaatcaaagtcatctttagaaatattttaggataaattctgatgaagctgcttgaggttttcaaattaaattactgaatatgaaagctgatgtttcctatagaaaagcagtgttttcaattttatttattcacttccaagagctctaatcatatttctcacatgaactgtctcaagagtcagtaacaattttttgattcaaaggaaaatcagacctgcaagaaaaagtcagattgaagagataggctagagctaaggactgtagcamattacggagttcccattagtgaatgacatagagctagaacagacaattgaagggagca

SEQ ID NO: 134102 - DNA, 453 bp, Homo sapiens
attttcttttaaacccagatgatttgactgagtatctacggttgaaaatcactactctgttatcatcatgctgattccaaactggaaaacagtttgccaaaatgtaactactgccctaagctgctcctgctctgtagcagcaggtcttgcagccagctttggcatcttcctgattccagctcttcctgtatactctgcttgggtttccccatgctggttcaccaaggctcagagtggaaggtcgggctcccataagtcggacagagtaaagtcctgtgaaagtcagaatggattctcagaaagagatgtgtctggagggagargtcctggaccaatagactacttcaccctgaaggtgtccagtagtgtgcctccttgactgttcaccctggccggaggaccagtctgcagccttcctgtggctgcttgctacccacatgcccagaggacagt

SEQ ID NO: 134103 - DNA, 580 bp, Homo sapiens
ctctcccgactctcagtcggttcccagctgggcaagctgcctcgaatcctctccttacttctcatgtttcccatatcttttctggtttatcctagcattctctcctagacaatctgttcaaaatggatccrcttactattctggtttctcaccatggtggaggcacatactacctgtgtttagatagccatcttgatcctttcgaaaatttactctttcaataagaacctgacaaatacataatttagaattaaatgatacaatatttgtgtctctttcagccgccatcccattctcccttattagtatgaaaatgttagaggtgcttaaaccaacaaaaaagctgccttaaattaatctcctgagaatactttccttctatttccctaactaggaatttgtatcgcctttaagcagaaatcatctccctcctaaggccctgctcaggctgtaactcttgagtgacagtggtcaagttacatgctgacctggaatctaaatctgcatcttgttccagaggacctagtgcagcaaagcattatactttactgtcacaactaagatggcaaaaggctaacag

SEQ ID NO: 134104 - DNA, 512 bp, Homo sapiens
acttcttttcatctgttatacacagggcttagcacagttcccgacattcrgttcgaatgaatgacggaaggaaagcagctttgggtagtggggtgctattaagttttattggcaggagatcagtcatgaactttaaggcactggttttaatccagcggaggtactggaagccaattgcagtatgttgaagaatggagaatgactaggagttaaagaactggagatagtatactctgaagaagtttgataaagggacgacaataacacagtttcaagtaaaggaaggtttttttcctcaaaggaagtcataagccttttagaggagacaaaattatttgaaaaagtaaatttgaacaagaaagctgagttgaatggaatcaggaacatgcatagttgcttccctccaagataacagcaaagaaaataagagagagggttttaagataaagaaaggaatattaagggaaccccttggcttagcatagtgaggtagcaggagatggaataggaat

SEQ ID NO: 134105 - DNA, 512 bp, Homo sapiens
acttcttttcatctgttatacacagggcttagcacagttcccgacattcggttcgaatgaatgacggaaggaaagcagctttgggtrgtggggtgctattaagttttattggcaggagatcagtcatgaactttaaggcactggttttaatccagcggaggtactggaagccaattgcagtatgttgaagaatggagaatgactaggagttaaagaactggagatagtatactctgaagaagtttgataaagggacgacaataacacagtttcaagtaaaggaaggtttttttcctcaaaggaagtcataagccttttagaggagacaaaattatttgaaaaagtaaatttgaacaagaaagctgagttgaatggaatcaggaacatgcatagttgcttccctccaagataacagcaaagaaaataagagagagggttttaagataaagaaaggaatattaagggaaccccttggcttagcatagtgaggtagcaggagatggaataggaat

SEQ ID NO: 134106 - DNA, 548 bp, Homo sapiens
cacagtactttgttgctgactatagtcaccagtactctgctattgaacattagaagttatttcttctatttgactgtatattttgtactcattaaccaacttctstttatcccctctcacccacccaccctctgcagcctctagtatctataattctatttgctacttctataagattaactcttttagtttctacatatgagtgagaacatgcagtatttgtcttgctgtgcctggcttatttcacttaatataataacctccagctcatctatgttgctgcaaataacatgatttcattctttgaatgccaaatccattgtgtatatatactacattttctttatttcatctgctgatggacacttaagttggttctttgtcttggctgttgtgaatagtgctgcaataaacacatgagtgcaggtatccctttgatacactgattcttttcttttgtataaatacagtggtgggattgccagatcatatgataatgatacttttagttttttgagaattctccatactgtttttcatagtagttg

SEQ ID NO: 134107 - DNA, 548 bp, Homo sapiens
cacagtactttgttgctgactatagtcaccagtactctgctattgaacattagaagttatttcttctatttgactgtatattttgtactcattaaccaacttctctttatcccctctcacccacccaccctctgcagcctctagtatctataattctatttgctacttctataagattaactcttttagtttctacatatgagtgagaacatgcagtatttgtcttgctgtgcctggcttatttcacttaatataataacctccagctcatctatgttgctgcaaatracatgatttcattctttgaatgccaaatccattgtgtatatatactacattttctttatttcatctgctgatggacacttaagttggttctttgtcttggctgttgtgaatagtgctgcaataaacacatgagtgcaggtatccctttgatacactgattcttttcttttgtataaatacagtggtgggattgccagatcatatgataatgatacttttagttttttgagaattctccatactgtttttcatagtagttg

SEQ ID NO: 134108 - DNA, 580 bp, Homo sapiens
tagtcaatgattagccactgtgcatccataatatttaataatcaacgattagccactgtgtttccataatatttatcaaagtcagcctcgtgctctattctttctaaaacatcacctcctctaattctcttgtaatgttcttggagacataaaccatatattgatcatcttagtaaacctgttgcatagcactgtgctttgtacatgatcagtcattagtaagtttttttgaggtgmatgtaattgaaatgttagttgagattataaatttgctcagtgactatggagctgtgtgaagttaattgactcacatagaagattgctttcgtctcattcgccaagttctaattaaataaactaatgaaaaattgacaaatggtggctcaattagactaattccatctatcttgttctgtgcacattcactggccttgtattcctggcgtaattttaaggagctgagacaggtgtagactctgatcaaaaatgaactcaagtaattggtggtccagttctcttcaagagtcagtccagtagtatcttgattccacctaacgaggttggcacaattaaagtttat

SEQ ID NO: 134109 - DNA, 580 bp, Homo sapiens
tagtcaatgattagccactgtgcatccataatatttaataatcaacgattagccactgtgtttccataatatttatcaaagtcagcctcgtgctctattctttctaaaacatcacctcctctaattctcttgtaatgttcttggagacataaaccatatattgatcatcttagtaaacctgttgcatagcactgtgctttgtacatgatcagtcattagtaagtttttttgaggtgaatgtaattgaaatgttagttgagattataaatttgctcagtgactatggagctgtgtgaagttaattgactcacatagaagattgctttcgtctcattcgccaagttctaattaaataaactaatgaaaaattgacaaatggtggctcaattagactaattccatctatcttgttctgtgcacattcactggccttgtattcctggcgtaattttaaggagctgagacaggtrtagactctgatcaaaaatgaactcaagtaattggtggtccagttctcttcaagagtcagtccagtagtatcttgattccacctaacgaggttggcacaattaaagtttat

SEQ ID NO: 134110 - DNA, 542 bp, Homo sapiens
cggtctcactctgttctcatcatctctttacattttaaaataattattaaaaattatacrtatacgtatatagattcctattcataatggcttgttgcttaatttcatttaatgttaaaatatataaaacctcttttataaggtatcaagctgcttatagatttctgggacctgtgttttcccccaaccatctactataaaattctaaaaattttcaagttacaggtagctctagttcattattgtcattgcctaaccataactcattgtataatatactatttgtgtttatccttatccctgacaatgtgcaattgtgttgcttccagtttttgtttttaagactaaggccataatgaacattttgtatgtgtgttctggtacactttcatgtgtttctctggagtttcaccaaggagtataatttctatgttatacttaatatgaacattcatctttaaaatgtaatactgacttgtttttatttcagttatagggacttatactcccaccctcagtttataaaaatgtaacctaatcta

SEQ ID NO: 134111 - DNA, 344 bp, Homo sapiens
agggtgaggcccagctatttgtgctttaacaagcctatgaggtaatttcctaatactcattacattgtgataatcattggtgcagagaaatccctgaggatatttwctcacctcccttcatctggaaagtgaagactgttatacaacattgaataccaagcacctaacttcttggtaaacagcaggtttcgaagcatttttaaaaattaatttatcaattagatttggggcaaaagtcatattatctaactttaactgaactcttgatgcttcttttaattttgtatatcattttttaacttcctgttgtttcaaacgttttcacacaattcaatcgccaactc

SEQ ID NO: 134112 - DNA, 614 bp, Homo sapiens
ttataaattgataagaggaattaattattgctaccttcttgaaaaagggggttacactaactattccacacaaatttttaacattttattttattataacaaatatacatttataatataaaagtatctgcctattctaggtcattcatgtaattggaacaatacagtatttgctcttttgtgtttttttcacttagcataatgttttcaaggttcatccatgttgtaacatatatcagaacttctttcgctttatcgcttaaacccgggaggcagaggttgcagtgagccgagatcgcaccagtgcactccagcctgggcaacacagtgagactcaatctcaacaacaacaacaacaacaaaaacactttattcccttttatagctgaatactatttgatcatatttataaaccattattttgtgtatccattcatctgttcacttagatcatttgcacrttttgtctattgtgaataatgcttcaatatacatttttgtacaaatatgtgttcaaatcctctatttattcatttatctatttatttattatggcaagaacacttaacatgagctctatcctcaacgaaattttaaatgcacaatacagtatt

SEQ ID NO: 134113 - DNA, 561 bp, Homo sapiens
gacctggacttggggacctcaagagcctgcttgttgctctatcccactgtggcccagctggtacataaggtgcaagacaaagtcccttttacttttccctctgcatttttcaaacagaaggagtctttcactgtagtcacaactaggaatgtgctgggtctccactgaagccagcacatctcagagcccagtgcccattgaatacttcctggttattgatagtggttattcagggcccaagggctctttagtcagcaggtgatgaatcctgcccagacttggtctttcccttcaaggtagcaggttcccctttggcccagggtgtgtctagaaatattgtctgagagctagggcctggaatggaggacccagaactctgcccagcttcctatcctactgtggctgagctggtatccaagatgcaagataaaggcctctttactcttcactctccyctcctgaagcagaaggtaggagtcactttctctgctatgagctgcaccgcctggagtcgggggagagatggggtaagccctcccttagccatttcctaggtcacat

SEQ ID NO: 134114 - DNA, 567 bp, Homo sapiens
atcctgggagagaaaaagaacatttggcaaaaactaagaaagcctgaataaactatggactttagttaatatagggatataagttcattaattgtcaccaatgtaccatactaatgtaaaaagttaataatatgagaaactgcatgtgagataaaaggaggacatagaaactccctgtactctctgatcagtttttctgtaaatgtagaactgttctaaaaaaattgtctattaaaaatagtagcagatggawaggtaagaagagctcactggatgggtggtaagtttaccatgattttcctccattacccccgactgaactcaattcagactgaaattcttcagtggcatcagagcagacacagagagcttcaggaaaagccttctagtccaggctcaagaataaggagaagggtcttcttacgtgcagatgaaatggagaaaattttccattttttcttctttttcctgtgttttcttacatataagcccccaaacaattctatgacagaagcctaaaactgaggggactttcctattaaaggagccatagccccaagcggaagg

SEQ ID NO: 134115 - DNA, 596 bp, Homo sapiens
ctgaggcatggtcagtgaggttttgagtttcacaatgaattatctgttctttgagggtgagttgattcaagagacaagtttagactcatcactcttaactcacttctctggagaattaattgtgggtgaggtgccagttaacttttgtcagacactcagggtatttcaggcaatggcacagtgagatttcatccttatcactgtaaggaaggatgaaaaacccaagagtataagagttgggccatctggattctcattcaagctgtgtcaccttggacaagtcaccagagattgacaattctaaatttcctcaatgtgttgttactatcctgtgggattttttttttgtgaaaagcgaataaggtgatggatacattaatcctttgcaaattgtaaaggttttttaagcaaagcatttttaaaatacattttattgtgtatatttaagatatacaacatgatgttataagatatatacatataataaaatggttagtatagtagaataaattaacatagccatcatctcacagagttatgcagtctcactgcccctatggcaagarcagctataatctactcataaaaagcctgaa

SEQ ID NO: 134116 - DNA, 630 bp, Homo sapiens
caggaaccctaatgtaaactatgggctctggtgatactgatgtgtcaatgtagttcatcaattgaaacaaatgtatcactctggtgggggaggttgatagtggaagggagtaggtgtgtgtggggccaaaaggtttgtggaaacagttcttctcaattttgctgtgaaattaaaactggcctaataaataaagtctattaaaaaaactattgcagcaagaaaaaaattctttcaataattatatatagtaacagaaaaaaagctaattgaatttcagataactgacctcggtatcaaatttcattttcacatgtattagaaaagtaaagtaagaacactcaggaatttgggagaaataataattttaaaatgtagtcaaatgtttactgcaagtgaaatgagtaagtcacactaatataattaaaatatgcaaaccaaacaggaatgacctttagcaaatctgacmaatatttggtgcagggatttcaatgatctggattcccaagtcttaggggataaactgaatgaatttagagtcaccaccaattatttctgaaagtgcatctcagacaccaagagatgccaaaatataggaacggggcaatagctattaaaggagaagagagcaag

SEQ ID NO: 134117 - DNA, 630 bp, Homo sapiens
caggaaccctaatgtaaactatgggctctggtgatactgatgtgtcaatgtagttcatcaattgaaacaaatgtatcactctggtgggggaggttgatagtggaagggagtaggtgtgtgtggggccaaaaggtttgtggaaacagttcttctcaattttgctgtgaaattaaaactggcctaataaataaagtctattaaaaaaactattgcagcaagaaaaaaattctttcaataattatatatagtaacagaaaaaaagctaattgaatttcagataactgacctcggtatcaaatttcattttcacatgtattagaaaagtaaagtaagaacactcaggaatttgggagaaataataattttaaaatgtagtcaaatgtttactgcaagtgaaatgagtaagtcacactaatataattaaaatatgcaaaccaaacaggaatgacctttagcaaatctgaccaatatttggtgcagggatttcaatgatctggattcccaagtcttagsggataaactgaatgaatttagagtcaccaccaattatttctgaaagtgcatctcagacaccaagagatgccaaaatataggaacggggcaatagctattaaaggagaagagagcaag

SEQ ID NO: 134118 - DNA, 556 bp, Homo sapiens
acgggaacttgcactgtgatgaagaagctagaataagctggtgaatagcaaaggggagtcatttgacaatcttgttttttttccatgaaaacgacccctgcggttcaaactgaacatttcaatgataggaaaatctcattttatttggtttgaatatgaaaacttgctaaaaaataaagatggccgcctttctttcctaatgctagatgataaatttatttgagttttcagtaaattcttacagagatagaagccwaggtatctccttataaatgagagaaatttaaagaggaattctaaggatgtgaatttcctggagaatgtgttatgtaactaacaaactgcgagggagaggagtaattatcactttaattaattagggccctgttacagctcccctgtgaaagataatccttgattaaaagtgtcagtatgtaaaaatattgatggatattgaaatgtaagagtgtaaaatttcaattaattgtgaaaaagaaattagctggtattatcatttcccaatagacagtcatgatttccagaagatatgggggca

SEQ ID NO: 134119 - DNA, 356 bp, Homo sapiens
gggcatttggtttcgttttaaagagaagmcagaaatacaaatgtaagtgtatattgccatcatttataaaatatggcctctattctcacgtcatctgtatccctaacaagttctagctgttactctactaccagcaccagataaaaccatccaagttgcctagcatttttataagttaactcctttgtaaataatttgttttttaaaataaaaacacccatggcttcgccttccaaaacatgttgctatgaataataagggctaaaaatgtcattattattatattgattaggtatataaaaataacaggaatatactgagcacctagtgggcaccaggtggtgcacatggctgtg

SEQ ID NO: 134120 - DNA, 540 bp, Homo sapiens
caggtggatggatggggagggccagcctacccaagacctccaaccacccaggagccatgtgggatrtgcagtgagagcagcttgggaagatgctcagttacaacagaagcttcacctttgttgtgtcatttccaggggtgtgagatggacttagaaggaatccaagatgatttttccattagaaaaattgtctttggtgacttgggaaaaggtttagtccagcatcgaacaagatttttcttttctcctaattaatttatttcctgccaaagaaattgactgtgtccctttaaacagcaccaaccccaaagcaaagtgtccctggagggaatcatgggatcaattttccagccggagactatgcagcctgactatacaggcttcaggcttttaatttgcttatacatagagtggcttgagctctatacatcaccaaatcaatgcaaatcagtttacttgaagctggttcaattttaaaagaatttcattaaccagcaataaaaggcccgggttaatataattactataggatcccaagct

SEQ ID NO: 134121 - DNA, 540 bp, Homo sapiens
caggtggatggatggggagggccagcctacccaagacctccaaccacccaggagccatgtgggatatgcagtgagagcagcttgggaagatgytcagttacaacagaagcttcacctttgttgtgtcatttccaggggtgtgagatggacttagaaggaatccaagatgatttttccattagaaaaattgtctttggtgacttgggaaaaggtttagtccagcatcgaacaagatttttcttttctcctaattaatttatttcctgccaaagaaattgactgtgtccctttaaacagcaccaaccccaaagcaaagtgtccctggagggaatcatgggatcaattttccagccggagactatgcagcctgactatacaggcttcaggcttttaatttgcttatacatagagtggcttgagctctatacatcaccaaatcaatgcaaatcagtttacttgaagctggttcaattttaaaagaatttcattaaccagcaataaaaggcccgggttaatataattactataggatcccaagct

SEQ ID NO: 134122 - DNA, 540 bp, Homo sapiens
caggtggatggatggggagggccagcctacccaagacctccaaccacccaggagccatgtgggatatgcagtgagagcagcttgggaagatgctcagttacaacagaagcttcacctttgttktgtcatttccaggggtgtgagatggacttagaaggaatccaagatgatttttccattagaaaaattgtctttggtgacttgggaaaaggtttagtccagcatcgaacaagatttttcttttctcctaattaatttatttcctgccaaagaaattgactgtgtccctttaaacagcaccaaccccaaagcaaagtgtccctggagggaatcatgggatcaattttccagccggagactatgcagcctgactatacaggcttcaggcttttaatttgcttatacatagagtggcttgagctctatacatcaccaaatcaatgcaaatcagtttacttgaagctggttcaattttaaaagaatttcattaaccagcaataaaaggcccgggttaatataattactataggatcccaagct

SEQ ID NO: 134123 - DNA, 599 bp, Homo sapiens
gaggacattatgctaagtgaaagaagccagacacagaggggcaagtgctgcatgattccacttctatgagrtatctaaagtggccaaactcatagatgcagaaagtaggatggtggtggccaggggctgggggcagggggaaatggggcgtttgctagttgatggacatcaagttctagttaagcagataaatccattctcgagacctgctgcatgacattgtgcctatggtcaatgacaccatgtaaaacacagatttgctaagggggtaaatctcatgttaaatgttcttactacagtaagataagattttaaaaaattgtaaagggccatttggaggtaagacattgtatatttttatactgagaagtgggccatctcctttggtgacttggaaaaagggtagtccatcattgaacatggcttttcttttctcctgatgaatttattttctgctggagaaattaaatgtgtgtctttaaacagctcaagcaaggtgcctctggaaggaactgttctaaagggaactttaattctgtcttaccaagatttcaccccagtgttaacccccatactaactgcatctcctggaaaaacgt

SEQ ID NO: 134124 - DNA, 599 bp, Homo sapiens
gaggacattatgctaagtgaaagaagccagacacagaggggcaagtgctgcatgattccacttctatgagatatctaaagtggccaaactcatagatgcagaaagtaggatggtggtggccaggggctgggggcagggggaaatggggcgtttgctagttgatggacatcaagttctagttaagcagataaatccattctcgaracctgctgcatgacattgtgcctatggtcaatgacaccatgtaaaacacagatttgctaagggggtaaatctcatgttaaatgttcttactacagtaagataagattttaaaaaattgtaaagggccatttggaggtaagacattgtatatttttatactgagaagtgggccatctcctttggtgacttggaaaaagggtagtccatcattgaacatggcttttcttttctcctgatgaatttattttctgctggagaaattaaatgtgtgtctttaaacagctcaagcaaggtgcctctggaaggaactgttctaaagggaactttaattctgtcttaccaagatttcaccccagtgttaacccccatactaactgcatctcctggaaaaacgt

SEQ ID NO: 134125 - DNA, 599 bp, Homo sapiens
gaggacattatgctaagtgaaagaagccagacacagaggggcaagtgctgcatgattccacttctatgagatatctaaagtggccaaactcatagatgcagaaagtaggatggtggtggccaggggctgggggcagggggaaatggggcgtttgctagttgatggacatcaagttctagttaagcagataaatccattctcgagacctgctgcatgacattgtgcctatggtcaatgacaccatrtaaaacacagatttgctaagggggtaaatctcatgttaaatgttcttactacagtaagataagattttaaaaaattgtaaagggccatttggaggtaagacattgtatatttttatactgagaagtgggccatctcctttggtgacttggaaaaagggtagtccatcattgaacatggcttttcttttctcctgatgaatttattttctgctggagaaattaaatgtgtgtctttaaacagctcaagcaaggtgcctctggaaggaactgttctaaagggaactttaattctgtcttaccaagatttcaccccagtgttaacccccatactaactgcatctcctggaaaaacgt

SEQ ID NO: 134126 - DNA, 486 bp, Homo sapiens
acgcactcactatcgggagaacagcaagggggaaactgcccccgtgatccaatcacctcccaccaggttcctcccccaacactggggattacaattcaacatgagatttgagtggggacacagagccaaaccatatcactcctgtacactaaactgctgtgctgaacttagattatggtttatgttgatctcaaatcaaatcgttagttacaaaatatttaaagtttctataattattataatctgcatagaaaaacaatagctgtaagaaataaaaaactctggaagaacctgagaagacacctgagcaaatattggtaaaatagctcaacgcactgcaggtatctggtaacttacttatccctggaagggagataaaaaaaatkccaggcaagaataaagcttcccatcttttgaggcacaaagattgaaaacaaagttggttcttctaagtggaattcaactagcctagaaagtgattgtcaa

SEQ ID NO: 134127 - DNA, 590 bp, Homo sapiens
tctttatttttttcatcatgttttctcctgtgattgtgtattttctaatagcctgtcttcaagctcactgattctttcctttgcttgatccattctgctgttgagagcctctaatgaatttttcagttcaacaaatatatttatcagttccaagatttttgtttgattttaaaaattatttcaatccccttgtcaaatttctctgataaatttctgaattgcttttctgtgtcatcttggagatcactgtttccttaaaactgctactttgatttctttgtcaaagagctctcgttatcactctctcattagggtcagtcactggttccttgctttgttcatttggggaggtcataggtccctgtttgctgttgcttctttgtatgtctttgtctttgcattgaaggattatttatttattccaggcttctctctctggcttgtttcggtttttattagatatattttcttagagattctttaccactaggtcactggygtcttttggctctaggtggcaccttaatcccagcttcgtctcggctttagtgaactacgagagtgctacccaacccaaaagggggagatct

SEQ ID NO: 134128 - DNA, 622 bp, Homo sapiens
tcattacctgggcatgatttgacccttggaatcagcccaaggtgaaggcttaggtcctctcaggttttttctgagcataatgtgtggctttttcagtctccctgtgtatatgtgtattagtccattttcatgctgctgataatgacatactcgagactgggtaatttataaagaaaaagaggtttaatggactcacagttccacatggttgggaaggcctcacaatcatggcagaaggtgaaaggcatgtcttacatggcagcagacaagagacagaagtgagaaccaagtgaaaygggtttccccttataaaaccatcagatcttgtgacacttatttgctaccatgagaacggtatggaggaaccgcccccatgattcaattatctcccactggatccctcccacaacacgtgggaattatgggagctacaattcaagatgagatttgggtggagacacagccaaaccatatcaacatagttgattttcactgtcttaattttccaaagagtatcacctaatttctcttagaggccttatgtgatgtattgtatgcctccatttgtactttcttgccccaggtacctgcaagtctgtagtccccctgcaggttttatgag

SEQ ID NO: 134129 - DNA, 622 bp, Homo sapiens
tcattacctgggcatgatttgacccttggaatcagcccaaggtgaaggcttaggtcctctcaggttttttctgagcataatgtgtggctttttcagtctccctgtgtatatgtgtattagtccattttcatgctgctgataatgacatactcgagactgggtaatttataaagaaaaagaggtttaatggactcacagttccacatggttgggaaggcctcacaatcatggcagaaggtgaaaggcatgtcttacatggcagcagacaagagacagaagtgagaaccaagtgaaacgggtttccccttataaaaccatcagatcttgtgacacttayttgctaccatgagaacggtatggaggaaccgcccccatgattcaattatctcccactggatccctcccacaacacgtgggaattatgggagctacaattcaagatgagatttgggtggagacacagccaaaccatatcaacatagttgattttcactgtcttaattttccaaagagtatcacctaatttctcttagaggccttatgtgatgtattgtatgcctccatttgtactttcttgccccaggtacctgcaagtctgtagtccccctgcaggttttatgag

SEQ ID NO: 134130 - DNA, 645 bp, Homo sapiens
tcaatcacctgagtaaatgtgaaaactactccttgtccctgagtcccgaccaacagtgtcccctgcatttctcaagtgctccactgcccctctccagggtccctcctagaccttctgcactccaaagctgccatagacattgccctccagattcatgatttaccagagttgcaggttggggatataaggtggcacttatctagaacatccctcacatttatgccttggtccccgaagctcctgtggaaggatatgcagactttcatttcacagaacaatagctctgagtggcggaacataagggcttaaatccacattgaattgtcaacagttagccttgaaggagggcatggtaggagaagaaggggagttcccaagcacttggggctggggaagggagcagatgaggcagatcaaartagcaatattaatcattactcatattctgatcagagttaattctgtcactatattctgttctcatgggttgatggtggtgggatggacaccagggatgggcacagcaaaaggcagtagtcctggccacgtaaacataggacttctggactgctctgcagagtctgatgtcagcccctcacattttccagtgaatccttagatttatgagacatgggttgaatagct

SEQ ID NO: 134131 - DNA, 592 bp, Homo sapiens
taaaaatatgtcgtaaattctctgatgtacttcccctaaaaaaatggagtcgacttcttccattgaaagtgggctggacttaatgattttctcctaaacaatagaatgtgattgaggtgamactatgtggcttccaaggctgaattatagagggatatgaaaaaggatatctaaaaatgatatctattagtttatctaaaaaggataaacttctatttagctctctgaattttggatcattcactctgagggaagccagctgccatgacatgaggatactcaagcagcctgtggagtggcccatatggagtgtgactgaggcctcccagcaacagccagtgtcagcatgccagctatgtgagtgagctactttggaagcagatcctccatccccagtcaagccttccaatgactgtggtcccagttgacatcctgactgcaacctcatgagaaatcctaagctagaatcacccatccaaggcattttcaaacttctgatccacagagactgtgtgatgcaattaatgcttattatcgatttaagctagaaagttttggagtaattcataatacagcaatacataatgaattc

SEQ ID NO: 134132 - DNA, 581 bp, Homo sapiens
atctcccagactcagttgattcttgtgcctccaccacctaagtaactgagactacaggtgtgcaccaccatgcctggctaatttttttgatgttttttattgagacagggtcttactatgtgtcccagactggtcttggcttcccgggctcaagtgatccatctgccttggcctcccaaaggctgaaattacagctatgagcgtgcccaactgtaaactgatatatgttattagaatctgcaccatatccaaatgaactttaattttcttccactcttcaagtttggaggaagaaacacatcatttttattgctggtgtcaatttttaagaaaaaaatttcactttaacaaaaccaggattttaagatgaaaacaaagtagaatcaaacaaaaagaaacaacaattgccmcccagctcccccgctcaaggaaaaacacctgtgccgttgctcagccacaggatcagtccaggcctcctgtggccactagctgcagtggttggttgtgtgcactgcactgccctctgctgggtgggccagctcacatcttaattttttttttttttttttaaattgtggtaa

SEQ ID NO: 134133 - DNA, 469 bp, Homo sapiens
cctctgcaggcacagagaccctcacagcagggatccattcacaccagtcacccttggagactgctatttatgctaaagaaatttatcccactgcattgtatgcttcttgtccagagttctcttggatcccttgtttacggccttaktcttatattgtgagcagtggaatggacaggccatttaagagggcagggatggctaatgatgggtctgttagccctgcagtcagtctttcctttgtgaaccaaacccaatttgggtgcatttgctaaaaaaaaaaaaaaaaaaaaaaaaaagaggcaaaacctttatttgaagttgaagaaatgttagttgtattccattccttttatgaggaaaaaaaaaaacacaaacacacacactggaagaaaccaaaaactttataatatttatgatccattctttcggtggtcaaaatacatatccgattttttcaggtgtaggtaca

SEQ ID NO: 134134 - DNA, 628 bp, Homo sapiens
aatttgtaccctcccttgtgagtcacttgccttaaaaaattcacaactaattatctgaaagtgagacaggttagtacaggtttgctatctactagtattcctttctttcctaatcactcttgcagatggaggaatccattttatcagcctttcctccttattctgctcttccagagtaatatatgtgtaaattaaatgtagcatagcttaagtaagcatagattaccctgtatctgaggcgttgtttttagagccacatttgcatgttaagtggagttgtgtgccatgagggataggtttatagaccggacccgtaatgaagttgagaatcattgtgcaaaagctgcagactacaggtagacattgagagcctttgaatgtggagagcrtatatttcacttccttttgacaaagactttattttataaggctttatgggaaacagtgtgttcaattacctcagttaaaactcattccagggagcagactattaaaatactacttgaaagtactgagatttccccctttttgtaacttttgatcaactgattgatacctggtatttaaaataacatgtttaaaaaagattcctgaattttgttgtatctgtgagagataccctagggag

SEQ ID NO: 134135 - DNA, 639 bp, Homo sapiens
aatgacacagttagtatatatgttcataactaagcttaaatgccatttttaataaatattaataccagtataaggtaaggacaaggatgcacatacagtcctattatgaaatagggctgtagcagcatttttctagtttagttacttccttccagtatttcaattcctttcaatccaggatcttagtgattttgcatgtaaacctttttcctatttcatgctctctctttgcatttgctttattcagttgtattgaatttctaatgtggattagagcacacagtagggctggttcttcattttaataactttcctttccaggcacttctcagtaatcctttctttttttaagccaggtttagagagggagctaaaagcagaacaagacatttgagtttgtattgttctgctttattttcataagttccacattctcaactgaatttctagggacgaaagagaacycgattacttttagttcctttcagtgccactctaacttagtgacttgacttccatttctctaagtggaaatatttacatgtatttcaaaggatgctctctggcttagttagtatctctacactgattagagaatgtaaagcgatgtttaagtgcttattattttttaattacatt

SEQ ID NO: 134136 - DNA, 599 bp, Homo sapiens
cctttacttctttaagcatggtttcctttaattccttgaacatataagtgctttaaagtcattgtttgctaagtctgatatctgagccctcaagtagtctgttgattacttttccctctccttatgttatgttatgagtcacataacatttcctgtttctgtgaatgtctcgtatttttgttgttgttgaaaactggacatgttatataatatagcaactctgaatactgatacttccaacccaggacttactgttttkgtttatttctttagtgatgtggctagtttattttagtgaagtctattttcctgcagtgtgaaatctcttaacgttgctcctcaaaaggtacagggttggtcatgtgcacagccccctcgggatggcaatcattttagcaaagctctctttgactgtctctttccctgctctctctctgttacgttctctgcctctgttggtataagccctaggtgttaggctcctctagttgctggtcattctattgttttcaacaatgccctagggtgtaaattgttccacattgtgttccaattaaatttaagcatctttgctggggtagtttttgaggtcagtcctt

SEQ ID NO: 134137 - DNA, 417 bp, Homo sapiens
gaagacagaaaaagctgcctctcactccctttctggggtcttctgtcttcctgtggagtgtgaagagtcatggagagatttcatgacagtttccagcacaaaactctgctctctttkgtatcgtgtcgcctgatccctttgacttttaggagtactggatattactttgttctgtgagagaacacttaacctttgtgtatgtgatggctggcaagttactggaggtggctgacagcagttgtttacagtgaatggttattattattactacagggagttactggtttctttgctggttaagataagaaaggcacggtttaaatacttagagaaatgtttttgtattgaagtacaccatgaaagtgttgcatagcccagtcccatggagtttccctctttttggggacccaggattca

SEQ ID NO: 134138 - DNA, 646 bp, Homo sapiens
gtctgtggggatgcagcactgaataaaagacaggacctgccctcaaataataactgtgggaactgacaaccccaaccacccacttccctcgtcaggtacccatcctctggacaggaaaatggttcttgtcttctccaggaagacaaatttctgggctgcagcagtatcctaaagttatggaggaagtatggctcaactcactgctggcgagatgacacagaccacctagcactgttttccatgacaattcctttcaggaaactgtgatgactgaagaggaggaatggaagcccatggacccatccaagatgagatgcagcttcttccagaatggcaaggagtctgagaaagagaaggtccccacaaggtctcttctggctcaagtgattattccgctagtaaattacagggtaaatggcattcttgccatttyacagaccacacaaactgagactccgcaaaacataatgattaacatctgcaatcacagaacctttgagccaggctaaatgttagagatttttctacctacctctcattttgtaagtaacaacacctatgccagagatgtgacttggcctatactgcctcatcccccatctaatgtttcttaccacaccaggccagtaaagactacatgaaagtt

SEQ ID NO: 134139 - DNA, 546 bp, Homo sapiens
tggtaaataatacatattttccccaacagcctaggtgccagcattggtagatgtcggtgaaatgaatgaatgcatacatacattttagatcatagatctttagttctttgggggatggatgtaggtgtgaaagtaggaaatccattgataagcagagtgttaaataataaaatacaggcaaaaattctagactcttaacacattacggctggttactttggcaaacattagaaccgccaaagcacacacaactgcacaaagttggttgrcaaacttttctgttaaatcgacactccaaagatcgtcattaatctcagtaagttattaactccaagaaatcatctgaacaatggtgaactataataatctgtacataccatatgtgcattaagcattaacacttcattcttgcctatttcctaatgtcaagaaagctcaaatgtacccagcacattgatctctcctgcagaaaaacatgttacatctcatccacaattacaacaactacctagcttgctatgttattgtcatcccaactactgggaa

SEQ ID NO: 134140 - DNA, 491 bp, Homo sapiens
ccatgccctgctcccccggtctttcctacggcccgcgtgtgtgtgtgtgtgtgtgtgtgtgtgtgtgtgcgtgcgcgcgcatgcatggggcaagagtgtgatggtgagtggggttaggctgaaagtcaraaaactggattctatgctcacctctgtcttcagcaagaccctccccctttgggggctcagtttcctcatctctaaaataaaagttgtacagtttcatttctggaatgacttgtggttcaatggatccatcattccggaactgtggctgatgaataggaaaaccggaaaagaaaaggaaggcatttttacatgaggcagaggggagaagtgaagtgcaaatccagggctcctgatacccagggcacacaagaggagattcagagagagaagacaggcatcagcaagtaaatctttcctctgccaagtgctcttagatagaaacccagatccctgaggaaattattgaaactcaattcctttga

SEQ ID NO: 134141 - DNA, 569 bp, Homo sapiens
tgattctgcttatgtgaggtgcctagagtagtcagattcatagtgacagaaagtagtacggtggttgccagggactagggaagggaggaataaggagttactctttaatgggcaaagactttctgtttgagcaaatgaaaatgttcagaagatggagggtggtgatgcttgcaccacaatgtgagtgtacttacaaatgcayacttagaaataattaacactgtgaatttttttatgtgtattttaccacaataaaagagttgaaataatccttttgagtggacttgacaaattatttcatcttcggcatggcagcatggatatgaaaacacctgttctctgcttagctccttgggtcaaaggggaacggcttttgctggtagactaatacaatcatctttatgaaatattctgatatctttcagtcaaaagataggtatcactattcttttcaacgtaatctcaaatgggttttggataaatgtctcctatcatgtatcattacataactggctctgttgttctcaaggtctggatacctgtttcctgatttggaaaaataatgccat

SEQ ID NO: 134142 - DNA, 538 bp, Homo sapiens
catcataactaactatcttaaggctggaaaaatctccaggagtgtcactccaggatctccctcaattttattctcatcttggttacttcatctatctgtatgatagggaccctcagctctgccctttccctagctcttgtgatctcaaaaaagtacagtgatatcaatctgaaatatactttgaattctaagaaaggaaattgtcgcaacttctaatsatgaattatgaaaccactagagtttactgtggccatttctatctatcattaacataaacaattgtgagggtgagtaaagggttgtgtgcacatcctttctgagagaatggagagagcacaggcttctgaagtcctagattcaactcctggctcagccacttatcaaaaatgtgtctttgagcctcggtttcctcctatgcataaagggagcagtattaggtgacgattaaatcctgttgtcagtgctcagcaacgtcccttcttgcctttctctgtgtgggactgggaggacagtcaggggacccagcggcgctgtgcca

SEQ ID NO: 134143 - DNA, 500 bp, Homo sapiens
ccatactttcaaaaacactattttgtttaccaattatcaagcatttgttaagtgtctatcccaagctaagtactgtgctatattggtcaggtcaggcaacgcagcaccttaaaagttgaagagaagcctttggaaccattattcattcattcaattgaatatggtcaattggcatcatgaatctaacaattaggaattgggtagcaatatgaagggtgtgtatgggaaggatcaggtggcaggagaacagcaagaagacaggattggggtcattttcagtcctgggcaaagaattgagcatgcagacaagatcagtggggtccttcctaggtatttatgaatccctgaatctcaaactgaataccttgtgtagcagaagcgagcgtacacagaccctagcagatacacatgtgaayctgggtagtccctgaagaacaggacagggctcagctgcaggtaccgtgcactatgaccctgccagccacacacatgggcactaa

SEQ ID NO: 134144 - DNA, 569 bp, Homo sapiens
tgaattttaaaaatccatcacaatcaattatcacaagtatgtccatttttccagcctgctagccagagtcaaagactgtgtgcatttgaaatctccaaccttttaaaacattactgtgaagttgaaagttcctggtgtcttttgattaaacatcgtgctaggtaatgactgttttacttcttattcttttttgcccccttcaaattactgwttgttgtctgacattaaggccccatttgctcttaggaaattaacaagcctacgaaactcttaatgaattgaaactcatcaaatgtttggaaactatggcagtcttaagattcttttccttttaatctatctctctgtgaaatgtctcattttttccacatattcacttggattcagacagctgcactttaggaattaggttttgagtcttgcttatctgaagtagcagggagtcacctgcccacagaggtgcaagggcttgagaacttgggtggtttctccaaccagcaacgtgcttactgtctttctgcataagcatcgacctggctgcaccaagtgatttctactttccatccaag

SEQ ID NO: 134145 - DNA, 596 bp, Homo sapiens
tgggcatccttgaatcccatcttatctggatagtttctccttttctaatgccatcatcatctagcagcagaccatatacagaggttccagttgagaccttcagctttgtgaagggygggaattcctgaaactgtcgcaaggcttggggtctgaggaatacataaccacccaagtaaggagcatccaggagcaaattccacactatctcttgcctcagaagtcaggaaaaataatcaggtaactaggaaaccctgaggaaatttcagtcatcagttcaccttgggaagtggagttgttatgtgagtgtttatgttcaggtgtgtcagtaggaggagcctgatgaggatgaagaataatgagcatagcccaaggggaacactttcctctctagtcaacaaccatttccaatccttggacaaccaaccacacagtcgcaaagccaggtgtccttggacacatgtgaatggggagaggggtgtgcccagctcacagagccctcagccctagagcagttctgaccttgacttagtatatcttccagctaatcatgagtctagacacacatgccccaaatagtcttggtagaggcttcccag

SEQ ID NO: 134146 - DNA, 596 bp, Homo sapiens
tgggcatccttgaatcccatcttatctggatagtttctccttttctaatgccatcatcatctagcagcagaccatatacagaggttccagttgagaccttcagctttgtgaagggcgggaattcctgaaactgtcgcaaggcttggggtctgakgaatacataaccacccaagtaaggagcatccaggagcaaattccacactatctcttgcctcagaagtcaggaaaaataatcaggtaactaggaaaccctgaggaaatttcagtcatcagttcaccttgggaagtggagttgttatgtgagtgtttatgttcaggtgtgtcagtaggaggagcctgatgaggatgaagaataatgagcatagcccaaggggaacactttcctctctagtcaacaaccatttccaatccttggacaaccaaccacacagtcgcaaagccaggtgtccttggacacatgtgaatggggagaggggtgtgcccagctcacagagccctcagccctagagcagttctgaccttgacttagtatatcttccagctaatcatgagtctagacacacatgccccaaatagtcttggtagaggcttcccag

SEQ ID NO: 134147 - DNA, 559 bp, Homo sapiens
acgaggtgccagcagcagcagcagacaatgatgaccacaaagacaacaacacttgcacagcccctgccttctgagagcctgtgcttaacaagggctggtgctacatggaaacacgaataagatatacaagtgtcagaataaaacatggtgccagactaaaggggtgaggaggatctagcaggagtacctgccacttagacaaaggctgggaaccccccaggaagagaagcatgcagttacagtagagccatctggaaaatcaccagggatcaacagagtcacaagaggggggggggcacccrtgagctcacagtccttccccagccttgtcaacattcctgccccaccctacactacatttcccagtgatccacagctcaccagtcattggtcctcataccatctcatttgattccccagtgactcagtgaggcaggggagacaggcatcaccatgtccaattcacagaggaagagctgggatgaggagtctgcacttgggggcaggcgcccaaaattcatgtccatggctgtttttatgccatgctgagactggagca

SEQ ID NO: 134148 - DNA, 559 bp, Homo sapiens
acgaggtgccagcagcagcagcagacaatgatgaccacaaagacaacaacacttgcacagcccctgccttctgagagcctgtgcttaacaagggctggtgctacatggaaacacgaataagatatacaagtgtcagaataaaacatggtgccagactaaaggggtgaggaggatctagcaggagtacctgccacttagacaaaggctgggaaccccccaggaagagaagcatgcagttacagtagagccatctggaaaatcaccagggatcaacagagtcacaagaggggggggggcacccatgagctcacagtccttccccagccttgtcaacattcctgccccaccctacactasatttcccagtgatccacagctcaccagtcattggtcctcataccatctcatttgattccccagtgactcagtgaggcaggggagacaggcatcaccatgtccaattcacagaggaagagctgggatgaggagtctgcacttgggggcaggcgcccaaaattcatgtccatggctgtttttatgccatgctgagactggagca

SEQ ID NO: 134149 - DNA, 456 bp, Homo sapiens
attcatgccaccaaggaaagctgcttcccctcagctcctagggcctcagaggtgggcttggagtggggagtgtggaagctgttataaaagcaaggaatgcagacaaatgggaagcctcgtgcccagctgcaggctccatctcggtagtctcccctcccaggaaaaaataytccattttccaccctaccttgggaatgagaccattcccaagccatggcagcctcatccagggcacagtgggtcccagtatggctgaagtcgggagaacggggagtctgacaacaggagaagatgtcatcgagctcttggggagggcagagctcctgtgactgttaaggcataatgcacaagccccgtgggtggcataatgtggaattcatctcccccacaatgccaagagggtccaggcagaacaatccagactctgtcagcagggtcctccagagagttcaggcc

SEQ ID NO: 134150 - DNA, 568 bp, Homo sapiens
aaggcaatgagtttagagtacagtcccttcctcagaggcctcactgggtgacacaaagaaaactgccccctgtctgcctggcaaggtatcattcagggaacaattctggcctgatctgagccaatctgcattctgaatgcaacctctgccatcctcttctatgctggccactcctaggctcccctgctctgttagcatgcaacctttctatacacttgagtgcacagtttctgatctgtctgtgagttatktatgtttcagacaagactgggcacgttcagggtggcacggccatagactgagttatgtatacttcagtgtagctcagtggttcttgacttttttccactgtaacctacctgaggaatttcagaccttcccctaaggaactcaaggactcactatgcctgagactgccacccagagatgtattcgagtttaagagggtgtttccgaattttaagggcactctttgcaaaggggaggggagaagacaagatcctgccccaccttcttatacttgaaaattattggtaaatgtcattggtcacatgtagttcaggttctt

SEQ ID NO: 134151 - DNA, 653 bp, Homo sapiens
gtggccagaggctaccatattggacagcacaattctagactattctctttcctgtgtattgattctgcattcaccaagtgaccttgctaataatttggtttggtgactatcccccggaggcatgctccattgagattttgcaaccacccccaaccccaaccggccctccctcccccctgtcctctgctgcaacccctttgtgtctcccagggaccttcaagctacagcacagtgcagtgtgccccattgcccttactttttgggcattcttgggctgtatgatccagccagctgyatggtccccatcaagtcagaatgctgctgcatgggcctcattctaatccaggctcatttgatgcacccatgccttctcttcccacactctgggcaaacctcctgcgcagcaggacccctggtacccctgctcgtgggaggggaccaaccagtcagccagaatcgttgctgtgggaggggattcttggagactcttacctgcaccaagtaatactgccttgggagagagtggtgataagtgggacacctagacggtggtgggcatctggggctgggggcagcaactgactaacaattgcatagatgcatttcaatattaacgactggtgaggccacatgagcacttaaggactgagcat

SEQ ID NO: 134152 - DNA, 507 bp, Homo sapiens
cattttgcaatgtcagtgcatttgcaaagccctagaacaggaggggattccagatttgctcagttgggatctataccaggatttcaaagtagccccagttcctgggctatctaggataattgtgtgtgtgtgtgtgtgtgtgtgtgtgtgtgtgtgtgcgcgtgtggcctaaaggagggtcagaaggaagtgagggatgcatgygacgttacccaagatccggctcatggaaaactgagaatctcagaactctccccagagtctcccggtatgattcggtgcctcctgtgggctccagcggcacttcctgcacaccttgcttgtgtcacttatatgcattgctacatggggtcatgagcgctcactgtcttccccactccctaggagcttcttgagtgcaggggctacatgttattcatcttacccaagctcactagccagtaagtggagcaccacactgaagtttacattttctggcttcaaacctgtactcagcaacaattcttc

SEQ ID NO: 134153 - DNA, 541 bp, Homo sapiens
atcactgtttcagttcattttccccccaatgatagattgtgataagttggttgttaataatgctacaatttacctaacaaattttgagcttgtaatacagcttcattaatatgtttaatttatcgttacagttccttcaggttaatggtttgagagtatgttggagtttaatctgaatggctattataaagtgcttgtttctcgttaaaatgtaaaactgagatacccaagatttayttgggataaaccagccagaataaatctccctcttctttgcattgggaagggaatgagggtcggctattaaaaaggctaagcattggagagccccttcaggtaagtttaaagtaattttgcagattaaacatcctttccctagggtgaatgggagcgatgcctgaggccagagtttagcctagaaggattctctggatgctgcagaaaggtagggacatcagaaatggggtgataactgaatttcgacaaaatacagtataagcattgcaggtgactggaaaggtatctgagtgttgggtgatgg

SEQ ID NO: 134154 - DNA, 496 bp, Homo sapiens
taggacaatgcttttacttcctgtgatctcataggcctctacattcaccagcatcagtctaggtcagtgtgattgggcccagaaggytctaagtggcaaggccgagtctgctgactcatgaaagtccattctgccacatgcaacaagctcacctttgaacactgggcaagagtcggctgactagaaggtggcaaaggtgaacctgaggccccagattctgttctcaggctggtcacaactgatgcttgcagaaactaggctagcgagtgccctgcaaacatatatgggtgattgcagaatgcaggacccagcaagactgtgtgactggtggtacacaaacattccctatgagggagcaactgaaaccctgtcttgcagcagtaagccagaagtgcagaaagcagagaactacaagggagtctgaggtcgatgctgttctctgctgtctgatgttccttgcagccctcaagctgatctgctgagcccttatctcagc

SEQ ID NO: 134155 - DNA, 477 bp, Homo sapiens
ccagtgaaaaatattagacagagatcgctatcattattttactttattcctattgtcttcctccctttccccttctccagatgcttcctaggaacatgagggaagaaaagagattgagagaaacaaaaaattcctctgtaaacatcatgggaaaataggaaaggcaaattctgaaaatgtcatattaataaatctttttcagcacataaaattaaaatgtaatacttgactaatattgggatatttttattgccttgttatcaactttcctcttggtccagcaacagattrcctacaaacactcacatgtattaaaaattatttgtctttcttcttttaaattttatctcaacttcctttcaaatagtagtacctgagacttagaagtctttaccctaatttaatgctgacctaccaagaggatatatgagtttcaacttagagaataaacaagtgttggggggttgtaaaagtttt

SEQ ID NO: 134156 - DNA, 618 bp, Homo sapiens
acagctagtatcatattgaatgaagaaaaattgaaagcctttcctctaatatctggaaggagagaaggatgcccattttcaccaatgttattyaacatagtattggaagtcacagctagagcaatcagacaagagaaataaataaatggctttcaaattaggaaggaagaagtaaaattctttgtttgcagattatatgatcttacatttgaaaaagactaaagattcaataaaaaattattagaactggcaaattcagtaaagttgcaggatacaaaaccaacatacaaaaatcagtagcatttctatatgccaacagtgaaaaaatctaaaaaatcaagacagtaaatccccttcacaatagctacaaataaaataaaatacctataaataaactcaaccaaaggagtgaaagttctctacaataaaagctataaaacattgatgcaggaaattgaggagagcacaaaaaaatgaagatattccatgttcatgtattggaagcaatcaatattgttaaaatgtccatactaatcaaagcaaactacagattcatgaaatcactatcaaagtaccaatggacattcttcacagaaatataaaaaacaatcctaaaat

SEQ ID NO: 134157 - DNA, 618 bp, Homo sapiens
acagctagtatcatattgaatgaagaaaaattgaaagcctttcctctaatatctggaaggagagaaggatgcccattttcaccaatgttattcaacatagtattggaagtcacagctagagcaatcagacaagagaaataaataaatggctttcaaattaggaaggaagaagtaaaattctttgtttgcagattatatgatcttayatttgaaaaagactaaagattcaataaaaaattattagaactggcaaattcagtaaagttgcaggatacaaaaccaacatacaaaaatcagtagcatttctatatgccaacagtgaaaaaatctaaaaaatcaagacagtaaatccccttcacaatagctacaaataaaataaaatacctataaataaactcaaccaaaggagtgaaagttctctacaataaaagctataaaacattgatgcaggaaattgaggagagcacaaaaaaatgaagatattccatgttcatgtattggaagcaatcaatattgttaaaatgtccatactaatcaaagcaaactacagattcatgaaatcactatcaaagtaccaatggacattcttcacagaaatataaaaaacaatcctaaaat

SEQ ID NO: 134158 - DNA, 608 bp, Homo sapiens
caaaaatgacactttgaattacatcagaactctacatggcaatgcaaaacgagagcctttcatctgaaaartgaaatacttaatgatttcaatcagttcgtacctcccctaatttgagatctgcataacgtattcagtgcctggatttctttcatatctctaaaatatttataaaaacaattcattctcttgttttctacctacctccccccctttcaagatgaaggtaatttgttttctctggtagaagttgcagagggcagcgggggattggggaagagcagtgtagttatagaaagcaccaaatggcatttccaagctatctgagaatattaacgtttgagtgtgtcagatctgcccaggggcaggaggcttaagatcatttttctccgctgaggtttaatgattgaatgcattttgtctgaaggaaaaaaaaaggaggaaataaattttttgaaaaaggtttatatttacagagagtgcctaacgaactagttaacattcttactatcaggaaagcctaaaccattcataaataaaccattttaaaccacctttacccacatgcagcactctttctttcagctccctttagcaatttgaagtac

SEQ ID NO: 134159 - DNA, 449 bp, Homo sapiens
aagactgtctcaaaaaaagaaaaaagttcagggacctggaggaaggagagaaactgaagcatgctttggtagatagatatttcattttgactaaagatcactaaagagaaaactgttcacctaatggtttgtgaggtaaatactggaatatctagtgggtgtctggtttgtcataggtaacaaacgtggcaccatctaagtcaycatgggaagcttgtttcattgtagtaaggtgctcttgcacaacacaaaggatgggggatttcatgaatcacagccattttcaggattgcccacccacccccatctcctttccacaccccttactctttttctatccatgtctctgatttgactcgtcctgagttgtatccttcatagtaagtgggtaaatataagtgaactgtgggtagttctatcaaattatggaacttgaggctgttgtacag

SEQ ID NO: 134160 - DNA, 553 bp, Homo sapiens
gggaaaaaagcaaaccataacaaattaagttgytagccaggtgcactggctaacgtctgtgatcgcagcacttttggaggccaaggaagcaggactgtttgaggccaggagctagagaccagcctaggcaacatatcaagatgccacctgcatacaaaaaaaaaaaaaaaaaaatcagccaggcgtgctggtgggcgactgtagtctcagctacttgggaggctgaggtgcttgagccagggaggtcaaggctgcagcaagccatgatcgcaccactgctccagcctgggccacagaacaagacattagctcaaagaaaaaaataaaattaaattattgtacctcatacatcagccttctatggaaaatgcaatcctattatatttatttgccttttccctatacaagtgttagggaagcaggtgcctaggggagccagagaaacaccaatttaagttcagctccatcttgagactaacaagaaacactccttgccagtcacaacccatgatcataaagtttcccatgaagaaaacagcctgaagatgcctgc

SEQ ID NO: 134161 - DNA, 551 bp, Homo sapiens
tgaggtgggagttgccaaagataagtagactagaacggcagaacacaagcatcgtgagagttttcacacaggtgggaggcagagcacagggaatcagaactccagttataaggggacctacacagaagaaggtgacaacagagatggcatgttggttatgaacagggaaattgatcagatatataaatatatgaagggtgatggagctaagtttcacactgtgcaaatagggagttacttatatgaagaaaaagctaaaattaaccctatggtgtgtyactagaataaagaatcagagtgattgcactaatggtttttgataattgtatttcattgtaggaataaatgtatatgcaaatatgtgtatgcctgtttttgtataactgtgtgtgtgtgtatgtgtgtgtgtttcctaactgtccaccaagagtgccctggagacagcagcccatcttgagcacacccagcacctagaccttggtttctaaataccacttttcaaaaggaaccagtattacttggaaaaacaactgatttcagaactggggcat

SEQ ID NO: 134162 - DNA, 596 bp, Homo sapiens
gaattcagaaactcttgtaagctgatgagatatataattagcttttatgttaattgactgctatgagtttgttgtatgacacttcttcatataatatgcaaatagcattgactgtttagttttattagacaatataattagaaatctaaaggcactcatttcgatgaggaataataaaggctgatacatttccagtgttctgtatatcagaaaaaaatgaattgcatctggacgtaataagagaggttttagctagacattatttagggagcccaaaccacatataacggaattaataggagtgcttccagccaccgtaaactccatatttaaacacgtgaatttgtggtgtccataagaccttggggggaaaacacaaatgtttcastacaatttaccacaaataataatatacttaatgaaaataatacctaaatgttgcctgctataattaaagtgaaataagtcattcttatttaaaacaaaatagtttgcgagtaagtgttccagttcttgttactcacagacattaccagtaacatatatgcttaggttgttcaaaaaaaaaaaggtaataaaataagaacaatgtgatt

SEQ ID NO: 134163 - DNA, 594 bp, Homo sapiens
atgagatatataattagcttttatgttaattgactgctatgagtttgttgtatgacacttcttcatataatatgcaaatagcattgactgtttagttttattagacaatataattagaaatctaaaggcactcatttcgatgaggaataataaaggctgatacatttccagtgttctgtatatcagaaaaaaatgaattgcatctggacgtaataagagaggttttagctagacattatttagggagcccaaaccacatataacggaattaataggagtgcttccagccaccgtaaactccatatttaaacacgtgaatttgtggtgtccataagaccttggggggaaaacacaaatgtttcagtacaatttaccacaaataataatatacttaatgaaaataatacctaaatgttgcctgctataattaaagtgaaataagtcattcttatttaaaacaaaatagtttgcgagtaagtgttccagttcttgttactcacagacattaccagtaacatatrtgcttaggttgttcaaaaaaaaaaaggtaataaaataagaacaatgtgattttggggggatatttttccagaa

SEQ ID NO: 134164 - DNA, 501 bp, Homo sapiens
gaaatttggcatcaggctaactatcatacctaagcctttgtttaacttagtttgggctagaatattcgaattaactcaggatacaattctccctcctctgtcaagycttagaaaaaaagaggtggttgcatcactctccctctgtcatttggctgtagatatttgaaagcggcattcgttttaatttggcttttaacctagaaaccacagcccctgattccttatgtggaaacctgtgagagaccttccttgcaccagcactgactaagaccactctggagtccccacacgagcaaaatggtttaagcaaaacgttctgcaaaactgtcttaaagtccccgggacttgtgcacagcaccttccgtaaagtatcactgagacgtgtccattgatcaccataaattgccacaaccccttaggtgtctcaaaagtcaagttactaaacgcatggtgagcacttaagcagcaagacaacaaagtcagcagatgacattttaatgt

SEQ ID NO: 134165 - DNA, 583 bp, Homo sapiens
catctgtagttatttaaaacccctccagatgatttggctgttaagatggaaataactattgtacttgtcaaataccagcttacgaggctggggactctcttgcagcttctaacttctgaattctcagctcactgctttagatacattttaatctcaaagaaaagagagcagcctgttttcttgaaaaaaggtcaggacatttattgggacatattttcatattagaggagggtacygttatttacagaggatacctcatgataacattgtctatttgctgcctgggacagagacaccaggttttgtgttctccttcttgtgagcattattaagtagctaaattagatagagccttctttataatctatatctctctttccacatttcaatctgtccagtagtaaaacaaaagggtcactggtacatatgctaatggttctgagtttctatgactaccttctttaatttttttatttgttttaattttttaattgactgataataattgtactgattcatggagtacataatgatgtttcagtacctgtaatatatagtgatcaaatcaggattttagcatatc

SEQ ID NO: 134166 - DNA, 578 bp, Homo sapiens
ggggtagggtgaaatacaactgatgaacagactctggcacagataaatttacattattttaatcagagaagagattttatctcaaaaataaatctcacgaagttctagattgtgatggaagagctttgatactccgacatatttgacattatactagttctaggatttctttatcctggatatgactacagtgatcctaaaactcctcaagaagtttcatatttagtagaaagacatcccaaaactcacttcatactaggtcccaccatatataatcactaaatggggttacaggtttcaactttccatgaagctaatgggtcacatcagataaacagtttcttgtttcattaaatcaaatagtctgattttgatgcaaaagctaatgtcttaccatgcatcctyctggcttacgtctcaagtcaaatcactatacatacactaccataactgaatacaacaagctgtgttcattgattattgagtgaggaggagctgtatcatttaaaaaacaaattgtatgggtctccctgagaagaaatataaagagctagctttaggtttctcaacagaagcac

SEQ ID NO: 134167 - DNA, 578 bp, Homo sapiens
ggggtagggtgaaatacaactgatgaacagactctggcacagataaatttacattattttaatcagagaagagattttatctcaaaaataaatctcacgaagttctagattgtgatggaagagctttgatactccgacatatttgacattatactagttctaggatttctttatcctggatatgactacagtgatcctaaaactcctcaagaagtttcatatttagtagaaagacatcccaaaactcacttcatactaggtcccaccatatataatcactaaatggggttacaggtttcaactttccatgaagctaatgggtcacatcagataaacagtttcttgtttcattaaatcaaatagtctgattttgatgcaaaagctaatgtcttaccatgcatccttytggcttacgtctcaagtcaaatcactatacatacactaccataactgaatacaacaagctgtgttcattgattattgagtgaggaggagctgtatcatttaaaaaacaaattgtatgggtctccctgagaagaaatataaagagctagctttaggtttctcaacagaagcac

SEQ ID NO: 134168 - DNA, 571 bp, Homo sapiens
gagaaaatacagtgtttgtctttctatgcctggcttatttcacttaacataatgatccccagttccttccatgctgttataaatgacagaatctcattctttttttatggctgaatagtatactcccttgtgtatatgtaccacattttctttatccactcatttgctgatggacacgtaggttgcttccaaatcttagctactgtgaacagtgctaccacaaatatgaaatatatggtattcaactgttacatattttttatttagttatatttgtatctataaaattcagatccaaatattcctgtctgtaattaagaaagagaactgtgagtagtcagggccaaagaagaaactgtattaagaacagaaaggcttttgcagatggctaagcataattaccaggtagaaaaagggtccaacaaggygttctagtatgaagggttagcaacatgcagcaagagcagcatgtacagaacagatgcagtttctcctcttctgagagataaagcctctggatgaccatgctagcaatgatgcactgccaaccagtcatatggaggaaaacagt

SEQ ID NO: 134169 - DNA, 514 bp, Homo sapiens
tggagagaaggaaaacaggcagtaagacattgatgttttgacccctaatctatgggttgatgtcttggagggggtcaaggagtgtactggatagtttgagaggaaccatttctatgtataatgctgatgtggtgacaaacatctaagttgacaccrcggcctgggatggcagctccttagagccctccagctctcgtaaggaatccagaagttcccacatgccctgtggagagctagggggagctggctgatggtgctgactggccagccagcagagagtgtcacagtggctcaagagaagggatcctgcagctctgctatactaggtagcacattcaggtttaggatgaaaaaagtgtctggcaattctccagagaaaccaaagcaaaagagaactaggatggagcctgactggctgatggattattaacagttaccaggtgcagagaaccagcagatgctgggagctgtagcagtgattaaggcaaaaaataccactgctgcagaggacagt

SEQ ID NO: 134170 - DNA, 426 bp, Homo sapiens
tctccctgccaatatctccctacctctacccatatggtacccatttcatgtaggagctcaaatgccgcttaagtctttacatccctcatcgtctgggagtttgttttcccacctgtaattcccataattaacctgtctttcacttaggatgctcgtcaactttctccctttcattaaacttgctcatgtacctaattcatcttccttatgtacttacaaactacttyggagaagaaaccatttcttttcatatatgtatactccatgttaatattcatcgaaaatgtaaatgggcaacattttaaagaatgaagaaactaaagaagtaaataaacaatgaatgaataaatgaattaatgagctatcagacaaaaattatttcccagcatgtgcttcataaatggagaataaattggcaaggcaaaa

SEQ ID NO: 134171 - DNA, 611 bp, Homo sapiens
ctgctgctattcgacattgtaaaggggtcttacccagtgtacttagcaaaaatgaatttgacaaataattacatattatacagmttgtcaaaagaagtgaattttatttttcttttttgcagtaacaagtttttataaatggaaaatcttaaggaagccacaaaaaaggtactaaaaattgagtgtgttgcacaagacagcagtacttaaaattacttttcacaaattgcatcaccatattactaccaaataaaaatcacaaaataaaattccatttcattaaatggcttccaaaccaggcaacatttaagtatacatttttaaaaatatatgtacaagaagacatgtacataatgttcatagtaactttatttgtcatatccaaaatcaagaacaagtaaaatgcacatcaataggatgtaatagataatacatttgaatactaattatcaataaaaattataagccaacaacaaatacatgcaacgacatcaatagatctcaaaaacactataataactgaaaaaagctggacacaaaggagaatataatatttgatttcaatgtatatttctaagaaattcaaattaagctagtgacaaaaatcacat

SEQ ID NO: 134172 - DNA, 470 bp, Homo sapiens
tatatctgcatgtgtatgtaattatttgaaaaataattgaatgcaatctatggcatcttctaccttcaagggagtgacaacacttagatagattatattatttaggaaaacaccctgatggaacttttcagtgaagagaaatgatgccttctggacatatcctaaatgaatggaataaggaagagagatctgaattattttgtacaataaaaaagagaataatcattcatgttcttgcaaaactatgagcgtccaggcagctagcaagagagaatagatttgcaaaaattttagaaagataagggacctatgaaaatagcaattgatcaagatctaagaaaagagtggagtcagtgagcacctgtgtarggagaggggggcggggatattggtatccaatagtaattattacgttgcattttggcttgcttggggttttgttttcttttgttttgttgatgctatgcttg

SEQ ID NO: 134173 - DNA, 482 bp, Homo sapiens
tgaattctccgaacatttttttttttttttgrcagtctcgctttatcacccaggatggagtgtactggcaccatctcagctcactgcaacctctgcctcccaagttcaagctattctcatgcctcagcctctcaagtagctgcaactacaggcacgtaccaccacgcccagctatttttgtttttgctgttgtatttttggtagagatggtgtttcactacgttggccaggctggttccaaactcctgatctcaagtgatcctcccacctctgcctcccaaagtgctgggattacaggcatgtgccaccgcacccggccctgatttctatcaaacatttaaagaaaataccaattctactcaaacttttccaaaaactagaagagggaacactgccaaactcattcaatgaggctagtattaccctgatatcaaaatcacacagaagcacactaaaatagaaaactacaggccaatatatct

SEQ ID NO: 134174 - DNA, 574 bp, Homo sapiens
tgcctttttaggttggacccagagccatccttcctcactgggcaggccatccctgcaggaattccagcagctctagtcaggggcttacagacagaaatctcatctccctgggacagagcactgcaggggagggtgyattgcgttctcaagttcagcagacttaatctttcctgtctactggctctgaagagactggctgatccagatgaggggaattcccccagcacagtgcactagctccactgagggaaagtcagactgcctccttaagcaggtcttggatcccatgcctcctgacttgactgggtgagacctcccaacaggggtcaccagacacctcatataggacagttccagctggcaccaggtcagtgcccctctgggatgaagcttctgaagggaggagcaggcagcaatctttgctgttctgcagcctccactggtgattcccaggcaaacagggtctgaagtgcccccagcaaactgcagcagcctgttagaacaaaaacaaacaaacaaacaaacagaaaataacaacaacaacaaagaccccacaaaaaccccactgaaaggt

SEQ ID NO: 134175 - DNA, 574 bp, Homo sapiens
tgcctttttaggttggacccagagccatccttcctcactgggcaggccatccctgcaggaattccagcagctctagtcaggggcttacagacagaaatctcatctccctgggacagagcactgcaggggagggtgcattgcgttctcaagttcagcagacttaatctttcctgtctactggctctgaagagactggctgatccagatgaggggaattcccccagcacagtgcactagctccactragggaaagtcagactgcctccttaagcaggtcttggatcccatgcctcctgacttgactgggtgagacctcccaacaggggtcaccagacacctcatataggacagttccagctggcaccaggtcagtgcccctctgggatgaagcttctgaagggaggagcaggcagcaatctttgctgttctgcagcctccactggtgattcccaggcaaacagggtctgaagtgcccccagcaaactgcagcagcctgttagaacaaaaacaaacaaacaaacaaacagaaaataacaacaacaacaaagaccccacaaaaaccccactgaaaggt

SEQ ID NO: 134176 - DNA, 489 bp, Homo sapiens
gaattcaatcagcaactcctgatgtggacaaacaactgggcagtgggaataggcagttggggggctgtggctcggcggggccgggggctccacttactttcccgatcgggtttcgtcttcatccccagccagagcccagggctgcccttggtgacgcccaggagaaaaccccagcccgcaccctcaccacagttccatttgtacatccaggaagcccagtttgaaaaacaaaccacgcctgtaaactgagttggatgaaaagagctgccttgggggtgggaggctaaggaactgttcacggtcttctgggtgggccctggattcccgcacttctggagcagtcctcagacagccaagggatccatccacgggccagggcttcccgaggctgtctccacggtcgctgggtctcaggagtcgtcctatcacctgagcgtgctcrctacttctgctaccattatggccacaatgacttcccataaacttaag

SEQ ID NO: 134177 - DNA, 523 bp, Homo sapiens
actttttaatgttcaattttaggctctcagcaactttatgctcttctctcttttttgtctgtaattaaaaacactaattttattttgcatatttgttctttgtcatatattgtatcttaactgaagtttgagyacataaagcagttatactgagagaagagagacagaccctctcatattgttttatattgttttatactcagaaaagaaaagcaaaacaaaaggcaggtagcccggtgcctaggaaccagacccgaaaccaggcctgggcctgcctgacctaagcctggtagttaaagattgacccctgacctaaccggatatgttatctatagattccagatattgtatagaaaagacactgtgaaacttcccggtctgttctgtttcactctgaccaccggtgcatgcagcccctgtcacgtaccccctgcttggtcaatcgatcacgactctctcacgcggacccccttagagttgtgagcccttaaaagggacaggaattgctcactcagagagctcg

SEQ ID NO: 134178 - DNA, 631 bp, Homo sapiens
gcaggagtaattggggaagttgcatgtcttgtgacctctgaaacaatggctaccaatcaggtatrtctacaccttagcagaattcaggctcctctccttctcctagcctggtgctctctcattagctttgcaaaggcagctgagttttggggaagggctattatcatttaaactataaactaaatgtctcctaaagttaacccaggaataactgaaggcagcttgaaggctaacagcactagaggggttagctagatcaaatcttccccactgccataattttctcactgatataatttttgcaaaggcagtttcatctttacttagagaaaaatggacagagaaggaaagacagcagcagaaaatgagtctaggttcattcacttatacattcagtaaggatttattaagaactttttacatgtattactcaacactaggcttttttgagacaggctctcactctgtcacccaggctgtagtgcagtggtgtgatcaccaccccctgtagcctcaacctcctgggctcaagcaatcatatctcagcctcccaagtattaatagatgggaccacaagcatgtgctaccacacccagctaatttttttggtggggtggagagtaaagacagg

SEQ ID NO: 134179 - DNA, 631 bp, Homo sapiens
gcaggagtaattggggaagttgcatgtcttgtgacctctgaaacaatggctaccaatcaggtatatctacaccttagcagaattcaggctcctctccttctcctagcctggtgctctctcattagctttgcaaaggcagctgagttttggggaagggctattatcatttaaactataaactaaatgtctcctaaagttaacccaggaataactgaaggcagcttgaaggctaacagcactagaggggttagctagatcaaatcttccccactgccataattttctcactgatataatttttgcaaaggcagtttcatctttacttagagaaaaatggacagagaaggaaagacagcagcagaaaatgagtctaggttcattcacttatacattcagtaaggatttattaagaactttttacatgtattactcaacactaggcttttttgagacaggctctcactctgtcacccaggctgtagtgcagtggtgtgatcaccacccmctgtagcctcaacctcctgggctcaagcaatcatatctcagcctcccaagtattaatagatgggaccacaagcatgtgctaccacacccagctaatttttttggtggggtggagagtaaagacagg

SEQ ID NO: 134180 - DNA, 620 bp, Homo sapiens
atggtggtacctatatgagtctgcaagaaccacagtgttactgggcttggggtgtcccctgatgcagatattgctgctgtgaccaaaaacttagatcacaacactcatgtccctttgaatacctggaaagccttcctaaaaagacaagtacaaacaagcccagactgtgaagaacacartaaatacctaactctttaatgcctagccacaaagaaacatccacaaatgtcaagaccatccaggaaaacatgacctaaccaaacaaactaaataaggtaccagggaccaatcctggggagacagaaatatctgacctttcaggcagagaattcaaaatagctgctttgaggaaactcaacaaaattgaagataacacagagaaggaattcagaatcctatcagataaatttaatagagattgaaataatttaaaacaatcaagcagacattctggcatggaaaaattcaactgacatgctaaagaatgcatcagagtctcaacagcagaattgatcaagcagaagaaagaatgagtgagcttgaagacaggctatttgaaaatataaagtcagagtagacaaaagaaaaatgaaaaataaaaaaaagaactcacacttata

SEQ ID NO: 134181 - DNA, 620 bp, Homo sapiens
atggtggtacctatatgagtctgcaagaaccacagtgttactgggcttggggtgtcccctgatgcagatattgctgctgtgaccaaaaacttagatcacaacactcatgtccctttgaatacctggaaagccttcctaaaaagacaagtacaaacaagcccagactgtgaagaacacagtaaatacctaactctttaatgcctagccacaaagaaacatccacaaatgtcaagaccatccaggaaaacatgacctaaccaaacaaactaaataaggtaccagggaccaatcctggggagacagaaatatctgacctttcaggcagagaattcaaaatagctgctttgaggaaactcaacaaaattgaagataacacagagaaggaattcagaatcctatcagataaatttaatagagattgaaataatttaaaacaatcaagcagacattctggcatggaaaaattcaactgacatgctaaagaatgcatcagagtctcaacagcagaattgatcaagcagaagaaagaatkagtgagcttgaagacaggctatttgaaaatataaagtcagagtagacaaaagaaaaatgaaaaataaaaaaaagaactcacacttata

SEQ ID NO: 134182 - DNA, 384 bp, Homo sapiens
gagggatggtgagggaaggggggaggagcacaagagatgactcccttactaagtccactcctgggttttgagggagcctcctacaatgactgacattrcacctgtgtttcctcaccccagtagggaccctggcgggctctactcccacctgtcttagcagcggctcaagccaaaggttaggtcacaaggagacccactcattctctgaggttgacagagtcagagcaggtgatggagtatgtgtgcaggcgttctggtgatgcaatgagtcaagggcgtaggatccccaggcagagcagtagtgccatgggtgtgcagctggtgtggcacctgtggcctggggcttttatcccagcagaggactatggggtctgcccagctctc

SEQ ID NO: 134183 - DNA, 582 bp, Homo sapiens
aaggaggcagccaagaccagtcatacgactcatcaaccgagcacaaaaccaccacaaaaactgatagaactgatagcaaaggaaaagtaccatggccctagttctcttcagaggatgacagcatcaccactcrttgtagacatcatggcagtggagactaaggccagccctgcttcctcatgtgcagttcctgtcacagcattcatgtatgtgtgtgagggtgaggtgtatgtgaccgtatctcttaagagtgtgtctatttacaaaggagttgtgacaatggatactaatggcagagtccttcacatagatgcaatgtaagtagtagggacttcagaaatcagccttcattctctcttaattcctcatacaatcatcaatcaatcaattagctgaactttcaaatgactgatctcatgggtggctctttttgaatagaagctttcaattcttcagctacaagggaaagaaaattccttacagtataaatatgcccttgagatattttccttggtagcatccagcatgaattgaatgcttactatgaaatattctgaccaatttacattctttaactcccac

SEQ ID NO: 134184 - DNA, 476 bp, Homo sapiens
gtcctaacagtatttgtgtgataatgattcaaacctctgcaaatattttaggatgaacagtttaatttctggcactatttgggttcttttaacagcaaatatctgaagcataatttatctaaaatcaaaggtgaataaaaggagagaaagttagcatggaattaagcrcattcactgctgtaagattcactttctgtaccttaaactgaacaaaatcttagagtttcctttctctctttcactttttttttgcttcttttttttttacccagcccatgtgatgttcactagaataacactattgactcgaatgcacccaaaagtatatacatataagatgatatgttttgcctctccaagtctgattatttctggaatggaaattacaaatcactaaacaatttacacttgtgtgcatataatgaaattaataaccttagaaatatagattgctgtattgcttggtatatggctta

SEQ ID NO: 134185 - DNA, 400 bp, Homo sapiens
atataaatccctcagcttccaggaacagatagtcccattcattaaagtgtatatatttaaagtatatatatcacatatatgtatacaatatatacatactcctgtgtgtatgtgtgtgcacatgtgtatgagtgtgtgtatacatctgttttaacccatgaagtgcgaggaagtattctagaaayaaacaatgaaaattttcttatgtattagacatattttacctgtgacagctgaatagtgagaacagagtatttaattataataccacttagtcaagtatgttaaaatataatttacagaaacaaagaaaaaaataaataaaaataaagaagaaacttgaattaaccaaagttataatataataattataaatattacatatatattcacttgtatg

SEQ ID NO: 134186 - DNA, 678 bp, Homo sapiens
atcagttatagcaaagaccagtttagaggaaaataattccaacagmtaactatattctcaattagtcctcttgtcattgagatggagaagaatcatctgcatcagtgcacaagtgggaatgtaaattggtgcaactatttggaaattcaattttgaacatatattaagcagttaaaagtgttcataacctttaacccttaaatttcacttctaaacctgtgggaaatctaagtaattttaaaaaatgtcttatgcacaaagatgctatctgaaagattttttttcctttttcttcaaggcaaaaaaaaatgcagaaacaatatgaactataaagagaatggctatatttctggcacatccatatgatggaataaaatataattgatcatttaaataaggttcatacagattttgtttaaaaaatggacaatgcacataatgcaggataaaagcaggatacagaatttcacagaaatacaatttaatttatcaagctcatattgtgtatctgtccctgtgctaggaaggtgcttcacatacattatttcttcttgaacaactctaattgccaagccaccctattttacaaacaaaggcactgaagcagaggataatgaacttgcgccaggtcatatacccagccaggggaggagctgtaatttcaaccttggcctatct

SEQ ID NO: 134187 - DNA, 395 bp, Homo sapiens
gaattcaaagctatgtccttagggtaccaaaacaactggtaaaatggaacaaagatcctttcctgaataaaaacttcaaatactagttttcctttcccttttctaagagaactttaaaagtcctttgagaaacagtactcartaagtcaaaagttatgttctccccttatacagtaaacacttaagcctgattttcaaaagtgcaattttctgaactctcacaggcaacaaaatgagctctgagatttaaggaaaaaaaaaaaaaagtatgttcaggcaactgtattttttctctccttgaaagaaaagcaaatagccttcagtttttctgcctctgcagtcaagattatcatagcataggacaacttgtacttagttctcttcataagttttca

SEQ ID NO: 134188 - DNA, 534 bp, Homo sapiens
ctaatgaatataataattattctttaagataggtatttcccagaagttagagataagaaaattgaagtctggaaagttgagcaatttggtggaaccagactgagtaactcagaaccacgatttgaacccagttctgccttggtggcatacttctacctcacttcacccttttacactgccaccactagcacttgttggccttcaatgcttcaraaaaagttctaagtattaaagaatcttaagcaggcaagttaagcaacaggaatcctttgcactttacaaacatgatttgataaagaatggcttagcagagaggcataccagaagcatcctgaatgaggctattgtgatggtcatgaatgaggaaagaagcagtatggatggagacagaatgactgaagagatattcagacagcgattgactgaatggaagtagccaaaagagtggagagaagaaaaaagaaaattataaacgacatcaaattggctattactccttggataactcaaaactgtgcatctagctgatggtag

SEQ ID NO: 134189 - DNA, 534 bp, Homo sapiens
ctaatgaatataataattattctttaagataggtatttcccagaagttagagataagaaaattgaagtctggaaagttgagcaatttggtggaaccagactgagtaactcagaaccacgatttgaacccagttctgccttggtggcatacttctacctcacttcacccttttacactgccaccactagcacttgttggccttcaatgcttcaaaaaaagttctaagtattaaagaatcttaagcaggcaagttaagcaacaggaatcctttscactttacaaacatgatttgataaagaatggcttagcagagaggcataccagaagcatcctgaatgaggctattgtgatggtcatgaatgaggaaagaagcagtatggatggagacagaatgactgaagagatattcagacagcgattgactgaatggaagtagccaaaagagtggagagaagaaaaaagaaaattataaacgacatcaaattggctattactccttggataactcaaaactgtgcatctagctgatggtag

SEQ ID NO: 134190 - DNA, 593 bp, Homo sapiens
atcacaaagagaaatcagtgtcacaaaatcccttaaaattaagggatcaaaaataatttatcaatagttgtacaaaatccagaataagttgtcattaggcatgaattactaccaatcttagaatgattgttttaaactggaagcaatggattatttagagacttggtggctaaatgtaggtagttaaatattgtaactatttgttgttcaagtattgaacattacagttaacataaagaataaacgggactgcatgaggaatggaaatattaaaagtataaatgcaaacagtttgacacaaaaatctataatcctaataaatttaactgtaattgtttacttttttcagaccwtgggtagatttaatacagatacactgagagaacaatttccttagagacctatacacaaataaataagccctgtctagtgtgtataggcgtctaaggaaattggctagaataggataaataggatttatcccttgaatttgtacaaaatgatgttgattatgaattccttacatatatacatgatgtgtgaataatgtaattaaagatacgaagttttttttaatgatttcacaattttaa

SEQ ID NO: 134191 - DNA, 520 bp, Homo sapiens
aatttatgaatacttctggggacatctggggacttttttttcctatgagaaagtgaaaaggactccagtgactatttggtcttgaaacagtttaatttagtttttttctttattccctttccctatctccattctagaaattaacatagaaactcattctggctaaattcccaatacattttcacagtgagcattttctgaagtgaaaattagtagcttccttgcagttttcatcaggaatgtgaaattgtggagctcacaggggtggagaactcaaaccccatttatgaattaatacatgctgttgagggtacctcactgtctgcagagtgctggcgaatcttttctacagaatcctgagtatctaaatagtayattttaatttcccttctcattgaaccagtgagaaaataccattttctatttgcaaaaatgaattttgtaacaactagtatctatataagattacattatttacaccatccttagggattggcagcacctggggcaagttacagtg

SEQ ID NO: 134192 - DNA, 618 bp, Homo sapiens
atttgcattttttaaatgattatataacagtagaagatttatttctcaggcataaaacttaaagtgggaaagttacttgaagtgagaaatctactggaagagtccacayaggaaatgagatctaatattacactactagaggagagagattaacttatggctatattgagaagatagtttatgatatttgacaactagttggctgtcagaaggtgaagggtaaggagagactcaaattgctctcagtcttctggcttgctattattttatgaggtgtagaatataagaggaggggcaagttcagtagaaagtgtggatttgggtgtgtttggcttgtgttccctgttgatcatccaggtagaggtgaccagttgtcagctagtgctgccatcacagaatatcacagactgggtggtataaacaacagaaatttattttctccattttaggatctggaagtctgagattagggtgccagcatgggcaggttctggtcagagtctttttcctgacttgcagtggtcactttttctctgtgttctcacatgcaggagagagtgcaagttatcattctacctttctcttcttataaggtaacagtcctgttggattagggcc

SEQ ID NO: 134193 - DNA, 618 bp, Homo sapiens
atttgcattttttaaatgattatataacagtagaagatttatttctcaggcataaaacttaaagtgggaaagttacttgaagtgagaaatctactggaagagtccacacaggaaatgagatctaatattacactactagaggagagagattaasttatggctatattgagaagatagtttatgatatttgacaactagttggctgtcagaaggtgaagggtaaggagagactcaaattgctctcagtcttctggcttgctattattttatgaggtgtagaatataagaggaggggcaagttcagtagaaagtgtggatttgggtgtgtttggcttgtgttccctgttgatcatccaggtagaggtgaccagttgtcagctagtgctgccatcacagaatatcacagactgggtggtataaacaacagaaatttattttctccattttaggatctggaagtctgagattagggtgccagcatgggcaggttctggtcagagtctttttcctgacttgcagtggtcactttttctctgtgttctcacatgcaggagagagtgcaagttatcattctacctttctcttcttataaggtaacagtcctgttggattagggcc

SEQ ID NO: 134194 - DNA, 551 bp, Homo sapiens
tgacttctttttcagtcatttcaatgatatttatttcttttggatttactattgtagctttattgtacatttggagatgttatgactccctaattcctcataattcttgtttccttgcattgttgtctgtacatttgtggagacttccctctcttttgtttttaaggttttttgtttgtttgtttgtttttttgtcagggatagatcttaactatttaatatagcctgtgattctggaatggcamtctggtaataaccctggcctggtagagcttgctgtcggttttccagttggcttggctgctactttagctgtgatgtcaggtggagcttctggttgggctctactatcaggcatagcttctgtctcaggactgcagtgtcctctggtcaggctggtcacagcatatattacctggctgggcaattctgctctttgcaatctgcagttgggcagggctgcaggctgggctttgagttaggtgcagctgctacttggagggacaaataggaccagagtctatgctcattagaactggaagactgagaat

SEQ ID NO: 134195 - DNA, 551 bp, Homo sapiens
tgacttctttttcagtcatttcaatgatatttatttcttttggatttactattgtagctttattgtacatttggagatgttatgactccctaattcctcataattcttgtttccttgcattgttgtctgtacatttgtggagacttccctctcttttgtttttaaggttttttgtttgtttgtttgtttttttgtcagggatagatcttaactatttaatatagcctgtgattctggaatggcactctggtaataaccctggcctggtagagcttgctgtcrgttttccagttggcttggctgctactttagctgtgatgtcaggtggagcttctggttgggctctactatcaggcatagcttctgtctcaggactgcagtgtcctctggtcaggctggtcacagcatatattacctggctgggcaattctgctctttgcaatctgcagttgggcagggctgcaggctgggctttgagttaggtgcagctgctacttggagggacaaataggaccagagtctatgctcattagaactggaagactgagaat

SEQ ID NO: 134196 - DNA, 551 bp, Homo sapiens
tgacttctttttcagtcatttcaatgatatttatttcttttggatttactattgtagctttattgtacatttggagatgttatgactccctaattcctcataattcttgtttccttgcattgttgtctgtacatttgtggagacttccctctcttttgtttttaaggttttttgtttgtttgtttgtttttttgtcagggatagatcttaactatttaatatagcctgtgattctggaatggcactctggtaataaccctggcctggtagagcttgctgtcggttttccagttggcttggctgctactttagctgtgatgtcaggtggagcttctggttgggctctactatcaggcatagcttctgtctcaggactgcagtgtcctctggtcaggctggtcacagcatatattacctggcwgggcaattctgctctttgcaatctgcagttgggcagggctgcaggctgggctttgagttaggtgcagctgctacttggagggacaaataggaccagagtctatgctcattagaactggaagactgagaat

SEQ ID NO: 134197 - DNA, 554 bp, Homo sapiens
tttttgtaaacatttttattcaagtcgaggaatttctacaatagtaattcttgatttctattgtctgaaagattttatggtgaattgctgttggatttcgaaattttatgcattagttaataagttaatatgtgaatttttttggcctgcttatgtggtggatttcattcatgtttcaaatgttgaatcggccatacatacctagattaaatgtgtgctacatgtttatttattatattttttttgtgatggatagattgaaataatcttttttattataaataaatttaagtaatctaggataaaaaatagcttcaatttttattcaaattgggtttagattgctgttttagtaccattttgtcraggatttctgtgtctatcttcataagaggtattggtccataatttttctttttgtactattttttctggtttggtattaaggtaatgctggcatcataaaatattttaggaagtatttcctctgcttcttctttctggaaaaattgtgaggaattggtattcttttttcttaactatttggtagaatt

SEQ ID NO: 134198 - DNA, 582 bp, Homo sapiens
tttcttcttaatgattttaaatagttcttattttaaaacaacattagctctaaagacagcaacgtacagcaattcctaccaatatacatgagatctatcaaacgactgcagttaacttggctgggatttcataatttttcacaagaggactcataggcctgagcagctggaacttgcactatcaaaagcaccaacttgaaatcatctgaacaagcgtacacaactaaattatagcytttttttttttttttttttttttttccagacatgaagcatgaaatgcctctgctggcagcaagattctctgtacttagcttgtagtaacacggttgccagatggggcttttgcctatctaaatttttataataaactctcagggtacaataaaatatccgattagtttaaagcagttctgtaatttaaatgatctatttagtttttgactatagagtctaccttaactagtcatttgtttcatttcatcaaagtcattagttaatatctcttatctcaatgaatagttaaaattacctcaatatagtggaaaaaaataaaaggcctttcagtttaaccattacttt

SEQ ID NO: 134199 - DNA, 463 bp, Homo sapiens
ttttacagctgtatagtatgcttgtgttttaaggtaagtattaatactaaacagtttaaaagtgaaaaaaattcaagactttatgaagtaaaaatatcacagtaatgtaaggttaattcattactgaagamagaaattttaaaaagaaatttagtataacctaagtgtatagtgtttataaagtctacaagtagcgtacagtaatgccctaagccttcacattcactacacactcactgactcacccagagcaactttcagtcctgcaagctccattcatgttacatgacctatacaagtatacaaatttttatctgttacaccgtgtttttactataccttttctatgtttagatacaaaaatacttaacataatgttacatttatctctagtgttcagtacagtaaaatgctgtacagagttacagcctagaaacaataggctacattatataacctagaa

SEQ ID NO: 134200 - DNA, 463 bp, Homo sapiens
ttttacagctgtatagtatgcttgtgttttaaggtaagtattaatactaaacagtttaaaagtgaaaaaaattcaagactttatgaagtaaaaatatcacagtaatgtaaggttaattcattactgaagaaagaaattttaaaaagaaatttagtataacctaagtgtatagtgtttataaagtctacaagtagcgtacagtwatgccctaagccttcacattcactacacactcactgactcacccagagcaactttcagtcctgcaagctccattcatgttacatgacctatacaagtatacaaatttttatctgttacaccgtgtttttactataccttttctatgtttagatacaaaaatacttaacataatgttacatttatctctagtgttcagtacagtaaaatgctgtacagagttacagcctagaaacaataggctacattatataacctagaa

SEQ ID NO: 134201 - DNA, 498 bp, Homo sapiens
aattaaccatgctgtattagaattattccttttctcatctctttgactttctgtatatttcttttgccagaaagttccttcaacctytgatcactcaaataatccttgttcatctctgaagaccaatttcaactttcaggtaagataactctctttcataattttatagctcttttacatcattccattatacttttcataatgttgcaattccattttttgcatgttatcacacagattctaactattgaactaatgtagttgttgttcctcttggacacatagctatgcaacattttccagcctgccctgcagttaggtgtggtccttaaccgagaatagaaatgatatgtgccaattcaagccaggctcataaaaacttcccgtgtgtggttctccatgtactttcccctgctgtagcaactttggaagccatgtgtggaaaacagcagtcgacactaccaacagtaacctagatgtctgaatcactgcttggaa

SEQ ID NO: 134202 - DNA, 580 bp, Homo sapiens
cctagatgtctgaatcactgcttggaagagagccatttgctcatgagaaatatccattgcaaaatttacatgaaaaacaaaacaaaacaacaactttattttgctaaaccattagaattttgggtctatttgttatacttgtcagtgttatttttattaatataattatttcattcctccgttagtctatgaamctccccgaagcattgtgcatcaattttggctcatcccagtacttgccactgtgcattcaatcagtgaataatttttttaaagtagaaggcaatttgtagacaatctagttctattatcaaaagactgataaaaaagtaattagaatagaggtttttaacgtgggttttccccatctcagatatatatatatatatatatatatatatatatatatatatatatatatataaaatggtctgttatgttactgaaaaaaagttagatgaattgagttgagattactatatgtatagacattataaataaattgatatgtgttaatacaagctcaaaaatctttaatcatagcaactcacaatgaaaatgtgtggacactatggactta

SEQ ID NO: 134203 - DNA, 580 bp, Homo sapiens
cctagatgtctgaatcactgcttggaagagagccatttgctcatgagaaatatccattgcaaaatttacatgaaaaacaaaacaaaacaacaactttattttgctaaaccattagaattttgggtctatttgttatacttgtcagtgttatttttattaatataattatttcattcctccgttagtctatgaaactccccgaagcattgtgcatcaattttggctcatcccagtacttgccactgtgcattcaatcagtgaataatttttttaaagtagaaggcaatttgtagacaatctagttctattatcaaaagactgataaaaaagtaattagaatagaggtttttaacgtgggttttccccatctcagatatatatatatatatatatatatatatatatatatatatatatatatatawaatggtctgttatgttactgaaaaaaagttagatgaattgagttgagattactatatgtatagacattataaataaattgatatgtgttaatacaagctcaaaaatctttaatcatagcaactcacaatgaaaatgtgtggacactatggactta

SEQ ID NO: 134204 - DNA, 672 bp, Homo sapiens
ctggagatttctacctctttattgtctgttttcaaagttattcctatagatagtaaacttagttggagccactgctcrctgtttccaaaagagaattgaaaacctgagggtgacactcataagattggcatgtcatttcaaagctggtgggtttaagacacatctaggcatgaatcacgtgggctgtccaggtgcttatttgcacatgggaccaaaaagcatcccaagaaaacactcaacatgaaggaaggagtcaactccattagtctaagcctattaaaatgttttcagtaactggaagggagagaaaacttctcaatttggatgatgcctatcaactagatttgtcttccaaaatgcaaaggagtggattctatggaaaacagagaactataaaacaaacaagcaaacaaaacaaacaaacaaaaaaacagaagaacaatttcggtggaatatctacagcagcttcttctccacccacataatcatggacattgtctcatgagcttccaagcatcttgggtcctgggaccccgcagaaccttagtgttctagggagcactctcagtaccagagatagcagatttgtgcagtacatttgaaacttccaaggaataccagggtgacatttcaaatacattagctagggtgagaaccagtgacattaggtca

SEQ ID NO: 134205 - DNA, 583 bp, Homo sapiens
ctcagggctaagccgtgctcagctgtaggstaggaactgatggagctatcagagctgaagaaacagtttggtgatagatatctggagacagtagctagctcttctcaaaaaagcagccctaaaatatcctaaaattgctggttgcacaagagacaaaagaactgattttaaaaatgagaaaaataagataataaatgctgcactaacactgagtagatgtggaacattatttctgtatttcagagccaactactgttataaattatgaatgttccttgtccctgagatgaaaggatgagggcttcgtgaggctggtcctgtggctgtttcccattggtgcttatagatctttttatcatcttgacaagtattaaaagtgaaagctttttgtgactctaataataaatttttgtaaaattcataaaaaatccattttctggctgaaagggaaattatgatgatagttttaggtgttttgtgatagtttaatatgttatatataaaatgttttatttttattctcttttcattaagaagaagctctttagagtagtatcagtagaagttatcttcaaaatacata

SEQ ID NO: 134206 - DNA, 439 bp, Homo sapiens
ccttatcttatcattcattcacgcattcattagcaagtacttactacaggacagccactctgctatataccagcatataaaacaaaaaatgaataaaagagttttggattgcagtgggctcagattccatcaggaaagtcatgaaggaaggactgcaggaactttcatcagtctatgggttatgctgctgtcagatgaggacacatttcctagtcctttcttcctctgtccatcaaaataaaacaccacgatggggcrtcttcaacatcctgttctgcacaagcgctagcactgtgaagactgcccaagtttgtttctgtatgaaggaaggtatacaaagtatatgcagcattatgttaaataaatgtcaattttctccttttataatatctatttaccctattttccaaaggtatgtgaaaaccagatatgagaacta

SEQ ID NO: 134207 - DNA, 601 bp, Homo sapiens
ggctataataaaaaacagaacaaaacaaacaaaaacagaaaagaacaagtgctgaggttgagaaggtatcctcatacgttgctggtgggaatgtaaaattgtgcagccactgtgagaaaaatttggctgtttcccaaaatattaaatataaagtttccgtatgattccacaatttcattcctaggtatgtactcaagaaaaatcacagcataggtcatcaaaaaagttgtacatgaatgttcattacagcattatccataagagctaaaaagtggaaacaaccagaatttctattaastgacaaatgaataaataacataatggtatatttgtacagtggaatattatttgtccacaaaaagaatgaagtactgatatgtactacaacatggataaagcctgaaacattatgctaagtgtgagaagccagtcaccaaagaccatatgattgcattatgtaaaatattcagaacaggcaaataggtagacagaaagtatattagtgattgcctatggctgggtgagtgtagagaggaggactaattattagtgggtatgaggtcttttacggggctaatgaaaatgttttgaaattagattg

SEQ ID NO: 134208 - DNA, 601 bp, Homo sapiens
ggctataataaaaaacagaacaaaacaaacaaaaacagaaaagaacaagtgctgaggttgagaaggtatcctcatacgttgctggtgggaatgtaaaattgtgcagccactgtgagaaaaatttggctgtttcccaaaatattaaatataaagtttccgtatgattccacaatttcattcctaggtatgtactcaagaaaaatcacagcataggtcatcaaaaaagttgtacatgaatgttcattacagcattatccataagagctaaaaagtggaaacaaccagaatttctattaagtgacaaatgaataaataacataatggtatatttgtacagtggaatattatttgtccacaaaaagaatgaagtactgatatgtactacaacatggataaagcctgaaacattatgctaagtgtgagaagccagtcaccaaagaccatatgattgcattatgtaaaatattcagaacaggcaaataggtagacagaaagtatattagtgattgcctatggctgggtgagtgtagagaggaggactaattattagtgggtatgaggtcttttayggggctaatgaaaatgttttgaaattagattg

SEQ ID NO: 134209 - DNA, 545 bp, Homo sapiens
tccaaaacctcaccagcatctgttattttttgagtttttaatgatatcatcctgactgttgggagatctcattgcaattctgatttgcatttctttaatgattagtgatgttgagcatttttttatgtatttgctggccacctgtatgttctcttcaaagcatctcttcatgtcctttgcccactttgtaataggattgtttaatactgcaaactagacaggtgaaagatctgtacaatgagaattactaaacactgctgaaagaaatgagagatagcacaagcaaatagaaaaacattccatgctaaatgataggaaaaaatcaatattgttaaaatggccatttgctcaaagcaacttacagattcagtgttattcctatcaaaataccgatgaaattgttcacataattagataataccatttcaaaattcatatgaaccaaaaaagagctgacttactcaggacaattctaggcatcatgttaccagacttcaaactatattacaatgctayggtaaccaaagcagcatggtattggtaca

SEQ ID NO: 134210 - DNA, 531 bp, Homo sapiens
tatttgggagctcaaaataatttagggggcatcaagaaagtagatttacattaacaagataggtattttatataatttaaagactcaatttaaaggtatgttatgttgtgaatatagatccatcgatcaatagatgatagagagagagagagagagagagagakagatagatagatagatagatagatagatagatagatagatagatagagatagacagatagatttatacagggctacaaccatctcattgtaaatttatgacccactactgccctcagaagccagttggctatgttgtctttagttggcttctcaattaatacaagaggaaagcagttacaaaaacattaagcaaagatgcataatgcatcttcacttgttttcaatagcaattattgcaaatataaggcatagagagaacaatgatattgattactaaacataacaaaaatatacaaccttaaaatgtttctaaatatatgatcttgtcacattaaaaaatatggttaacagaaaggataaagggtt

SEQ ID NO: 134211 - DNA, 570 bp, Homo sapiens
agtagtaatcaaaggccaaagaaggaagtttgtctagaaaagtaaggactracacaagagaaggaaattaagaaaagggtgaaattaactatataaacccctttgaaagttttccccaaacctttggaagcctagttcaccagcacgctttcctcccttgagtttgtacccccttttctctctttttccctcatatcccctcttccatcctgtccctcttttcctattacctgttccaaaaagatcatttcagccagtttgtagttcttttccagcatggctagacgtgctcggacctgataaaagtctgttccttctccgccctgtgggggaaaaaggaggttctgatttttctgtaggtgctgccattctgtctgtgagggctgaaattggaaggccagaaggatgtagaaaacaaaagacttgggaaggtaaaacacttcatggagcttaaaggtttgaggtttagcaaaagcaattctgaaatggtctgacttgagggtaaaggtggggtgggcagggtaaaggaaactggggatggctggaaagctaggaatcatggggctgaat

SEQ ID NO: 134212 - DNA, 560 bp, Homo sapiens
gtctccctctggagtgcagaggtgccatctcagctcactgcaacctccgcctcctggattcaagcaattctccttcctcagcctcccgagtagctgggactacaggcgtgcaccaccatgcccagctaatttttgtatttttagtagagacgaggtttcaccatgttggccaggatggttttgatctcttgacgtcatgatccrcccgccttggcctcccaaagtgctgggattacaggtgtgagccaccgtgcccagccctagactagcttttgaacaaacagctgggcacatagcttagccaagttgacatgaaattaaccatcacaatcctatgttttcttctgagagttttatagttttacagctcttacatttaggtctttgcatcattttgaattaattttttgaattagatggtgtgaattaagagtccaacttcattcttttgcatgtggctatctagttgtcccagcaccatttgttgaagagactattattttcctatctaatggtcttgttacccttatagaaaatcaattgatttgtagatgtatgga

SEQ ID NO: 134213 - DNA, 560 bp, Homo sapiens
gtctccctctggagtgcagaggtgccatctcagctcactgcaacctccgcctcctggattcaagcaattctccttcctcagcctcccgagtagctgggactacaggcgtgcaccaccatgcccagctaatttttgtatttttagtagagacgaggtttcaccatgttggccaggatggttttgatctcttgacgtcatgatccacccgccttggcctcccaaagtgctgggattacaggtgtgagccaccgtgcccagccctagactagcttttgaacaaacagctgggcacatagcttagccaagttgacatgaaattaaccatcacaatcctatgttttcttctgagagttttatagttttacagctcttacatttaggtctttgcatcattttgaattaattttttgaattagatggtgtgaattaagagtccaacttcattcttttgcatgtggctatctagttgtcccagcaccatttgttgaagagactattattttcctatckaatggtcttgttacccttatagaaaatcaattgatttgtagatgtatgga

SEQ ID NO: 134214 - DNA, 606 bp, Homo sapiens
agtatatagaatgctatcatttgcatgaaaggcaaaactgtatgtttatatttgctcatattgcattgaaggatatataagattttggtaatattagttgcctgtgaggagggaaagtaggtcgctgtattggaattgaagagaatgtgttgctgtatactcttgagcagtcagaattttgaaatgttaattcattacctattcataagtaaataaataagcaagcaatgtgtgattctgttgtttacatgtaatatattttctgcagaaactgtgaattcccttagcckggagtggctaaaggaaatgcccttaccctaggctgcctcctcttttttcaacctatttctgggctatctcccactctctttggagtcctaccctattcatagttcctaccctattcatagttccctgatcgcctgagtcagaatgctgcttcttagcagcaacgcttttaagacaaatttcaaataattctcatggttattcacatgcaaacacccataaatttatgaacagaaatcttcataaccctctgactatatttgttttttaactgcattcatcttaaggagggttccttttagttgttttagagtctgc

SEQ ID NO: 134215 - DNA, 583 bp, Homo sapiens
ttgtttggtttctcagtgaatataaaagttaggtttacaactatagtgtagtctaaatgtacaatagcattgtctctaaaaaacaacatatataccttaataaaaactactttattgctaaaaaaaaaaaaaaaaaaaaaaagataaagctcatttgggccttcagtgagtcataatctttttgctggaggaaggtcctgcctccatgttgatggctgctgactaatcagggtagtggctggctgaaggttggggtggctgtggcaatttcttaaaataagacaatgaagcttggcacatccatcgacttttccttttacaaaaggtttcttggtagcatacgatgctgtttgatagcatttgatccacagtagaactcctttccaagttggagtcaatcctctcaatccttgctggtgctttatcaactaagctggtgtaatactctaaatcctttgmtgtcatttcaacaatgtttacagcatcttcaccaggaataggttccatctcaaaaaaactactcatccataagaaacaactcctcattcattcaagttttataatgagattacagcacttagtc

SEQ ID NO: 134216 - DNA, 576 bp, Homo sapiens
aaaaatacaaaaattagccgggtctggtggcaggtgcctgtaatcccagctactcgggaggctsaggcacaagaatcgctggaacccagaaggtggagattgtgataagccgagaatgtaccactacactccagcccaggtgacagagagagactctgtcaaaaaaaaaaaaagaaaagaaaagaaaagaaggaaagaaggaaggaaggaaggaaggaaggttagttatgtgattttttaacccttaaagtattttagataacttacacttgaactactatgttgaacttcaggttaagaagtaagagaaggaggatgaatggtctctaacagtatgaatataattcctttctgtttcttctatttattttctagtcgtttctcaatgcacttattaaaatataaaactaactttaacactggttatataataattgatctgacatatatttccttctacctagcatgtgtcatgccttgtttttggtactggacatgcagaagtcagaacaaactccctgatgtcagcttatattctagtgaggagactagagtggagttggcagaaaggaagtc

SEQ ID NO: 134217 - DNA, 531 bp, Homo sapiens
atgaggaaagtgcttaaagctcaaaacagcccatttccttgcaacttccccaataaagtgcttctcggtcttaccagtctcagattgcaccatcatttacctagtagctcaaaacaaaaatctgcagcttatactttattcattktattcttcatcaaatccatttataaagcttgatcccaacttttgggatatgtgggaacttgtctggaattataagaatccaggtacacctcatcataacttatcaaaaagctcagactggaaacagagccaaattcagacactactgatagtttcaaaaactccagtgaacttcacaaagactgtactttgagaaagaaaccagattctgtatgtaggctagacaggctggccactggaccattgccaagacaacttcagggggtgtggggaagtacaacaatccaggttttactacatcaattgggaaaccagagcatttttaggtaagctgaaacatgggagctcaaacatgcttgaaggatcctaagaaagtggaaagggatt

SEQ ID NO: 134218 - DNA, 462 bp, Homo sapiens
gtcccatgtgaaaaagatgcagcatctgggtcccacaacagccagaagcctttggtatcagaattcaacaattcttgtcatagaagcctttcctggacttcacctcttctccctcatacccctggaggggacctgaacagcaaggaacatgtggttgaaaaggtggctcaaggaagagaggaatctgaccctgcctccctttcctacataaggtcccctgcccatgaatttagttctgagccagaagttagaataggttaaaaatgggctgagaacttagctttgatatggccctaagctaggtattttcttactcaaaagtgatcaggcwattttattcactgagaagggacaactagaaaagctttgggttcagctcaggatttcaagcaggatggggaggtttgggatctcagggtggctgtgctagggcaagtgagagaaaggatcagttgcttcttg

SEQ ID NO: 134219 - DNA, 569 bp, Homo sapiens
caaatacagaaattagacaacatgctccaaatgaccagagggtcaagaaagaaaatcaaggggtaatcaaaaaagattcttgaaacgaattaaaataaacacaatayagcaaacctatgggacacaggaaaatcagtattaagaggcaaattcattgccaaaaaaatacattaaaaaatagaaagatttcaaataatgaacctagtgatgaacctcaagaaactagaaaagcaagagcaaaccaaaccccaaatttgtagaaggaaagaaaataaagatgagagcagagatgagcaaaactgtgactcagaaaaaaaatcaacaaaacgaatcattggtttttttttgaaaaggcaaaaaaaaaccaacaacaattaaacagactaagaaaaaaagagagaagatccaaataaacaaaatcagaaacaaaaaaggagctgtcacaactgataccacaagaacacaaggatcactggagactattatgaacacagtcataccaacaaactggtaaatctagaagaaatggatacatttctggctacatacaaactaccaagattaaacca

SEQ ID NO: 134220 - DNA, 379 bp, Homo sapiens
accatacttcctcctattctcttactcccctgcaactagggcatcccttccttacccacttgagtcagatctatggggtcctggaccacacatcttcctcttgcttgatttttttccgattatgctaaagtacatctacaaatacatagaacatagagtatctgagcctttttaatgccagaaaatgtatttagcactcatacttatctgcgattcaaaggttaaagttcagcaatagtttcaaacaataatttttcctggagctctgaagatggtgtgtcaagtggctgatgagaagttgacagacaatctaattctgctttctttatttttggcaascttttcctctttctcattagtttttaaaaattttcccttt

SEQ ID NO: 134221 - DNA, 545 bp, Homo sapiens
tgttaaattgaaactttaccatgaacagggaaattgctttcaaaacactgtaattgaaatagctgaactgaataagacaataaattaaagggaaaagagtgaattatataaaaaatatatattacaaagatttctgtgacgatattcagatctatmtcagagatttgctctgagaattaaatgagatgatgcatctgaaaccagctgatgcaacaagtctctctcaggcgagtcctgagagtctttcaacaagctcccaggtaaccctgatgcttctggcctgaggaccaccctttgagtagcagggacccagcaccgtgcctggcttatgtatactcaatgaaaatggttcccctatctcagtggtcctcaaagctgagcggacatcagaatgaacagagggctgtgttgtaagacaattttctggattccattcccagagtttaggagtcagcatctctgggacagggactgagcacagtaaattcctaatacaagccatcatccctgccctcaaggagtcacagtatataactcgtaaaagg

SEQ ID NO: 134222 - DNA, 525 bp, Homo sapiens
ctacagtgagtaccttggagctattaaaacagtaacaaatgccttaattagggcaagaacagggagttctgtaaatctcctcccaggtccctctgaagcaagcagcttcccccactgatgcaaccaggagttcctttttactttataaacgttcctgaaacaacaaaattaaagtcctccaaaaatgagattataaacrttaaatgctatttacaaatctcatgatagaaactgcagcagaattcattttaatattgtcacttaataaatatgccacaagttttttgttcccctctaaattatcttaaatttcttcaaaatatgagctcttaaagagggtgagttcttattgtgtgtggcagggactggggaaagcacaaaattaagtaaactatgggcactccccagccccctccacccataacaccctcagtcgcccagagctcagagggtacaaactagaaatcaacccaccaagttcatttctaactcaagccttggtgttgcgattttacctactgaaat

SEQ ID NO: 134223 - DNA, 478 bp, Homo sapiens
aatgtgaccaaggggtactgttttaaagatatggagtgagtcttaaatgtgtttacatactgtgaaagggatattctttattcttatgaataaagaacaaagctaaagggagatgggaagacgtgatagaatccagagagcagctcaggaggtgaatcttccactgatcagcaggtactaagttcaaatgagtgtttttctacttgaactgtttccttttgaggatctattttgaccactataaattggtttgcctcccagagtcagcctgtagattggaggccaattctrtaacttgtatgcacgtagaaataatctcaaagtcttgttagaatgcaggttctgactcaggaggtgtgaggtatggcctgagatgctccatttccgacaagctctaagggtggataaggctacagttcacacgcatgctttgaatagccctaaaccctgaagtatcttgctgtagcatgtggctacc

SEQ ID NO: 134224 - DNA, 446 bp, Homo sapiens
taattcttacttgaaatggccttgttttaatttattattcttgtttaatactttattccagtgattacttttcccttgaagaaaaaagtggtatccyccctttctatcaattatctcataaactcattggataattgggtgagtcacagtaaaacagatcagggatttatttatttaatttgagatggagtctcgctctgtcgccaggctggaattcagtggcacgatctcggctcaccgcaacctctgcctcccagttcaagcaattctcctgcctcagcctcccgagtagctgggactacaggtgtgcgccaccatgcccagataatttttgtatttttagtagagatggggtttcaccatgttggccaggatggtctcaatcagatttatttttaaatacaaaagacatagctactattttcagaaaaccaatcacttgtgga

SEQ ID NO: 134225 - DNA, 446 bp, Homo sapiens
taattcttacttgaaatggccttgttttaatttattattcttgtttaatactttattccagtgattacttttcccttgaagaaaaaagtggtatcctccctttctatcaattatctcataaactcattggataattgggtgagtcacagtaaaacagatcagggatttatttatttawtttgagatggagtctcgctctgtcgccaggctggaattcagtggcacgatctcggctcaccgcaacctctgcctcccagttcaagcaattctcctgcctcagcctcccgagtagctgggactacaggtgtgcgccaccatgcccagataatttttgtatttttagtagagatggggtttcaccatgttggccaggatggtctcaatcagatttatttttaaatacaaaagacatagctactattttcagaaaaccaatcacttgtgga

SEQ ID NO: 134226 - DNA, 502 bp, Homo sapiens
tctaacagaatgtaagctctagcaccattaccacaaagtatagaggccgacttagaagatcagactctccctattaaatacatgcaattggctgggcatgctggcactttaytgaaaaaattaataggccctctatgtgacattaaatagccttttaacagcagtgcacttagatcccacacctacttacatgaaataaatagtactgaattggctaacaatcaaataaggatttgtcttccatttcaatttaaattactctgaaagataagcaaacctaaaaagctaatggaggaataaatcccgatctattattttctatttgacacatatgcagccccagttgtctttgggaaaataaagtcacattatttattttgtattttccatacactagtcattagggcatcctcagtaaatagcattaaatggaatacaataaggttataatattgtcacaagtgagcacaaagaataattggatgttttcgtacagaggaat

SEQ ID NO: 134227 - DNA, 421 bp, Homo sapiens
gaattcgaaccaggctaatagaaagaatgtggtgaggtaaacccctgggtgagggagagggagggggcttgtgtttgtttgcaatattggatcagtgggctcaatttcctctgcttccaagggaaagcatgaaggtctccctcccattatgtgtccacatgtrcacgcttccctttcttggagactggaggggctgccagcagggagctgcccttggctgtctcccagccataaagcccacctctccatgttcactgctctgctctttagaaagggcttttatatacaggttatttaatgtcattcggatctcttattcctgggatatagactggaacaaaaagcagaatgacagcagcaattaattttcctgtcgaggatgccagcagcagagagagagccaggccagagcagggagctc

SEQ ID NO: 134228 - DNA, 554 bp, Homo sapiens
aataccgggggtctgctgttttagcagaggcagtgtttctcatggagatcttcctcacagcagccccttctatcaggcactgcatttgcattttagaacaattttcccccctgattaccagcttgaactgagtgaggaaaagggaggatgaaagaatgcaaccgaatgcccctgccaaacccagccacctgttaatgaagctcagctcctcccctcttcccttctcatttcatggaaatggagagtgcaggactgagatttatgcattgggaatgaagcaggagggtttttccaagcgctggccagaacgctgaaatcaaacstgtttcagtgaaaagtgcattgttgctcttgtttaagaggcattcacaggcaataagcaaatcacctcaggatgaatacatttggttcctgattctgaatctgtggaaagattgttaaaatataaagcaatatacaccagttactgacccactgggaaattctgtagctccataaagcacgttaaaacattgtagttatttcagtaagtctgtgtttgcaggctgagatgc

SEQ ID NO: 134229 - DNA, 615 bp, Homo sapiens
gtattgtttatacaaatgaaaagatgacaatctactgagaagagacacttgctgagaaactagattcttcatttgttagcacactaaaaaacgaactttactattaaggttatgaaatgcaggtatcttgggctgtctcaataattgataaattcaacaaacacctaagtagacattaatctcataccattgtattttatcttcataacaagcctctgaggcagtaaaattgaawctcaaaggagtaagttgatcctgatcaaatagctaataggggaagggtgtgaatgtgaacccaggtcttctgaattctaatacactccttatcccacaatactacagctatgtagagaagaaaaaaaagtacagtaccaagacttgtttccacacttccaagtactgacatcattaaaatcattttttgagggttgaggcttatgttttaatctcagatttttccataaaaaaataaaaacactagcccccaccacccccaagtaacctttttacttttaactaacctagagactgttaagcattccgtgaattttctccactcaatagttcctggtttagagcagggaaatacaaggtaagttattgcacaccatccga

SEQ ID NO: 134230 - DNA, 615 bp, Homo sapiens
gtattgtttatacaaatgaaaagatgacaatctactgagaagagacacttgctgagaaactagattcttcatttgttagcacactaaaaaacgaactttactattaaggttatgaaatgcaggtatcttgggctgtctcaataattgataaattcaacaaacacctaagtagacattaatctcataccattgtattttatcttcataacaagcctctgaggcagtaaaattgaaactcaaaggagtaagttgatcctgatcaaatagctaataggggaagggtstgaatgtgaacccaggtcttctgaattctaatacactccttatcccacaatactacagctatgtagagaagaaaaaaaagtacagtaccaagacttgtttccacacttccaagtactgacatcattaaaatcattttttgagggttgaggcttatgttttaatctcagatttttccataaaaaaataaaaacactagcccccaccacccccaagtaacctttttacttttaactaacctagagactgttaagcattccgtgaattttctccactcaatagttcctggtttagagcagggaaatacaaggtaagttattgcacaccatccga

SEQ ID NO: 134231 - DNA, 397 bp, Homo sapiens
atagtggtcctgaggtgatgtacattctcagcttacgaagataacgtgactaatagattaaagaaaggcataagaaattatgagtattgttagggaagtgataaatgtccatgaaatgttcaccatttatgttcagagattgcagtaaagacaggcrtaagaaattataaaagtatcagttttgggaactgataaatgtccatgaaatcttcacaatttatgttcttctgcctcggctccagccagtccctctattcggggtccctgacttcccgcaacagtcttatctattctaatcttgcctgttgatatatatatataaaacagaggcattgaactctttaattaacgtgaaaacagtgctctggagtctttctcttctctctcaaagagtcag

SEQ ID NO: 134232 - DNA, 397 bp, Homo sapiens
atagtggtcctgaggtgatgtacattctcagcttacgaagataacgtgactaatagattaaagaaaggcataagaaattatgagtattgttagggaagtgataaatgtccatgaaatgttcaccatttatgttcagagattgcagtaaagacaggcataagaaattataaaagtatsagttttgggaactgataaatgtccatgaaatcttcacaatttatgttcttctgcctcggctccagccagtccctctattcggggtccctgacttcccgcaacagtcttatctattctaatcttgcctgttgatatatatatataaaacagaggcattgaactctttaattaacgtgaaaacagtgctctggagtctttctcttctctctcaaagagtcag

SEQ ID NO: 134233 - DNA, 397 bp, Homo sapiens
atagtggtcctgaggtgatgtacattctcagcttacgaagataacgtgactaatagattaaagaaaggcataagaaattatgagtattgttagggaagtgataaatgtccatgaaatgttcaccatttatgttcagagattgcagtaaagacaggcataagaaattataaaagtatcarttttgggaactgataaatgtccatgaaatcttcacaatttatgttcttctgcctcggctccagccagtccctctattcggggtccctgacttcccgcaacagtcttatctattctaatcttgcctgttgatatatatatataaaacagaggcattgaactctttaattaacgtgaaaacagtgctctggagtctttctcttctctctcaaagagtcag

SEQ ID NO: 134234 - DNA, 591 bp, Homo sapiens
atatcaataaaacactgattaaaacgaaagaagcgaaaaggcaacatgaaagaacaatgagcaaacataaaaaataaaaaacaaataaagtggtagacttaaatccaccatattatttattatactaaatgtaaacagactaagtgcaaatttaagacagacatggttggattaaacaaaaaactaagatgccaccatgtatttataggagacacatttaaaacataaggacacagagcaaatgacagtttaaaatggagaaaaatggatacagaatatgaaaataaaacaagacagygtattgcgataataataattcagaaaaaaatagacatcatggcaagtaacataaaatgaggtgaagagaaacactgcttaataacagaaaggttaatgcattaggaagcaacaataatcctaaaaaaatatgtctttcatgacctcatttcaaaatagatgaaggaaaaattgatcaaaagaattgagaaatacacaataatagctggagattttaacacattttttcagtaataatagaagaagcatattaaaaaacaattaataatgaaacagaaaatgagaacattattg

SEQ ID NO: 134235 - DNA, 591 bp, Homo sapiens
atatcaataaaacactgattaaaacgaaagaagcgaaaaggcaacatgaaagaacaatgagcaaacataaaaaataaaaaacaaataaagtggtagacttaaatccaccatattatttattatactaaatgtaaacagactaagtgcaaatttaagacagacatggttggattaaacaaaaaactaagatgccaccatgtatttataggagacacatttaaaacataaggacacagagcaaatgacagtttaaaatggagaaaaatggatacagaatatgaaaataaaacaagacagcgtattgcgataataataattcagaaaaaaatagacatcatggcaagtaacataaaatgaggtgaagagaaacactgcttaataacagaaaggttaatgcattaggaagcaacaataatcctaaaaaaatatgtctttcatgacctcatttcaaaatagatgaaggaaaaattgatcaaaagaattgagaaatacacmataatagctggagattttaacacattttttcagtaataatagaagaagcatattaaaaaacaattaataatgaaacagaaaatgagaacattattg

SEQ ID NO: 134236 - DNA, 582 bp, Homo sapiens
cttagtctttcagttagataacccatctcaatttaaagatctctacaggaaaagaaaatgacaattccctctcctctctttttcacaccccacccagtgctacacaagagctttcaaaactcaaatctgtgggtacgaaaaccctcctgtttatttttactaaaaacaagagaatcacacacacacacacatgcacacacacacacttacacacacacttgcacacacacacatacacacacacaacatcatggaatgcaaaaaaggtttgatatcatgagaagattaactgaaaagcaattattctaatcaccagctatggaaaaaggcataaagaattaatcagcagctacatttcaagctagaaacagagtgaactatggtrgagctgttgggatcacggggtctgaagtcaaggtccctggtctcaaattccaggcccaccatttaccagtggcaaggcatgggtccagctgcttaacccctcttccccagtttcctcaaaatgtgctggaaataaaataatatataaaatgcacttagaacatcacctggtgagtggcaaacactcaatgaacatta

SEQ ID NO: 134237 - DNA, 240 bp, Homo sapiens
gaagtgcagggtgcccagtaagaataccttcctttgccatgtccctccagcgacctctactgacaaagtttagcattttgccagctgkcaaaggaaaatatttcaaggactcaactcagttttcacagagcaggcaatgaaggattgattgttttgtgtaggtgataagtgacagagtcagcttgctccctttcctgaatgtctagaagcctttagggagataggctatcatttatgcaa

SEQ ID NO: 134238 - DNA, 411 bp, Homo sapiens
gaattcaaacttaaagagcaaattaagcaaattaaaataacactgacataatacttctatcacaatggcaaaaagttaaaagtcagacaacatattcttttgaatacgctgaggctttggaaaataagtacagtcatactttgctggtgaaaatggaaactggtagaacccttttggagatgaatttgacaacrcccaacaaaactacatatttgttgatctcttgacccagtccttccatttctaactacttaccctgaaaatatacttccaacattaatacacatgcacaaaattttcattgtagtattgtttgtaactgcaccatatttttttaaaaagtctcacattggaaagatgttaaataaactatggtctacctatacaatagagtacttttgcaggtgtaat

SEQ ID NO: 134239 - DNA, 455 bp, Homo sapiens
agcagatcactagttacctaggcctggtgggtagggagagtgggcagaagaggtggtagagggacggtgarggagcacaaggaaacgttttggggtgatgagtatatcttgattgtggtgatggtttagtgtgtgtataattatgtcaaaagttatcaaattgtacactttagtttattggaagcccattataattcaataaacaaaagagtaagcagaaagattcagcataataagtgttttccccaatctgttgaattttataatttggaaatcaatcgtgacctcaacagaaaccattagaatgaactaaccactgctgcctctgtcgggcagcaattggaaggtatatttcataaactgtagctgaaaaggacagtaagtttccagagaaagatggatcatcaaataatggtagttgtttgttttattgtgagattacatcatttagggta

SEQ ID NO: 134240 - DNA, 471 bp, Homo sapiens
agcagatcactagttacctaggcctggtgggtagggagagtgggcagaagaggtggtagagggacggtgagggagcacaaggaaacgttttggggtgatgagtatatcttgattgtggtgatggtttagtgtgtgtataattatgtcaaaagttatcaaattgtacactttagtttattggaagcccattataattcaataaacaaaagagtaagcagaaagattcagcataataagtgttttccccaatctgttgaattttataatttggaaatcaatcgtgacctcaacagaaaccattagaatgaactaaccactgctgcctctgtcgggcagcaattggaaggtatatttcataaactgtagctgaaaaggacagtaagtttccagagaaagatggatcatcaaataatggtagttgtttgttttattgtgagatkacatcatttagggtatatttaaagctgatga

SEQ ID NO: 134241 - DNA, 480 bp, Homo sapiens
agttcctgtcacaaacattaagctgcatcagaaaagaagaccaaaaaagacacagagagtaagtgatgagagagatgtaagaatataatgaaggcgaagaggggaatgagatgtaatagaaaattgcaggaaggaaggtccagaaggagtagccaaacgattcaaatgaaaaagagaaacttccacatttggacaggatggaataataaaccagttttacccttccatatgaaaaactaataataataataataataataaaaagacaaatatataaaatcacaccactcaaaacagaggacaccaggtgaccaaggacacagaccccccagaggggtgagacctaaggagaacatgggagagcccaacagtctccttgatttgaggagacagagccgggagtctggacaagtcaggatagctagaattctcagggcagagtraaggagagaagagagctgcgcgaagaactctggagat

SEQ ID NO: 134242 - DNA, 573 bp, Homo sapiens
gacatttctctgattttccaaatcttagtccttagaaatgtcatcatttgatggctacttataaaggcattagggacactttatttgcattattattaatattaataatgatgatcatatagaaatcagagggctttttattgaggttggaaaggaatctttccctagcataggccctgataaatactactgaattcaaagcagcacactttcttaaactgatgcttgaagtgtgtagagagtgttttaagatagcaagcacagtttgccatgaatgttttcaagaygctccatggacattgacattattccccaatctcactgagtcctgtgagtttatgggagactgggagattactggaataattattaaatggaaaaggagagtgttggaaaggagaaatggatcaactgcactgagtctctggtagatcctgcaggtgacaggaagaggacgatgatggcgcactggataccactgagagtttcagtggatggtcgggcaggagggtagcctggactgtaggagaatgaggatgccagtataggatgtttcaaagcacctggcatctc

SEQ ID NO: 134243 - DNA, 657 bp, Homo sapiens
ggcaaaaatgaacgcaactaagtcacttatcccgggaatcgtggacacaaacagtaacactattgcttcttgtttcatactgtggaggtggtgacccacaggctattggaaatgcttgaaaactactgatgccttcaataagcatttccatattatctgtgaaagaaaagtatttgtctatttttttcttaagctcaggtattgatcaaacaaccactttatcaaattttgagattgcaggctgtgaaacaaaaacagcgtgtcatctcttaacagcattttacagtttacaaatgtaaaatctctcttaaattactgtaagcattattgttatgagaagtaccgtagaagayaaaaataatttagattatctgaaaaataaaacttaattttcagaatgtttgaatgtaaaagcagttgacaactatttttctaaataaaaagatccatataaaaatcagtgaatgagtattttctgtgcaggcagttatactctacaaaatactcaatgagctatgaaaaagaggtctcagctacagaaaatcataatttaaatgttaggtttgttcattttcagcttcatgaatcaatagagtaaatcctttatattattctgtatgtaaaatctggtcatgtttaaaatcagattttgggact

SEQ ID NO: 134244 - DNA, 657 bp, Homo sapiens
ggcaaaaatgaacgcaactaagtcacttatcccgggaatcgtggacacaaacagtaacactattgcttcttgtttcatactgtggaggtggtgacccacaggctattggaaatgcttgaaaactactgatgccttcaataagcatttccatattatctgtgaaagaaaagtatttgtctatttttttcttaagctcaggtattgatcaaacaaccactttatcaaattttgagattgcaggctgtgaaacaaaaacagcgtgtcatctcttaacagcattttacagtttacaaatgtaaaatctctcttaaattactgtaagcattattgttatgagaagtaccgtagaagataaaaataatttagattatctgaaaaataaaacttaattttcasaatgtttgaatgtaaaagcagttgacaactatttttctaaataaaaagatccatataaaaatcagtgaatgagtattttctgtgcaggcagttatactctacaaaatactcaatgagctatgaaaaagaggtctcagctacagaaaatcataatttaaatgttaggtttgttcattttcagcttcatgaatcaatagagtaaatcctttatattattctgtatgtaaaatctggtcatgtttaaaatcagattttgggact

SEQ ID NO: 134245 - DNA, 575 bp, Homo sapiens
ccctcggctctcctctggttactatttatgtgaagtgtgttttttcattcttccaattttatcctatttatccctttaggtctaaagtgagtattttgtaggcagcatagagttggataacggtttgtttaattgtgttgttatccattttacctatctctgccttttgattggatagtttaacccatttatatttaaggtaattcctaataatggaagayttttgccttttcgttatttgccataatttcctccattactggcttattttgtgttccgttgaaattttgtgtgtgtaatgacatgttttgcttctcttctcattttcttttgcatatagactatagatatttcatttgcagttaccctggggattatatataacatcttaaaattattacactctcatttcaactaatgccaaattaactattattgcaagtagtaactctacaactttactctttctgctctcttttatgtttctgatgtcacaaagtatatctttatgcattatgtgaccaataacattgatttataataattaacatatttgtcttttaaatcttatagta

SEQ ID NO: 134246 - DNA, 603 bp, Homo sapiens
acgtcttgccttcctcttcatcttttcctctatcttgatgcttagaatgtgcataagatgctagagctctacccaccatcttggactaggaggcagaggaccacagcctatggggagtggaataaacagattaaagccttcyaatctggcaagacttggaggagcaaagctaccatggcaattcggggctgcccacctctacatattaaattaatcactattattttgagcttctgttacttgtgctgaatttaatgcaaatggctgcattgcaggttttgtgaaggttctatatgcaggggacctagcacagtgtctggcatagcattgacgtctattatagcagctgttcagcattctcttatctggatatttttgcttgccccatgaagcagctctcaaaagttactacattcctagtgctagctagtaaatagtttcattccttaagtttctaaaaataagccttctcaatgtcatctatgtattaaattctgtagccttatctcctttacaaactgttaggagaagaatctatcaggatgggattaatattttcctgctgtgtagacttttaagaatgtgctggtgtgtaatttttcc

SEQ ID NO: 134247 - DNA, 603 bp, Homo sapiens
acgtcttgccttcctcttcatcttttcctctatcttgatgcttagaatgtgcataagatgctagagctctacccaccatcttggactaggaggcagaggaccacagcctatggggagtggaataaacagattaaagccttctaatctggcaagacttggaggagcaaagctaccatggcaattcggggctgcccacctctacatattaaattaatcactattattttgagcttctgttacttgtgctgaatttaatgcaaatggctgcattgcaggttttgtgaaggttctatatgcaggggacctagcacagtgtctggcatagcattgacgtctattatagcagctgttcagcattctcttatctggatatttttgcttgccccaygaagcagctctcaaaagttactacattcctagtgctagctagtaaatagtttcattccttaagtttctaaaaataagccttctcaatgtcatctatgtattaaattctgtagccttatctcctttacaaactgttaggagaagaatctatcaggatgggattaatattttcctgctgtgtagacttttaagaatgtgctggtgtgtaatttttcc

SEQ ID NO: 134248 - DNA, 570 bp, Homo sapiens
tcctttagttgtaagatatataacacagccaaagccttagaatatcttgttttgttgttgagtgttggttcatgttagcccttttaaatagataatttatctgtccccccagaagcctggagagagtatcattttcactgttttatttgaaaggaaactggaaatcagaaaaattgagtagtaaattcaattctaatgcttatgtggcccagtctggatttgaatttgtctctctgattccaaggtctacgtgtccatgtacaccatgcacacatgtacatayggagaaataacagggccatctagaattcaaagatgttatctctccctacaaatttgtgcagtagggtaagatcgaaggaaatgaaaaaaagaaaaggggaaggatcagatattaatggcaaattagtaagaggttggggaagggaggaattgggagaaaacgacattccgttgaatagtgtatgtgaagcttatcactcagggaattttctcaatgtgaacattttaaactatttctacacagccagtgttgcttgtcagcagagatatgaaagggataaatataac

SEQ ID NO: 134249 - DNA, 321 bp, Homo sapiens
gttttattacatttggtccataccacccttgaaccaaaaatctcttctgcttgaagatgcacacgttgtcagtttctcttttctccagaagtcatgacagagaaaaggcaaacaaagctaacttcactgtttttgaaatgaggaaaggtagcttaaactatattttttwaaaaaaaaggctgggcacaatggctcatgcctgtaatcccagcaatttgggaggacaaggtgggcggatcacttgaggtcaggagtttgagaccagcctggccaacacggtgaaaccccgtatatactgaaaatacaaatattagcctggcg

SEQ ID NO: 134250 - DNA, 573 bp, Homo sapiens
tattatcactcttagtcatcttttgtatgttactttacttattctcacaataaccatgtgcagtaattactatttccccaatttataaacaggcaaaatgaatcttgaaaagtttctctaatttgcccaagtttgcattgttcattcaaagcattatgctttatgctaataaagaaaaaaaataagttactattacaggctgaacaggtatggacaattttagggagaagaaaaaaagtggaataaatgaatgtcagacttgagtttaagacttcatttagaaaaggttggaaaggagacaagacaggaaaggtgcagtgagatgtgaggtctcctcgttctattatgctttcttaagcaatagagtcattgtggatcatcacctctaggaagatacacagtattggcttactgtcagtaattaaacatttttgctgtctttgaagaattttatgaacacagtagggaagccaaactaatttaattgttttgctaattgctaattagcctcagtataagggcaggtgmttgcatttgtgtaattaggaagagagccagaatatcatttgtaag

SEQ ID NO: 134251 - DNA, 470 bp, Homo sapiens
tagtttgttaatatacctagggaaaagagccaatgtaccaagaggttaaagatctataatccagaggcagagcaacaatgaagaaattagtcttgattttaagcactctctcaatgtaaatgcttgcctctccttcctctcattgtactataaaccacagtcttacagctaagaaataaattttctgaatgcttttagggccatactactagtaaaatctattgctttccaggtttgttctttatccaaagcacccactgttggatcagaagggaaatatttgtggtaagactccaaatttgcatgtgtttttctttcttttctctttttttctaacaattttcttccacactccagaattaggagaaatggctcaatgaagctatgttcccctatttctaaggtaactagtaaatgcagcattactggcayaaagttcctcatccagccataccttagtacagcaagtc

SEQ ID NO: 134252 - DNA, 578 bp, Homo sapiens
gaagctggtgcccaataaaatgcactaaattatcaaactaaaatatgcttattactaaattatctgaaattgccatatatatttgctaatgtatttactatctgaccccttctgtaggktataatctgacccttctgtaggtataatcttcatgagtgtagagctttatctcttattcacatctaaatcccatcgatacttaaaatgcaagattttttgctcaataagttgtgtttcaagaaataggcgaataacagacgagtgtccttcttctttaaatgattttcctctcctagtcacatttaaaaaccaacaacaataagaactatttacattattttgtcactttttttgtttgtttccatcctcaatttgaaagatgtatctccagctgaaatgtatcacctcatgcagtggatgctatgatgtgtcattcagatcacccttcagagtgaaggatttatttctcactcttggatgattcctttagatgtcagttctctttgagagttgccttagctgaatgaaattgcttcattcagcttcaagcttccttccaggaggagcttgcatacaaa

SEQ ID NO: 134253 - DNA, 412 bp, Homo sapiens
aaaactaaataccacatgttctcacatataagtggaagctgaatgagaacacctgaacacataaaggggaacaatgcacactggggcctattggagggcagagggttggagaagagagagaatcaggaaaaataactaatggatgctaggcgtaatacctgggtgataaaacaatctgtacaaaaaacccccatgacacacatttacatattaacaaacctacaaatcctgcacatgtacccctgaacttaacataaagttaaaatatatacatatatattaacttttaacttataggttccattgtattcctcattctggccagcattccagcaaagctttacttttgataatgaagggtrcttggatagacagtgtacatgattcagcataatctgtttttcaatttcag

SEQ ID NO: 134254 - DNA, 589 bp, Homo sapiens
acatctttacaggtttagaggattaggacatgcacatctttggtgggatggggaaggattatccactcaatcacagcaataattttattattgagttactttttctgaaaatcaattgaccatagatgtatgagtttgtttctggatgctctattctgatccattgacctatgtgtctagccttaagccaatatcacactgtcttcattattatagccttatagtaattcttaaatccatgtagtgtgagtcttctgactctgttttactttttgcaacatcttttgcctgatttagatcccctgcatttacataaacatttaaaattagtatttcaacatctataccaaaacttatataacagtttgaggtgctgacagcttagcaatagtagattttctaattmacaaagatggtgtgtgtatgtatatatatatcatatatacatcatatatatcatatatatgataggatatcatatatcatatatatcatatatacatataaatacacacaaactatctaatatatctatatctatctattcattttgatcttctgtaagttcttcatcaatttcttgtagact

SEQ ID NO: 134255 - DNA, 553 bp, Homo sapiens
aataacttaaaacagaagtaccattcaacccagcaattccattattgggtatatacccaaagaaatagaaatcgttctaccacggagacacatgcacacatatgttcaccccagcactattcacagcagcagagttatggaatcaacctaaatgcccatcaatggtagactggataaagaaaatgtagtccatatacaccatagaacattatgcagccataaaaatgaaggagactgtgtcttttgcagcgacatggtttgagctggaagccatgagaagcaaactaatgaaagaacagaagctgaaatacttcatgttctcacttataagtgggagttaaacattaagtagacatgaacacaaagaaaggaacagcagccacagggacctacttgagggtggaggatgggaggagagaggggatcaaataactatttgttactatgtttattacctaggtgaaaaaacaatctgtacacccaacccgtgtgatgaacagtttaccagtgtaacaaacctgcacatgyacccctgaatgtaagctagaagttt

SEQ ID NO: 134256 - DNA, 460 bp, Homo sapiens
tctttctgtctttctgatttttaaaacttgaatttgtaacatttcagcatttcttctttaatcattgtctagcaatactaaataaccatcaatttgcttcatctgtcaagccaacacttttcagaatttttctcttttcctaatttccacttctggaaaaccctttctttgtatatatgacagtccagtctttcctttacacattaagaacttttactttatttatgactatttgatatattttatctgagtactccagtcttttctttgtaagatggttttaccatttgaaaataatttattttgaggtgtactaatagtcatgagctcayagcatcatactataaaaacactgaacagaggatcaggcaagatgactgaataggaacagttctggtctgcagctcccagggagaccaatgcagaaggtgggtggtttctgcatttccaactgagctac

SEQ ID NO: 134257 - DNA, 565 bp, Homo sapiens
tttcaaactctatcatggctttatcagctaagtttatgtaatattccatattctttattgtcattgcaacaagttcacagcatcttcaccaggagtagagtccatctcaagaaaagattttctttgctcatccataagaagcaactcttcatccattcaagttttattatgaggttgaagcaattcagtcgcatcctcaggctttgcttctaattctagctctctttctatttctagtacatctgcagttatttcttctactgaagtctttaactgctcaaagtcatccawgagggccggaaccatcttcttccaaactcctgttaatattgatatttttacctcctcccatgaattatgaatattcttaatggcatctagatggtgaaccctttccagaaagttttcaatttattttgcctatatttatcagaggaatcattatcttatggaagctatggtcttatgaaatgtatttattaaataataaaacttcaaagtcaaaattactctcttatatatgagctgcagaaatgacgttgtgtaagcaggcataaaaacagca

SEQ ID NO: 134258 - DNA, 673 bp, Homo sapiens
gatgccctgaactagtgtgcacctctgtggaattacagaagccagaaggcagagaggatggtgtacctacatctctactttgcagactgtggcctggtgagttttcccttttcccaacaaagattttcttaatccatgcctagtgctggtgtgatgttgagtawtattttctgccctcttttgtgatagatgatagtcctggagggacccacctgatacaacatctgttaagtcttccccaagagctggagatgtcagacactgagtggtattatctctctctctctttcatccttcatcctactatggcttgcctctcttgatagtgtctgacaacctgtaggcatcttacttctataggtagccattcattagattatacaagttctgtccacagatctgcatgctgagaaaggagcaaaggttcttgggtatactgattacatggcctgcatctggatggaatttaaggtggaaagctcatatcttttctgtcctgattgtctttgaggtttcctattacttggtgggttgtttagtgaatctgtgagttgagttgaacaaatattcatttatttagtttaataaataatataaagaagaatatttcatctctacctgcctttctgctattctgtcatttgtgttctatttggataaatatattaattag

SEQ ID NO: 134259 - DNA, 673 bp, Homo sapiens
gatgccctgaactagtgtgcacctctgtggaattacagaagccagaaggcagagaggatggtgtacctacatctctactttgcagactgtggcctggtgagttttcccttttcccaacaaagattttcttaatccatgcctagtgctggtgtgatgttgagtattattttctgccctcttttgtgatagatgatagtcctggagggacccacctgatacaacatctgttaagtcttccccaagagctggagatgtcagacactgagtggtattatctctctctctctttcatccttcatcctactatggcytgcctctcttgatagtgtctgacaacctgtaggcatcttacttctataggtagccattcattagattatacaagttctgtccacagatctgcatgctgagaaaggagcaaaggttcttgggtatactgattacatggcctgcatctggatggaatttaaggtggaaagctcatatcttttctgtcctgattgtctttgaggtttcctattacttggtgggttgtttagtgaatctgtgagttgagttgaacaaatattcatttatttagtttaataaataatataaagaagaatatttcatctctacctgcctttctgctattctgtcatttgtgttctatttggataaatatattaattag

SEQ ID NO: 134260 - DNA, 673 bp, Homo sapiens
gatgccctgaactagtgtgcacctctgtggaattacagaagccagaaggcagagaggatggtgtacctacatctctactttgcagactgtggcctggtgagttttcccttttcccaacaaagattttcttaatccatgcctagtgctggtgtgatgttgagtattattttctgccctcttttgtgatagatgatagtcctggagggacccacctgatacaacatctgttaagtcttccccaagagctggagatgtcagacactgagtggtattatctctctctctctttcatccttcatcctactatggcttgcctctcttgmtagtgtctgacaacctgtaggcatcttacttctataggtagccattcattagattatacaagttctgtccacagatctgcatgctgagaaaggagcaaaggttcttgggtatactgattacatggcctgcatctggatggaatttaaggtggaaagctcatatcttttctgtcctgattgtctttgaggtttcctattacttggtgggttgtttagtgaatctgtgagttgagttgaacaaatattcatttatttagtttaataaataatataaagaagaatatttcatctctacctgcctttctgctattctgtcatttgtgttctatttggataaatatattaattag

SEQ ID NO: 134261 - DNA, 673 bp, Homo sapiens
gatgccctgaactagtgtgcacctctgtggaattacagaagccagaaggcagagaggatggtgtacctacatctctactttgcagactgtggcctggtgagttttcccttttcccaacaaagattttcttaatccatgcctagtgctggtgtgatgttgagtattattttctgccctcttttgtgatagatgatagtcctggagggacccacctgatacaacatctgttaagtcttccccaagagctggagatgtcagacactgagtggtattatctctctctctctttcatccttcatcctactatggcttgcctctcttgatagtgtctgacaacctgtaggcatcttacttstataggtagccattcattagattatacaagttctgtccacagatctgcatgctgagaaaggagcaaaggttcttgggtatactgattacatggcctgcatctggatggaatttaaggtggaaagctcatatcttttctgtcctgattgtctttgaggtttcctattacttggtgggttgtttagtgaatctgtgagttgagttgaacaaatattcatttatttagtttaataaataatataaagaagaatatttcatctctacctgcctttctgctattctgtcatttgtgttctatttggataaatatattaattag

SEQ ID NO: 134262 - DNA, 530 bp, Homo sapiens
atctctgcttgtacttcctcgtttctttcattattgacatataaattccctgtttatacattgtatgcctatgaacacaaatttataattgctttatgcgattgcttttaagtcaaataaaataaagtgttacatacaaacatayatttatactttgttttatattgaccgacatacttacttttactgttgacttttcttcatgtggattcaagttactgtgtagctatgtagtttttttttcattttactttaagatatacctcttgatgctttttgtagaatagctctaataaagcaaattctctgtgtttattatatagatacattgaatttttccttaagtttttttttttttttcttgagataaagtctcgctctgccactcagaatggagtgcagtggcacgatcttgactaacggcaacctctgcctcccgggtagcgattctcctacctcagcctcctgaggagctgggattacagggaagcgccaccacacccagctaatttttgtatttttagtagaga

SEQ ID NO: 134263 - DNA, 530 bp, Homo sapiens
atctctgcttgtacttcctcgtttctttcattattgacatataaattccctgtttatacattgtatgcctatgaacacaaatttataattgctttatgcgattgcttttaagtcaaataaaataaagtgttacatacaaacatatatttatactttgttttatattgacckacatacttacttttactgttgacttttcttcatgtggattcaagttactgtgtagctatgtagtttttttttcattttactttaagatatacctcttgatgctttttgtagaatagctctaataaagcaaattctctgtgtttattatatagatacattgaatttttccttaagtttttttttttttttcttgagataaagtctcgctctgccactcagaatggagtgcagtggcacgatcttgactaacggcaacctctgcctcccgggtagcgattctcctacctcagcctcctgaggagctgggattacagggaagcgccaccacacccagctaatttttgtatttttagtagaga

SEQ ID NO: 134264 - DNA, 347 bp, Homo sapiens
ctagtgtatttttattataaggtagggtatatttcaaaactgccaaggggttaaattttaaaatgttctcaccataaaaaataataggtatgtgaggtaatgtatatgttaacttgcttgatttaattatttcacaatgtatgcatacatcaraacatcacattgtgccccataaatatataccattattgtctgtattagcccattctcatgctgctaataaagacacacttgagactgggtaatttataaaggaaagaggtttaattgattcacatttcagcgtggatggggttcagcatggctggggttcctgaggttccatgacacctcaggaaacacaatca

SEQ ID NO: 134265 - DNA, 505 bp, Homo sapiens
tgcaacttcattttgcatgtagatgtaatttgtttgtctgcaagggaatgtacatattttaaactcactggctcataacgaatgcttctggagcactagggagttaggggaagtggcaggttaggcatagagaagtatgtgcaggtttcagcaaagagcaagaagaaatgtgcaagcctttagggccatagtcaaggaargaagatgcatcaagaagttaaaataagttgcaatttcaatcacctaaggcaatgaagataaggactgagaagaagctactgggttaatcatacagtggtttgcttggaaataaatatttcactggagtgatggaagtagagaaataactgccctaagttaatgagtgaaaagaagaaggtgagaaagtggatatgatatgtacagagttaacctcccaaaattttagctgtgaaggggaggcgatggaggatttctggaagagtagagaaggttctggaagtttcccaaaatcttgatattccca

SEQ ID NO: 134266 - DNA, 597 bp, Homo sapiens
agatgggctcccacagtgcagtggtggagtgaagggctcctcgagcatggccaaagtgggcaccgaggccgaggaggcaccgagagtgagcgagggctgccagcacgctgtcatctctcaatgccactgtctgagtggcaattgcgtgttctcttcatgtctgtgtgggttttctctgggtattccagtttcctcccctacatcccaaagctgtgcacatgaggtgaactgccatgtctatatggttcctatatgagtgagtgtgggtgtgtgtcatagataagagatagcagaagaattgagagatgagtcagcccaaggcaaagaatgtctctttttatgaaaattgggagatgtaaaactgaaacctaacagaaaacactttccaaatcacataaaacatcacttatcaattgagctaaaagaactgcagctataatcaattatggataccacaggacagtggacagaaatgatattgaaaagaragacaaagaaaaaattgggacactttttactctatagtctgtatttgactataaacatctaatataacatttgtggcagcaaaaggatagggttgtacaaggtaccctt

SEQ ID NO: 134267 - DNA, 558 bp, Homo sapiens
gtagaagtacaatttgaatctttgaagttgtaaaagaggcaataggatacataagcaaggcactgtttattattagaaacctttaggcagactaagccaggcaccctgcctcatgcatgtaatcccagctactcgggaggttgaggcacaaggattgcttgagtccaggagtttaagaccagccaggggctcatgcctgtaatcccagcactttgggaggccaaggcaagcagatcacttgaggtcacgagttcaagaccaggctggccaacatgatgaaacccagtctctactaaaatmccaaaaaaaaaaaaaaaaaaaaagcagggcgtggtggcctgtgcctgtagtcgttccactgcacttcagcctggttgacagagtgggattccaaaaaacaaacaaacaaaagaaaaaacaatcagccagggcaatatagcaaaacatcatctctaaaaaagaaacgaaaaaaattggcttggcatgttggcaggcacttgtcgtcctacatacttgagagggtgagagggtgagctcaggagtttgctgatacagtga

SEQ ID NO: 134268 - DNA, 640 bp, Homo sapiens
gtatatttgtcataatgaatgagccaatatcaacacattattctaagctaaagtctactctttattcagattttcttagtttttatctaatgttctttttctgtcccaggatcccatcttggataccacattaccttaaacactgcctcagccaggtgatcaaggtcaacgtctactgtgataagtcatggttttggtgtgtacccttgatgtgatgtgataaaaatggcactttacctctgtggtcttcctctgaaaaatcccgtaacagcagcctaatcatgagaagcayatcaacaaaactcagactcagggacattctacaaaataccaggctgtccctccctgaaattgtcaagttcaccaaaaacaaggtgaatctaagaaacctgttacagccaagaggagcctaagaagacatgaggactaaatataacatggaattcgggataggattgtgctacagaaaatgtatgtgctaatgtgagatgttaacagttggagaaactcagttttgggtataaggaattctctgtactatgtttatctaaaaacaattccatggtgagcaaacttaagcatagaaatgttaaataaattgtccaaaatagagaagtaaatagcagtgccaggtttcaag

SEQ ID NO: 134269 - DNA, 555 bp, Homo sapiens
ccaggctgtccctccctgaaattgtcaagttcaccaaaaacaaggtgaatctaagaaacctgttacagccaagaggagcctaagaagacatgaggactaaatataacatggaattcgggataggattgtgctacagaaaatgtatgtgctaatgtgagatgttaacarttggagaaactcagttttgggtataaggaattctctgtactatgtttatctaaaaacaattccatggtgagcaaacttaagcatagaaatgttaaataaattgtccaaaatagagaagtaaatagcagtgccaggtttcaagcataagaatcatcaactctgaactttaaacacagctctgtatggtacttttgtttatatcaatgcctagatagataaataggtagatagataatttccaagtgctagaaacaaaaaaggaactaaaactgataaagaatataaatgaggccaggcagggtggctcacacctgtaatcccagcattttgggaggccgaggcaggcagatcactgaaggttcggagttcaagaccagcctggccaac

SEQ ID NO: 134270 - DNA, 555 bp, Homo sapiens
ccaggctgtccctccctgaaattgtcaagttcaccaaaaacaaggtgaatctaagaaacctgttacagccaagaggagcctaagaagacatgaggactaaatataacatggaattcgggataggattgtgctacagaaaatgtatgtgctaatgtgagatgttaacagttggagaaactcagttttgggtataaggaattctctgtactatgtttatctaaaarcaattccatggtgagcaaacttaagcatagaaatgttaaataaattgtccaaaatagagaagtaaatagcagtgccaggtttcaagcataagaatcatcaactctgaactttaaacacagctctgtatggtacttttgtttatatcaatgcctagatagataaataggtagatagataatttccaagtgctagaaacaaaaaaggaactaaaactgataaagaatataaatgaggccaggcagggtggctcacacctgtaatcccagcattttgggaggccgaggcaggcagatcactgaaggttcggagttcaagaccagcctggccaac

SEQ ID NO: 134271 - DNA, 555 bp, Homo sapiens
ccaggctgtccctccctgaaattgtcaagttcaccaaaaacaaggtgaatctaagaaacctgttacagccaagaggagcctaagaagacatgaggactaaatataacatggaattcgggataggattgtgctacagaaaatgtatgtgctaatgtgagatgttaacagttggagaaactcagttttgggtataaggaattctctgtactatgtttatctaaaaacaattccatggtgagcaaacttaagcrtagaaatgttaaataaattgtccaaaatagagaagtaaatagcagtgccaggtttcaagcataagaatcatcaactctgaactttaaacacagctctgtatggtacttttgtttatatcaatgcctagatagataaataggtagatagataatttccaagtgctagaaacaaaaaaggaactaaaactgataaagaatataaatgaggccaggcagggtggctcacacctgtaatcccagcattttgggaggccgaggcaggcagatcactgaaggttcggagttcaagaccagcctggccaac

SEQ ID NO: 134272 - DNA, 503 bp, Homo sapiens
gcgatcacagcaaacaatttastcctggaattcagcttccaattgttttccttttctgcccaaatttcaatatcttaattagagttgccagagttaccaaataaaaatactggaatgcccagttaaatttgattttcaaataaacatcaaataaaagtgaagtagaagtatgtcccgtgcagtatttggaatatattgctattaaacaattatctaaatgtatcactttaactgatcatcctgtgttttaccaggcaacctgtaatatttttgatcaccttaaaaccaaatttgaatgtttttccagactaaaccttaatccacatttacatcaagaaataatttttgtttgaaccactttcaccttcccactaacccagatttaaaattgttttcttgctagttctttaattatttctcacctggaacttaaaaacaacagatatctttttgttttttacaaactgacttatgaatgtgattcagcatagaaaagacaaatt

SEQ ID NO: 134273 - DNA, 562 bp, Homo sapiens
cttcacaaaaaaaccttgtaatacaggcattttaatctccattttacaaatcagaaattagtggctcagagatgttaaataagttgcccatgaccatggagctagtaaatgataaatccagggagtgatcataagcctgttttggcagctgttatgcttttactttttccgtactgcctagcacaaacctggcctagagagaggtctgratgggtatttgaaaatcccgttggttgagaatagtctaaaagagaatcgcaaggtgttttaacccaaaatctggccattggtttgctctcaacacccacgttttggctgaattagtagcctactaaagcagagggactagcagagggctttgaaaggcaagctcagcttcttcttcatgttgcttcaggttggagctacttgatacacatgcaaaacaaatacatttcaccaaggatggcagaaaatctcatagattctttaggccccaatgtttctgatgagatgttggtctcacacatactaggtctccaatcttacacagggagcatcaatgcccccgtttttctcatat

SEQ ID NO: 134274 - DNA, 631 bp, Homo sapiens
cagattgaaaatccatagtatatatagggcttggtactatgtgaggtttcaggcatccactgagggtcatggaacatgtctcatggacatagtgagactactctatctgatttttctcagtgttgtcacttgttaattgacttttctcattcaaattgtgttggttcttgatatgatgagtggtttacattgtatactgaacttcaaatactattcaattaattaagtagtcaaccaaacaataccctcgttgaagtatagttaaaaaacatggtatgtgagcatgttctgcttttcattgggctccatagataccagcacagagcaccaactcacactgcctgattgcagatgcgtggagtgaaagttatcccaaggcttcactgacactttatctttccagcaaaaatgagcaccaactggtactgcttgttgtctcccagggggagtgtgtcctctgcttcctgctgtgtttcactgatgccaatgagggaggaagctgaagactcaaaaaacacttttwttttttttgctgcaggtatgaggaagaagcttagctcctcactggagcccactgatgacatggatagggagatgggacagtgaagtcaaccagcttcatctcacacca

SEQ ID NO: 134275 - DNA, 479 bp, Homo sapiens
ggcacgattcaactttttttttttgtctcagcattttgtatatgttgtaaagtacaggttatattgtttttgcatacagrtatcaaaatatttcagcacaatatttaaaagactatccataacccattgatttacattagcattttataaaaaaattaaacacaaatttgtgtttattcatagactttctgtgattttccattgatctataagtgtactgttacaccaacaccacagtgtcctgattactgacatcttgaaatcaggcagtaaaattcttccattttgtccttcttttatacaatttttattctaggttatttatattttacattactttcagataagccagttaatttttgcaaaaaaaaaaaaaaaaaaacacgttgaggtgttgattgggattatcttgctgctagaggttaatttgggaacactttaaatcttaatatcaagtctctcaattaatgaacgttatg

SEQ ID NO: 134276 - DNA, 519 bp, Homo sapiens
tggctggaaaaaatgaaattatatttcaactgaagattttcctttctcagaaacggatgaggaaatggagaaatgcagttaatattttaacaaaaagccatttctgggctgggtgcggtagctcacgcctgtaatcccagcactttgggatgccaaggcgggtggatcacttgaggtcaggagttcaagaccggtctgaccaacatggtgaaaccctatctctactaamaatactaaaaattagccaggtgtggtggtgcatgcctgtaatcccagctacttgggaggctgaggcaagagaattgcttgaacctgggaggaggaggttgcagtaagccgagagagtgccattgcactccagcctgggtgacagagcgagactccgtctcaaaaacaaaaaaaagccatttctgaaaatgatttgaagttctagtactgaacattcagataaaattttagttgtcatgtgaagtttgtgctacatgtgggaaaactttaaattgtattggccaggttttt

SEQ ID NO: 134277 - DNA, 519 bp, Homo sapiens
tggctggaaaaaatgaaattatatttcaactgaagattttcctttctcagaaacggatgaggaaatggagaaatgcagttaatattttaacaaaaagccatttctgggctgggtgcggtagctcacgcctgtaatcccagcactttgggatgccaaggcgggtggatcacttgaggtcaggagttcaagaccggtctgaccaacatggtgaaaccctatctctactaacaatactaaaaattagccaggtgtggtggtgcatgcctgtaatcccagctacttgggaggctgaggcaagagaattgcttgaaccygggaggaggaggttgcagtaagccgagagagtgccattgcactccagcctgggtgacagagcgagactccgtctcaaaaacaaaaaaaagccatttctgaaaatgatttgaagttctagtactgaacattcagataaaattttagttgtcatgtgaagtttgtgctacatgtgggaaaactttaaattgtattggccaggttttt

SEQ ID NO: 134278 - DNA, 569 bp, Homo sapiens
aatatcttctattatctattttctatctatatcttctgtctatctatatgaaaggaataatcgtatcactatcatatgtaatacatatgtatgcattggtcatggtgatatagtaatttgacaaagaaaaactcctcagataaggatgttttgcttcatagatgaggaaactgagactcagtgtttttgtgagttacscatggtcatgttgctaaaccgtggcagaccaggactgggatccaggttgctctgttagaaaagtgttttttccaccataccatggagtctttttccataaactgctgtattatatgtataagccacttcccttttgcatggcgtggctcttaaaagaagagcactttaaatattagttaatcccaagtgaacatttgagtttgagtgatatgattattccttccttatacataaagggagacatctgtgtgaggctgaaagattggccataggtcagaagaatgatttgtttgaattcagaggttatccttggatattggaaaagcccttgcttatggctcagagagaaaaagttatgcaaatcaggacgc

SEQ ID NO: 134279 - DNA, 631 bp, Homo sapiens
tttctgctctaaagctacggatactatgattttatgacagaatttcaggtcaggaaaaaaaaggatttgaagaaagacagaaattttcttttatcaaaacaagtagacagttgtcctgtcactcacatttagatctctagagattattccagatgaaaaattctgtatggcagttgtgagaagtgatgtacttgacaaatagctcccagtamaatttaagggcagaaagcgtatgcctctaattcatgccacacactgatgccagattaatcttcccgtaagactattctgggcacgataaaccctgactctaaatatttccctcactttctaccgcatacagaaatgctatgaaacctccagtgtctcatctcaaactgcctcaaacttgtgttttatgaatcctctcttagttaccagttattagattagaaagaagataactttcctaagtgattatatgcaaaaaagaaatatcttaaaaggatgcagggatatccttgaaacacggcaacaagtacagctgccttcatgaaggctgaactgaggaagggacatcataaaaaaacaagatatttctgtgcttatttatttttattaagatataattttaataccataaaagtcacca

SEQ ID NO: 134280 - DNA, 631 bp, Homo sapiens
tttctgctctaaagctacggatactatgattttatgacagaatttcaggtcaggaaaaaaaaggatttgaagaaagacagaaattttcttttatcaaaacaagtagacagttgtcctgtcactcacatttagatctctagagattattccagatgaaaaattctgtatggcagttgtgagaagtgatgtacttgacaaatagctcccagtacaatttaagggcagaaagcgtatgcctctaattcatgccacacactgatgccarattaatcttcccgtaagactattctgggcacgataaaccctgactctaaatatttccctcactttctaccgcatacagaaatgctatgaaacctccagtgtctcatctcaaactgcctcaaacttgtgttttatgaatcctctcttagttaccagttattagattagaaagaagataactttcctaagtgattatatgcaaaaaagaaatatcttaaaaggatgcagggatatccttgaaacacggcaacaagtacagctgccttcatgaaggctgaactgaggaagggacatcataaaaaaacaagatatttctgtgcttatttatttttattaagatataattttaataccataaaagtcacca

SEQ ID NO: 134281 - DNA, 631 bp, Homo sapiens
tttctgctctaaagctacggatactatgattttatgacagaatttcaggtcaggaaaaaaaaggatttgaagaaagacagaaattttcttttatcaaaacaagtagacagttgtcctgtcactcacatttagatctctagagattattccagatgaaaaattctgtatggcagttgtgagaagtgatgtacttgacaaatagctcccagtacaatttaagggcagaaagcgtatgcctctaattcatgccacacactgatgccagattaatcttcccgtaagactattctgggcacgataaaccctgactctaaatatttccctcactttctaccgcatacagaaatgctatgaaacctccagtgtctcatctcaaactgcctcaaacttgtgtttyatgaatcctctcttagttaccagttattagattagaaagaagataactttcctaagtgattatatgcaaaaaagaaatatcttaaaaggatgcagggatatccttgaaacacggcaacaagtacagctgccttcatgaaggctgaactgaggaagggacatcataaaaaaacaagatatttctgtgcttatttatttttattaagatataattttaataccataaaagtcacca

SEQ ID NO: 134282 - DNA, 474 bp, Homo sapiens
tgagcgtctggtacgtttaaagatctgaaagaaacgtttactatttgttttctttgaaggctgctatctgtgaagtttcatgtatacatcaagagcacctttgctacgtaagcctcctctttccccacttcccataacctgtcttgccactatcacctgatttatctccataacctgtttgtggccctgctgtgatgtcmccattttttctgtaatctcaaggtgttatataaatttctgtacccctttgagaggtgagggtaatcactgtggttcacagagctgatttttcagtgaaccttcagaaggcaaagaaagtttttctttggcttctacatatgcattaaacattttttaaaatttggtctcctaaatttgttggtagattcttggaaaatagcttttatgtaagttttctcttactggacaataaattgccaagcattcattagcaaatagtggggaaagaaatga

SEQ ID NO: 134283 - DNA, 580 bp, Homo sapiens
ctgtaacacagtgaaaacttcagtgtcattttagttattaaatcatggagacaattcgaaaccacaccaaacatactcatttaaatatcttacgatctcttggttttaaaagtttgtaagataactcaaattagccaattttaagtttaaattaaaataatatatataattgttttaatctaatataatttctacaattttaggaagtacagtaaaatccatggaattggatgtgaagtttattagtatattttaaaggaaaatctgcagggcagaaaaacacacaaagactagttaatcctttgtaaacttctattgccacttctgaaatataaattaaatttttaaaaaattttgtttagaaagtgtcaaaaattgttaataaraaaagtcactaataggattggaacatgttacttatgttaatagtgcatactttaatgcttaacatcaggttgctataatttaaatgtgttcctcaaagttcatgtgtggaaaacttaatccccaatgcaacagcgttgggaggagaatcccaataaggggtgattaggtcataagggctttgcccttaggaatg

SEQ ID NO: 134284 - DNA, 690 bp, Homo sapiens
tttgtttcttaataaacatccttgcactttactctgtggactacacctgaattatttcctgtacaaggtccaataatcctctcttgcggtctggatggagatccttttctgataacagtcatgcaagtgtataattagaggacaaaggctatggtaataaactaggttaacttagcaaggtctattagtgcagattcttctctgtgttcctgtatggtattcttttcctctaggtatagggtggacacatctggaatgaaggttctatgacctaccttagagagaggccagcaaattctcttatagcctccttcaagggaaaagggtgarggaaaggtgagagtgaacttcctgcttcagttccttcctgcttctgctccttcttcaaatgccaagatgctatattttggagtagcatgtcctgaaccccatttcacctaaggcttacccaagagttttattttaaatcgtccctctattgtcacatcaggaacactcttggagttaacatttaaatgaaaatgcatatttagataattaatatatttcaacacaatcagagatgccaagattatacaagcaattgctggcagacctttaaaaagtgttaaattccactggctgtttttacatgtaacttgttagaagcagcatttcactctcaaccaatggaggggaaaaacaattata

SEQ ID NO: 134285 - DNA, 501 bp, Homo sapiens
cactgcccagaccagtaatctgagtcaaccaaatctgtgattccatccaggaacagaagacagcaagaacttacttcaacccactatgatttcatctccaacccgaccaatcagcactccccacttcctgagcctctacccaccaaattatcttgaaaaatttggattccccagttttcagggagactgatttgagtaataataaaactccagtctccctcacagaatgctctgaatgaattactctttattgcaatttctctgtctaaattggctctgtctaggcagtaggyaagctgaacccattaggcagtcataccaatatctacatttattaaaaatatgtatttaaataaagtttattattcaaacctcaataaggtttgttgtacatttagattaacaggcaacttgcaacaaatctatgactcttcagaattattctgcctcatgtttggtatccaatgttggaaaaaatagaaaaaaaaaaaaaaaagaatt

SEQ ID NO: 134286 - DNA, 572 bp, Homo sapiens
tctgctcattttttcaggagtcaacagaatggaaggtgggatgggggatcagactgggttagacccgtgataaaccttgggaaaacattctttgctctctgaaattattgcagttttctctagtctgtgggggcccacttagctttcctttrtttatattctttatttactcacctaagcagtgcataaataatttgtttggagcctcattaggagtttaatgaactttaaccgaaggaaatcttgtgagatttctgacaaaagtaaacaaacaggtacagctctacatggccccaccagcttaagtgatggtatttaattttataaaatttaactaagatggaataaaaatgatgttatttctgaaaagcaaaatttgcaatataatgataagtagatgtgaaaaatacacttattctaaaattactaagcaatctgattaaaagatgggaagattcaatgaaagttttcatcatataatgtaatttaaatgctttataacaaatttacataatttcagtgcagtgaaaagcaatttcaggccttctttccacaatttataaatttgtaaa

SEQ ID NO: 134287 - DNA, 568 bp, Homo sapiens
tcaagaggagccaatcaggatgtgtctctgcagcctctttccactggtaaaccagatgcagatgttttgcggtcctaattattgaaggagttccaggattctccaaaataaaatctatcttttttccatttcagctgacacactgtcagatgtgcaaattcyatgcggaggtatttgtttccttctcctggtgtcaggctgttgagtgtgatttgtacttcctgctgctttgcttcaggcaaaggaggaggtgacagcttcaagttgaataattagactaattgcagtacacacccgaggttctcaaggaaagtgcaaatacagaaaatcaattttatagtattattatccaattttacagtgtgtaataatatatttatgaagcatcatcttcaaaaatagaaataaagatgatgaagataaacaaaaataaaaccaaaataggctctatgcccagaaatccagagcaataaactaagtacagcaggaaaacattgcctaaaaggaagagttttcagagacacaaaaaagtgctttgaaaatgctttcttccagattgaaagaggat

SEQ ID NO: 134288 - DNA, 568 bp, Homo sapiens
tcaagaggagccaatcaggatgtgtctctgcagcctctttccactggtaaaccagatgcagatgttttgcggtcctaattattgaaggagttccaggattctccaaaataaaatctatcttttttccatttcagctgacacactgtcagatgtgcaaattccatgcggaggtatttgtttccttctcctggtgtcaggctgttgagtgtgatttgtacttcctgctgctttgcttcaggcaaaggaggaggtgacagcttcaagttgaataattagactaattgcagtacacacccgaggttctcaaggaaagtgcaaatacagaaaatcaattttatagtattattatccaattttacagtgtgtaataatatatttatgaagcatcatcttcaaaaatagaaataaagatgatgaagataaacaaaaataaaaccaaaataggctctatgcccagaaatccagagcaataaactaagtayagcaggaaaacattgcctaaaaggaagagttttcagagacacaaaaaagtgctttgaaaatgctttcttccagattgaaagaggat

SEQ ID NO: 134289 - DNA, 609 bp, Homo sapiens
gtaagcaattttatttcagaaaacattttgaaaaatgtttataatgacttatgtaaatacactcatgattttccttcttgtaattcttttattttcctagtgaattcctcaaccatttatacatttattatgaaattttgggggagcctaataattgagtttgggactttctcatttatctctattccttactgttaagaaggcaacagctgtgaataaatggcttctcatactgatgtttaatttataatttattttcaatttattggtaacatacaactcaagtctcagttccttataaaggcaaagrtttatttgttggttgtattccatgtccaccatagttttgttggagactgtgcttattagagtcactcaagagacccagtgacctcatcttgacacctacctccatgatcaaccacagtaagtggtaagagaatgtgttctcacactggctcttagaactttggcctgaaagtgacacatatttctactgcttacattttgttagccaactgtctcccaaacacatataacttcaggtgttgagaaggcacaatattactatgcctagaagaactgtagtgtttgtggacagcctgaatg

SEQ ID NO: 134290 - DNA, 621 bp, Homo sapiens
ttatcataatttctcctgcttacttttaaaaacaagtgttcatttattgattagtcaagagctcttccatgcaaagtccataggtgaaaaccgaacaaatgttggtacrtcagtttcctccagttgacacagcccacagaagtggaaatgtaattaattagacgtccttgacagttttgcacccaaagtgattctgtaaactagtattttcagattgattgtctgcactgatggacttaactgaatatctcaccactttctcaccaaagtggaaaatgaatttgcacaaccaatgtagtcaaggctgcatgaaggagttatcatttgcctaaaattaatatctgatgtgtatttatttaaggaatgtgactatcaaatcctgtaacacatatctcagggtcattaagtgtcatagcatgaatataaaaagcccgtaaatttctatttcattaagcacatgtgaaaattatttgaatttttatttcaaaactgtcacaaacatagagaaattgtgcatgaaaagtacaaataatattttttctcaaccatttgagcctaagttgctaacatgatgttccaccatccttaaatacctaaggatgtgttttctgtaaacatgga

SEQ ID NO: 134291 - DNA, 628 bp, Homo sapiens
attaataatatagtcattagtcattataaataagtccttcttagacatattgactcctacaaatttccatgaagaaaatgaacattaataaatattcctggagggttcctgataagttttctttagaaaatgttttacataatcataaaagagaagaaaacaaattttcctttatttcartgtattttaaagatttcatatacatacataaccacatcacaaaaaaggatcttgaaatgctatcttttaatttaaaatgtatttttatgtgaccaaagaaagacaaaagaggaaacacttttgatttggcattttaagtatgtcagtgagaatgctgccttcatagaaggtaaaataaaaggaataacagagcagagatttgtgcaccactgctcctgttctgacttccagagagaccattcagccttcagcaaatgaagaataagttcactgttgagtggattcacaaagaatctcaaaattgtaagatatatttagcttcatgagaaggctatgttgaattccttgtgatttcagaatttcttggtaacaggaaatcacaagggagtatatttaggaaagatgtcctcaggtttgcacaaagagactttagcaaacaaaacagaaa

SEQ ID NO: 134292 - DNA, 628 bp, Homo sapiens
attaataatatagtcattagtcattataaataagtccttcttagacatattgactcctacaaatttccatgaagaaaatgaacattaataaatattcctggagggttcctgataagttttctttagaaaatgttttacataatcataaaagagaagaaaacaaattttcctttatttcagtgtattttaaagatttcatatacatacataaccacatcacaaaaaaggatcttgaaatgctatcttttaatttaaaatgtatttttaygtgaccaaagaaagacaaaagaggaaacacttttgatttggcattttaagtatgtcagtgagaatgctgccttcatagaaggtaaaataaaaggaataacagagcagagatttgtgcaccactgctcctgttctgacttccagagagaccattcagccttcagcaaatgaagaataagttcactgttgagtggattcacaaagaatctcaaaattgtaagatatatttagcttcatgagaaggctatgttgaattccttgtgatttcagaatttcttggtaacaggaaatcacaagggagtatatttaggaaagatgtcctcaggtttgcacaaagagactttagcaaacaaaacagaaa

SEQ ID NO: 134293 - DNA, 551 bp, Homo sapiens
tactttattaaatgctggtaactgtcttggtaaaagagaaacaagaaccatagatactgtaaatytgcagaagcatgataagcaaaggaatagtcaaattgatgcattcttcataatcatgttttttgtactttccaccattagtcagtactttgattatccaaattatctagagatactcatgcacgtattttctgagggttgagagagaattatattgtttttgatttacataggtcaggctaagaaaaacttagtgtgatcaaaaccgacatttcagggtagacacacaacagcaaataatgtatttgtatgcatagtctgtgtagaatcttcaaggtgtgatagcattttctaatttcaaagcaacatcctgaaaaattctacaaaagagaacttcataattattttcaggggaatgataaaagacaggcaaagaagtataactttttaagaaataaaaaatcataatttgtttcataaaacacgcacttcatctcccaacattgggctgaagacagtggctggtaaaattacaactccaagtcatt

SEQ ID NO: 134294 - DNA, 551 bp, Homo sapiens
tactttattaaatgctggtaactgtcttggtaaaagagaaacaagaaccatagatactgtaaatttgcagaagcatgataagcaarggaatagtcaaattgatgcattcttcataatcatgttttttgtactttccaccattagtcagtactttgattatccaaattatctagagatactcatgcacgtattttctgagggttgagagagaattatattgtttttgatttacataggtcaggctaagaaaaacttagtgtgatcaaaaccgacatttcagggtagacacacaacagcaaataatgtatttgtatgcatagtctgtgtagaatcttcaaggtgtgatagcattttctaatttcaaagcaacatcctgaaaaattctacaaaagagaacttcataattattttcaggggaatgataaaagacaggcaaagaagtataactttttaagaaataaaaaatcataatttgtttcataaaacacgcacttcatctcccaacattgggctgaagacagtggctggtaaaattacaactccaagtcatt

SEQ ID NO: 134295 - DNA, 551 bp, Homo sapiens
tactttattaaatgctggtaactgtcttggtaaaagagaaacaagaaccatagatactgtaaatttgcagaagcatgataagcaaaggaatagtcaaattgatgcattcttcataatcatgttttttgtactttccaccattagtcagtactttgattatccaaattatctagagatactcatgcacgtattttctgagggttgagagagaattatattgtttttgatttacataggtcaggctaagaaaaacttagtgtgatcaaaaccgacatttcagggtagacacacaacagcaaataatgtatttgtatgcatagtctgtgtagaatcttcaaggtgtgatagcattttctaatttcaaagcaacatcctgaaaaattctacaaaagagaacttcataattattttcaggggaatgataaaagacaggyaaagaagtataactttttaagaaataaaaaatcataatttgtttcataaaacacgcacttcatctcccaacattgggctgaagacagtggctggtaaaattacaactccaagtcatt

SEQ ID NO: 134296 - DNA, 621 bp, Homo sapiens
ttatcataatttctcctgcttacttttaaaaacaagtgttcatttattgattagtcaagagctcttccatgcaaagtccataggtgaaaaccgaacaaatgttggtacatcagtttcctccagttgacacagcccacagaagtggaaatgtaattaattagacgtccttgacagttttgcacccaaagtgattctgtaaactagtattttcagattgattgtctgcactgatggacttaactgaatatctcaccactttctcaccaaagtggaaaatgaatttgcacaaccaatgtagtcaaggctgcatgaaggagttatcatttgcctaaaattaatatctgatgtgtatttatttaaggaatgtgactatcaaatcctgtaacacatatctcagggtcattaagtgtcatagcatgaatataaaaagcccgtaaatttctatttcattaagcacatgtgaaaattatttgaatttttatttcaaaactgtcacaaacatagagaaattgtgcatgaaaagtacaaakaatattttttctcaaccatttgagcctaagttgctaacatgatgttccaccatccttaaatacctaaggatgtgttttctgtaaacatgga

SEQ ID NO: 134297 - DNA, 625 bp, Homo sapiens
tggctgctgattctttggtgaatatgctttttggctgggaactccagagaagaggaaaaataaatggtaggatttgggtgccaagccagccgcaccctaaaccacaccctgaatgcgtcattgtgcctttccataaacttttctgaggattaaagaagagaatgcatgtaaagtgctaagcaccrtcactggcatatagtactcactcaataaatattaattattattaataatacacacagatgacaaatatttgccattggctatctgtacttagtcaggtagtccccaagttttgaaaaaactgctctaaggctgaatatttgaatatttgatttactgaaactggaacaaaatgggtatgttctaagcttactgtgattttttttttccctgtagttaaataaggaagtaagaatttttctttgaggcataccactctcacttctgggcgagttcactctttggaatgttctggctatgcacaggtaagcacctactctttgacctttggggagccaatactggtgaagaaatgtcaatgcaaagtccccagacctgccttgacagattttgcttaatgagtcatgcaagtggggagtgaaatccaccttcctaagatttt

SEQ ID NO: 134298 - DNA, 380 bp, Homo sapiens
tgcctctgaagagcaggcactaacagtgtgggaaggcaggagcygcagagagacacaggcagccctaaccctctcctgatgtgatttgcaggtgggctccaggaagcattgttgtctaatatccaatattcagttttcccattctggctttccaattttcttttgctatcttcttgtacttggtaaatgtttttgaaccttgtgttcaacatttggggaatggcagaagggccacgtccatgattagaggaatccctaaggggagagaacaagtagctgatcaaagtggccatggaaccacagaaggtggaccaaaaagcagactttactcatagtctggataatcagaacctgtaaacatttccaagaaatgttcggaa

SEQ ID NO: 134299 - DNA, 509 bp, Homo sapiens
gatgatgttgattttagtcacttgcttaagttagtgtctgttaggtgtgaaatacataaagttaccattttttttatatacttcattatttgaaagcaaattcctaagtccagctcacactcaagaagaggggaaattaagctccagttcctggaaagagaagtatatacatagagtatatggaatacctctgtaaagaagatttgttccttctctcccattttctgttgatttcgttatttttacataccagtatggactcatcatatttattttatattttcagtaataatcyaatgctacattgtctgttctgttgttcaaattcctccaggtttgaccatggcggtgggtggggggtgctctttgaggctggctcctgtgtttctttgacgcgccccattttttgtggttgttgtttgtctgtattaggagcacctcctcacttcccggcactacaagatgcaccatgttcactttgtgtttacccttctcagacccagaatgag

SEQ ID NO: 134300 - DNA, 460 bp, Homo sapiens
aagcttacatacaatatttttagtgtgtttatagatgtatttttgtttgtttgtttatttttcctgtttggtattctctgatgttcctgtgctttggtggacctgtgattaatttaggaaagttctcagccattattactacaaatattttgttttctcttatccttctggtgttccagagaatgtctaataattcttacatgttcatttgatctttcttttctttgctttgctttcttgytctttttccttttaaattttagtttggaaagtttctatttgcctatcttgaagctcactgattcttgtgaaatgtcaagtttttctgatgacccatcaaaggcatcctttatttctgctgcagtgttttttatttccagaaattccctttgattcatagtgttttcatttctctgcttacattatccatctattcttgcacattatctgctttttcctt

SEQ ID NO: 134301 - DNA, 460 bp, Homo sapiens
aagcttacatacaatatttttagtgtgtttatagatgtatttttgtttgtttgtttatttttcctgtttggtattctctgatgttcctgtgctttggtggacctgtgattaatttaggaaagttctcagccattattactacaaatattttgttttctcttatccttctggtgttccagagaatgtctaataattcttacatgttcatttgatctttcttttctttgctttgctttcttgctctttttccttttaaatttyagtttggaaagtttctatttgcctatcttgaagctcactgattcttgtgaaatgtcaagtttttctgatgacccatcaaaggcatcctttatttctgctgcagtgttttttatttccagaaattccctttgattcatagtgttttcatttctctgcttacattatccatctattcttgcacattatctgctttttcctt

SEQ ID NO: 134302 - DNA, 635 bp, Homo sapiens
gaggagattagggattttagaagacatttctctctcttaatgagccttgctttaaatttaattatcttcctgtgcacataaaattcctattttgtttgccaaaaactgagtactatctttttcactctgccttcatgttattacaattctattttccctctgaacttccctgccctgcatcctcagaaagagtagatagrtgcttcaggctgacttggatgaaaatcagatacatggaaacacaaaagagacaagcatatttatatatttccaaaattattaccccaccttactatacattactaaagaaataattagtggttcagaagtgtgcatgtacaaacactgtcatctgataatattgacaaattaaattacaaaagaattttctattgctacaaattatatatgagagctccagcttcactgaatccttgtaaggattatcattttgaaaatgtttactaacttcccaatcaaaggataatcaaggaataacatttagattttcttcattttattttttctcctaacctttctaattctgcaagagagtaagcttgtactcataagaaatacaatataagaatctgatgtagggatgtaacatcacaaggtatcaagcacagtcagta

SEQ ID NO: 134303 - DNA, 424 bp, Homo sapiens
ttttgttttatcttaggcttaatattttcagaattccatgataaatagtgtgaaaattgtgactaccaagtatctcacaagagaaaaagagaaagcttataacraaagtccagaagtgtgacttgagctctcttagtgatctcagataaacatctctaggcttgtcaactccaccaactgtcaaatgggggcaatagagtagaagacctttacagttctgcttttttctgaaaacctttcttttcaatgaaactggcagctttgagaaccagtcagttgactatgattttactgaatgattggagagaaaactctatattaagccatgctccactgcagaggtattttttccaggttgagaacagctatggaacaatgcaattggagcactgatgtaattactcatgtccatggaagtgtgcag

SEQ ID NO: 134304 - DNA, 402 bp, Homo sapiens
ttcagaattccatgataaatagtgtgaaaattgtgactaccaagtatctcacaagagaaaaagagaaagcttataacgaaagtccagaagtgtgacttgagctctcttagtgatctcagataaacatctctaggcttgtcaactccaccaactgtcaaatgggggcaatagagtagaagacctttacagttctgcttttttctgaaaacctttcttttcaatgaaactggcagctttgagaaccagtcagttgactatgattttactgaatgattggagagaaaactctatattaagccatgctccactgcagaggtattttttccaggttgagaacagctatggarcaatgcaattggagcactgatgtaattactcatgtccatggaagtgtgcaggctt

SEQ ID NO: 134305 - DNA, 398 bp, Homo sapiens
aaatgaattcaggtaacttggagatccatttgattcaaatactactagtactgataggttggcagwcacaggtgggtttactggagtgagttcattcctgattggcttattttcagaagaaatggaagacaccgattgcttggcttagaaaagcgtgtttcctcatggacacagagaggggaacaacacacaccatagcctgttgggggtggtgggtgaggggagggaacttacaggacaggtcaatagtttcagcaaaccaccatggctaacgtatacctatgtaactaacctgcacgttctgcacatgtatcctgtttttccttttagagtaaataaagttaagaaagaaaggaaggaaggaacaaaggaaggaaggaaggaaggaaggaaggaag

SEQ ID NO: 134306 - DNA, 589 bp, Homo sapiens
gttcattaaataaacgggatagccctgagttccacgtctgcggatttctttgcttttgttgactgtgttttcaaaatgtgagttgcaaaatgaaaatataagtgccttctattttggggaagagagagattacactacactgtttcacatattgattcctatagttttgtagcctgtacctcaamttttgtgccactaaaatagagaatactaatactgactttcttcacaaagcatgaagatgaactaacatatctttaaaattatctgaaaagatgtaatttatcttttttttttttttgagatggagtcttgctctgttgcccaagcaggagtgcaatggcatgatctcggctcactgcaacctctgcctcctgggctcaagagattctcctgcctcagactcctgagtagctgggactacaggcatgcaccaccacacctggctaatatttgtatttttagtagagacggggtttcaccatgttggccaggctggtctcgaactcatgacctcaagtgatctgttcaccttggcctcccaaagtgctgggattacaggtgtgagccaccgtgcgcagcctgaaaa

SEQ ID NO: 134307 - DNA, 589 bp, Homo sapiens
gttcattaaataaacgggatagccctgagttccacgtctgcggatttctttgcttttgttgactgtgttttcaaaatgtgagttgcaaaatgaaaatataagtgccttctattttggggaagagagagattacactacactgtttcacatattgattcctatagttttgtagcctgtacctcaacttttstgccactaaaatagagaatactaatactgactttcttcacaaagcatgaagatgaactaacatatctttaaaattatctgaaaagatgtaatttatcttttttttttttttgagatggagtcttgctctgttgcccaagcaggagtgcaatggcatgatctcggctcactgcaacctctgcctcctgggctcaagagattctcctgcctcagactcctgagtagctgggactacaggcatgcaccaccacacctggctaatatttgtatttttagtagagacggggtttcaccatgttggccaggctggtctcgaactcatgacctcaagtgatctgttcaccttggcctcccaaagtgctgggattacaggtgtgagccaccgtgcgcagcctgaaaa

SEQ ID NO: 134308 - DNA, 525 bp, Homo sapiens
ggccttttggagcaagcctgtagtcatagatactctggagactgaggtgggtggattgcttgagccaggaggtcaaggctgcaatgagctgtgaccataccactgcactctagcctgggtgacagaatgagaccctgtctcaaaaataaataaaataaaatggagtacacatacaccacagtatactatgcaaccataaraaagaatgcaatcatatcctttgcaacaacatggatgtagctggaggccattatcctaagcaaactaatgcagaaacaaaaaattaaatactgcatgtaagtgggagcttaacattacttgtaagtgggaactaaacattgggtacacatggacataaatacggaaaaatagacactggggactactgtgtcaggggagaaagggataggggaaagggctgaaaaactacctactggatactatgctcactacctgggtggtgggttcaattatgccacaaacctcagtaccatgcaatatacctttataacaaaactgcacccc

SEQ ID NO: 134309 - DNA, 364 bp, Homo sapiens
tgatatttccttctgcctaagtggacaaaattgacagactcaggttgggctgatcccattctttttaccagaaactaggaaactggatggagaaactggaaaatgtaagtagttagaaggtagccatttttatggcaattctaagaaaacaattctccccaaactcctgttgccaggctgagtctccagatgtatcccagtttctgccagaatgtttcygttacatattcatacaccattaaaatattcttctcttcatgttttccttatctttaataactgtaccattatttacctactattcaagccagaaaccagaaatcctaagactgatctttctctccacattcagttagttacttgg

SEQ ID NO: 134310 - DNA, 431 bp, Homo sapiens
tctataaaatttgggattatgttaaatggctaaacctaagaataactggtgttcctgaaaaaaagaaatctaagtctggaaaacttatctgagggaataatcaaggaaagcttccctggcctcactagagatctagacatccaaatataggaagctcaaagaaaacctgggaaattcatcacaaaaagatcatcacctaggtacacagtcatcgggttatctaaagycaagacgaaggaaagaatcttaacagctgtgaggcaaaagcatcagataacctataaaagaaaacatatcagaataacagcaaatttctcagcagaaccctgaaagccagaaggtattggggttctatctttagcctcctcaaaaaaagtaattgccagtcaataattttgtatccagcaaaactaagcttcataaatggagga

SEQ ID NO: 134311 - DNA, 525 bp, Homo sapiens
gtggaacacacctcttattgtgcttacacccccactgagttgtggaagttaggtaagcaatgccagcaacatccaggggagcccctctctgcctgaatgctccatctctgcgatgaaggagctgacacgtttcctgctccrcctccaagatgaaaaagctggcttctttaattacagtctgaactgatgcacgtgaaatagcaaaaactgtcagtagatagcagtcgtatactgatttggtgcaagtaccccatgagctgggtatgcggcaggctatgtttgatccaaatacctggggccagatgatgaacactttgtctcccacatgagggatcttatgctgggctcagccccactgagtgcttttgcctctctagccactgttctcaccctgtatgtggagggctgcatacatgaagtgactattactatggcaactctcggggagacagaaggccattggcaggactggggagtttgtaccataaagaaggtgaacactcctcatccacaggtaaccacccc

SEQ ID NO: 134312 - DNA, 619 bp, Homo sapiens
ataaatcccttctccagggattttcgtggccctgaagaagacagaccagtctgcataaataagcatcagaagttttcttatctctcatttgttctaaaaaccsatttgtctttcttaaaggaacctatttgttcttcccataggaaccttttctccctactccctttcccctcctaagttagatatatcaacatcaaattctaatctcccctctgagttactcatcattgagcactcctgtctgcatccacattgcacacataaatgaacttttttccttgcaaacctgtcttgtcagtttaattcacatgcccccaattacttaatgtaataaggtagagggaatttttccccctccacaacttcagtaaactcataagccagaaggattcatggtccacaggcagaaagaccctggcaagtataacagatttacgtgaatgataccaaagagctacgttctagggtaactgaactataactagaccagtcctcaaaggaactgaaaaccaaattcgaatcattcagtcctgattagagtgtggtgaactgctttgattgctagtgccatagctagctgcacaccagaaatcctctctagagtaagatgccattgtaa

SEQ ID NO: 134313 - DNA, 398 bp, Homo sapiens
agatcttccttgtcctcaaggattttatastcagtaggaaagatatctatctaaagattacttcaactcagtgtggtaagtgaccaaataaaatggtattcacagtgtgggagtccagaggagggactcttagctcaatatgtggtttaggaaatggcttccagaagaaggtaagtattcaaggttaaagggttttaaagtgaagaacatgagcaaaggtaccaatggaagaaatagcagagtgtgctgagaaactggcacacaaagggacaaagagagggacaaaagaggagagagagaaaagggcaagacatggagacagctttgccttggtgcagagatttaggaaccaccagaaagttttgagcagagtgaagtcaggggaagcataattagat

SEQ ID NO: 134314 - DNA, 398 bp, Homo sapiens
gattttatactcagtaggaaagatatctatctaaagattacttcaactcagtgtggtaagtgaccaaataaaatggtattcacagtgtgggagtccagaggagggactcttagctcaatatgtggtttaggaaatggcttccagaagaaggtaagtattcaaggttaaagggttttaaagtgaagaacatgagcaaaggtaccaatggaagaaatagcagagtgtgctgagaaactggcacacaaagggacaaagagagggacaaaagaggagagagagaaaagggyaagacatggagacagctttgccttggtgcagagatttaggaaccaccagaaagttttgagcagagtgaagtcaggggaagcataattagatttgtgtatagaggaagatct

SEQ ID NO: 134315 - DNA, 562 bp, Homo sapiens
tatggactgcatctggggctccatttgaagaacgatttgtagttttacagcttcaattctggaagatacaaacttaacaaggaggttaaagatacagggatttaaatgtatggcctgcagtgcagaggattatttctttggcacactttacaggccctgactatctgcttgatagttttgaaaaggcctggtccagtaaataataatttggccatctgatgggtgctatcaatgcctaagtggaaggtttggtgaagggttttaagtaatttctattggttagctgcaggcaaaagtatttttccttcttcggtggctagccatctggaggggaggaaagtatgtccttgtgaggttccttattttatttttcctgctgagtactggggcttggtttcccagaggggattaccctatactaggggtccttctataagcatttttaatggagggtcctgccttgtggctcttttgactttaatatccgcttggtggttttcttctattttaaagctcctcagtcacagcttartggctgggagaagtatctagagactggctg

SEQ ID NO: 134316 - DNA, 464 bp, Homo sapiens
tgcatgtgacataagattcacctgaggatctcgttaaatagccagttctgactcggtaggtctagagtggggtccaagagtccgaagttctagcaagatcycaggtgatactaatgctgcttgctggtcctcacaccacacctataacgaaggtctagccctgaggttcaggtctaagaaggagctccatcggccagcagagagggcaacccagacttgcggtaagacacaagtaagcatgcccaagcatgacctggattcatatccagggaggatgaccccaggggaagacaagctaaggtccttattgattagggaaatactaactctaacttgctgtactttgtagaacaaacttaagggtgaggtgtttgcaaccccaagctagcaaacagtggacctacctacacttaaatatccaaccatctcagaatcagaagagtgaacacaaatttttttttttt

SEQ ID NO: 134317 - DNA, 502 bp, Homo sapiens
caaaattttaaaacactaaaaacttaaatgcaatgttttcattacagtgattcaaaagtgaaaaactaaaggcatgtatactaaagtagttcaaagtaaattcacacattatttttgtagggagtaactaaatgagaaacatagagcttggrtgagttcttcaaagaaaaacaggatatcatccttttcattatgtcataaagtatgatgttgacagtgaaatgacctatagcactgtataaatcaaatgttgcttctgcagactttaaaaagtatgctaataaacagagtgaattagttttctatcactacgtagcaaattaccgcaagttcattggtttaaaacaatgcacatttattatctcatagtttcggtgggtgagggatctaggcacagtgtaactaggttctctgctcaggatttcacaaggctggattcaaaatgtgactgggtctgcattctcatgtggagcaggaaggtctctctcaagctcattcaggc

SEQ ID NO: 134318 - DNA, 586 bp, Homo sapiens
agatctaccagataaacattcagtcaccagtttaggacacagtatagagaaatttcatgacaaaacactaattacaatgagtaatgtacaagtacacagatcaactacggtttatctttcaatatgagccacagccccttcctgggccattctggtccctagtaaggtaatattcctccyggctgatttctccagggtttattcttgagctcagacttaaccaggctactgcaatcctaagccacgatgatgctatttgcgttattaaggtaacactaattgctatgacagataaactcagaaattttgttccatgcaattactcaggaaccagactgtcaaaggctctgctgacttcagcacctggtttccaaggtcaccctaaccactgacatatagccagcagagggggaatgaggatggcagtcacctaggaagcattgatgggccaggcctagaagtgatgtacatgacttcaactggcattccattggccagaactcagtaacctggtccctcctgaatgcaaaggtcattgggaaatgcagtccccatttcagtagcaacttcccagaaacagtactct

SEQ ID NO: 134319 - DNA, 598 bp, Homo sapiens
ctttactgcttgtggagttggatgggagaacggattggggcaacacttagacctggccacagatcagtctgcctacaccaatttctagttctcttctctttccctttgcctcctacaaagatgaaataggcctggatacactcagcccaggaagaaaagccctttggataggaagaagagaagaaaggagtctcactagacatgtgaagatccttcatccaatcccaccaactaaataagggaatagagagaagttacaagaagtgtgattccagtagtttcttttcagagaagagcagttgtcttatagcatagtgtagatggagaaaccatgccttctgtaacgtaccagaagcccaagtctaccctcttcagacaatcctgccaccacagattggcttttaagaggatctgaaaagccaatccacaggcatctacagaggatttgtgacttggaggttggtacattttcgggaatgtcaaaatgttcactttatggttatgtggagcacagtagctgcctctgaataaccagctcgcaactaccactgcttctgctgactgcygaaagccttagcatcatgcagctgatggttta

SEQ ID NO: 134320 - DNA, 636 bp, Homo sapiens
ccaccatcaaagtccgatcaagaggcataaaatgatctgattcagctagtgcatttgcttactggttttctttttagctcatgtttctctcctgtttatgttttattttgtttttaattgacacataatcattgtgcatacttatggggtacaatgtgatgtttccatacctgtgtatattgtataatgatcaaatctgggcaattagcatatctatcacctgctaacacttgtcatttctttgtggtgagaatattcaaaattctctcttctagctattttgaatgacacaatatattattgttaactctagttaccctactgtgcaacagaacaccagaacatcatttgcagcaaaggtaaacctagagagcattatgttaaatgaaataaaccaaacacagacggacaatacctcaagatgggactcatatatggaatctaaaaaggtcgatcttagaattacagagtagtgtaatgattaccagagtctggcgaggctagacrtggtggcgatggggaaaggttggtcagtaggttcctcttcttttgtttaatgtgaaattggtgctgttaagtttggctttgatatgcccagaaacagtaaaggaaagaggaaagagcatagttgttggg

SEQ ID NO: 134321 - DNA, 591 bp, Homo sapiens
tctctacctcttacttggcctttgactccaatgctacatatccaactgcctccaaagtatctatgcttgcctgtttctctatcatctcaaacattagaaaacccctcattttctctttcctccaaagccagttgcctctaaataaattatccactttgagatayaaaatcatcagttttccattcattcaggcataaattctctttcttcccaggtctattcagccatgctgccagggaggttcttcctttaaaatgtcgtcatctttttattgtactccaatgccactaccttatggtctttataacctcagagaactagcatcctaataagttttcccttcacactcaccctattctcatccatctttgctcatgttcttacatgttttcccatggagtcacatttctacttaaaacacatatgcatggtttcacatcaccaggaagacaagtacttgacatcaaaatactccaacaatctaaatctttttattacatcagtgttttacatgcaatttgtttcaatatgcttgtgatattaaagctttattactaactaccattctataacacttccatttcagccata

SEQ ID NO: 134322 - DNA, 511 bp, Homo sapiens
acttctttctaaagtttctaacaaccatagcagataactgtgctggcagtcagataattggacatgaattgttattagaaaataaagcatggaccttttgatactgatattcatctatccatccatccatccataaaaatgccagtattggaagaaaaaagtgatttcgactaagtcgaatgctggattaaccrcactgcggtgtggtagaggcatcaccagctaccaacttcctggcatatttcagccgtggtttagtgtgtttcctgctaagctaaaatgaaaggttgacttagacagaatggtttctgatttatctttgtgcctgggagctaggcactgtgaacctgcctagctcttggtgggcaaaaggtagtcaacacatactgggtgaaataagtaagtatgtgtgtgcattggttagtgagccagttagttaaatcttttaggatttggtagtatttgggtcacatggaattttaaaagatctttgggcaacacctaatcactg

SEQ ID NO: 134323 - DNA, 424 bp, Homo sapiens
gaattcacaaggaagactcgtaaaatggaaactacggttgctgaaacacgttgtctactctattaattttctgccaaacatttcatgtgcttttagttcttcattgagcatgacatacttcaaatactcaaacctatttccttcttgtaggaatagctaggcatttcctcccacggtccaaggtgagrctgaagataagtagaatctccacacttatttgtttactttggtccagactatagagtcaggttaaaagccatctggggaaatagccagtagccaatgcttattagcgtactacttgggtaggtgggaggatgcaagagctgtcaaacagcagccatcctgatgagaaagtgaagaaagccagaagcagcgtctcttctgtggcagtcacacagggtcccttgatactcagccccca

SEQ ID NO: 134324 - DNA, 569 bp, Homo sapiens
tttattgtccaatgaggcagaaagttttgcaaacacacacatatacatagtcactgtaaaagtatgtacaaagtgtgataatgtttaccaatttcaatgtacctacatttctgaaggagtaagtyactgacttcacagaaagagtgtttgatctggttttgaataatgaataggcaaaagaggggagaaaggtaaattcaaaaaatgatgcagcaaaactaaaaatattccaaatttagcaataagagtacattcaaaagactgaaaaatagaaggctctgaaaaagaatccaaatagactatcttaattatactaaagattgttaagagctgacagtaagcaattgttttattgctgtcaagaatatgataaacagtgtatttgtctgttctcatggtgctaataaagacatatctgagaccgggtaattgataaagaaaaacaggtttaatggactcacagttccacaaggcttgggaggcctcactatcatgatggaaggtgaatgaggagcaaagtcatggcagcaggcaagatagctcgtgcaggggaacccccatttataaaa

SEQ ID NO: 134325 - DNA, 569 bp, Homo sapiens
tttattgtccaatgaggcagaaagttttgcaaacacacacatatacatagtcactgtaaaagtatgtacaaagtgtgataatgtttaccaatttcaatgtacctacatttctgaaggagtaagttactgacttcacagaaagagtgtttgatctggttttgaataatgaataggcaaaagaggggagaaaggtaaattcaaaaaatgatgcagcaaaactaaaaatattccaaatttagcaataagagtacattcaaaagactgaaaaatagaaggctctgaaaaagaatccaaatagactatcttaattatactaaagattgttaagagctgacagwaagcaattgttttattgctgtcaagaatatgataaacagtgtatttgtctgttctcatggtgctaataaagacatatctgagaccgggtaattgataaagaaaaacaggtttaatggactcacagttccacaaggcttgggaggcctcactatcatgatggaaggtgaatgaggagcaaagtcatggcagcaggcaagatagctcgtgcaggggaacccccatttataaaa

SEQ ID NO: 134326 - DNA, 559 bp, Homo sapiens
gaggcagaaagttttgcaaacacacacatatacatagtcactgtaaaagtatgtacaaagtgtgataatgtttaccaatttcaatgtacctacatttctgaaggagtaagttactgacttcacagaaagagtgtttgatctggttttgaataatgaataggcaaaagaggggagaaaggtaaattcaaaaaatgatgcagcaaaactaaaaatattccaaatttagcaataagagtacattcaaaagactgaaaaatagaaggctctgaaaaagaatccaaatagactatcttaattatactaaagattgttaagagctgacagtaagcaattgttttattgctgtcaagaatatgataaacagtgtatttgtctgttctcatggtgctaataaagacatatctgagaccgggtaattgataaagaaaaacaggtttaatggactcacagttccacaagscttgggaggcctcactatcatgatggaaggtgaatgaggagcaaagtcatggcagcaggcaagatagctcgtgcaggggaacccccatttataaaacca

SEQ ID NO: 134327 - DNA, 535 bp, Homo sapiens
ttcttgtctggcttctttcactcagcatactgtttctgagactcagcggattgctttttaataatataattacaactgagtctcaaagatttgaaaaagtcagaatttcttataaaattggacattgtggtttgctacctgctgaatgatgaagacgaataatgtacttcagtgccctgagatagtttttgtctactgtaataaaatatttccagtcttctctgtttttgcattcttcaattattaccttgaagttttaatgttttttaaaataatgaattggcctaattgtagcctcagcacaactactaagttacacattcaataaaaagactttttctttgtaatgttatatgttaatggtcagcctcctagatactgatgaagcccatcaatttctgatagttaagatcaattaaccaattagttacccattttcatttttcctgtatattctttgtagatcacttactaaaatgattttctaagrccttcactttcttaagtaaagaaaaacaatttgactgagacttgg

SEQ ID NO: 134328 - DNA, 587 bp, Homo sapiens
tcataattctttccacttgcctaatctctagggtttattattaacttcttcaggtgttcctccaggatacagcagaacrtaatttaaggggcactcttagccttaatgaatttcagatcaggaatgaaggaataaaagagacctcaaaaatagctctagaagacacttttgacagtttccacaggtatctattacattctttctttaaatgtaaggttgcctgttgtggtacacttctactaccaatgtttagaaagagaccaatgcttttaacaggatgtcagaccacaggaaaattcatggtgtgacgcatgcgcagcaacttgaatgtgccttataaaatcccaggtttttcatcttctggtgttccaggacatttcctgattcattgtcatacaaattgtgtttttgcccagatgatcattgccacgtttctattatgtactcatatctccaggttttcaattgcaaacaagtcactcttggcaggcagggtcttttcataattttttttttctggtttgttttttgtcttttttgttttttaaaccttgccatgtttttgattggtttggggctctcccatg

SEQ ID NO: 134329 - DNA, 456 bp, Homo sapiens
tgattttttaaatttggatacagtaaggtccactcctcatgctataaagttttataggcttttacaaaggcatagagacatatatccaccattataggataatacagaatagcttcactgccttaaaaaacgtactttcatctattcaccacacacatgctctctccaaactcttggctacactgagctttttaccatcatgattttgttgccttttccataatgtcmtacacttggaatcatgtgtccttttcaggatggcttctttcactaaacagtatgcatttaaagtgtttttatggcttggtggcttatttcttttaatcatttaatgttattatattgcatgggtatcacaccatttttattaattgacctattgatggacatcttggttgctttaaagtttgggcaattattaacaaagataatgtaaacatttatgagcaaaatttt

SEQ ID NO: 134330 - DNA, 558 bp, Homo sapiens
cattattgagttcaaaatctgtgtctaaataaaccccacaaacccatagcagatcacttattttgtgccttggctttgccacatcaactccagcagtaaccacctcagcaatatcacacaaacaccacctccccctaaagttcaatcagttctgtgtccattgggggtagtttttctaacaaataccactgttttcaggaaaatatttttatctctgaatmctttcagatgtgggctgtcttgtggaggttcagaggtatatcaaggtgacccaattttcatgtccctagctttgaaaccagttcttttctactgatatgagggccacttgaagatacgtggagatttctttctcaaggagtgtgaggaaataggaagacatatgaagatttttcccgagtctgatagtgtgttctcctcctattccagattttctaaaacctttattctgccttttcttgggcctcctctccttcctctcatcctcctcaccacctgtacagagccagtagatttggggtcagctctactttttcattaaggccaagaaaagaattg

SEQ ID NO: 134331 - DNA, 464 bp, Homo sapiens
acttttccctttggataccaggtacttttctgagctggatgtatctaatygtcacaactgttctttggggtgaattaagccaggcccagggttaagaagaaaatacacccaacatatttacagcagcttagtttaaaaacaatacccactacaataataaaatgaggggtaatctcaccaagtcctaattacgttggaaaattttgctcagcaacctaaaaagtttctgtgaaacttgggaaccacaaagaaaaagcctaagttcagggaaaggaaaaaaaaatctgtttctctgtcttccgcatgctgtctcctgctcaccctcattcagtccctgaagctgcttcttcccactgtgggctctctctataaccacaagccaacagcttgttgggtagggaatccaccttcagacctcaaacctggtgtgaagaggcagagcatgccatctatgtgccactgct

SEQ ID NO: 134332 - DNA, 464 bp, Homo sapiens
acttttccctttggataccaggtacttttctgagctggatgtatctaatcgtcacaactgttctttggggtgaattaagccaggcccagggttaagaagaaaatacacccaacatatttacagcagcttagtttaaaaacaatacccactacaataataaaatgaggggtaatctcaccaagtcctaattacgttggaaaattttgctcagcaacctaaaaagtttctgtgaaacttgggaaccacaaagaaaaagcctaagttcagggaaaggaaaaaaaaatctgtttctctgtcttccgcatgctgtctcctgctcaccctcattcagtccctgaagctgcttcttcccactktgggctctctctataaccacaagccaacagcttgttgggtagggaatccaccttcagacctcaaacctggtgtgaagaggcagagcatgccatctatgtgccactgct

SEQ ID NO: 134333 - DNA, 464 bp, Homo sapiens
acttttccctttggataccaggtacttttctgagctggatgtatctaatcgtcacaactgttctttggggtgaattaagccaggcccagggttaagaagaaaatacacccaacatatttacagcagcttagtttaaaaacaatacccactacaataataaaatgaggggtaatctcaccaagtcctaattacgttggaaaattttgctcagcaacctaaaaagtttctgtgaaacttgggaaccacaaagaaaaagcctaagttcagggaaaggaaaaaaaaatctgtttctctgtcttccgcatgctgtctcctgctcaccctcattcagtccctgaagctgcttcttcccactgtgggctctctctataaccacaagccaacagctkgttgggtagggaatccaccttcagacctcaaacctggtgtgaagaggcagagcatgccatctatgtgccactgct

SEQ ID NO: 134334 - DNA, 589 bp, Homo sapiens
ccttccatggtctgtctcagggtaagacccactggcttgggaatccagccagccactggtagcaccctcacaccyccctgacatggagctcccagcggcagggtgtgggctgccatctttactgtttcacagccttagctattggagcctctgggttctagggagtccaaggcagctagggactggagcagccaccctgcacagcccagcagctctacagagaagcagtcagactgcttattcacgtcaatcccaaatcctgtttcttttcaccaggtgaaatctctccactggggtctccagtcacctccaccactgttttctggcagacagcagtttcaaatgtccctgggatggcgctcccaaagggaagggtgggttgccattgatgctgtttagcagccttagccattcttgcaaatgccattcttttgtgctgggggtggtagcagacccccagcacagcacagctgctctaccaaaaagtggccagactgtttcttcacctgattccctgatgctgcttctcctcagtgggcggcatatccccaccggggtctccagccacctcgcgcaggtatgttccagc

SEQ ID NO: 134335 - DNA, 589 bp, Homo sapiens
ccttccatggtctgtctcagggtaagacccactggcttgggaatccagccagccactggtagcaccctcacacccccctgacatggagctcccagcggcagggtgtgggctgccatctttactgtttcacagccttagctattggagcctctgggttctagggagtccaaggcagctagggactggagcagccaccctgcacagcccagcagctctacagagaagcagtcagactgcttattcacgtcaatcccaaatcctgtttcttttcaccaggtgaaatctctccactggggtctccagtcacctccaccactgttttctggcagacagcagtttcaaatgtccctgggatggcgctcccaaagggaagggtgggttgccattgatgctgtttagcagccttagccattcttgcaaatgccattcttttgtgctgggggtggtagcagacccccagcacagcacagctgctctaccaaaaagtggccagactgtttcttcacctgattccctgatgctgcttctcctcagtgggcrgcatatccccaccggggtctccagccacctcgcgcaggtatgttccagc

SEQ ID NO: 134336 - DNA, 456 bp, Homo sapiens
aaatttataaatgatggaaaaatgatgtcacaagtatctaccgttcacatacacattctggggatttgatccagggaaggaaagctgtaggattatttgggggatagaggctattattccctacttttgggaatagtaaattgtctgattcctataaactgtgtgaattggagagtttgaaattagatatgtgactctgtatttgacaccaggctacttattttctattatcacaaaatagaggacagattagagatgaagccataaatagttaacatagtgctagcaaaggatgatattatgctgctcttgcaacttgwatccccagatctacatgaaccttaaaaaaactagaatcccagtggtttaagcagtaaactaaatgggcattattgactctcagtaaaagctgaatggaaacttttgtcattgtctattacaatcccagcaaatatg

SEQ ID NO: 134337 - DNA, 544 bp, Homo sapiens
gggacctgaaccttatgggggaataaatatggcatgaactgctgtgggattaaaagagaaaaggaaagctggagggtctggaactaaacctggggttcccattcctcctactgtgtgctccagattctctcatcataaagttagaattgagctggccatcaggaatagccagaggaatatgtcagcttttgtgttctccctaaccttcccacgttatttgggggatactttgctcctsgaaagatttttaaataattatgtgccccccaccatccctgcaagcttaagggtgagaagtcccatttacttccatgacactattaagcagcaatctctttattctgctcatcatgggacagccaagatgtgtgggtatcttaggggagctgtgggtccctgtctgctggcatggcacaggcatcagaggaagaagaacctttttataccctagccatctggttagttttctccctagtttttcaaaaaactaagcctgcttccagtccccactgccttgttcatacagaattccaggaatgtcctg

SEQ ID NO: 134338 - DNA, 544 bp, Homo sapiens
gggacctgaaccttatgggggaataaatatggcatgaactgctgtgggattaaaagagaaaaggaaagctggagggtctggaactaaacctggggttcccattcctcctactgtgtgctccagattctctcatcataaagttagaattgagctggccatcaggaatagccagaggaatatgtcagcttttgtgttctccctaaccttcccacgttatttgggggatactttgctcctcgaaagakttttaaataattatgtgccccccaccatccctgcaagcttaagggtgagaagtcccatttacttccatgacactattaagcagcaatctctttattctgctcatcatgggacagccaagatgtgtgggtatcttaggggagctgtgggtccctgtctgctggcatggcacaggcatcagaggaagaagaacctttttataccctagccatctggttagttttctccctagtttttcaaaaaactaagcctgcttccagtccccactgccttgttcatacagaattccaggaatgtcctg

SEQ ID NO: 134339 - DNA, 447 bp, Homo sapiens
tggagaaataggcagcaatatgatcataataggagacttcaataccccattttcaacaaaggatggatcattttgaatgrtttacagtaaaccaatgaagaagcaaatttaaaagattgaaatcatatcaagtatcttttctgactataataaaaaataaaaataaattaacaggaggaaaattggaaaatttacaaattgtatatattatatatattaaattatatatattatcatatataatataatgtattatatatgataatatatatacacaacatactcctgaataaccaagaggttaaaaaagaagtcaagaagtattttgaagcaaaaacagaaacacgacattgcaaaatttaaggaatgcagcaaaagcagttctaagagggaggtttctagtgatacatgtgtacataagaaggaaagaaagatttcagataaacc

SEQ ID NO: 134340 - DNA, 602 bp, Homo sapiens
accttaaaacttaaagtataataataataaataaataaaaatatatatatgcaagcagaatggaatttcaatgtaaaataasttattgttatttatacatgatgtgtaaattttgtattgggatttcctttaattattaatctccttttttcctcaattatacacaaccatctcctgctctctgaatttccttggttcatgttgtattttcagctgattttgaccaactttctttctttctttctttctttctttctttctttctttctttctttctttctttctttccttccttctttctttctttttgattttgctttaagttctggaatacacgtgcagaacatgcagatttgttacataggtatacgtgtgacatggtggtttgctgcacctatcaactcgtcacctaggttttaagcacaatttttttaatccagtctctcattgatgggcatttgggttggtttcctgtctttgctattgtaaataatgctgcaataaacatacacatgcatgtatttttataagagaatgatttatatttctttgggtatatactgaggaatgggattgctgggtcaaatggtatttctggttct

SEQ ID NO: 134341 - DNA, 652 bp, Homo sapiens
ctattttaactttcagcaacatctgtaaaaagagaaaaaaatataaaactcatgtcaattcgatctctaccttttaaaaagtggcaaaagacttgaaattgtagggaaagagctgattcctttgctttgtacatactttatgtcaggtagagaatgtggtgcagattttaatacgtttaaattcactgctattcttatctgaagatggttggcattatgtaattcatttagaagtaattaatgagatggataccagacaaactaaatgggacaagaaaataaaaatttggggtaaagatgtgttaaagcaaaaatcaacttatagaaagagaaatataaaaatgyttgctgagaaatttactttgattacccacagggtctttgaattggactaaaaaatcccaaagatgtttttaaaaatgtgtacatgtttaaataagttaatgtctctacatatctttattttgtttacaaatttctcatctttataaaaaaaggaatatataattattcattgagaaacatttgggaaaacatttctttatgatatgcccttgaaataacatctgttttgtataatgtagataggagaaaaatccttatccatccacacagccacttaaagtgtaagaatatataaagtataatgtga

SEQ ID NO: 134342 - DNA, 566 bp, Homo sapiens
cccgtttacctgcatttgtttatccattaccccttcttcctgaaacaccacaaggaattctggaaacagggatgatgtcttatttaactttgtattctcagcacccaacacttggtctggaattcaacaggctttcaactaatgtttacmcaatgaatgatgttgaaaggagcaaagaggccgggtgcagtggctcatgcctgtaatcccagcactttgggaggccgaggcagtcagatcacctgaggtcgggagttcgagaccagcctgaccaacatagagaaaccctgcctctactaaaaaaaaaaaaaaaaaaaaatcagccaggcatggtggtgcatgcctgtaatcccagctacttgggaggctgaggcaggagaatcgcttgaacctggaaggaggaggttgcggtgagccgagatcacgccactgtactccagcctgggcaacaagagtgaaactctgtctcaaaaaaaaaaaaaaaaaaaaaaaaaaaaaggcaaggagcaaaggatcataaacaattcaaccttatgtccaacattctctgctgattggataggctg

SEQ ID NO: 134343 - DNA, 289 bp, Homo sapiens
tttgtgattttctggactaccaagatgagtcaaagactgcagtcaatgcagaaactattttttacttttgcttcattttttctttttagtgtgaattacttcagagcattaatccaaagcacaytgtggtccaccaagactctcttccttggcagaccctggactaaaatgtttgctttccagttctcctttgagactactaacactgcttatcccttgggctacatctttcatatcaataaacactccctgggcaaaaacaacttcatattgcagactcttttgtctg

SEQ ID NO: 134344 - DNA, 459 bp, Homo sapiens
ccgatcctagctccactccttactakctgtgtgatcttgactcaacctctctgtgcctcagtttcccacaaaatggagatgatgataattagtgctactactcagagggttgcgttgcatgtcagtatgtccatatataacaagtgctgaaaacagctcctggccataagtgctcatgctaataaggtggtcattatcatgagactgttctctcctcacttgtgctgtgaggtcttttatagccctttccagggagtgcttgaatgctgagccccagaggaagggctggcaatgaaagcatggagagaagcatggacaagtcacagctcctgggtgggtgcctcagttatgtgatttggcccagagcaaatttgtcttaccacaaagaggaaagggcttgttcagtgcagcactggctttcccctggagcccactgcaggcaggaaacctcctgccttg

SEQ ID NO: 134345 - DNA, 424 bp, Homo sapiens
cttgactcaacctctctgtgcctcagtttcccacaaaatggagatgatgataattagtgctactactcagagggttgcrttgcatgtcagtatgtccatatataacaagtgctgaaaacagctcctggccataagtgctcatgctaataaggtggtcattatcatgagactgttctctcctcacttgtgctgtgaggtcttttatagccctttccagggagtgcttgaatgctgagccccagaggaagggctggcaatgaaagcatggagagaagcatggacaagtcacagctcctgggtgggtgcctcagttatgtgatttggcccagagcaaatttgtcttaccacaaagaggaaagggcttgttcagtgcagcactggctttcccctggagcccactgcaggcaggaaacctcctgccttg

SEQ ID NO: 134346 - DNA, 478 bp, Homo sapiens
gatcctgacagcttagattccgatcctagctccactccttactagctgtgtgatcttgactcaacctctctgtgcctcagtttcccacaaaatggagatgatgataattagtgctactactcagagggttgcgttgcatgtcagtatgtccatatataacaagtgctgaaaacagctcctggccataagtgctcatgctaataaggtggtcwttatcatgagactgttctctcctcacttgtgctgtgaggtcttttatagccctttccagggagtgcttgaatgctgagccccagaggaagggctggcaatgaaagcatggagagaagcatggacaagtcacagctcctgggtgggtgcctcagttatgtgatttggcccagagcaaatttgtcttaccacaaagaggaaagggcttgttcagtgcagcactggctttcccctggagcccactgcaggcaggaaacctcctgccttg

SEQ ID NO: 134347 - DNA, 594 bp, Homo sapiens
ggatacctcagttgccagtgcaggattcacttgctgttttcattcttctcagtgggagcctctgacaatggctgtttctagttggccatcttggcccctcctctgcagtgccttttttagtaccttagttgttcctgttttcttcagtcatatcacgtttattatcaatagtcttaaatacttctacataccactctcctaacagatgatccaaaataagagaggtaaaattatgctgagtagcactcagagtcgaaattakgcctctgcaaatgagcttccaagagaataaatgagcttccaatagaatcagtggcgaagatctggacaatagtgatgatctttcctgcagctttggctgagagaaaataaaaaacaggattgagggtaaagaataatagtcttcagattcccagaaatagattgacaattgcacagccatggttagtgttagggttagaactgattttaaacttgtccaattgtctaattcgtgctaatgatcagtaatgagtagtggtctcactccaatgaacatgcttctcaggctgacattaaatgtctgcctgtgtaatcaacacaaaacgtgctgtt

SEQ ID NO: 134348 - DNA, 405 bp, Homo sapiens
tttggttcacttgggggaaatctaaaaatttcattacataggccacactcaagacctgttgtatctgaatctttgggagtaagaacccaggcattggtgctttcaaaagcagaattttaaaagctttacaggttattacagtgtgcagccaaggttgagagtcactgcaatagaactttctcaattctttttattttaaaaatactccytggggaagtacaagaaacactgagcaaatatccagtggtgctaggtcttaagaacggttggtggttaggattctcagggggatatttcttactggaatttggccagcagttagggattcccactccaacaaagatagtgtattccttgaaaatatttgatcttgataatcactcataccagcctgttaaaaatccc

SEQ ID NO: 134349 - DNA, 405 bp, Homo sapiens
tttggttcacttgggggaaatctaaaaatttcattacataggccacactcaagacctgttgtatctgaatctttgggagtaagaacccaggcattggtgctttcaaaagcagaattttaaaagctttacaggttattacagtgtgcagccaaggttgagagtcactgcaatagaactttctcaattctttttattttaaaaatactccckggggaagtacaagaaacactgagcaaatatccagtggtgctaggtcttaagaacggttggtggttaggattctcagggggatatttcttactggaatttggccagcagttagggattcccactccaacaaagatagtgtattccttgaaaatatttgatcttgataatcactcataccagcctgttaaaaatccc

SEQ ID NO: 134350 - DNA, 617 bp, Homo sapiens
ggtcagttactcaatgtgtattttacttactgtccttcctcttttctgtatttttccctcaagttttattttgtttatacgttcctatattttcatatataactaactctaagtagtttgatataatgaagttaatgacatagcctcaaaaatcatgttatgtgccaatttattaacataaggcatcttttgacttctactagtttgacagtgctctactaacttcagacttccagttaatataggtataagtaattaaaaatttatctctttagtttgagaggttcactctgtcttcatagctgaaaaaatttctagttarcaatacttagttatacattttccccatatcttgtggaaaattcacaaattctcatcagcctatcttattaacaatctacttagcatattcaacagataaaatgactaatttgaacatctttgggaacttcttcaaagcaggcctacctcatctgtttccttctcttgtgcgtgtggactcttccatatgatgaaagcagcaggtatgctcagtatggccttcagatttgatcatttaaaaaattatatatttttcatttttatagatttaggtggtacaagttcagatttattat

SEQ ID NO: 134351 - DNA, 605 bp, Homo sapiens
tgctatactattgtgttagtaacataattttatttttatgtaacactaacaataaatagataaaagcaaaattgggaggcctaaaattttaatttcaagttgttgtttggaaaaaaaattacattttgtttttaagtaactgactttgagctccaaggatttaattcagtaaattgtctctcaggatgcatgaatatataagcagattaactgatgggcagtgaaatgcaattaccaaatgagttttcaaaatttttctctaatgcatccctggagtagattttgtattttaacagagacatttaccaggcacatgctgacattttaagtgatctgaaataaataaaaagcaggacagtcctaaaataaattagtttataatattttgttaattaggatgttagttgggtacttttagatcaaaataaaaatggcttaaataaaattggaaatttttctctgatacaaaagtctgagttggaagacaatccagtgtgtcaaggtgggaccactccacaggtcatctcatggactcaggcattttctcactcactgstccacagtctagtgttaaccttggctgcctgttctaagctggttcatca

SEQ ID NO: 134352 - DNA, 603 bp, Homo sapiens
ttatgaacaagttaacaagttaacctgtcatagtttcatggatgctgaccaaagtcacgaaacttctgggccagaaaaaagacaacaactgttactcatggcacaataggaacctgtaggaaatagaccgatatataaaaagagagttattataaacaattgtctcatggaattatggatgctgagaagttccactatcctctatctgcaagctggaggaccaggaaagctggtggtactgctccagtccaagtccaaagacctgagcactaggggagccaayactgtaagccccaatctgagtctgaaggcctgagaaccaaagaaggctaaggtacaagggcaggagaagatggatgtcccagttcaggaaggagaataaattttcccttactccataattttgttctatttggacccttaagcgattagatgatggctacccacattggtgagacagatctttttcactcagtctaccagttcaaatgctaatatcttcctgaaacaccctcacagatatacccagaaatactgttttaccagctatctgggcatccattatcccagtcaagttgatatataaaattaactatcacagtg

SEQ ID NO: 134353 - DNA, 603 bp, Homo sapiens
ttatgaacaagttaacaagttaacctgtcatagtttcatggatgctgaccaaagtcacgaaacttctgggccagaaaaaagacaacaactgttactcatggcacaataggaacctgtaggaaatagaccgatatataaaaagagagttattataaacaattgtctcatggaattatggatgctgagaagttccactatcctctatctgcaagctggaggaccaggaaagctggtggtactgctccagtccaagtccaaagacctgagcactaggggagccaacactgtaagccccaatctgagtctgaaggcctgagaaccaaagaaggctaaggtacaagggcaggagaagatggatgtcccagttcaggaaggagaataaattttcccttactccataattttgttctatttggacccttaagcgattagatgatggctacccacattggtgagacagatctttttcactcagtctaccagttcaaatgctaatatcttcctgaaacaccctcacagatatacccagaaatactgttttaccasctatctgggcatccattatcccagtcaagttgatatataaaattaactatcacagtg

SEQ ID NO: 134354 - DNA, 553 bp, Homo sapiens
ttcacttctttggttaagttaattcctaggtacttaattttatttgtgactgttgtatatgggattactttctgatttctttttcagattattcgctgttggcatatagaaatgcaactgatttttgtatgttgattttgtatcctgcaactgtactgaatgtttgtaagttcaaataattttcttgtggagtctttaggtttttccaaatatatcacctacaaataaggacaatttggcttcttctttttcaatttggatgccctttatttctttctcttgtctgattctgtagctaggacttacagtactatgttgaataataaaggggcatccttgtcatgttccagattttacagaaaaggctttcagcttttccccattcagtatgatastaactgtgggtctgttatatatggcttttattaggttgagttatgtttcttctatcctcagttttttgagagtttttatcatgaaggatgttgaattttatgaaatgctttttcagcatcgattgaaaatgatcatttttgtccttcattctgttgat

SEQ ID NO: 134355 - DNA, 535 bp, Homo sapiens
agcacagtaacttgaatgttctagaggaaattgtaaattgtacaaaaaactatgtaaaaaactaagtgttttaacttaagaaaagttaaggtgaaagatggcttgggtcaaatatttagaacaaagaagactaaacacatcacagtatcaaaatagttttaaatgtgtgtgtatgatcattgtcacctacaattgactagttgttcatataatcttgacactgatggttatacagtgaggttcaggtgcacataaatttgcctaaccatctcataaattctgggggcactctgttaggcattaggagttccaattcttgaagggctccgaagaatcctaggagatggctgtggggaccttggacctgatgatttggcacccgggcastagatttataacagtttaatgagaaaggaaaaaaagaggttgctctaaatattgacggagcatcctgggaaacaaacctcatccactctgaggtgggagaagatttaaaggagtgagtacttttacaactataggagggttgagagtg

SEQ ID NO: 134356 - DNA, 535 bp, Homo sapiens
agcacagtaacttgaatgttctagaggaaattgtaaattgtacaaaaaactatgtaaaaaactaagtgttttaacttaagaaaagttaaggtgaaagatggcttgggtcaaatatttagaacaaagaagactaaacacatcacagtatcaaaatagttttaaatgtgtgtgtatgatcattgtcacctacaattgactagttgttcatataatcttgacactgatggttatacagtgaggttcaggtgcacataaatttgcctaaccatctcataaattctgggggcactctgttaggcattaggagttccaattcttgaagggctccgaagaatcctaggagatggctgtggggaccttggacctgatgatttggcacccgggcagtagatttataacwgtttaatgagaaaggaaaaaaagaggttgctctaaatattgacggagcatcctgggaaacaaacctcatccactctgaggtgggagaagatttaaaggagtgagtacttttacaactataggagggttgagagtg

SEQ ID NO: 134357 - DNA, 402 bp, Homo sapiens
gaaagacaaaatgttgcatgttataagatgcagccccaatttagagatgttaaaacataaaaaaatactaattggaagaactaacataktagatgtgtgagataatgttctgggtgatggaggttgtgccagtggtcaaagcagataatgtctctctcttttcatggagctcatattctagtggcagggggcaaatgattatgtcaggtaaccattaatgctctgaaggggaaacaaaaccaggaaagaggaagaagagtgacaggtgtaagtgggaagtgttctcttcatatagagtagtcaggccagcaggaatggcctctctggtaagggtatatataagcagagaccagagggaagggaaggaatgagctattaagatgggagaggataactccaggc

SEQ ID NO: 134358 - DNA, 558 bp, Homo sapiens
caaaagaacaaaacctatttatgaacccggagggcatttcacctttaagacagcaaagccgtcaggaaactaaagaagtcgttcatttttatarcaccagataaattacagggtaaatcagttcagtgatgtcttttaactctttctgctcttccttgtgtgtgaagcataactgctagagaaaatacttccgtttattaggatgccttccaacactttttatttagaatgtttgaaccaaagaaggcaaccaaatgtgttttgccataatacagagcatgaagtggaaagaaaagaacagtaataggtttgccccagattcagaatcagaaaacttatgttctagtgctgggcctgctgtttggtggttatgtaacctcaggaaaatcttggctatgccagttactagctatgtgatggtgggcaagttacttaagcttgctagaaattatgttttctcatctgtagcataaggaaggttaataatatctacctcactgggtcattgagagaattaaaaaacagtgctgatatagcacctagcacaaggccttgctc

SEQ ID NO: 134359 - DNA, 662 bp, Homo sapiens
cgttttttgttgttttgttgttgttttgttttttgcttagagtcaggaagctgagtaaacatgaggtttctcacatattattatataaagttagaaaataatgacatgagctgggcacagtggctgactttggaagtgttgtaatcctaacactttgagaggacaaagtgatcacttgaagtcaggagtttgagaaaagcctgggcaatagtgagaccctgtttctacagaaacattttaaaaattagtggcgcatgatggtgtgtgcctgtagtcctagctacttggmggctgaggagggtgaatagcttgagcctaggaagctgaggctgcagtgagccaaaatcatgcccctgcactgcagcctgggtaacagagtgagatcctgtctcaaaaaaaacaaaaaagaaaagaaaaaaaaagaaaacaatgacatttttaatcttgagaattctgaaaaataaaaaagaaaagaagaaaataatgacatatttatcttcagagttctgaaacccagtatggacaaatgtatgaagaactatatttattattttgtagatcttggaatagtcatgttcaacaaaagggggcagaatcatgtgaattttaaagcctgagctccagagtaagacttagaacaagtgccagttgggcccgttatt

SEQ ID NO: 134360 - DNA, 528 bp, Homo sapiens
ggtgataagcatgccatttgagggctgctcttagcctatctgcttaatttggatattcttacttccttgtttaataacctttttaccgttattgatctgttacatatatgtcatatgtaagtgccattaattgtatatattttccagctaagtttggatcactataagaaatttgtcttaaaccatggttgtacttttgtatagtaaattatytttgcgttgcattatgatttgcttcagtaattttagccaaatcaggtttactttccaaaaaaaaaaaaaaaaaaaaaaaaaacccttccagggggacacttataaagggggtaaaatttgggtttggtttcctgggcctttaacaaacaatccccgaaattaaaatgtttaaaaattacatgatttgggtatgattccatgattaactgacctatcaaaaaaattgttttaacaattatccacaaactttgcctttataaagaacctaaatgtcttttacctcctgtaagttttataaatttgattatatttcac

SEQ ID NO: 134361 - DNA, 528 bp, Homo sapiens
ggtgataagcatgccatttgagggctgctcttagcctatctgcttaatttggatattcttacttccttgtttaataacctttttaccgttattgatctgttacatatatgtcatatgtaagtgccattaattgtatatattttccagctaagtttggatcactataagaaatttgtcttaaaccatggttgtacttttgtatagtaaattatctttgcgttgcattatgatttgcttcagtaattttagccaaatcaggtttactttccaaaaaaaaaaaaaaaaaaaaaaaaaacccttccagggggacacttataaagggggtaaaatttgggtttggtttcctgggcctytaacaaacaatccccgaaattaaaatgtttaaaaattacatgatttgggtatgattccatgattaactgacctatcaaaaaaattgttttaacaattatccacaaactttgcctttataaagaacctaaatgtcttttacctcctgtaagttttataaatttgattatatttcac

SEQ ID NO: 134362 - DNA, 528 bp, Homo sapiens
ggtgataagcatgccatttgagggctgctcttagcctatctgcttaatttggatattcttacttccttgtttaataacctttttaccgttattgatctgttacatatatgtcatatgtaagtgccattaattgtatatattttccagctaagtttggatcactataagaaatttgtcttaaaccatggttgtacttttgtatagtaaattatctttgcgttgcattatgatttgcttcagtaattttagccaaatcaggtttactttccaaaaaaaaaaaaaaaaaaaaaaaaaacccttccagggggacacttataaagggggtaaaatttgggtttggtttcctgggcctttaacaaacaatcmccgaaattaaaatgtttaaaaattacatgatttgggtatgattccatgattaactgacctatcaaaaaaattgttttaacaattatccacaaactttgcctttataaagaacctaaatgtcttttacctcctgtaagttttataaatttgattatatttcac

SEQ ID NO: 134363 - DNA, 528 bp, Homo sapiens
ggtgataagcatgccatttgagggctgctcttagcctatctgcttaatttggatattcttacttccttgtttaataacctttttaccgttattgatctgttacatatatgtcatatgtaagtgccattaattgtatatattttccagctaagtttggatcactataagaaatttgtcttaaaccatggttgtacttttgtatagtaaattatctttgcgttgcattatgatttgcttcagtaattttagccaaatcaggtttactttccaaaaaaaaaaaaaaaaaaaaaaaaaacccttccagggggacacttataaagggggtaaaatttgggtttggtttcctgggcctttaacaaacaatccccgaaattaaaatgtttaaaaattacatgatttgggtatgattccatgattaactgasctatcaaaaaaattgttttaacaattatccacaaactttgcctttataaagaacctaaatgtcttttacctcctgtaagttttataaatttgattatatttcac

SEQ ID NO: 134364 - DNA, 510 bp, Homo sapiens
gactgtaccctgtgatgaaattataagcccttgctttcaatttcttctactttgaaaatagttactcagagctctgcccaatctggaacataaatacatgtatgggtgtaaattgtccttttaatatgtgaaatttcgtatttcttgtgtttattgacttactcattcttgactctaataaaatttcacatgcatctgtagcctttattcacatttaaggttcctactggtaattcctcctagaattctctgagaatgtttgaaaaactaacaaatgacaagaaatattttgcaaataatcagaaaatgggtttgttacttgttactattatctgtttttcttttcatatttgtgtgacatcaaaacaagcagatacaacacgaaytcatttatttaattgctagctgggagcaagtcattggattctgactgacctctctgtacctcagtattctcctctgtaaattcaaagagtagtatctacttaataaggttcttatgagcattaa

SEQ ID NO: 134365 - DNA, 457 bp, Homo sapiens
ggagttaactaaacaaagagtaggaggaaaagtgttctagacagcgagaattggataygcaaattccactagggaaaactaccagaagcccagagtggctggagtgcaaatgtaagcagaggaagtgtgtgtgatacatagagctgaagaccagggccagaccaggcatagggcaggcaggacttgtggggtttttggcctttgtcccaagcgcaataaaaagtagttgaagttttaaaggggtggaggatggggaaatggagggtagcatggtcagatttgcattctataagcctattctggctaacgtagtagagaataaattggcgtgagagtgaatgtgtgaagactggttaagtaaaacattggtaaattgaactaaagtagtagtagtggaaacaaacatgccaaggaactgagaggtaaaattaacaaaatttagtgtaacttcctgagc

SEQ ID NO: 134366 - DNA, 496 bp, Homo sapiens
ctaggttaaacctgtaattttcactatagaaaagaacagcttcttcctcatatttaactcagtcacagtttcatcatctaacattgagccaaaaacaaaatgtaattgattttttctagtagaaatatatacctgaatatactactacaacgatagagatgtaagtgaaagcacttgtaaatcataaaactcattaaatgttatatacttcagctattctgaaagcattaaattttgtgaaaaacactcaggggttgtttgttagaaactagagaactgtgttttattacatgacccaggaataacagttttcattcytgtttgcaatggaacagcccattcattcaaagggaacgtgaaaaagtacaaaatgccccttgcaacatgcaagtgactaatattttctcctcattcttttgtcacagcaagaaaacaagaacagcttccttatatcattctcaagtgattttaaaagctctttaaagtactcagcata

SEQ ID NO: 134367 - DNA, 552 bp, Homo sapiens
ggtgagtaagtcacgttactacagagaaaagtttgggagtaaaagtgtaaaaaattatatttttgttgcaccttctaagagaaagaatattgttatgttctcctaacttctgttgattgctactttaagtgatattcatgatattcatttaaaacattgaaaatttgttttatttacttatttttctttttgagatggagtcttgctctattgcccaggctgaagtgcagtggcatgatctcggctcacggcaacctccacctcctgggttcaagygattctcctgcctcaggttcctgagtatctgggattacaggagagtaccaccaaacccggctaatttttgtatttttagtagagacagggtttcgccatgttggccaggctggtctcaaactcctgacctcaaaagatgggcttgcctcggccttctaaagtgctgggattacaggcttgatccactgtgcccggccaaaacattgcaaatttaaatgagaatttaaaaaattaaataatgactgtcctgtttctgttttagtatgtaaatcttca

SEQ ID NO: 134368 - DNA, 517 bp, Homo sapiens
ccttcaacatgttttctgttttttagtgtactttttagtgtacttctttggttaactttattcataagtattttattctttctgatgttattataaatggaattttttctatttcattttcagattatccatagctagcatataggaatgcaactgatttttagataataatcttgtatcctgcaactttgctgaactcatttattagttccaattttttttggtaaattctgtaggatttttctacatgtaagatcatgtcatcggtaaatatagttttatttctttctgatataaatgtmttttctttttcctgcttaactgccccacctagaaccaccaatagagtgttgaataggagtggcaagagcatccttgtcttgttctgatcttaagggggaaagctttcagtcttcaaccattaagtatgatgttagctgtgagttttcctgttagttggattttgtttgttgaactgaattttgacagtgccaactcataaggttgtgctgagaat

SEQ ID NO: 134369 - DNA, 594 bp, Homo sapiens
cttcaccattgaagacttcagtgtgcagcccctaagaaccaaggcattctccgacataaccagaggactatcatcactcaatggaacttcatattatcattgtctactatgcggtccgtatacacattttcacaattgtccyaatcataacatggcttaaaaaattcagaatccaatcaaacatcagacattacacttagtacatgattctttagtctccttcaatctagaactgttcccaggattgttttaaagtatactgacaagtctttgagactgtaaatgacctgaggtatacttgagaataatttttcaatacacatgaaagatcattacacatgagccaagactcaaatgagctggcctacttactttgtacataaatgtgtaaactcctgaagacttccaataatgaactcccataagacagttagttcaatgtctttatggccttggtgacaaatcattacagaggatgagagcatttttcctatccaataatggtcaagaaaaaagcagacagatcctcactatcttagagaactaagtgagaaagctggtcgatgaaggggacttcatccagagaggaaggga

SEQ ID NO: 134370 - DNA, 594 bp, Homo sapiens
cttcaccattgaagacttcagtgtgcagcccctaagaaccaaggcattctccgacataaccagaggactatcatcactcaatggaacttcatattatcattgtctactatgcggtccgtatacacattttcacaattgtcctaatcataacatggcttaaaaaattcasaatccaatcaaacatcagacattacacttagtacatgattctttagtctccttcaatctagaactgttcccaggattgttttaaagtatactgacaagtctttgagactgtaaatgacctgaggtatacttgagaataatttttcaatacacatgaaagatcattacacatgagccaagactcaaatgagctggcctacttactttgtacataaatgtgtaaactcctgaagacttccaataatgaactcccataagacagttagttcaatgtctttatggccttggtgacaaatcattacagaggatgagagcatttttcctatccaataatggtcaagaaaaaagcagacagatcctcactatcttagagaactaagtgagaaagctggtcgatgaaggggacttcatccagagaggaaggga

SEQ ID NO: 134371 - DNA, 594 bp, Homo sapiens
cttcaccattgaagacttcagtgtgcagcccctaagaaccaaggcattctccgacataaccagaggactatcatcactcaatggaacttcatattatcattgtctactatgcggtccgtatacacattttcacaattgtcctaatcataacatggcttaaaaaattcagaatccaatcaaacatcagacattacacttagtacatgattctttagtctccttcaatctagaactgttcccaggattgttttaaagtatactgacaartctttgagactgtaaatgacctgaggtatacttgagaataatttttcaatacacatgaaagatcattacacatgagccaagactcaaatgagctggcctacttactttgtacataaatgtgtaaactcctgaagacttccaataatgaactcccataagacagttagttcaatgtctttatggccttggtgacaaatcattacagaggatgagagcatttttcctatccaataatggtcaagaaaaaagcagacagatcctcactatcttagagaactaagtgagaaagctggtcgatgaaggggacttcatccagagaggaaggga

SEQ ID NO: 134372 - DNA, 594 bp, Homo sapiens
cttcaccattgaagacttcagtgtgcagcccctaagaaccaaggcattctccgacataaccagaggactatcatcactcaatggaacttcatattatcattgtctactatgcggtccgtatacacattttcacaattgtcctaatcataacatggcttaaaaaattcagaatccaatcaaacatcagacattacacttagtacatgattctttagtctccttcaatctagaactgttcccaggattgttttaaagtatactgacaagtctttgagactgtaaatgacctgaggtatacttgagaataatttttcaatacacatgaaagatcattacacatgagccaagactcaaatgagctggcctacttactttgtacataaatgtgtaaactcctgaagacttccaataatgaactcccataagacakttagttcaatgtctttatggccttggtgacaaatcattacagaggatgagagcatttttcctatccaataatggtcaagaaaaaagcagacagatcctcactatcttagagaactaagtgagaaagctggtcgatgaaggggacttcatccagagaggaaggga

SEQ ID NO: 134373 - DNA, 591 bp, Homo sapiens
ctggtcttgaactcctgacctcaggtgatccaccctcctcgggctcccaaagtgctgggattacaggcgtgagccaccatgcccagcctctgacagcttttaagacctctctatggtatcatgtagtttctttmaaaaatgtttatgtgtgaattttttttctttttatcctttctgggattctttagcttcctaaatttgtaggttgtttttcatcagttctctgtcattatctcttcaaatactgcctctgcctcattcttttccatgcccctgctcccctgccccagaattctgactagactgaaccttcttattctaccctctgtattctcttaactcttttattacttttcattttcttgcctctatactgcaattttttcagatccactttactaaatctttctttagctgtgtctaatctgttattaaatttgtacactggtcatttttgtatacttgctcctcattcctattttaaatttctttttttctataagcatattaaatatatgtacttataatctgtgtctgctaactccaatatgtgaactctttgcaggttctgattctgctctttattgtttc

SEQ ID NO: 134374 - DNA, 517 bp, Homo sapiens
aatcttacatgtggctaatgaatacatgtatgtgcatttggtttccataaggaagtagcaaaataaatattattcccacggcatcctaaaagtcatttatggaaacttccagaaaccactggagtaggcagggttaggccccagtcaccaatcagtaggtccaggccaagagtaccacttactcttcagagcagtatcagtccacagactgccgccctgcccagtcatccttccagcaggtcatggcggcaggagagccttgccagagtggtgagcagcctcatggccttccagggcttctgctgccctccccgctgtatggctcatccttcctgctgtatgggacaggctggaacctgaacgccagccttaggaytcaaggccccaccccctctagtcactgtttccaagactgcagctgcctccctgctgagaggccaaggctaaaactccatgaccctctctcctctcgggcctccctgcagcccctgcctgctcccatcagcctcccacactg

SEQ ID NO: 134375 - DNA, 505 bp, Homo sapiens
gcagaagatgaggggagcagaagctgcagcccatccgttactggaacagctaggaccacaggtgggcaccaccatgcccaggwaattttttattttttgtagagaggggtctcttgcccaggttggtctcaaactccagggctcacatttatttgaaaaggtagctggtagataaagaaataaaaagacggcccagggacagggtctggggctgctaccccacaaggcaggtgggaaagtgtggggactcccaggcttgggatgcctgacaccctgcggctccgcccagatggagagcagcagagaagctggcagagagggtgcgcagggaagctgctgagcctagggaagggccttgcagggctgggcagggtggtagtggggacccagtgagagcagagggcacagggtgtaagcagggaagggcccacactgaacagcaaggagggaggggcacccagcgcggactagggctgggggtgtggaggacgcacacagaggctgc

SEQ ID NO: 134376 - DNA, 505 bp, Homo sapiens
gcagaagatgaggggagcagaagctgcagcccatccgttactggaacagctaggaccacaggtgggcaccaccatgcccaggaaattttttattttttgtagagaggggtctcttgcccaggttggtctcaaactccagggctcacatttatttgaaaaggtagctggtagataaagaaataaaaagacggcccagggacagggtctggggctgctaccccacaaggcaggtgggaaagtgtggggactcccaggcttgggatgcctgacaccctgcggctccgcccagatggagagcagcagagaagctggcagagagggtgcgcagggaagctgctgagcctagggaagggccttgcagggctgggcagkgtggtagtggggacccagtgagagcagagggcacagggtgtaagcagggaagggcccacactgaacagcaaggagggaggggcacccagcgcggactagggctgggggtgtggaggacgcacacagaggctgc

SEQ ID NO: 134377 - DNA, 575 bp, Homo sapiens
taaatgaaatgataccatatgtggtcttttgtgtctggtggctttgacttagcataatgttttcaaggatcatccatgttgtagcatgcatcaggacttcatttctttttgtaactgaataacattctatcgtgtggatgcgtcacattttgtttatccactcatcggctgatgggcatttgggtcgttaacgcttttttttgagactgggtctcattttgtcacctaggctggagtgcagtgatgcaatcttggctcactgaagcctcgacctcctgggctcaagcaatcctcccgcctcrgccccccaagtagctgggactaccagtgcgcatcaccatgcctggataatttttcgtaagaagggatttcaccatgttgccaaggctggtctcaaactcctgagctcaagtgatccactcaccttggcctccaaagtgctgggattacaggtgtgagccaccatgcccagcctgtttacacattttgattattatgaataatgctgctatgagtatttgcctagaagtttttgcatggatgtatattttcaattctcttggacatacacttgg

SEQ ID NO: 134378 - DNA, 569 bp, Homo sapiens
aagcttgctaatttcacatattaattctctcaagatccttgaggcctggggcagaaacggaattccctgcaggttcccaagtacaggaagatgaagccaagggaccttcatagccccccagggccagttgcaggatttctactgcttttactcattttttcaaagatacttgaagatttgtctagggatgctatcttttatttccaaattataatctcacaaaamaactgtggaaagtataaacttttactaatcagttcccacagtacagaattaaataaatcgagtctccagtgatggaacatagaattttcctcaagtattttttttcccacaaaattaattttttagcttttgacttttcacaatactcccactcatagacctaagattctctctgtaaaatcctaattctctaagaaagctgtgcacttgcagcatgccaaagagactcacaagagaaacttatttgtgtgggaacagaaataaaataattaggtattttcatcagggaaaaaagattcaaagaatcacgactttagtctttgcttccagacaagcctctaagt

SEQ ID NO: 134379 - DNA, 590 bp, Homo sapiens
ttcatcagggaaaaaagattcaaagaatcacgactttagtctttgcttccagacaagcctctaagttatctgacaaaaattctccttggaacatcaagcttgaattatgtaacattttagggtattactcttattcttggtctttttagtcactccgtatcctttctgttttacctgttgagaagcaaaatggagaaaggagattccttttttgggggaacaaggttaaatttaaagcaaatatctgtaaaggtgggcttgctatattcttgctgacagtgactatagaattaaatatatttttctgttggcaaattttagtgtaaaacacaccgtttctaatgagaaggcatgaaataatgtttatggcaatttgagcatagattttggtatctgagtgctggggttcgaatcccggctggggtgggtgggttcttagctccgactgctgacagttaacagwtttaacagtttcctcgcctggtccaagggataatccagtattcctgggcagaggctggtgctaaggccaggactgaccagttcacagctcacaggggaaggtgggtggggcagaaaggaggagagtc

SEQ ID NO: 134380 - DNA, 591 bp, Homo sapiens
ttagtcttgatgtatgttttcattccgtttggatacatgcctgggaatgggactcctttctttcccaagagaaacatctggatctatatatattacaagagtttctagttggaattagtcactcaacatgattaattcctctctgaacatttaataacttcattaaaaactctactatttatcctatccaggtgggtagcatggcagatgttacatgagggtaacacttatctaactttctaatgcgtttcagatttaaattcgcacagagatagtcccaacattcttggaattcctgacaattccaaayaatcaaataagaaagccccaaagcctggcttagtacctcttcctggccttctgctccagccacagccactttctgagcttcctgggccacactgtgagggaagagggacagcagtaaaacgggcagaggcgctcttttgctttggagcttggagtgcagggtgagtgattggaggagagtagagtctggggagagtggcgattccttccactccctgcagagtgactcaaccaaagtaaggcctgtcattcaccgattcactcagcaaatatttatcatgg

SEQ ID NO: 134381 - DNA, 400 bp, Homo sapiens
gaaaacatatttggtggaataatcaaggaaaactttcccagccttgtgagagacgtagacagccaaatacaagaagcacaaagaatacctgggaaattcatcacaaaaacatctttgcctaggcacactgtcatcaggttatcccaagttaagatgaaggaaagaatcttaagagctgtgagacagaagcaccaggtaacctataaaggaaaacccatcagatcaacagcagatttctcagcggaaaccctataagctagaagggattggggacctatcttcagcctcctcaaacaaaacatttatcagccaagaattttgtatccagcaaaactaagcatgatatatgaaggaaagacacagtygttttcagacacacaaacactgactgagagaattc

SEQ ID NO: 134382 - DNA, 517 bp, Homo sapiens
gaatacataccttaaacatatacaacataaaaaataaaaaawtaaaattaaaaaaaaacaaaaaagtaccttttactcaactttgaatataaggatacttaaacatgatactcttaatcttaaatgcaaaagtcattattttgtctttagacaaaaaggcaataccagcttccaatcctgttatcaaagttctaaaattataactatttcaagaagaaaagaaagtttaagtattaacagagaggaaaaaaacaaaataattatttgcatataactacctttccacataacccaaaatttttaaaattaggataataagtttaaagaattggccgaccagcaccaacaccaagtcagaaaacatttttaaaattcaatttataatataaaaaaataaaaataacctcaatggcatatgcataataactgcacagagaaaaatactgaagagcataaataaatagtgttttgggatgggatgactctatattataaagatactagttgtccttaattt

SEQ ID NO: 134383 - DNA, 553 bp, Homo sapiens
ttcattggctccaatcctgccaagygtatccccacctgagtcactgggacagagacgggagattctggccagcccaaccctgacagctgttgccctctgctctgttccaagaaatcaagctgcctggaggagtggtcactgggcaaagaacgttccaattccagtgctggaaggacctccccagcatttcagatggcatcccagcagatgcctgaagagccaacaggatcccacctcgatgctggacagctctgccaaaggccccaagactaggagcctctctgttcagaaagatccatgcacttacagaatttcagcactgctgaaaagagagaacgcccctaactcgaacttctcatttcgcaattgaggaaaccaaagcccaaaaagtggaagcaatttgcctgaagtcacacagtgccaaaagggactagcaggtcacctgacgcccctgccacaggtccttccgcggcactacacagacctctctctctgccccaagtcagagcaggcccctgaagttgactctgtcaccctcctgttgcaaagcagt

SEQ ID NO: 134384 - DNA, 545 bp, Homo sapiens
ccctcctaagaggcccttgagagcaactgccttgccttgcacccctcaccccatgccagttatgcaagccacttgatgctgcccggacaacccgcattatttacaaatgtggaaactgaggctcatatgagacccatgcctgagtttttctgcatctcagatcctggcactgcccttggtctactatctccaggctggctagggaggcctgttttggggaggccaaactgggcaggggttcaagatgcccaacatcccagcacccacccccggtccttgcacaccagccccagagcccctcaacagggaacatgggctctaactgcagggattgggggtgaagcctgtggtgcttgctgtcccctcaactccacactgtcacgcagcccaccacaggcaaggggcagagtgsgccaggaggcataggaagaacctcagaacctttgcaggaagcagctgggtgcggacctggtaggcagttgagccacgggtgtgagggaggggcacagtgccagggcagagcgtcgggctcttggttccttaca

SEQ ID NO: 134385 - DNA, 533 bp, Homo sapiens
caggctgacactgctaatctcctgcccttcctccttgaaaccctttaccrtcttgacttctatgatgacatgctgtcctggtctcctgccaccacccgaacactcactctcagcccctttacagcctctacctcccttcatggccattccatcctaagttcttttctctccaagccctctgacattgagatctcacatacacccaaagctttaaccatcacctttgtgagaatgattccaaaacctgtagctcttccttttctttcacactcaattccaaagttcagctgccttccatatgtctctccctggaggctccactctcccctcaaactcaacatgtctaacaccaaggcttcatcttccacccaacgtcctcctcctgccttcctgcttgttaacagaaccatcattctatttctattcatggagctcagaatcatttttgatgatccttctccctcatccgctccagccaatcaacacataagtgcattggttctacccccacagtatccactgcatcatctctt

SEQ ID NO: 134386 - DNA, 533 bp, Homo sapiens
caggctgacactgctaatctcctgcccttcctccttgaaaccctttaccatcttgacttctatgatgacatgctgtcctggtctcctgccaccacccgaacactcactctcagcccctttrcagcctctacctcccttcatggccattccatcctaagttcttttctctccaagccctctgacattgagatctcacatacacccaaagctttaaccatcacctttgtgagaatgattccaaaacctgtagctcttccttttctttcacactcaattccaaagttcagctgccttccatatgtctctccctggaggctccactctcccctcaaactcaacatgtctaacaccaaggcttcatcttccacccaacgtcctcctcctgccttcctgcttgttaacagaaccatcattctatttctattcatggagctcagaatcatttttgatgatccttctccctcatccgctccagccaatcaacacataagtgcattggttctacccccacagtatccactgcatcatctctt

SEQ ID NO: 134387 - DNA, 533 bp, Homo sapiens
caggctgacactgctaatctcctgcccttcctccttgaaaccctttaccatcttgacttctatgatgacatgctgtcctggtctcctgccaccacccgaacactcactctcagcccctttacagcctctacctcccttcatrgccattccatcctaagttcttttctctccaagccctctgacattgagatctcacatacacccaaagctttaaccatcacctttgtgagaatgattccaaaacctgtagctcttccttttctttcacactcaattccaaagttcagctgccttccatatgtctctccctggaggctccactctcccctcaaactcaacatgtctaacaccaaggcttcatcttccacccaacgtcctcctcctgccttcctgcttgttaacagaaccatcattctatttctattcatggagctcagaatcatttttgatgatccttctccctcatccgctccagccaatcaacacataagtgcattggttctacccccacagtatccactgcatcatctctt

SEQ ID NO: 134388 - DNA, 533 bp, Homo sapiens
caggctgacactgctaatctcctgcccttcctccttgaaaccctttaccatcttgacttctatgatgacatgctgtcctggtctcctgccaccacccgaacactcactctcagcccctttacagcctctacctcccttcatggccattccatcctaagttcttttctctccaagccctctgacattgagatctcacatacacccaaagctttaaccatcacctttgtgagaatgattccaaaacctgtasctcttccttttctttcacactcaattccaaagttcagctgccttccatatgtctctccctggaggctccactctcccctcaaactcaacatgtctaacaccaaggcttcatcttccacccaacgtcctcctcctgccttcctgcttgttaacagaaccatcattctatttctattcatggagctcagaatcatttttgatgatccttctccctcatccgctccagccaatcaacacataagtgcattggttctacccccacagtatccactgcatcatctctt

SEQ ID NO: 134389 - DNA, 391 bp, Homo sapiens
ggcccagccaaacatggctgatagtcataaggtgagtaagacctgccaggagggacagactccagagaggcccgtggggctggctcaggggttcccaacgaatgcccactggggatatagccagatctggactgggtcagtggatgggactgacgrgaggatccagagaggggctgggaggagagtggagaagcccctggccaggccccggggacactctgggacttgtgtagtggggcagcagcggaggctggctccaggtccagcatcagcatattgagtgtttcgatggactgttcaatctcctgctgggaggctgctcgcgggaactcagggagactggggatgggggtctctgccaatggctgagggctgggcctgctggctacaa

SEQ ID NO: 134390 - DNA, 391 bp, Homo sapiens
ggcccagccaaacatggctgatagtcataaggtgagtaagacctgccaggagggacagactccagagaggcccgtggggctggctcaggggttcccaacgaatgcccactggggatatagccagatctggactgggtcagtggatgggactgacgggaggatccagagaggggctgggaggagagtggagaagcccctggccaggccccggggacactctgggacttgtgtagtggggcagcagcggaggctggctccaggtccagcatcagcatrttgagtgtttcgatggactgttcaatctcctgctgggaggctgctcgcgggaactcagggagactggggatgggggtctctgccaatggctgagggctgggcctgctggctacaa

SEQ ID NO: 134391 - DNA, 610 bp, Homo sapiens
taaattgtgttctgagcctgcagctgcctctcaccgtgggtctgccaggagcctggtgccctgcccggctgtcctttgctgtggttgagctgacactgaccgggaactcactgggaacatggctctgacccactcacctgagccttgtgacatccagcaagggggacaagccttttccatacgacctcgggccccagcatgagcwcccaggagaagatctcagcgcagctcctgctgtgagctggtcttcagacagccgccgccatggtcttcacgggcctgctgtcctggcaccctgcctggcatgctgtagcacacagggcagtgtgtgcagagaagggggcccgggaccaagtgtctcttcactcactgcgtctaagtactatgtgtgacaacgaaacagtgttccttggcacaactcacacctggaaggagtgtttgctgtgggacagatcacaagactgggggcggataacaggattggaaagtggccatcagagggggtgagagtatttcacctgggcccggagaacatgaagcttaagctgttgtgctcctgctcagacaattcacccgcagacgccgggctggggaggtgcgaggcttctgt

SEQ ID NO: 134392 - DNA, 603 bp, Homo sapiens
taaattgtgttctgagcctgcagctgcctctcaccgtgggtctgccaggagcctggtgccctgcccggctgtcctttgctgtggttgagctgacactgaccgggaactcactgggaacatggctctgacccactcacctgagccttgtgacatccagcaagggggacaagccttttccatacgacctcgggccccagcatgagcacccaggagaagatctcmgcgcagctcctgctgtgagctggtcttcagacagccgccgccatggtcttcacgggcctgctgtcctggcaccctgcctggcatgctgtagcacacagggcagtgtgtgcagagaagggggcccgggaccaagtgtctcttcactcactgcgtctaagtactatgtgtgacaacgaaacagtgttccttggcacaactcacacctggaaggagtgtttgctgtgggacagatcacaagactgggggcggataacaggattggaaagtggccatcagagggggtgagagtatttcacctgggcccggagaacatgaagcttaagctgttgtgctcctgctcagacaattcacccgcagacgccgggctggggaggtgcgagg

SEQ ID NO: 134393 - DNA, 602 bp, Homo sapiens
taaattgtgttctgagcctgcagctgcctctcaccgtgggtctgccaggagcctggtgccctgcccggctgtcctttgctgtggttgagctgacactgaccgggaactcactgggaacatggctctgacccactcacctgagccttgtgacatccagcaagggggacaagccttttccatacgacctcgggccccagcatgagcacccaggagaagatctcagygcagctcctgctgtgagctggtcttcagacagccgccgccatggtcttcacgggcctgctgtcctggcaccctgcctggcatgctgtagcacacagggcagtgtgtgcagagaagggggcccgggaccaagtgtctcttcactcactgcgtctaagtactatgtgtgacaacgaaacagtgttccttggcacaactcacacctggaaggagtgtttgctgtgggacagatcacaagactgggggcggataacaggattggaaagtggccatcagagggggtgagagtatttcacctgggcccggagaacatgaagcttaagctgttgtgctcctgctcagacaattcacccgcagacgccgggctggggaggtgcgag

SEQ ID NO: 134394 - DNA, 602 bp, Homo sapiens
taaattgtgttctgagcctgcagctgcctctcaccgtgggtctgccaggagcctggtgccctgcccggctgtcctttgctgtggttgagctgacactgaccgggaactcactgggaacatggctctgacccactcacctgagccttgtgacatccagcaagggggacaagccttttccatacgacctcgggccccagcatgagcacccaggagaagatctcagcgcagctcctgctgtgagctggtcttcagacagccgcygccatggtcttcacgggcctgctgtcctggcaccctgcctggcatgctgtagcacacagggcagtgtgtgcagagaagggggcccgggaccaagtgtctcttcactcactgcgtctaagtactatgtgtgacaacgaaacagtgttccttggcacaactcacacctggaaggagtgtttgctgtgggacagatcacaagactgggggcggataacaggattggaaagtggccatcagagggggtgagagtatttcacctgggcccggagaacatgaagcttaagctgttgtgctcctgctcagacaattcacccgcagacgccgggctggggaggtgcgag

SEQ ID NO: 134395 - DNA, 617 bp, Homo sapiens
tggctgaactgaacacagtaaattgtgttctgagcctgcagctgcctctcaccgtgggtctgccaggagcctggtgccctgcccggctgtcctttgctgtggttgagctgacactgaccgggaactcactgggaacatggctctgacccactcacctgagccttgtgacatccagcaagggggacaagccttttccatacgacctcgggccccagcatgagcacccaggagaagatctcagcgcagctcctgctgtgagctggtcttcagacagccgccgccatggtcttcaygggcctgctgtcctggcaccctgcctggcatgctgtagcacacagggcagtgtgtgcagagaagggggcccgggaccaagtgtctcttcactcactgcgtctaagtactatgtgtgacaacgaaacagtgttccttggcacaactcacacctggaaggagtgtttgctgtgggacagatcacaagactgggggcggataacaggattggaaagtggccatcagagggggtgagagtatttcacctgggcccggagaacatgaagcttaagctgttgtgctcctgctcagacaattcacccgcagacgccgggctggggaggtgc

SEQ ID NO: 134396 - DNA, 617 bp, Homo sapiens
tggctgaactgaacacagtaaattgtgttctgagcctgcagctgcctctcaccgtgggtctgccaggagcctggtgccctgcccggctgtcctttgctgtggttgagctgacactgaccgggaactcactgggaacatggctctgacccactcacctgagccttgtgacatccagcaagggggacaagccttttccatacgacctcgggccccagcatgagcacccaggagaagatctcagcgcagctcctgctgtgagctggtcttcagacagccgccgccatggtcttcacgggcctgctgtcctggcaccctgcctggcatgctgtagcacacagggcagtgtgtgcagagaagggggcccgggaccaagtgtctcttcactcactgcgtctaagtactatgtgtgacaacgaaacagtgttccttggcacaactcacacctggaaggagtgtttgctgtgggacaratcacaagactgggggcggataacaggattggaaagtggccatcagagggggtgagagtatttcacctgggcccggagaacatgaagcttaagctgttgtgctcctgctcagacaattcacccgcagacgccgggctggggaggtgc

SEQ ID NO: 134397 - DNA, 440 bp, Homo sapiens
gctgagccccagccccagtacttcatccacagctggcatcagagctgccgtctatccctcatggacagccacggagcagcaggccttcactgcagaaggaggggttttggaaagtgggaagaacccccttcctgaatggcatcctattggaattgggttgccccagtagaccatggactcaacaccctggacagacaagggcattctgcctcatcagagagtgccccaaaaggtgccattcaaaggaggaaataaattaagattttcaggcttgtcaccctcataaacagaatacaacttgatatggtttggctctgtgtccccacccaaatctcacctcgaattataatcccyataattcccacctgtgaagggcaggaccaggtggaggtaattaaatcatgggggcgttcccccatgctgtcctcatgatagtgagt

SEQ ID NO: 134398 - DNA, 575 bp, Homo sapiens
gcactgttcatgctttatggactctgcttccttcagtgctcccatatccttgccctctctgtgtcctttattttataaaacccaaaagagtggggcttaagaaactggttctgctgaatgccttatgctagcaaatcccacagtggaggactggcattaagaacccatttttctgcccttgaaaggtgagatatttggcaacttttatcctgaactatggactctagcaggctgttccaggaaagcacaaatgtcccttatgaccactttatcactttttaaaaatattaatttcatactatagtagtcattaatttttgaatttttrtattgcaaaatggttttccaagacagattcccaatttataacattttgcctctaagaactaaattttccatttaaactaattcaacttgagactgtaatcttggcactaattaagttataacttgggagatcactatattgatttcaaaactccaactaaagctctgggataaaaagttttctgagaactagaagtaatatagataaggggaggatgtctaagactaaacagcttttcatttatgag

SEQ ID NO: 134399 - DNA, 407 bp, Homo sapiens
aaaaaaaaaaataagttgccctaatataatacagaaatcttttccagatcaaatcttactttcacactcacggagtaaaaatttttcactgagttgaaacacattaaaacatgctcattattttacatgcctaggaaaatttcgaattcttcatattacttttcccaggcatccagatgggttctaagaaaagttctagtgagattatatttcgtctgtatggttaaaagaaggagtattgrcagtctcctaatttagtggtggtttttagcccaaattccagattaaggaggtttaagtttctgcaattacagcttttaaaaacacagcaatgaatcttcacaggtttaccttcattacaaattgtatcactaagaagatgagagaaaataatatcttttgaaatt

SEQ ID NO: 134400 - DNA, 512 bp, Homo sapiens
ccagcaatcccactactgggtatctacccaaaggaaaaggaatcattatatcaaaaagacacctgtactcctatgtttattgtaacactattcacaagagcaaagtcacaaaatcacataagtgtccatcagcagttgattgggtaaaggaaatgcagcatttatacatcatggaatactacgcamccatagaaaaagaataaataatgtccttttcagcaactcagatggagctggaggccattatcataagtgaaataactcagtaacagataatcaaataccacatgttctcacttataagtagaagctaaacaatggcacacatagacataaagatggaaaaaatagacactggaggctccaaaagaggggaggataagagggttgaaaaattacctattggttgcttgaaattgcttatagggggagggtgtgcaacacagaaatcaacaaacactacaaatcaaagattttcttgttttgctagagagtttcttaaccagcacacc

SEQ ID NO: 134401 - DNA, 582 bp, Homo sapiens
aattaatttggtagtaatttagaggcttcaggagttgggctatttcatttaaagaaggaatcagtatttgttggtagggccaaagaaatgtaaaggatttaacaattgatgagccactctcaatgttcagagcaggagggaaggttgtagtaataaattcccaagctctgtcaatgatgtgctggtgaayggacagacagtaacagagtggagccacctttccctccagctccctcctgggactgttggacactcaggcatttgtgattcctgtccttcccctcctctcatgagacaccaactccagtgtctgcaagaaagcaaaaagaaaaaacaggatataccagaccctacccaaacagaggtttctttggcttcagctatctattcccctgatgtcagaattaaacctggagcaagtgagcagctacaggtaaagcactgctacgtggaacagcagctcctcctttgtttttgtgtttgttttttttaagtctcacttacctatttcttttttcccctatttgttaaatttgtctcaattctcaatataccttacttaacatgccatcagtttaatat

SEQ ID NO: 134402 - DNA, 581 bp, Homo sapiens
cattcataataaatgaatgcatacttaaaactgaatacactggccgggcgcggtggctcacgcctgtattcctagcactctggtaggccaaggtgggtggatcacaaggtcaggagatcgagaccatcctggctaacatggtgaaaccccgtctctactaaaaataaaaaaaawaaaaaaattagccgggcatggtggcaggtgcctgtagtcacaactactagagaggctgaggcagaatggtgtgaacccgggaggcggagcttgcagtgagccgagatctcgccactgcactccagagcctgggtgacagagcgagactccatctcaaaaaaaaacactgaatacatcccccctaaaatcaggaacaaggcaaggatgtcttctctcactactgctattctacataatatttgaaggtctaaccaaggcaacaaggcaaggtaaggaaacagaaggcataaaggttacaaagaaaacagattcctatttgtagatgacatgattgcctatgtagtatatcccaaagaatctacagaaaaaggaaatagagtaagtgagcttagaaagtttacaggcgc

SEQ ID NO: 134403 - DNA, 501 bp, Homo sapiens
ttaacaaattgaagaagacccatcagcaagttttttgactcctaaggacaggtaaagtgtgctyttttttatttttcacctttccctatgaatagagtgacttgtttgaaataatgaaggctgtttctttcagagtatttaaattaggtactcacagtttttaaaaattgtcaaaaaattgtagaaagaagaatcatctcaatgaatggtcagcttgcttctaggaactctgatgtgtatgtgtgcctgagggtatacgtgccttgtatatgggtatgagtgtctgtgtatatctgtgtgcctgtttgactgcgtgcctgtgggtgcatgtctctatttgtgtgtttagatcagtcagtttcatctctctagggatctgtcttctgggcattgatggcaaatcattaatatatttgttctctctataggttttattgactgataccaatactcaatttgtagagcaaaccctagatataatgaagaacttgctagataatc

SEQ ID NO: 134404 - DNA, 308 bp, Homo sapiens
ctgctctttatctgatgctatttaacaaattgaagaagacccatcagcaagttttttgactcctaaggacaggtaaagtgtgctcttttttatttttcacctttccctatgaatagagtgacttgtttgaaataatgaagsctgtttctttcagagtatttaaattaggtactcacagtttttaaaaattgtcaaaaaattgtagaaagaagaatcatctcaatgaatggtcagcttgcttctaggaactctgatgtgtatgtgtgcctgagggtatacgtgccttgtatatgggtatgagtgtctgt

SEQ ID NO: 134405 - DNA, 504 bp, Homo sapiens
ctgctctttatctgatgctatttaacaaattgaagaagacccatcagcaagttttttgactcctaaggacaggtaaagtgtgctcttttttatttttcacctttccctatgaatagagtgacttgtttgaaataatgaaggctktttctttcagagtatttaaattaggtactcacagtttttaaaaattgtcaaaaaattgtagaaagaagaatcatctcaatgaatggtcagcttgcttctaggaactctgatgtgtatgtgtgcctgagggtatacgtgccttgtatatgggtatgagtgtctgtgtatatctgtgtgcctgtttgactgcgtgcctgtgggtgcatgtctctatttgtgtgtttagatcagtcagtttcatctctctagggatctgtcttctgggcattgatggcaaatcattaatatatttgttctctctataggttttattgactgataccaatactcaatttgtagagcaaaccctagatataatga

SEQ ID NO: 134406 - DNA, 495 bp, Homo sapiens
ttaacaaattgaagaagacccatcagcaagttttttgactcctaaggacaggtaaagtgtgctcttttttatttttcacctttccctatgaatagagtgacttgtttgaaataatgaaggctgtttctttcagaktatttaaattaggtactcacagtttttaaaaattgtcaaaaaattgtagaaagaagaatcatctcaatgaatggtcagcttgcttctaggaactctgatgtgtatgtgtgcctgagggtatacgtgccttgtatatgggtatgagtgtctgtgtatatctgtgtgcctgtttgactgcgtgcctgtgggtgcatgtctctatttgtgtgtttagatcagtcagtttcatctctctagggatctgtcttctgggcattgatggcaaatcattaatatatttgttctctctataggttttattgactgataccaatactcaatttgtagagcaaaccctagatataatgaagaacttgctag

SEQ ID NO: 134407 - DNA, 374 bp, Homo sapiens
tgatgctatttaacaaattgaagaagacccatcagcaagttttttgactcctaaggacaggtaaagtgtgctcttttttatttttcacctttccctatgaatagagtgacttgtttgaaataatgaaggctgtttctttcagagtatttaaattaggtactcacagtttttaaaaattgtcaaaaaattgtagaaagaagaatcatctcaatgaatggtcagcttgcttctaggaactctgatgtgtatgtgtgcctgagggtatacgtgccttgtatatrggtatgagtgtctgtgtatatctgtgtgcctgtttgactgcgtgcctgtgggtgcatgtctctatttgtgtgtttagatcagtcagtttcatc

SEQ ID NO: 134408 - DNA, 501 bp, Homo sapiens
ttaacaaattgaagaagacccatcagcaagttttttgactcctaaggacaggtaaagtgtgctcttttttatttttcacctttccctatgaatagagtgacttgtttgaaataatgaaggctgtttctttcagagtatttaaattaggtactcacagtttttaaaaattgtcaaaaaattgtagaaagaagaatcatctcaatgaatggtcagcttgcttctaggaactctgatgtgtatgtgtgcctgagggtatacgtgccttgtatatgggtmtgagtgtctgtgtatatctgtgtgcctgtttgactgcgtgcctgtgggtgcatgtctctatttgtgtgtttagatcagtcagtttcatctctctagggatctgtcttctgggcattgatggcaaatcattaatatatttgttctctctataggttttattgactgataccaatactcaatttgtagagcaaaccctagatataatgaagaacttgctagataatc

SEQ ID NO: 134409 - DNA, 545 bp, Homo sapiens
aacaaattgaagaagacccatcagcaagttttttgactcctaaggacaggtaaagtgtgctcttttttatttttcacctttccctatgaatagagtgacttgtttgaaataatgaaggctgtttctttcagagtatttaaattaggtactcacagtttttaaaaattgtcaaaaaattgtagaaagaagaatcatctcaatgaatggtcagcttgcttctaggaactctgatgtgtatgtgtgcctgagggtatacgtgccttgtatatgggtatgagtgtctgtgtatatctgtgtgcctgtttgrctgcgtgcctgtgggtgcatgtctctatttgtgtgtttagatcagtcagtttcatctctctagggatctgtcttctgggcattgatggcaaatcattaatatatttgttctctctataggttttattgactgataccaatactcaatttgtagagcaaaccctagatataatgaagaacttgctagataatcatactgaaggcagccctgaacatctagagcaagctagcattgaaac

SEQ ID NO: 134410 - DNA, 527 bp, Homo sapiens
ttatctgatgctatttaacaaattgaagaagacccatcagcaagttttttgactcctaaggacaggtaaagtgtgctcttttttatttttcacctttccctatgaatagagtgacttgtttgaaataatgaaggctgtttctttcagagtatttaaattaggtactcacagtttttaaaaattgtcaaaaaattgtagaaagaagaatcatctcaatgaatggtcagcttgcttctaggaactctgatgtgtatgtgtgcctgagggtatacgtgccttgtatatgggtatgagtgtctgtgtatatctgtgtgcctgtttgactgcgtgcctgtgggtgcatgtctctatttgtgtgtttagatcagtcagtttcatctctctagggatctgtcttctgggcattgatggcaaatcattaatatatttgttctctctataggttttattgactgataccaatactcaatttgtagagcaaaccctagatatawtgaagaacttgctagataatcatactgaaggca

SEQ ID NO: 134411 - DNA, 545 bp, Homo sapiens
aacaaattgaagaagacccatcagcaagttttttgactcctaaggacaggtaaagtgtgctcttttttatttttcacctttccctatgaatagagtgacttgtttgaaataatgaaggctgtttctttcagagtatttaaattaggtactcacagtttttaaaaattgtcaaaaaattgtagaaagaagaatcatctcaatgaatggtcagcttgcttctaggaactctgatgtgtatgtgtgcctgagggtatacgtgccttgtatatgggtatgagtgtctgtgtatatctgtgtgcctgtttgactgcgtgcctgtgggtgcatgtctctatttgtgtgtttagatcagtcagtttcatctctctagggatctgtcttctgggcattgatggcaaatcattaatatatttgttctctctataggttttattgactgataccaatactcaatttgtagagcaaaccctagatataatgaagaacttgctagataatcatactgaaggcagcyctgaacatctagagcaagctagcattgaaac

SEQ ID NO: 134412 - DNA, 394 bp, Homo sapiens
tctctgaacactatgcaaggtaaatacaaataaaatcgcatctagttacatcatggtaaaagcaaagatattttcaaagtarcaaggtacacgggttgggggaaatgtagagaagaaacatgatttcaaagaggcaaaaattattctaggccgggcacagtggctcaggcctgtactcccagtactttgggaggctgaggtgggatgagcacaggagtttgagatcagcctgggcaacacagtgagacccgatctctacaaaaattaaaattaaaaaattattcaggcatggtagcgcacacctgtagtcccagctacttgggaggctgaggcaggaggatcccttgagtccaaggagtttgaggctgcagtgagccgtgactacaccactgca

SEQ ID NO: 134413 - DNA, 599 bp, Homo sapiens
attctgagttctccatttgaagggtgaattttaatctaattaaacgcttaaacctcasatagcaaaatatcatcaaaagttatactcctgtagctagttcatttgctaaagatgccaaagatgaagctatctaaaaatatctatttcacatttaaatacaatgggctggattagaaaatcgacccctgttaaaaatgaacacatgctgacatttaagctaatgacatataaaaattaaccaatacaaggtttttgaggcgaatggagccgttaaggtgttaacttctaatcaagtaaaacggttttttctacatcctaccttaaataaatataaatactctcagtctcttaaaactaaaagccattcctaagtcaaatcaatcacattttaattataaaagctgggtgagggagaaccctttatgacataaatatataaattatagaggatgcacagtaaagcagtaacaacaacaaaaatctaagaacaaaatgtttagtatgcatccacagaaagttccacaaccataaaacaaacatcaatgcatcttacctctatcattatatgaaaggcgtgcttgtgaagaaaaaacacaggc

SEQ ID NO: 134414 - DNA, 538 bp, Homo sapiens
caatactgtaggggcaagtgatgggctaaaaaatactaagtcttcagatactactacatagttaaaactcattccctatgaaacagtaattcccattgtaaaagcaagaatcccaactcggcctggggaagatgaacacattctgtaaggatctctcatctttctgttcaattaaccaacctgtctrctatggttctgttactttcctagtgaagaagagccttcccatcaatctttttcttcccaaaaccattccaaattaaggtagagatcagaatcagggataaattagtttttaccagaaactaagaaaaagagatttcttaaaagacatatattatgatttttaagtacttaaaatgggtaactgactctggactaaccaagtgttgcttaagacaggctttcccttaatataactttaaaaagaactattttcaattagcgtatcaaagctaccagtttccacagccaagacttctgcttgtaacacaattaatagcaggccctgttttacctacacccacttgtaaattgc

SEQ ID NO: 134415 - DNA, 460 bp, Homo sapiens
gtaacactattcccaagagggtgtgcgaggtagtccagaaaccagtaaatgaaaaaacagtggaaaagactatctggtcaattctcaagcattctaaattcaatctgttttcattaaaactacgggtaagccctctggagtcacccatgatgctaagccacaastgggttccacaagcaagcagtataaggaagtacagaagggtcaggggaagaaaagggagtagacaaagaagggaggaaaatggaaagggaacaataatgaaagggaatggaaaaaacaatgagttacagagcagtgagcaaaaagctaaggcataccagtgacccctagtatcaaatgttgccaaccttacctataatctgagacaacatggcaactggcaacttaacagaccatgaaaacacaaatttaaatcattggactcatgaaatatcaaagatgagaaaatcatagtagc

SEQ ID NO: 134416 - DNA, 474 bp, Homo sapiens
taaatatttctcatggagatctatgatatatcagaaatagaatatcatttttacgtatgatgtgaggtcggggacaagtctcatttttatctctaagactgtccagtttattcaactatttatagaacataccaacatttcttcacaacattgcaatggcacttttatcataaaacaggtgactgtacacatggtggatatgtttctggactatctgatttgttccttcagtttttttttttattcttgagccattaccacactgttttaattactatagctttacaataagtcttaacatctggatgtgagccctctttgctctttaagattattttgagcatttcagactctaatttgtgatttcatattttaaaattagcttgcctatttttatcaatrtatctaaattctagcatcactgtatccaattgccaccaaactaaaaacaaaagcacaacctgttatgctttt

SEQ ID NO: 134417 - DNA, 494 bp, Homo sapiens
gtaggactaagaatatgaggtttgaaactgctgtaaattccagttttgttggaggatcccaaggaatcctgcctccagggcagagtgaatataagtcctttgttcacactttgagattttgttgaacacctactgcatagcatctgtttggtgctgtctacrtaagacaccaggataaaaagaagacagagtcctgtcctggagaagctcatgggctgacagcagcacagtgataaaacacagttaccatttatggagtgattacaacagagctcactttccttattttccttaatccccataaaattcttctaggtaaatgtgtattcttatgaccattttgaagacgaggaaaatggggcctaaataaatgaaggaccttgaaagcattggaatatagtgtgagccttgctataatagaaaaatatgcaaataaaatataatgggattaaagctaattgaatgcttacaatacttatggtatgttgagcatt

SEQ ID NO: 134418 - DNA, 574 bp, Homo sapiens
aattgagacaagtgtagccagcagaggaagtgttggaaaagataagggacatggccaggctgatcacaaggtcaggagttcaagactagcctggccaacgtggtgaaactccatgtctactaaaaataaaaaaattagccaggcatggtggtgggcacctgtaatccacttgggaagcaaccagaagaattgcttgaacccaggaggcggaggttgcagtaagctgagactgcgccactgcactccagcctgggtgatagagcaggactccgtctcgaaaaaaaaawttttttttaagttaagggacagagctaccatgcacaagggttccctgtgtctctgcctctcacagtacctcctgcagtgtccgacatccgggtgacgcggtcctcacccagcagcttgagcctggcctgggctgttccccgggcacccagtggggctgtgctggactacgaggtcaaataccatgagaaggtaaggccatcccccagccctggggtgggtgggcaatgggttgtgctctcctggctgggacacctgggttgcaggcacctggcaggcatttgaattc

SEQ ID NO: 134419 - DNA, 574 bp, Homo sapiens
aattgagacaagtgtagccagcagaggaagtgttggaaaagataagggacatggccaggctgatcacaaggtcaggagttcaagactagcctggccaacgtggtgaaactccatgtctactaaaaataaaaaaattagccaggcatggtggtgggcacctgtaatccacttgggaagcaaccagaagaattgcttgaacccaggaggcggaggttgcagtaagctgagactgcgccactgcactccagcctgggtgatagagcaggactccgtctcgaaaaaaaaatttttttttaagttaagggacagagctaccatgcacaagggttccctgtgtctctgcctctcacagtacctcctgcagtgtccgacatccgggtgacgcggtcctcacccagcagcttgagcctggcctgggctgttccccgggcacccagtggggctgtgctggactacgaggtcaaataccatgagaaggtraggccatcccccagccctggggtgggtgggcaatgggttgtgctctcctggctgggacacctgggttgcaggcacctggcaggcatttgaattc

SEQ ID NO: 134420 - DNA, 375 bp, Homo sapiens
actgtagcctcaatttcttgggcttaagtgatcttcccacctcagcttccaagtagctgagactacaggagtgcaccaccacacycagctctttttttctttaatttttagtagagacgatgtctccctatattgcccaggctgatcttgaactcctgagctcaaagcaattcgcccacctcacctccaaaaatgctgggattacaggcatgagtcacccacgcccagcaggaaactgcttaacctctctgaactccatgtttgttatgtataaattaggagtgctgtgctaaccatcagggctgaaggagatcatgggaaggaacgctagggaaggattcggtaggtcatggatgcttagggatcgggagatct

SEQ ID NO: 134421 - DNA, 447 bp, Homo sapiens
cctgctctaggttagactttgacttaagggaatgttgtggctggtttgagcttctattcagactactaaaactttytctgtattagcaataagaacaagaagcctgtttcattcttatcatttgtgtattcactggagtatcatgttcaatttccttcaagaacttttccttggtattcacaacttggccaacctgttggcatgagaggcctaacgtttgtcctatctcagctttcaacatggcttcctcactaagcttaatcatttttaagcttttgatttaaagcgggtgatttaaagtgagagatatgcaactcttctttttacttaaacactttagaggccattgtaggattactaattgacccaattttaatattttgttttagggaatatagagacctgaggagagggagagaggtggaggaatgcccagttggcatagca

SEQ ID NO: 134422 - DNA, 447 bp, Homo sapiens
cctgctctaggttagactttgacttaagggaatgttgtggctggtttgagcttctattcagactactaaaactttctctgtattagcaataagaacaagaagcctgtttcattcttatcatttgtgtattcactggagtatcatgttcaatttccttcaagaacttttccttggtattcacaacttggccaacctgttggcatgagaggcctaacgtttgtcctrtctcagctttcaacatggcttcctcactaagcttaatcatttttaagcttttgatttaaagcgggtgatttaaagtgagagatatgcaactcttctttttacttaaacactttagaggccattgtaggattactaattgacccaattttaatattttgttttagggaatatagagacctgaggagagggagagaggtggaggaatgcccagttggcatagca

SEQ ID NO: 134423 - DNA, 447 bp, Homo sapiens
cctgctctaggttagactttgacttaagggaatgttgtggctggtttgagcttctattcagactactaaaactttctctgtattagcaataagaacaagaagcctgtttcattcttatcatttgtgtattcactggagtatcatgttcaatttccttcaagaacttttccttggtattcacaacttggccaacctgttggcatgagaggcctaacgtttgtcctatctcagctttcaacatggcttcctcactaagcttaatcatttttaagcttttgatttaaagcgggtgatttaaagtgagagatatgcaactcttctttttacttaaacactttagaggccattgtaggattactaattgacccaattttaatattttkttttagggaatatagagacctgaggagagggagagaggtggaggaatgcccagttggcatagca

SEQ ID NO: 134424 - DNA, 554 bp, Homo sapiens
gttagactttgacttaagggaatgttgtggctggtttgagcttctattcagactactaaaactttctctgtattagcaataagaacaagaagcctgtttcattcttatcatttgtgtattcactggagtatcatgttcaatttccttcaagaacttttccttggtattcacaacttggccaacctgttggcatgagaggcctaacgtttgtcctatctcagctttcaacatggcttcctcactaagcttaatcatttttaagcttttgatttaaagcgggtgatttaaagtgagagatatgcaactcttctttttacttaaacactttagaggccattgtaggattactaattgacccaattttaatattttgttttagggaatatagagacctgaggagagggagagaggtggaggaatgcccagttggcatagcagttagaacacacacaatgctyattaattatatttgccatcatatgtgggtgtggtttgtggcatcccaaaacaattacaatagtaacatcaaagatcacagatcacagacaactgta

SEQ ID NO: 134425 - DNA, 551 bp, Homo sapiens
gaacaaagacaggcagtttgggtacataaatgagtatacatgtatagtttatatttacatttatattcatatttttaggtacatgcttacctgtatataggtctatctatagttaggtgttctcaaataatctcccagtacatttcaaaatatacttaggccacctagaatgcagtgtccactgaagacatgtcttgggaatgcttactgtttgctgcctttgaagtgtgtgaatagcatgaatgttttaaggttgcctgttttggggagttgtggtcacttataatggggctggacaacttgaagaaagaatgataataaaaawtttttaaatttttggcacaaaagatggatcattcacagggactttctatacaacttttaaaaaaattttctatattttagagctttaagaccaagagaaaataaaataagtttcatcttgcaggttgctgatataatttccgttgaattcatggcttttatcaaattggtgcaagagtaaggacgttgattgttttaactattgtgggaaggtaggaaaagtgttt

SEQ ID NO: 134426 - DNA, 551 bp, Homo sapiens
gaacaaagacaggcagtttgggtacataaatgagtatacatgtatagtttatatttacatttatattcatatttttaggtacatgcttacctgtatataggtctatctatagttaggtgttctcaaataatctcccagtacatttcaaaatatacttaggccacctagaatgcagtgtccactgaagacatgtcttgggaatgcttactgtttgctgcctttgaagtgtgtgaatagcatgaatgttttaaggttgcctgttttggggagttgtggtcacttataatggggctggacaacttgaagaaagaatgataataaaaattttttaaatttttggcacaaaagatggatcattcacagggactttctatacaacttttaaaaaaattttctatattttagagctttaagaccaagagaaaataaaataagtttcatcttgcaggttgctgatataatttcmgttgaattcatggcttttatcaaattggtgcaagagtaaggacgttgattgttttaactattgtgggaaggtaggaaaagtgttt

SEQ ID NO: 134427 - DNA, 520 bp, Homo sapiens
tgttctacattttatggtttctcggtcacaaaagaaggaagaattaaaccaaactttaaggaagttaagattttattataagggtgtaggtacaggatatttcagaaggtgggaatcacacaaaccaaatgtagaacaagagagtgtgaacttcctgttagaggatgcagagtggtttgtggttygtcctaaatattataaagatcagaaagcagatattttgaaatataaaccatcagtactacactgtggatgaaggtaacagtatgattggatttgggcttatgatgaaaggtgttgatgtccatctatccctaggtaactggttcacttgaatcctttaagtttcttacatttggcctttggtcaatatcattcctctaattctgttgctacttatcaaatcaaaaaaggcatggtgaagaattattctgcatccttgtatttttaacattaaaggaaatgaagatatatctctggttactttaaggaagttttctgtcatagtgacctgtggtct

SEQ ID NO: 134428 - DNA, 520 bp, Homo sapiens
tgttctacattttatggtttctcggtcacaaaagaaggaagaattaaaccaaactttaaggaagttaagattttattataagggtgtaggtacaggatatttcagaaggtgggaatcacacaaaccaaatgtagaacaagagagtgtgaacttcctgttagaggatgcagagtggtttgtggttcgtcctaaatattataaagatcagaaagcagatattttgaaatataaaccatcagtactacactgtggatgaaggtaacagtatgattggatttgggcttatgatgaaaggtgttgatgtccatctatccctasgtaactggttcacttgaatcctttaagtttcttacatttggcctttggtcaatatcattcctctaattctgttgctacttatcaaatcaaaaaaggcatggtgaagaattattctgcatccttgtatttttaacattaaaggaaatgaagatatatctctggttactttaaggaagttttctgtcatagtgacctgtggtct

SEQ ID NO: 134429 - DNA, 520 bp, Homo sapiens
tgttctacattttatggtttctcggtcacaaaagaaggaagaattaaaccaaactttaaggaagttaagattttattataagggtgtaggtacaggatatttcagaaggtgggaatcacacaaaccaaatgtagaacaagagagtgtgaacttcctgttagaggatgcagagtggtttgtggttcgtcctaaatattataaagatcagaaagcagatattttgaaatataaaccatcagtactacactgtggatgaaggtaacagtatgattggatttgggcttatgatgaaaggtgttgatgtccatctatccctaggtaactggttcacttgaatcctttaagtttcttacatttggcctttggtcaatatcattcctctaattctgttgctacttaycaaatcaaaaaaggcatggtgaagaattattctgcatccttgtatttttaacattaaaggaaatgaagatatatctctggttactttaaggaagttttctgtcatagtgacctgtggtct

SEQ ID NO: 134430 - DNA, 448 bp, Homo sapiens
aaaaagatccacacagtttaggttgtgtttagtccgttctcaagctgctataaagaaatacctgagactgggcaatttataaaggaaagaagtttaattgacttacagttctgcatggctggagaggcctcaggaaacttataatcatgctggaaggcaactcttcacagggtgtcagagaatgggtgcaagcaggggaaatgccagacacttaaaaaaccatcagatctcatgagactcactcattattaggagaacagcatggggtaaattgtccccatgattcaattacttccacctggtcctgcccttgatatgtagrgattctggggattacaattcaaggtgagatttgggtggggacacagagcctagccatatcaggtagattatgtgcattttattctatactagttagacttctctacagtcctaattaacattatca

SEQ ID NO: 134431 - DNA, 608 bp, Homo sapiens
acctaatccccactgtgatggtatttggaggtggggcctctgagaggtgattagttcattagagtcctcatgaatagcatttgtgctgttatagaagaggtctcagagagctcctttctcctttccaccatgtgaggacccagaaaagacagcagactataaaccaggaagtgggccctcatcagacgctgactctgctagcactttggtattggattgtccagccctcagatttgtaagaaataagtttctgttgtttacaacccacccaatctatagtgttctattacagcaatctgaacagactaagacaatgccataatgtgaatgtgggcttcagatgtgcaacaaaacagggaaaaatggacagtgtgaatgttgagccaaaagagagaaatgcattatgaatgatatttagaagacctaggggtcccaaamgattgttttttgaatctgccatgctacaaaaacagctaaaagaaaaatgaaaaaaatgaccttaatcaagacatctgaagatactgtagaagtagaaatgtaagagggaacagctttgctccctaatggttatcactggggagaaactcattatgtcttagcctttcatg

SEQ ID NO: 134432 - DNA, 612 bp, Homo sapiens
tttcagtcattcttgggcctcagcctcccaagtagttgggattacaggtgcctgccaccactcctggctaattttcgtatttttagtagagatgggatttcaccccaggctggtctccaacccctgacctcaggtgatccactcacttcggcctcccaaagtgctgtaattacgggcataaggtaccgcacctggctcaagctttgttttagatactgaggatacagcagtgaaaaaatagaggcaaaaattcttgacctcaattctgctcctctatgaactcatattcttctcgacaataaatcagattgaatacagggtgataagtgctaagaagaaaggagaaaaggggatacaactttcatcctagagactgtaattttagcttggctaggaaagttacccatcaaggagaatattcttaagtaaaaacctggtgtatgaagaaggttaataacttgctgtttaaagtgaaggctagtgaaggagcaacattccctatgtacatgtaaattgkaactgctgctttctttactctgttgttggcctagttaggggtggcaactcaagcatggtgaggccttcttaggaagtcttgagccagtgaagcaa

SEQ ID NO: 134433 - DNA, 625 bp, Homo sapiens
ctgttttttaaaagtaataaactttggaatggcactgatttcttaaaacatgacagtatcacaaaatccccataatagaagctctgagtctctcatttcttttcaaaaaatttgtttaaaaattttttgttttgcttcattttttttttttttctttaaagagacagaacagctggttctctctgakctactgttttggattcagctgcagtgattatttaatactttgtgcatgcatcattcatacctagtatgttctgctccacaaaagacatttgtgggttaatgaagttgtacacatgtatgtcatcaaggacctgttttaagcataaggcgctatggaagctcttctatttaatgcaaaatatcccacctaaaatttctggttagtaaatttgaatttttagtcttttgtacaaataatttcatggtgccataggcactggggtcgggattagtagcattttgatttggtgagcaggttaattgtgtataaagtaagcttttgttaatgcaaaaagttgcttcacctctcttgcatgcacatggcattatagagatcatttttacaatgtgtaatcataaaggggatctttagagactgttttctgccagtcacagtaaa

SEQ ID NO: 134434 - DNA, 592 bp, Homo sapiens
agtatccatacaaaaatacccaaagaaataacagatgaataagaataaaagctatctggtgtattaaaacatttaatgtaaaaattatagccataaaactgtaaaacgatacttcawaatgaatttaaaacagtataaagagaaatcacagttacaaaagagtatcatgaattagaaatttaagacaaaggatacaaaaagaaaagcaatataaaactaggtaattaacagaatgcaggaaggaaatgaagaacatgttaaaatcatctgagaaatttgaaataaattacaaatttatgtatctggtacattgtcatggtacaaataaatatacatttatgtatttggttgttttagctgctcaggcttcccaggttgcataacagtgtaccagagactatggtttaaacaacaaaaatatgttttatcaccattctggaggctggaaaatccagggtcaggggccagcagggtctggtttctgatgagggctcttttcctggcttgcagacattgtgtactcatatggcctttgctcagtgcatgcatttgaagaaactctctccttaattttctcttcttataaggtcac

SEQ ID NO: 134435 - DNA, 592 bp, Homo sapiens
agtatccatacaaaaatacccaaagaaataacagatgaataagaataaaagctatctggtgtattaaaacatttaatgtaaaaattatagccataaaactgtaaaacgatacttcaaaatgaatttaaaacagtataaagagaaatcacagttacaaaagagtatcatgaattagaaatttaagacaaaggatacaaaaagaaaagcaatataaaactaggtaattaacagaatgcaggaaggaaatgaagaacatgttaaaatcatctgagaaatttgaaataaattacaaatttatgtatctggtacattgtcatggtacaaataaatatacayttatgtatttggttgttttagctgctcaggcttcccaggttgcataacagtgtaccagagactatggtttaaacaacaaaaatatgttttatcaccattctggaggctggaaaatccagggtcaggggccagcagggtctggtttctgatgagggctcttttcctggcttgcagacattgtgtactcatatggcctttgctcagtgcatgcatttgaagaaactctctccttaattttctcttcttataaggtcac

SEQ ID NO: 134436 - DNA, 542 bp, Homo sapiens
tacatgtagtctgcttgttagtgggaaaaatagttctggcaaaccaaatagcccaattcatgagggaaagttttctctacatatgaatgttagctaataaatacagaggaatgrtagaattttaaaaatacacacaaataaaatctaattatttatatgtatttgtgcctgtgtatatttcctattgttagaaaaatataggaaatatataaatatatataaaatttcctttatattcctacatataggaaattcatatatgtatagtaaatatatataattccttcatatataatcctttcgtatatagttactgcaagaaagaagtcttttatttaacagtcatttaaggacttaatatgtgtgtttcataaatgctgaatgtttaatatttgtattattttttcaagctagatcattttaagtaagagttatgaatgccattaaatcataattcagaactggaaggacccaaagaagtcatttggttgactcccttctctgtgtgccatctcattttataaataggaatcacttcatac

SEQ ID NO: 134437 - DNA, 542 bp, Homo sapiens
tacatgtagtctgcttgttagtgggaaaaatagttctggcaaaccaaatagcccaattcatgagggaaagttttctctacatatgaatgttagctaataaatacagaggaatggtagaattttaaaaatacacacaaataaaatctaattatttatatgtatttgtgcctgtgtatatttcctattgttagaaaaatataggaaatatataaatatatataaaatttcctttatattcctacatataggaaattcatatatgtatagtaaatatatataattccttcatatataatcctttcgtatatagttactgcaagaaagaagtctttyatttaacagtcatttaaggacttaatatgtgtgtttcataaatgctgaatgtttaatatttgtattattttttcaagctagatcattttaagtaagagttatgaatgccattaaatcataattcagaactggaaggacccaaagaagtcatttggttgactcccttctctgtgtgccatctcattttataaataggaatcacttcatac

SEQ ID NO: 134438 - DNA, 468 bp, Homo sapiens
cctttactgatttcagttctgtttgtattaacatgaaacttagttcatggcctagacatattaccttaacaacataacacattttaaaaattgattgtatatttaaagcctatgccttaattcagtatgcaagatacaatctccctgcctcaaagtaattacattccttgaccaaattagtcaaagcatctagactttatcttgaattaggatcaatttggaatctgatgttaaagacagtaaatcccttttgctaaagaagaccactcaatatttttctacttgtcaaktaattaattgtgaaatattgctaccttttccttttcatattaccatccactgggacaacacccttaatccagcaactctagtaaacttacccagtgaaaaagaatttcgtaattctgtttttataacacagtaagtgttcatgtccagaacaaaacttttgatcactctagtaccaaa

SEQ ID NO: 134439 - DNA, 553 bp, Homo sapiens
aaacctaactctccaagtgtcagaccgacaccagtgcttttagcattgtttacatgattgttgggtaaggaagaacaaagaatctatgagcttaaaataagttgcagtttgccatttgattatgtaaatatgtggttacatgatccccaaattctccaaatcacattttatgcacaaaggcaaaaccagcttttgtgtcttgaaaaacaggtgcacaattatccctgcaaagaaaaagagagtcatttgcagtgattttttggggaaatgattgagcaattacagacatacatactaattttgtttcaccctctgaccatcttctatttgcaaaatgcataggctttttctctctcyttgataagagaaagaagctgcagaaacaaagataaggaagtcggacaatttatgctgctgccagtggacatcaacctggcactacttgttcaagcatttttcagtgagtacttgccatgcctgatcatttaataaaataccttggtagtttaattcatatcttactaatatgacttgcctaaacacccccacagaa

SEQ ID NO: 134440 - DNA, 593 bp, Homo sapiens
attttgatacatgcatataatgtgtattgatcaaatcaggataattagcatatgtgtcacctcaaacatttatcccttctttgtggtgggaacactgaaaatcctttcttctacctattttgagatatacactaccttattttttgctattgtcaccctactatgcaataggacaccagaacttattcttccttcctgattgtaaatttgtacccattgacaaacctctctccaccctcctattcccttccctagttttcattaacctgttccattcactacttctataagagcaacatttttagattccacctaagaatgagaacatgcagtatttgtctgtgtctggcttatttcacttaacaaacataatgtcctctaacaacaacaacaacaaatgtagtgcttaatgtccaaaaaatatggacagcacrctcatgaagattctaacttctcatttagacacaaattctgaaatggtttccagtagaaactgggttctcaattcctggctggaacaaaaaacgtccaccaatgccatcaagcaaaatgagtaggtctctttttggaccttttgagtgtaatgactaaat

SEQ ID NO: 134441 - DNA, 478 bp, Homo sapiens
gaattctcttgcttgatttttaatatttaatatttctttttatttttaattattgtgaatacataatagttgattaaaaactaaccagtttaactcctttggaagcccttgactgagcacatataaatatatatgtatatgaggcrtacagaaaatgcaaagttgcagaagggtgactggtatactcttagtgtggatgagactagaaaaaaggttaaagaaaaggataagataccacttgaaggaaaacactatgttgtttagacatgtgagtaagcttaattattcaatttttatgctttgtccttccatatccaggagaataactttaaaacggacaagtatagagtaaacaaacataattaagaaaaaatgaaagctcaagacagataactgtgggcaccttgatcttttaaatgaagtcacttcctcagatccaaataaatactttttggagggatgttttatgaaggtgaag

SEQ ID NO: 134442 - DNA, 543 bp, Homo sapiens
atatttaatatttctttttatttttaattattgtgaatacataatagttgattaaaaactaaccagtttaactcctttggaagcccttgactgagcacatataaatatatatgtatatgaggcatacagaaaatgcaaagttgcagaagggtgactggtatactcttagtgtggatgagactagaaaaaaggttaaagaaaaggataagataccacttgaaggaaaacactrtgttgtttagacatgtgagtaagcttaattattcaatttttatgctttgtccttccatatccaggagaataactttaaaacggacaagtatagagtaaacaaacataattaagaaaaaatgaaagctcaagacagataactgtgggcaccttgatcttttaaatgaagtcacttcctcagatccaaataaatactttttggagggatgttttatgaaggtgaaggtgcagaggtgggaaaataaccacttgctaattttaaagaattgcagaatttgggagaggtgccacaaagaagaagtccttgcagaa

SEQ ID NO: 134443 - DNA, 622 bp, Homo sapiens
ttctaccttatggttgagcaaactgaaactcagatagtatcacctgcccaaagtcttggtagagtcaaaaacagaactcaggactctggaatcccagaattttaagagcagaaatgcyctttcaaaaagaactctcagaggtctcatttaattgtgacccaggtatcagccttatgcaacctgtcttaaaggaaaactcaagctcaaatttattttctacttcaattttcctttaagtcagatggattcttttttttttccactaatcctttttaatgagaaaaacctgagttgtacataccacaaagagcttcaagtttctataccaactccaatgaccaaacaattgaacataacctgaagcatcatttttaatgtggaaagtttcaaaaacttaactcacaaaaacatccctatagaggtgtcatgaacatatgatggagaaaagacaatctcttcaataaatggtgctgaaaaaactgagtatccatatgcagaagaataaaactagatccctatctctcaacatatagaaaaatcaaatcaaaatggattaaaaactcaaatctaagacctcaaactatgaaacaactaaaaaaatactgagaaatttctccagaac

SEQ ID NO: 134444 - DNA, 622 bp, Homo sapiens
ttctaccttatggttgagcaaactgaaactcagatagtatcacctgcccaaagtcttggtagagtcaaaaacagaactcaggactctggaatcccagaattttaagagcagaaatgctctttcaaaaagaactctcagaggtctcatttaattgtgacccaggtatcagccttatgcaacctgtcttaaaggaaaactcaagctcaaatttattttctacttcaattttcctttaagtcagatggattcttttttttttccactaatcctttttaatgagaaaaacctgagttgtacataccacaaagagcttcaagtttctataccaactccaatgaccaaacaattgaacataacctgaagcatcatttttaatgtggaaagtttcaaaaacttaactcacaaaaacatccctatagaggtgtcatgaacatatgatggagaaaagacaatctcttcaataaatggtgctgaaaaaactgagtatccatatgcagaagaataaaactagatccctatctctcaacatayagaaaaatcaaatcaaaatggattaaaaactcaaatctaagacctcaaactatgaaacaactaaaaaaatactgagaaatttctccagaac

SEQ ID NO: 134445 - DNA, 575 bp, Homo sapiens
acagtttctgtgactttgagaagattatacattgtggatagacttagaatttataataaaatccccatcagttaatattttcaaaatcaactcatattgtcagtgtattcaaatgcttttagagaaaatatgacactgcacaaaaaaaattaggaagtgttagccataattttcatatatattaaaaatcagtatacttgaaataatattattttagcagtgcttagtctcatgtttaataaaattcatttgtatgaacatgttttcagagatttcagtgctattaatctaattgaagttacttgattacatggagatgaatgttaaaatgactaatattttctggagacaaatttaatttgcttttaagtactatagcaaatgacattcttctagatctctgaatggtattgatgtttrtgtgttcaggtgttgtacaaattaaggaactaaatcactttcataggtgggagttaaatgtggtagagaagtcattaaagtaatttacagctgatgatatgtcaaagcagtttcctatgaaatcctagagagatgggagggagcatgaatcattg

SEQ ID NO: 134446 - DNA, 390 bp, Homo sapiens
tacttgggaagctgaggtgggaggatgaggctgcagtgagccgtggttgcatccatgcrctccagcatggatgacagagaaaaactttgtctcaaaaaagagaaagtcattgtaggcttttagtgggcaaatgaagtattcaagtctgtaagttattaatcaaatgcagtttaaatataaaagcccatataaaaatatagtttaagaaataagcaccagaacaaacaatttctgaaacattttcagtggattatttccaatggaaatagataaaaatgtgtccaattaaagaatccattataaaaataggttataagataaaaatgtaaacattcttcatactcagcatctccaagtactcaaagatcccagagtcatagcactttaaaa

SEQ ID NO: 134447 - DNA, 390 bp, Homo sapiens
tacttgggaagctgaggtgggaggatgaggctgcagtgagccgtggttgcatccatgcactccagcatggatgacagagaaaaactttgtctcaaaaaagagaaagtcattgtaggcttttagtgggcaaatgawgtattcaagtctgtaagttattaatcaaatgcagtttaaatataaaagcccatataaaaatatagtttaagaaataagcaccagaacaaacaatttctgaaacattttcagtggattatttccaatggaaatagataaaaatgtgtccaattaaagaatccattataaaaataggttataagataaaaatgtaaacattcttcatactcagcatctccaagtactcaaagatcccagagtcatagcactttaaaa

SEQ ID NO: 134448 - DNA, 653 bp, Homo sapiens
ttatgggaactcaaattcaagatgagatttgggtagggacacagccaaaccataacaattcctttgggaaagcaagttcccaaatggtgtttgaacaacggaaaattaaattagtaaatctcaacctcctacatcactctatgtacaaaaattatttcaagattaatcattgacttaaaataaaagttagaaaaataaagcatctagaaaaaacattgaagtagatcttcatacgtttgagataggcaaagatttctttagagcataaaaagcaccaaacataaaacaaaacttgataaattacacaacatcaaaaataagaacttctgcacattaaaaaatgttrtaagaaataaaatcaagcttcagacttggagaaaatatttacaacacaattattttacaatacaaatatctaacaaaggacttgtatttagaatatataacgacctgcaaatcaataatgaagaaatctactcaataaatatgcatataatatgtaaacattttaccaaaaaaaatgactgttcaacatgaacataaaaaggtgcttatcagggaaataacaattaaaaccaccacaagatacatactagaatgtttaaaataaaaaggactgaaaataccaagttttggcaaggaagtgaaaccac

SEQ ID NO: 134449 - DNA, 621 bp, Homo sapiens
ttttaaaaaatcagcatatcgatgcagctaaaccaaagagaaaggttctccacaagcttatgcccctttaaaacacatgcaactttcagttcctgaaagaatttgccaccaagttgtgaagaagataaccttctagagcatttaaaattaaattctccagtaattcagttgagatctgcaagtctctrttgcctgcccactctttgctaagcccacataaactgaaaaaaaaaaaaaggattctctactatccatgtactttagggacatgggagtgagagaaagcaactgaacaaagagtttaatgaaagagccctatttggggcctagtttcggtgtaacttggaaaattatttatcacatttctgatataacataactttgtttcatatgaggcgatttctattatatcacttatcatgggacaaaactctgttatataacaggtgatataaggaaagtcatatttctctagcacattgtaggtatcagtaaatgtattttgaaggaaaaaaggaaggaggaagttaaggacaaaaggacacaaaaaacaaaaacagtctccagcatgcatcatccaaaaatatttccttcatgtcttattcatctttgtgtctccat

SEQ ID NO: 134450 - DNA, 569 bp, Homo sapiens
agttttgttgtaatctaagtcaacccctcatagtatgtgaaccactttgaaaatctgagatgattgttctgagattctacagggggaagaatcatataaaacaatgtccaaaaaagttcatactaaaataacctatttatattttccctgttttaacttgcwatattttaaacacaatgtagaattatgttggatcattatttaaaaaatacccacgtgtttgtggctcttcactgtgataccacctctattctctgcttgaatcaatagcatttcaacacttttactgctttgagaagaaattattccagtctgttcagtctttgagccaaatctctcagtctgactttgagatcctcactaaaagctctagttccctcatgaggcaaaactgtttctagagtatgtttcaaagcaaagttgtgtaaccaacaattaaacaattaacaaactaaaatagtttaaagttaggcttagtaactttacacatttacttgttacattatatattacaactattttttatgaattaaaatttcgatctcagctaaataatttcagtttcttca

SEQ ID NO: 134451 - DNA, 569 bp, Homo sapiens
agttttgttgtaatctaagtcaacccctcatagtatgtgaaccactttgaaaatctgagatgattgttctgagattctacagggggaagaatcatataaaacaatgtccaaaaaagttcatactaaaataacctatttatattttccctgttttaacttgctatattttaaacacaatgtagaattatgttggatcattatttaaaaaatacccacgtgtttgtggctcttcactgtgataccacctctattctctgcttgaatcaatagcatttcaacacttttactgctttgagaagaaattattccagtctgttcagtctttgagccaaatctctcagtctgactttgagatcctcactaaaagctctagttccctcatgaggcaaaactgtttctagagtatgtttcaaagcaaagttgtgtaaccaacaaytaaacaattaacaaactaaaatagtttaaagttaggcttagtaactttacacatttacttgttacattatatattacaactattttttatgaattaaaatttcgatctcagctaaataatttcagtttcttca

SEQ ID NO: 134452 - DNA, 569 bp, Homo sapiens
agttttgttgtaatctaagtcaacccctcatagtatgtgaaccactttgaaaatctgagatgattgttctgagattctacagggggaagaatcatataaaacaatgtccaaaaaagttcatactaaaataacctatttatattttccctgttttaacttgctatattttaaacacaatgtagaattatgttggatcattatttaaaaaatacccacgtgtttgtggctcttcactgtgataccacctctattctctgcttgaatcaatagcatttcaacacttttactgctttgagaagaaattattccagtctgttcagtctttgagccaaatctctcagtctgactttgagatcctcactaaaagctctagttccctcatgaggcaaaactgtttctagagtatgtttcaaagcaaagttgtgtaaccaacaattaamcaattaacaaactaaaatagtttaaagttaggcttagtaactttacacatttacttgttacattatatattacaactattttttatgaattaaaatttcgatctcagctaaataatttcagtttcttca

SEQ ID NO: 134453 - DNA, 415 bp, Homo sapiens
tccacaaaaagactacattgagagattaaaatagatccctcaatgatttgtaggaatgtagtcttggaagctctgattggataattaagccttccgtagacactttcaattttaacctgcctttacattcttggtgggtgaaatatttctcctaaggaaaatattatcatatttaggattttagaaatgatcagtgcctgaatcatcttcacatgtattcagttctttagtccatcaagtgcaaaaatacatttggaatgatagatactttatagatataaaatcctattgaaaaggaaggtgttttcagttagctgttcaattatgcatttagttagtatcaaaataattcatactatgtaatttgggtgaaatttaacacaactcrtgtacactaagggggaaaactgaattc

SEQ ID NO: 134454 - DNA, 608 bp, Homo sapiens
aacccctgatgactggcaatcagataatttcctggtcccccttcatttataatgtcattggtgcgctatgattagtgtcactattttatgcagaaacttggctttttcaataaggaaagcaactcaggtagtcaaaagaagagggcagtgcctatctgctgaacagttgcttaagatgggttcacagaaagattcatgagtaaaaaaaaaaaaaaaaatacagatacaaattctggctctaatatctgctatactttttactggggccaagatgattgtattagaatagtctgccttctcttctttagcataggraattccatggctggataaggtgacaagcagagcaagtttttttctcttgcctatactctggtctgcatacagattaatctgtggaatctgagacaattggtaaatctctcatgaatacccttggattgtccagaaccccacctctcacctgagtgaagaggtcagtccaacacttgttgaacccaaacactctatcttcggtatccaatcaccaaaatagttttggaatattgatgaaacgtacatgcccttccttcaagaagattgtatctaatggaatggagagggaaggg

SEQ ID NO: 134455 - DNA, 605 bp, Homo sapiens
agatctgaataggaaactttgtcatctattgtctctaagggcagccattatragacttcgaaagaactttggtctccaaatcttttatcttaacctgaactttccctttctatggattccaggtctttagacaaatgcaaccaattgtcaaccagaaaatgtttaaatttacctatagcctggaagccacccgcttcctcccacccttccctactttgagttgtcctgcctttctgaaccaaaccaatgtgtttcttaaatgtatttgattggtgtctcatgcctctctaaaatgtataaaactaagctgcaccccaaccaccttgggcacatgttctgaggacttcctgaggtctgtgtcacgggccatggtcactcgccatgtcgatagaagttcaaaccagccacaacattcccttaagccaaagcctaatcgaaagcaagaccctaactctcttcagttctctgaagattgaaagaggggagaaagctgaagaaaaaaagtccgacagtaacagaagttggtttatgaggtttaagaaaagaagccctgttcataacataaaaattcaagatgaggcaggccgatgcagatgtagaagcta

SEQ ID NO: 134456 - DNA, 605 bp, Homo sapiens
agatctgaataggaaactttgtcatctattgtctctaagggcagccattatgagacttcgaaagaactttggtctccaaatcttttatcttaacctgaactttccctttctatggattccaggtctttagacaaaygcaaccaattgtcaaccagaaaatgtttaaatttacctatagcctggaagccacccgcttcctcccacccttccctactttgagttgtcctgcctttctgaaccaaaccaatgtgtttcttaaatgtatttgattggtgtctcatgcctctctaaaatgtataaaactaagctgcaccccaaccaccttgggcacatgttctgaggacttcctgaggtctgtgtcacgggccatggtcactcgccatgtcgatagaagttcaaaccagccacaacattcccttaagccaaagcctaatcgaaagcaagaccctaactctcttcagttctctgaagattgaaagaggggagaaagctgaagaaaaaaagtccgacagtaacagaagttggtttatgaggtttaagaaaagaagccctgttcataacataaaaattcaagatgaggcaggccgatgcagatgtagaagcta

SEQ ID NO: 134457 - DNA, 605 bp, Homo sapiens
agatctgaataggaaactttgtcatctattgtctctaagggcagccattatgagacttcgaaagaactttggtctccaaatcttttatcttaacctgaactttccctttctatggattccaggtctttagacaaatgcaaccaattgtcaaccagaaaatgtttaaatttacctatagcctggaagccacccgcttcctcccacccttccctactttgagttgtcctgcctttctgraccaaaccaatgtgtttcttaaatgtatttgattggtgtctcatgcctctctaaaatgtataaaactaagctgcaccccaaccaccttgggcacatgttctgaggacttcctgaggtctgtgtcacgggccatggtcactcgccatgtcgatagaagttcaaaccagccacaacattcccttaagccaaagcctaatcgaaagcaagaccctaactctcttcagttctctgaagattgaaagaggggagaaagctgaagaaaaaaagtccgacagtaacagaagttggtttatgaggtttaagaaaagaagccctgttcataacataaaaattcaagatgaggcaggccgatgcagatgtagaagcta

SEQ ID NO: 134458 - DNA, 607 bp, Homo sapiens
tttgtcatctattgtctctaagggcagccattatgagacttcgaaagaactttggtctccaaatcttttatcttaacctgaactttccctttctatggattccaggtctttagacaaatgcaaccaattgtcaaccagaaaatgtttaaatttacctatagcctggaagccacccgcttcctcccacccttccctactttgagttgtcctgcctttctgaaccaaaccaatgtgtttcttaaatgtatttgattggtgtctcatgcctctctaaaatgtataaaactaagctgcaccccaaccaccttgggcacatgttctgaggacttcctgaggtctgtgtcacgggccatggtcactcgccatgtcgatagaagttcaaaccagccacaacattcccttaagccaaagcctaatcgaaagcaagaccctaactytcttcagttctctgaagattgaaagaggggagaaagctgaagaaaaaaagtccgacagtaacagaagttggtttatgaggtttaagaaaagaagccctgttcataacataaaaattcaagatgaggcaggccgatgcagatgtagaagctacagcaagttatccagatct

SEQ ID NO: 134459 - DNA, 607 bp, Homo sapiens
tttgtcatctattgtctctaagggcagccattatgagacttcgaaagaactttggtctccaaatcttttatcttaacctgaactttccctttctatggattccaggtctttagacaaatgcaaccaattgtcaaccagaaaatgtttaaatttacctatagcctggaagccacccgcttcctcccacccttccctactttgagttgtcctgcctttctgaaccaaaccaatgtgtttcttaaatgtatttgattggtgtctcatgcctctctaaaatgtataaaactaagctgcaccccaaccaccttgggcacatgttctgaggacttcctgaggtctgtgtcacgggccatggtcactcgccatgtcgatagaagttcaaaccagccacaacattcccttaagccaaagcctaatcgaaagcaagaccctaactctcttcagttctctgaagattgaaagaggggagaaagctgaagaaaaaaagtccgacagtaacagaagttggtttatgaggtttaagaaaagaagccctgttcataacataaaaattcaagatgaggcargccgatgcagatgtagaagctacagcaagttatccagatct

SEQ ID NO: 134460 - DNA, 596 bp, Homo sapiens
tttgtcatctattgtctctaagggcagccattatgagacttcgaaagaactttggtctccaaatcttttatcttaacctgaactttccctttctatggattccaggtctttagacaaatgcaaccaattgtcaaccagaaaatgtttaaatttacctatagcctggaagccacccgcttcctcccacccttccctactttgagttgtcctgcctttctgaaccaaaccaatgtgtttcttaaatgtatttgattggtgtctcatgcctctctaaaatgtataaaactaagctgcaccccaaccaccttgggcacatgttctgaggacttcctgaggtctgtgtcacgggccatggtcactcgccatgtcgatagaagttcaaaccagccacaacattcccttaagccaaagcctaatcgaaagcaagaccctaactctcttcagttctctgaagattgaaagaggggagaaagctgaagaaaaaaagtccgacagtaacagaagttggtttatgaggtttaagaaaagaagccctgttcataacataaaaattcaagatgaggcaggccgatgcaratgtagaagctacagcaagt

SEQ ID NO: 134461 - DNA, 436 bp, Homo sapiens
gttaccttttgttttgtgtgtgattagaacacttaagctctactytcttagcaaatttcaagtatacaatatggtataattaactatagtcactgtaatgtacatgacttttttattcttaaaggaataaggccaaggtccatccagaacaacctttcctgaattgtggtcatgttctgtgaaacaagagatgattataccttagcacactggaagaaaagatggcagaaatccaagagtggatgcaaacagacccagaatcatcttataatgctagcagagagtttgcttgccaaagaagggtaaatcctttgattaccacctgtgaaacaaggctctgatattctaccaaattacatcagaacacgagatagggagacaggagaacactgaattaagaatcaagatgctttgctctgtctctagctattagcac

SEQ ID NO: 134462 - DNA, 485 bp, Homo sapiens
aaagtgctaatgtccaaaacaatgggaaaaagccctcaaaagcatttcagagatcttagagacagcccctcccatcacaggcccagaaggctagaaggaaagaatggttttggggaacaggcctaggaaacccctgtcctgctcagccttgggacattgctccccacatcctggctgctctagctacagytgtggcttaaagagccccaggtacagctcaggtcacccctccagaaggcacaagccataagccttggtggcttccacatggtgtaaaacacatagaatgcgagggtgaaggaggtttggtggcttccatctagatttcagaggctgtatgagaaagcctgggtgcccaagtagaagcctgctgcaaagatagagccctcacagataatctatactagggcaatgacaagaggaagtatggtgttggggctgccacacagtcaccactggggaactgcctaatggagctgaagaag

SEQ ID NO: 134463 - DNA, 582 bp, Homo sapiens
acagcttcagaaaatcaaggtacttcttcatgagcacaaaatcactagtgatattccaatctgacaaaaaagtatatgaggcttaccgctgtgaaaagcaygtggtaaagtttcacagaagaggagccgccatccttaaccttggtggtgaagttaggatcctcctcctggtgcctattccttccttcaactcatttcagtctcataaccagtcatatgcaaaggttccttttcaggctaaatgctaacacatttatcaatatgatgcagcagagacctgctttcctggctactttgcatgttatttcacttattacgtaacacgaaaacttccctgtttactaagtttatgtattagtcagggttctccagagggagagaattataggatatatgtatatacgaaagggagtttattaaggaaaattgattcacacaatgactgggtgaagtcccacaataggccacctgcaagcttaggaggaaaccagtagtagctcagtctgagtccagaagcctcaaaagtagggaagccaagagtgcagccttcagtctgtggccaaaggcccgacagcctctgga

SEQ ID NO: 134464 - DNA, 582 bp, Homo sapiens
acagcttcagaaaatcaaggtacttcttcatgagcacaaaatcactagtgatattccaatctgacaaaaaagtatatgaggcttaccgctgtgaaaagcacgtggtaaagtttcacagaagaggagccgccatccttaaccttggtggtgaagttaggatcctcctcctggtgcctattccttccttcaactcatttcagtctcataaccagtcatatgcaaaggttccttttcaggctaaatgctaacacatttatcaatatgatgcagcagagacctgctttcctggctwctttgcatgttatttcacttattacgtaacacgaaaacttccctgtttactaagtttatgtattagtcagggttctccagagggagagaattataggatatatgtatatacgaaagggagtttattaaggaaaattgattcacacaatgactgggtgaagtcccacaataggccacctgcaagcttaggaggaaaccagtagtagctcagtctgagtccagaagcctcaaaagtagggaagccaagagtgcagccttcagtctgtggccaaaggcccgacagcctctgga

SEQ ID NO: 134465 - DNA, 582 bp, Homo sapiens
acagcttcagaaaatcaaggtacttcttcatgagcacaaaatcactagtgatattccaatctgacaaaaaagtatatgaggcttaccgctgtgaaaagcacgtggtaaagtttcacagaagaggagccgccatccttaaccttggtggtgaagttaggatcctcctcctggtgcctattccttccttcaactcatttcagtctcataaccagtcatatgcaaaggttccttttcaggctaaatgctaacacatttatcaatatgatgcagcagagacctgctttcctggctactttgcatgttatttcacttattacgtaacacgaaaacttccctgtttactaagtttatgtattagtcagggttctccagagggagagaattataggatatatgtatatacgaaagggagtttattaaggaaaattgattcacacaatgacwgggtgaagtcccacaataggccacctgcaagcttaggaggaaaccagtagtagctcagtctgagtccagaagcctcaaaagtagggaagccaagagtgcagccttcagtctgtggccaaaggcccgacagcctctgga

SEQ ID NO: 134466 - DNA, 548 bp, Homo sapiens
taagagtgaatatctcataatagtgttagtgctcttataagaagagacacaagagagatgatctctctttgtgtcatatgaagatacatcaagaaagcagccatttgcaaaccggaagagggatcccatcaggacacaaatcagctcacatcttggtcttggacttcccagcctccagaaccatgagaaataratgtttgtgatgtaaaccacttgatctatggcttttgggcttgaactaagacactcattcatgaaactatttccagaacttagacttgggggtcacttatgatctactctaatctgttttcccaactgcttttccattaacaccaccccctcctacataccttctttgtcttccctgcatactctatgtattctcttttccctgtgagaaaaaaaatcgcttttaatttttttcagaaaatattgctctgtgactgatactctgaactccaagtccttgagtgttatctctgacaccaaaatataaactcacaaaatggatgaagcaaaatgcttttcttctccatagtactgat

SEQ ID NO: 134467 - DNA, 571 bp, Homo sapiens
ccacatttgtatttgaaaaggtcactctgattatgaaggactaacactaagggtaagaatttggcagaggaaaaaagaagtaaaaaggagtacattctgatcataacatagaaaaagtatatagaatacagagtctcagtgtgatccaccaaagtawttcagttatgaatttatgaagttcagagttatggtggtagaagaaagtacaaaaagcacaacagatacaataatggaatatgccccaggagttgacatcagataatccagaaaacttaagggaggcacaaagcaaaaatgactataggatttatgatgggagccccattaatccagatcaaaacctcctcttatttaaaataaataaatcaaagggatatcaaagaaagaattacacattcgaacctgtggttcaagaaagaagaagcttgaagattgttatttttagaaccattcatttagcaagtacagttggatccttgaaagtacacaagagaaagcaacgtataagccttttataataactatagatccagaaatacagaagattaagtaccaatctatagccacagcc

SEQ ID NO: 134468 - DNA, 438 bp, Homo sapiens
tgatgtttttatacttttaatagtttaaaagcaagtttgggagagctcaargtcatggtaattctaattgtgtatgtgctggttcagatacatataagcaaccattctgaaaaggcaatttggtttaacaaatatctgctgcatacttgctatataaaaggtactagttagtaaactaataatggtaatagaagatatgcattactttggacgaaaaattataatgaatctatattgtgaacttatgtatgttgcaaaaggttatgctggcttttcaggtaatcattcactctgagcttctgccacctctgggatttccacaagctgcaacattttagtttcaactcagcttagcaatgccattgcaaaaaccatttcaactagcgttcagatagaatggagtatgcgtccattgccaaatcaactcactcagcatgt

SEQ ID NO: 134469 - DNA, 438 bp, Homo sapiens
tgatgtttttatacttttaatagtttaaaagcaagtttgggagagctcaaggtcatggtaattctaattgtgtatgtgctggttcagatacatataagcaaccattctgaaaaggcaatttggtttaacaaatatctgctgcatacttgctatataaaaggtactagttagtaaactaayaatggtaatagaagatatgcattactttggacgaaaaattataatgaatctatattgtgaacttatgtatgttgcaaaaggttatgctggcttttcaggtaatcattcactctgagcttctgccacctctgggatttccacaagctgcaacattttagtttcaactcagcttagcaatgccattgcaaaaaccatttcaactagcgttcagatagaatggagtatgcgtccattgccaaatcaactcactcagcatgt

SEQ ID NO: 134470 - DNA, 438 bp, Homo sapiens
tgatgtttttatacttttaatagtttaaaagcaagtttgggagagctcaaggtcatggtaattctaattgtgtatgtgctggttcagatacatataagcaaccattctgaaaaggcaatttggtttaacaaatatctgctgcatacttgctatataaaaggtactagttagtaaactaataatggtaatagaagatatgcattactttggacgaaaaattataatgaatctataytgtgaacttatgtatgttgcaaaaggttatgctggcttttcaggtaatcattcactctgagcttctgccacctctgggatttccacaagctgcaacattttagtttcaactcagcttagcaatgccattgcaaaaaccatttcaactagcgttcagatagaatggagtatgcgtccattgccaaatcaactcactcagcatgt

SEQ ID NO: 134471 - DNA, 565 bp, Homo sapiens
tgatgaaagaaactgaagatgacacaaatagatatcaattaatattgttaaaatgtctatactactcaaagtcatctacatattcaatgcaattcctatcaaaattctaatgatattcttcacagatatagaaaaaaaatcctcaaaatttttttaaattatactttaacttctagggtacatgtgcacaatgtgcaggtttgttacatatgtatacatgtgccatgttggtgtgctgcacccattaactcmtcatttatattaggtatatctcctaatgctatccctctcccctccccctaccccatgacaggccccagtgtgtgttccccttcttgtgtccaagtgatctcattgttcaattcccacctatgagtgagaacatgtggtgtttggttttttgtccttgcgatagtttgctgagaacgatggtttccagaaaaagatcccaagtagctaaagcaatcttgaacaaaaagagcaaatccagtggcactgcactacctaacttcgaaatatacaacaaagttatagtaaccaaaacagcatggtactggtatataca

SEQ ID NO: 134472 - DNA, 522 bp, Homo sapiens
atttggcagtattttcttaaatatgataccaaaagcacaagtaacaaaaaaaataaaagataattcggactttatcaactttaaaaactcttgtgcttcaaaggctactattaagaaagtgaaaacacaacgctcaaaatgggagatactatcatttagaattatatatctaayaaggtcttgtatctaaaatataagaacaattataactcaataataaaaagactaacaactatttaaaaattagcaaaggatatgaatagacacttctccaaagaatatatacaaatcgtcagtaatcacatgaaaaggtgctcatcatcattagttatcaggaaaatgcaaacacacacacacacacacacacacacacacacacacacacacacacatacagcatgagatactattttctacacactaaggtggttgtaactgaaaagacaaataacaacaaatgttggtgaggatgtggagaaatcagaatcctcatacactgctgatgagaatgtaaagtgctgc

SEQ ID NO: 134473 - DNA, 532 bp, Homo sapiens
gagccatctgcagataactctatgtctttttctcattctttagaaatcctgaaaagctcagagtcagagacatagccatgtgacaattcagtaaattgctctttttttttttggagatggagtcttgctctgttggccaggctgacgagcagtgcagtggctactcaccagcatgatcatggcacaccgcagcctggagctactggcctcaagtctctgcttagttcattatattgttccttctggccaacatgctctatgaaccctctttgggtattttaagtcatgaagtaatgattccatttaatgtttatgcagtgtttctctatccagtcatgattatatcatcagataatttattcaattatatttttcacttattaaatttttttctccattttttaaccaaagcaatttacactggtttgagttctatatcatttgtctttatctttcatcccctcatttattccaaatgacaaagtgyacatatatatgtatgtataaaaataatagaagataaaaaatttct

SEQ ID NO: 134474 - DNA, 594 bp, Homo sapiens
gctagccatacataagataaaccccagggctatgaagacccctagtcactgccaccctttggaggtctctgacccaaagattcccctccagactgctgagaaacttcatgtagacatctaagacccctctccaagtccccattcctctggaagctcccttgccctcatacccttctgaggaatgaccctaaaccatagcctctgggcaaagtctcatgctgcgagggacttcccctgcatgccagcctgtcagggtgtcaccygaataaagcttgcatgtgccactaccacgtggcagtcatatctttttcctttcttgatcagccccagaatccctcaaactccctaaaaccaggttctcaaagagtgaaatctgcacaggcatggcctaaatccacaatgatatgagtctaggaagcagccagttctcagagttcaacaggcagcagcagcaaggctcagaggaccaccctccagccacagcctgaccagcaactggaccatggaaggatccagcctctcaagaggagctggccaatgtcaggcagaatgtgtggaccccagacaaatagagaacgatgaaaagagggagag

SEQ ID NO: 134475 - DNA, 594 bp, Homo sapiens
gctagccatacataagataaaccccagggctatgaagacccctagtcactgccaccctttggaggtctctgacccaaagattcccctccagactgctgagaaacttcatgtagacatctaagacccctctccaagtccccattcctctggaagctcccttgccctcatacccttctgaggaatgaccctaaaccatagcctctgggcaaagtctcatgctgcgagggacttcccctgcatgccagcctgtcagggtgtcacccgaataaagcttgcatgtgccactaccacgtggcagtcatatctttttcctttcttgatcagccccagaatccctcaaactccctaaaaccaggttctcaaagagtgaaatctgcacaggcatggcctaaatccacaatgatatgagtctaggaagcagccagttctcagagttcaacaggcagcagcagcaaggctcagaggaccaccctccagccacagcctgaccagcaactggaccatggaargatccagcctctcaagaggagctggccaatgtcaggcagaatgtgtggaccccagacaaatagagaacgatgaaaagagggagag

SEQ ID NO: 134476 - DNA, 480 bp, Homo sapiens
caagctcagatatcctcagaagaaactgaggatcctcagaagaaataatctggaagttatttctatgtctcttccccttcaaactcccagggctggaaagtgacaatctggtcttgatggtgggcctcaaacttggctgaagatacaaatcatgtggggagcttgaamgtacttggattccacctctagagattccattgaaattgctctggagcatgacccaggcatccagatttgtagaggcttcccaggtcatttgaatgtgcagccaagatttaaaaccactgaattctgactgtctcctgcaaatctgcttctctctgagggacaaaagatgaaggcctgagctaaaagcttattttgtgagataaggagcaacggaatataattttcagagctctccaccctggggctcatctagccccatcccctgagttcactggagctaacacgcctggacctgcctttctcaacttgtac

SEQ ID NO: 134477 - DNA, 614 bp, Homo sapiens
tgctcatttagtggctctctttgttcgcttgaataacttcatttagccctccagatccacctttcacctttcccttcctgctctgtgcctgggaggttggaccatgtaaaacaacgaccattagaagccaagatatgcaaattgagttgattaacttgccagacaaaggaatacacaccagtgaataaatccactgagttgttctcagaggttgaagagtcaagtgtttttttttttttgacttcggaagagggtttcagggtggttatctcaattaaggatggaaaactaccactcttgttaggtgtgggcccgattggttaaaacaagtcccattgttcattggtgaagaaggaacctgtagaagggtccagkaagggcctggcttacctgagtcattcaaaattcacagtcgattctccgtttcagctcatcagaaccagttgcaatacaactcaagcccagttttgctatctcctctgcaaagtgccactataaggaggacgcacttgaatggattgtccactggctctggtttggtttgaccaatagaggcagggcaggagaaaaggaggcaggaggagggtaaggttgaggtggcattcccccagctc

SEQ ID NO: 134478 - DNA, 461 bp, Homo sapiens
tatgcaatctgtagtcactttcgtgtataggtaagttagcgctggctgtcctggtacagaaatggttttcatgaatacacctgctactcactgggaccactcacccatgcggcaaaactgggggcagagggcagaagtcacactgcattagactgcacatactrggcaaagtgcttaacctcttggagcctcagttgtccacctttaaaatgaggataatgtcagcacctatctcaaaggttgtgagttattaaaatagattattattattactattactattattaagactaacatgacttactgtgtatcaggcacagtgttacttgcttaacatacacaatctcaattaatcccaggtttagagaaatgaagtaatttaccaaaggtgacacagcttataaactggggagccacgagataaatatgggcatcctttaacccacgatgctacttatttg

SEQ ID NO: 134479 - DNA, 428 bp, Homo sapiens
gaaggcctcacctggaagtggcatacatcactttccctcacattgtcatggagaggacacgccatacctcactgcaagagagtctgagaaatgtataatagtttagccttgtgtctggttacaatcacattactctaggggaagcagggactagattctcatagagagcttccattatctgccctagtactcaataaacacaaactattgtggctattttttcttgttagatagccagtgggtacttgctggatgcttgaaggattcagtggaaataagaaagaataaagaaagaaaatggatgttgcagggcaraaacaacaagaaacgagaatgagtgacaatggagagcgctgtgtaaagggaggtacacacagtgccagagttagagggggcaacccatgtccgccgtgaggaaacactacagc

SEQ ID NO: 134480 - DNA, 493 bp, Homo sapiens
gacatacccttcacaccattgtttatctgcacaccagaatgattcttcacctagctcaagtcagtcaaaccaccttggcaggtgggtgatcctgcagatgaggccatagggatctgccacatagggcttgcgctccagtctccacaayggcctggctttgggagcaacattatgagataaggctaagacaagctgtctaatctccacatccatttcctcttcttcctgggtgcatagtcagaccacacttcccagcatcctttgctttaggtgtgacaatgtgactgtgttccaaccagtagaatgtcagtggaaatggtgtctactgcttccagatgtggcccataacaccattctcttgtgatcctccgtgctctccatcctccatcatcttctggtagaccagcccaaggatcttggaagtcatgtgttgaagatggtagaaccataagatgggaaaagcctaggtccctgataactcccggatgacagc

SEQ ID NO: 134481 - DNA, 623 bp, Homo sapiens
aggaagcagtggaggaacaagagggtggcttccctcacatgaagggcacctgrgtaatgttttaaaatataaagatggaaccataggactgaaagaaaataagtttgacgatatcgaaatttctcaaattttatttcgtgtatgaagagaaaattagcttattgataataagcaaacttatttctaagtactataaaggtgtattataagaatgattgaactaatatctaaaatttgtttaacaattataataagtttgcactgaagtaacacacatttgaaagtgagttgtgtttgtgaatgctgattgcctgtactcaaccggttttctgcagaactcatttatattcattatactttagagttttctactttagggcccagaacttcgtgtcagttgtattatcaaagtacgatgtaatatttaaaattttccaacaggaagaagtaactgaatactgaagattgattttgcagtatttgttttcttgtgtctacatgtggaaacatctatgcaaatgtattgctttgtaattttgatacagagagtttgtacattggcctgccgtaaagcattttcaatttaagaaatgtagaactttaatttctgaaaagagtctgtg

SEQ ID NO: 134482 - DNA, 623 bp, Homo sapiens
aggaagcagtggaggaacaagagggtggcttccctcacatgaagggcacctgagtaatgttttaaaatataaagatggaaccataggactgaaagaaaataagtttgacgatatygaaatttctcaaattttatttcgtgtatgaagagaaaattagcttattgataataagcaaacttatttctaagtactataaaggtgtattataagaatgattgaactaatatctaaaatttgtttaacaattataataagtttgcactgaagtaacacacatttgaaagtgagttgtgtttgtgaatgctgattgcctgtactcaaccggttttctgcagaactcatttatattcattatactttagagttttctactttagggcccagaacttcgtgtcagttgtattatcaaagtacgatgtaatatttaaaattttccaacaggaagaagtaactgaatactgaagattgattttgcagtatttgttttcttgtgtctacatgtggaaacatctatgcaaatgtattgctttgtaattttgatacagagagtttgtacattggcctgccgtaaagcattttcaatttaagaaatgtagaactttaatttctgaaaagagtctgtg

SEQ ID NO: 134483 - DNA, 610 bp, Homo sapiens
aggaagcagtggaggaacaagagggtggcttccctcacatgaagggcacctgagtaatgttttaaaatataaagatggaaccataggactgaaagaaaataagtttgacgatatcgaaatttctyaaattttatttcgtgtatgaagagaaaattagcttattgataataagcaaacttatttctaagtactataaaggtgtattataagaatgattgaactaatatctaaaatttgtttaacaattataataagtttgcactgaagtaacacacatttgaaagtgagttgtgtttgtgaatgctgattgcctgtactcaaccggttttctgcagaactcatttatattcattatactttagagttttctactttagggcccagaacttcgtgtcagttgtattatcaaagtacgatgtaatatttaaaattttccaacaggaagaagtaactgaatactgaagattgattttgcagtatttgttttcttgtgtctacatgtggaaacatctatgcaaatgtattgctttgtaattttgatacagagagtttgtacattggcctgccgtaaagcattttcaatttaagaaatgtagaactttaatttctg

SEQ ID NO: 134484 - DNA, 616 bp, Homo sapiens
gggtggcttccctcacatgaagggcacctgagtaatgttttaaaatataaagatggaaccataggactgaaagaaaataagtttgacgatatcgaaatttctcaaattttatttcstgtatgaagagaaaattagcttattgataataagcaaacttatttctaagtactataaaggtgtattataagaatgattgaactaatatctaaaatttgtttaacaattataataagtttgcactgaagtaacacacatttgaaagtgagttgtgtttgtgaatgctgattgcctgtactcaaccggttttctgcagaactcatttatattcattatactttagagttttctactttagggcccagaacttcgtgtcagttgtattatcaaagtacgatgtaatatttaaaattttccaacaggaagaagtaactgaatactgaagattgattttgcagtatttgttttcttgtgtctacatgtggaaacatctatgcaaatgtattgctttgtaattttgatacagagagtttgtacattggcctgccgtaaagcattttcaatttaagaaatgtagaactttaatttctgaaaagagtctgtgactctggaaagatct

SEQ ID NO: 134485 - DNA, 623 bp, Homo sapiens
aggaagcagtggaggaacaagagggtggcttccctcacatgaagggcacctgagtaatgttttaaaatataaagatggaaccataggactgaaagaaaataagtttgacgatatcgaaatttctcaaattttatttcgtgtatgaagagaaaattagcttattgataataagcaaacttatttctaagtactataaaggtgtattataagaatgattgaactaatatctaaaatttgtttaacaattataataagtttgcactgaagtaacacacatttgaaastgagttgtgtttgtgaatgctgattgcctgtactcaaccggttttctgcagaactcatttatattcattatactttagagttttctactttagggcccagaacttcgtgtcagttgtattatcaaagtacgatgtaatatttaaaattttccaacaggaagaagtaactgaatactgaagattgattttgcagtatttgttttcttgtgtctacatgtggaaacatctatgcaaatgtattgctttgtaattttgatacagagagtttgtacattggcctgccgtaaagcattttcaatttaagaaatgtagaactttaatttctgaaaagagtctgtg

SEQ ID NO: 134486 - DNA, 446 bp, Homo sapiens
aatttgtcaaatagatttcttaaattgctcattccaactaacgttctatcagggctccaatttatctacatcctctcaaacacttgttatttcctgcttttgaaaatttattgcccttccagtgtgtgcgtatgaaatatgatatctcattttggatttgaaatgcattttctgcacccattaactcatcatgcacatggaccctagaacttaaagtataattaaaaaaaaaagaaatgcgtcttctgaatcactgaatatgagtatstgtcccatgtgcatcttgggcatttgcccattttatttggagaaatatccattgagatgtttggccttttaattttgtttaagttgtaagttagtcatgtatcggatactagaagttgaaaatttaaaatttgttgcttaaacttatgcatacagaaatcatcgaagttcccgagaaa

SEQ ID NO: 134487 - DNA, 453 bp, Homo sapiens
actgtaactttttgtggatttgtcaaatagatttcttaaattgttcattccaactaacattgtatcagggctccaatttatctrcatcctctccaacacttgttatttcctgcttttgaaaatttattgccattcatctgtgtgtgaaatatgatatctcattttggatttgaaatgcattttctgcacccattaactcgtcatgcacatggaccctagaacttaaagtataataaaaaaaagaaatgcattttctgaatcactgaatatgagtatctgtcccatgtgctttttgggcgtttgcccattttatttggagaaatatctatttagatgtttggccttttaattttgtttaagttgtaagttagtcatatatcggatactacaagttgaaaatttaaaatttgttgcttaaacttatgcatacagaaatcgtcgaagttcccgaga

SEQ ID NO: 134488 - DNA, 453 bp, Homo sapiens
actgtaactttttgtggatttgtcaaatagatttcttaaattgttcattccaactaacattgtatcagggctccaatttatctgcatcctctccaacacttgttatttcctgcttttgaaaatttattgccattcatctgtgtgtgaaatatgatatcycattttggatttgaaatgcattttctgcacccattaactcgtcatgcacatggaccctagaacttaaagtataataaaaaaaagaaatgcattttctgaatcactgaatatgagtatctgtcccatgtgctttttgggcgtttgcccattttatttggagaaatatctatttagatgtttggccttttaattttgtttaagttgtaagttagtcatatatcggatactacaagttgaaaatttaaaatttgttgcttaaacttatgcatacagaaatcgtcgaagttcccgaga

SEQ ID NO: 134489 - DNA, 453 bp, Homo sapiens
actgtaactttttgtggatttgtcaaatagatttcttaaattgttcattccaactaacattgtatcagggctccaatttatctgcatcctctccaacacttgttatttcctgcttttgaaaatttattgccattcatctgtgtgtgaaatatgatatctcattttggatttgaaatgcattttctgcacccattaactcrtcatgcacatggaccctagaacttaaagtataataaaaaaaagaaatgcattttctgaatcactgaatatgagtatctgtcccatgtgctttttgggcgtttgcccattttatttggagaaatatctatttagatgtttggccttttaattttgtttaagttgtaagttagtcatatatcggatactacaagttgaaaatttaaaatttgttgcttaaacttatgcatacagaaatcgtcgaagttcccgaga

SEQ ID NO: 134490 - DNA, 419 bp, Homo sapiens
ttaaattgttcattccaactaacattgtatcagggctccaatttatctgcatcctctccaacacttgttatttcctgcttttgaaaatttattgccattcatctgtgtgtgaaatatgatatctcattttggatttgaaatgcattttctgcacccattaactcgtcatgcacatggaccctagaacttaaagtataataaaaaaaagaaatgcattttctgaatcactgaatatgagtatctgtcccatgtgctttttgggcgtttgcccattttatttggagaaatatctatttagatgtttggccttttaattttgtttaagttgtaagttagtcatayatcggatactacaagttgaaaatttaaaatttgttgcttaaacttatgcatacagaaatcgtcgaagttcccgagaa

SEQ ID NO: 134491 - DNA, 419 bp, Homo sapiens
ttaaattgttcattccaactaacattgtatcagggctccaatttatctgcatcctctccaacacttgttatttcctgcttttgaaaatttattgccattcatctgtgtgtgaaatatgatatctcattttggatttgaaatgcattttctgcacccattaactcgtcatgcacatggaccctagaacttaaagtataataaaaaaaagaaatgcattttctgaatcactgaatatgagtatctgtcccatgtgctttttgggcgtttgcccattttatttggagaaatatctatttagatgtttggccttttaattttgtttaagttgtaagttagtcatatatcggayactacaagttgaaaatttaaaatttgttgcttaaacttatgcatacagaaatcgtcgaagttcccgagaa

SEQ ID NO: 134492 - DNA, 456 bp, Homo sapiens
gtactgtaatttttctggatttgtcaaatagatttcttaaattgttcattccaactaacattgtatcagggctccaatttatctacatcctctcaaacacttgttatttcctgcttttgaaaatctattgccattcatctgtgtgtgtgaaatatgatatctcattttggatttgaaatgcattttctgcacccattaactcatcatgcacatgtatgctagaacttaaagtataataaaacaaaaagaaatgcattttctgaatcactgaatatgagtatctgtcacttgtcctttttgggcatttgcctattttatttggagaaatacctatttagatgtttggccttttaatttaaagttgtaagttagtcatgtattcgatactagaagatgaaaatttaaaayttgttgcttaaacttatgcacacacaaatcatccaagttcccgagaaa

SEQ ID NO: 134493 - DNA, 464 bp, Homo sapiens
atactgtaactttttctggatttatcaaatagatttcttaaattgttcattccaactaacattgtatcagggctscaatttatctacatcctctcaaacacttgttatttcctgcttttgaaaattttttgcccttccagtgtgtgtgtgtgaagtgtggatgctccttttttatttgaaatgcatttcctgaatcactgattatgagtatctgtttcatgtgctttttgggcatttgggcattttgggcatttgggctctgtgggcattttatttagatgtttggtaatttaattgtgtttaagttgtaatgtagttatgttttggatactagaaggtgacaatttaaaattccttgcttcaactcgtgcacgcagaaatcatccaagttcccgagaaaccagggattatgctccaccacatagagactatgcataccgtgattatggtcattctagttggga

SEQ ID NO: 134494 - DNA, 459 bp, Homo sapiens
gatactgtaactttttctggatttatcaaatagatttcttaaattgttcattccaactaacattgtatcagggctccaatttatctacatcctctcaaacacttgttatttcctgcttttgwaaattttttgcccttccagtgtgtgtgtgtgaagtgtggatgctccttttttatttgaaatgcatttcctgaatcactgattatgagtatctgtttcatgtgctttttgggcatttgggcattttgggcatttgggctctgtgggcattttatttagatgtttggtaatttaattgtgtttaagttgtaatgtagttatgttttggatactagaaggtgacaatttaaaattccttgcttcaactcgtgcacgcagaaatcatccaagttcccgagaaaccagggattatgctccaccacatagagactatgcataccgtgattatggtcattctag

SEQ ID NO: 134495 - DNA, 459 bp, Homo sapiens
gatactgtaactttttctggatttatcaaatagatttcttaaattgttcattccaactaacattgtatcagggctccaatttatctacatcctctcaaacacttgttatttcctgcttttgaaarttttttgcccttccagtgtgtgtgtgtgaagtgtggatgctccttttttatttgaaatgcatttcctgaatcactgattatgagtatctgtttcatgtgctttttgggcatttgggcattttgggcatttgggctctgtgggcattttatttagatgtttggtaatttaattgtgtttaagttgtaatgtagttatgttttggatactagaaggtgacaatttaaaattccttgcttcaactcgtgcacgcagaaatcatccaagttcccgagaaaccagggattatgctccaccacatagagactatgcataccgtgattatggtcattctag

SEQ ID NO: 134496 - DNA, 478 bp, Homo sapiens
actgtaactttttctggatttatcaaatagatttcttaaattgttcattccaactaacattgtatcagggctccaatttatctacatcctctcaaacacttgttatttcctgcttttgaaaattttttgcccttccagtgtgtgtgtgtgaagtgtggawgctccttttttatttgaaatgcatttcctgaatcactgattatgagtatctgtttcatgtgctttttgggcatttgggcattttgggcatttgggctctgtgggcattttatttagatgtttggtaatttaattgtgtttaagttgtaatgtagttatgttttggatactagaaggtgacaatttaaaattccttgcttcaactcgtgcacgcagaaatcatccaagttcccgagaaaccagggattatgctccaccacatagagactatgcataccgtgattatggtcattctagttgggatgaacattcctctaga

SEQ ID NO: 134497 - DNA, 420 bp, Homo sapiens
atagatttcttaaattgttcattccaactaacattgtatcagggctccaatttatctacatcctctcaaacacttgttatttcctgcttttgaaaattttttgcccttccagtgtgtgtgtgtgaagtgtggatgctccttttttatttgaaatgcatttcctgaatcactgattatgagtatctgtttcatgtgctttttgggcatttgggcattttgggcatttgggctctgtgggcattttatttagatgtttggyaatttaattgtgtttaagttgtaatgtagttatgttttggatactagaaggtgacaatttaaaattccttgcttcaactcgtgcacgcagaaatcatccaagttcccgagaaaccagggattatgctccaccacatagagactatgcataccgtgattatg

SEQ ID NO: 134498 - DNA, 605 bp, Homo sapiens
caagagggtggcttccctcacatgaagggcacctgggtaatgttttaaaatataaagatggaaccataggactgaaagaaaataagtttgacgatattgaaatttcttaatttttttctttcctgtatgaagagaaaattagcttattgataataagcaaacttatttctaagtactataaaggtgtattataagaatgrttgaactaatatctaaaatttgtttaacaattataataagtttgcactgaagtaacacacatttgaaagtgagttgtgtttgtgaatgctgattgcctgtactcaaccggttttctgcagaactcatttatattcattatactttagagttttctactttagggcccagaacttcgtgtcagttgtattatcaaagtacgatgtaatatttaaaattttccaacaggaagaagtaactgaatactgaagattgattttgcagtatttgttttcttgtgtctacatgtggaaacatctatgcaaatgtattgctttgtaattttgatacagagagtttgtacattggcctgccgtaaagcattttcaatttaagaaatgtagaactttaatttctgaaaagagtct

SEQ ID NO: 134499 - DNA, 605 bp, Homo sapiens
caagagggtggcttccctcacatgaagggcacctgggtaatgttttaaaatataaagatggaaccataggactgaaagaaaataagtttgacgatattgaaatttcttaatttttttctttcctgtatgaagagaaaattagcttattgataataagcaaacttatttctaagtactataaaggtgtattataagaatgattgaactaatatctaaaatttgtttaacaattataataagtttgcactgaagtaacacacatttgaaastgagttgtgtttgtgaatgctgattgcctgtactcaaccggttttctgcagaactcatttatattcattatactttagagttttctactttagggcccagaacttcgtgtcagttgtattatcaaagtacgatgtaatatttaaaattttccaacaggaagaagtaactgaatactgaagattgattttgcagtatttgttttcttgtgtctacatgtggaaacatctatgcaaatgtattgctttgtaattttgatacagagagtttgtacattggcctgccgtaaagcattttcaatttaagaaatgtagaactttaatttctgaaaagagtct

SEQ ID NO: 134500 - DNA, 450 bp, Homo sapiens
ttttctggatttgtcaaatagatttcttaaattgttcattccaactaacattgtatcagggctccaatttatctacatcctctcaaacacttgttatttcctgcttttgaaaatctattgccattcatctgtgtgtgtgaaatatgatatctcattttggatttgaaatgcattttctgcacccattaactcatcatgcacatgtatgctagaacttaaagtataataaaacaaaaagaaatgcattttctgaatcactgaatatgagtatctgtcacttgtcctttttgggcatttgcctattttatttggagaaatacctatttagatgtttggccttttaatttaaagttgtaagttagtcatgtattcgatactagaagatgaaaatttaaaayttgttgcttaaacttatgcacacacaaatcatccaagttcccgagaaactag

SEQ ID NO: 134501 - DNA, 442 bp, Homo sapiens
tactgtaactttttctggatttatcaaatagatttcttaaattgttcattccaactaacattgtatcagggctccaatttatctacatcctctcaaacacttgttatttcctgcttttgaaaattttttgcccttccagtgtgtgtgtgtgaagtgtggaagctccttttttatttgaaatgcatttcctgaatcactgattatgagtatctgtttcatgtgctttttgggcatttgggcattttgggcatttgggctctgtgggcattttatttagatgtttggyaatttaattgtgtttaagttgtaatgtagttatgttttggatactagaaggtgacaatttaaaattccttgcttcaactcgtgcacgcagaaatcatccaagttcccgagaaaccagggattatgctccaccacatagagactatgcataccgtga

SEQ ID NO: 134502 - DNA, 345 bp, Homo sapiens
tgttatatcttgtttctgtttcaatcattacagcctaatgaagctttatttgttttcattcattgaacaaacatttgagtgcttgctatatgctacgcgctatgctagaggctggaaaaacatgaaaagctcacattctggttgatgtasaaagtgtgaaatgcctgggagattagagactcatataaatcacattataaagatacaaataataaagttttgtgagaataaagaggatgaggcaactaattctcactgagagactagaaaaggctttatcaaagagatgttatttgaactgcatctcaaatactgagagcttaccaggcaaagaagttcggggtg

SEQ ID NO: 134503 - DNA, 273 bp, Homo sapiens
gggcactgggcagagttgtgaggcccccactccaggcactagcttccagatgacatttctagacataccctgggccaaaagggaatccactaccttcaagggaaggacctagtcctgggaagattcatcacctgctgactaaagagtccttgggccctgaataaccagcagcaatacckggggagtacacagtgggcctcagactctgagatgtactggcttcaggtgggacccagcacaatcccagctatggtggctatggtggaagactcc

SEQ ID NO: 134504 - DNA, 635 bp, Homo sapiens
ttaaaaaattgagatgaccaatgctcagtatattcacttcctctaattccgggcattagtgagcttagagtgtttgcaaaacggtgtaattatcagcattcctgttcagtagagacgactctggaggtggccatatttttagaagtaaaaagcagaacacaaaaatggttaaatctgacagagaacagatgataaatacagtagcaactgcagagtacacactgtgaagaaaggtattcggaactattatatgtttcgcccacgttattctcatcgtcttggatctgaatccatattctgaccccttccctgccactgccttccactgctttctagtgttctaaaaaatccaataattatgtataaaatagccaaakgcacctcaatttgaaatttctttaagaaactaagtcagtgcttatgacgtcaaacctcaagctctaacaaaaagactacctttgcttccaggcaatacaaaggtaaaaacctcctaggagtaggtatcagcatctcccggtgactcagtcaccttttatcttcttaacccaactttaggtgtactgggtacataccagaagtactcaaatatattctgagttgcagttattaaattgctacacattcctaaaacaact

SEQ ID NO: 134505 - DNA, 251 bp, Homo sapiens
gaattctctttcccattttctaatgaaccatggctcattattgaaggctaacctcaaatgtccccacctcattaaagctgcctgttctgacctctccagaagtcagatgtactctatcctgctgttccacaatactttttataaacctatattagcacttcatacacagcayggtaattctttcttgactttatattccaccaaacagtaatttcttttaagggcaggagccatgttagttactctatttt

SEQ ID NO: 134506 - DNA, 408 bp, Homo sapiens
ggaattctctttcccattttctaatgaaccatggctcattattgaaggctaacctcaaatgtccccacctcattaaagctgcctgttctgacctctccagaagtcagatgtactctatcctgctgttccacaatactttttataaacctatattagcacttcatacacagcatggtaattctttcttgactttatattccaccaaacagtaatttcttttaagggcaggagccatgttagttactctattttcagggcataaaagaaggcttgatgcatagtatgttcttaattataagctgagtaaatgaaaattactatggcayccaaaacactgcagttagaagcatgtgaataagaatcctagagtatctcccacaaagataaatgtgaatgaataacttgggg

SEQ ID NO: 134507 - DNA, 474 bp, Homo sapiens
caggcacttggcaggaaggttgagaaaccaagctcagaaagtggacaggaataaggtcagatacatggccaaactcatggccaaaattaagttacagaaacagtctagtgagaacaytacactcaacttcacccatcaccaaaatctgtgccttgcacttcttacattgccagaactggatcaaggattccaccatcagtaccaatgccattactatctctgtggatcccttaaaactggatgtcggtgcagccactgtcacctccttgagaataaatgctcttctgtccatgcttcattgggttgccagcatctcatttaaagctggaagcacgtgcatctgacttggtaaacccagctcatgcatctgtaatctagctgaaaagaaagacgggaacataggcatctacttttagacctccatcgccagagttggggtctacttctcaccataacatatactttggaaaattg

SEQ ID NO: 134508 - DNA, 370 bp, Homo sapiens
ggtacatttgttacaaatgatgaacctatattcacatatcatcatccaaactcaataatttacataagggttcactcttggtatagtacattctatcagtttagacttatgtatttatcatyatagtatcagaggagtgaccttatgaagcccacactttaaagaggtaactcagggtgctacataaagaataaattggtacacaaatgttgaaaccagcaactaaattggaaagtagtatggagagggggtaaatttacaaactttggagaaaagacttgcttagcttgaacgaattatttaaccttcctaaggcgcattcctcatccataaaatggggtttattttcctgtctttatccacctttgag

SEQ ID NO: 134509 - DNA, 524 bp, Homo sapiens
aaattttaaaatcagcttgtcatattctacataaaagcctgctaagaatttgacattttatttcactgacatcttaaatacattaattgttccaaattataaacatggcatatttctacttttatttaagtctaacttaatttctttcagcaatgttttgtaattaccagtatagagggcatgcacatgcattgttaaatttattcctatgtatttaattttttgatattattataaattatgatgtttttaatttcgattttcaattgytcacttctggcatgtagaaatataactaattttagatttttgaccctgtaatctgtgatctttctaaatacatatattagctctaatagcttctttttccaggtttcttaggattttttgtaggcattatcaggtctacacatacagtctattttatttcttcctttccaacctgtatgtcttttacttgttttattgttatatcacactggctaggacttccaatagaaagtccatttgaagaggtgagagta

SEQ ID NO: 134510 - DNA, 361 bp, Homo sapiens
tctatggctcagcttctagcccatgccctagtgcctggcacagagaaaaaagaaatgaatcaccatgaagctcaatttctctcacatgcagaatagggatttttacctaccttgcagggtttccctaaggatcacaatgaatgtagcaaagttatctgaaaatacctaacatgccttgtaacrggtgctccataaatagtactttcctttctccgtttcaacaactgtcttccttattcactatcagctggggcagggaatgaagacaacaggtaaaagggtgtgactcacgcactttgaaagggaagtgagaagcaggagagaagggctcacactaacccaggggttaggcaatcacctg

SEQ ID NO: 134511 - DNA, 339 bp, Homo sapiens
tctgaaaactggccagtattcagaaagtgttaattctcctaacaaagcttttgtcagattcgtttgttttttctctccatcggtcaccttaatcttaagaaaactttgayatatttctttatgccaatgcaacagaaagagagggtttaatgttttgacaaagttttctttttttttttttggattttatttatttatttatttattatactttaagttttagggtacatgtgcacattgtgcaggttagttacatatgtatacatgtgccatgctggtgcactgaaatctaaaaagatggtaacactaatctgtatttagcaatttaagacattaaaa

SEQ ID NO: 134512 - DNA, 516 bp, Homo sapiens
atgtaatgacccctttccattatataatatcattcttgttctcattatacagttattgacttaaagtatattttattttatgtaagtgtagctattccttctctcttttggtttccatttccatggaataccttttttttcatccatccactgttagtttatatgtgtccttaacggtgaaatgagtctcttataggtagaatatagttgggtcttttyaaaaatctattcagtcattctttgtcttttgaatggaaagtttaattctttatatttgctatggtttgaatatccctcccaacctcatgttgaaacttggcccttcatgtgacagtgttgagagatggggcttttaggaggtgattagatcataaggactctgcctgaatgtatgcattaacatgaatgaatgaattaatccatttatagattaacaaattaatgggttgatggattaatgggttatcatggaaggggaactggtggctatataagaacaagagagacctgatctag

SEQ ID NO: 134513 - DNA, 582 bp, Homo sapiens
taaagtgtttacctttccttcatttctgaaggacagctttgccaggtaaagtattctttgttgmcagttttttttttctttaagtactttattcttttttgtttgtttttgtttataattttcataaattctggcctaataattaagcactttaaatttatcatctcactctttcctggtctgtcaggtttatgctaagatatctgtcaataaccatacttgacttctcttgtatgtgatatgcttgtcttgctgcttttaggatcctctctcagctttgattttttaaagttttattatcatatgtcttagtgtagttttgtttggattgaacctgattggagacttttgtgctttctgcacttggatatttgtatatatttttcatatttggaaagttttctgtcattatttccttaaataagctctctgccccatccccttctctgatccttttggggtatttgtaatacatatattggtttgcttggtggtgtcccataattcccataggcattctttactctttttcattcttttctcattttgttcctctaatatcaaatgatctgtcttcaaaat

SEQ ID NO: 134514 - DNA, 373 bp, Homo sapiens
agtgcacagaattcaaggactgaggttggggaacctctgcctagatttcagaggatgtatggaaatgcctgaatatccaggcagaagttttcttgcaggggcagaggcctcatgcagaacctctgctagggcaatgtggaagggaaatgtggggttggataccccatgcagagtccccactggggcactgcctagtggagctgtgagaagagggcaaccatactccagacaccagaatggtagatccgctgacarcttggaccaagtgcctggaaaagcaacagacactcaatgccagcctgtgaaagcagccaggatagggcctgtaccttgcaaagccacagggatagagatgcccaagtctgtgggagcc

SEQ ID NO: 134515 - DNA, 616 bp, Homo sapiens
ggcagcattttgtccctgctttagagatatgtggaagtttaaacttcagggagattagggtatctagcagaaaaagtttctaaacagcaaagcattctatacatggcttagctgtttctaaaagcctatggtcatttacataaagaaatgacctaaaactagaacttacatttaaaagtgaagcagagcataaaagtttggaaaatttgcagtccaaccatgggatagaaaaaaatccattttctggggaggaattcaaggctgcataaatttgcataagtaaagaagagccaaatgttaatagccaaaacaatgggggaaaattcattcagggcatttagagayttttgtggtagcccctgccatcacaggccttggaggcctaggaggaaaaaatggtttcaagggccaggcccagggccctgtttctctctgcagccttgggacatggcaccctgtgtcccagccactccagctctggccgtagctaaaagggccattgcttaggccattgcttcagagggtgcaagccccaggctttggcagcttccatgtggtattgggcctgcaggtgtgcagaaggcaggagttgaggtttgggagcctccacctagat

SEQ ID NO: 134516 - DNA, 318 bp, Homo sapiens
tgggcctccatcctccagaccaccacatggtagattcactgtcagcttgcaccttgtacctggaaaagccacaggcatgcaacaccagcccttgagagcagctgtgggggctgatccctgcaaagacaccctgcccaaggtcatgggagcccaccctttgccccagtatgtcttggattagagacatggagtcaaaggagatyattttggacctttaaaatttaatgactgtcctgctgagttttgaacttgcatggggcctgtagcccctttcttttggatgatttctcccttttagaataggagtatttacccaat

SEQ ID NO: 134517 - DNA, 577 bp, Homo sapiens
gctataaagacacatgcacacgtatgtttattgtggcattattcacaatagcaaagacttggaaccaacccaaatgtccaacaatgagagactggattaagaattatgtattctggatactggacccttaycagatgtatttgcaaatgtttcccattgtgtaagtttttactttctttgcagtgtcctttgatgtaaaaatagtttaaacttttgatggagaccaatttatctgttttttctttgattgcttatgcttttagtgtcatacctgagaatccatgatcaaattcaaggtcattgggatttacccctatgttttctgagtttatctgatgacacttttgtggaataaaagtgctccgatgtgagaatatatacagtcatgtgcagtgggcttatggagtgcttgctccagaagcatgaaatcacactcaacttagcatctaaccaggagatagccccatgactgtggtcattgaccatatcacataattcatgatccaggatcaaccagcctgatagtgttggaatagcctgctaaaagcacatttgaagcaccagcacagaggcaata

SEQ ID NO: 134518 - DNA, 189 bp, Homo sapiens
tggaaattcatagtccatgctcaagatcgaatggcatctctcagactggaagacctttctgaagtcagttccagacatccctggaaggctggataayttgggaaaaggctgactcaatgtaaggtaatacagcagaccaaagcccccatagttcatgccagaagtgacaaagcggaaaaacactcaggt

SEQ ID NO: 134519 - DNA, 607 bp, Homo sapiens
ttgttatgatgagaaataaatgaatatgtgaaaaaaatgcctgaaacatataaaacatggtataaatgaatgctttttaaataaaacaattctttttagcatggatagtggttttttttgtgtgtrtgtgagacagggtctcactctgtcacccaggttggagcctcaacatcctgggctaaagcaatcctcccacctcagtttcccaagtagctgggactagaggcacgtgccacatgcacccagctaatttttaaattattttgtagagatgaggtcttgctatattgcccaggttggtcctgaattcctagtgtcaagtgatccttctgcctcggcttcccaaagtattgggaatactggcataagtcatcacactcggcaaaacagaattctcatttaaacttcctttgcaacgttacttccaaagacttgcctctttcaccttcatcaaagaaaaaagacttactgacaattcctgagagacttttacacagaaatgtttaaaacagaactttttatacattataattctataagctctgccaaatttatatcaaacctttaactgaatttcaaagtgaatggtgtaaaagatgaccacaaa

SEQ ID NO: 134520 - DNA, 607 bp, Homo sapiens
ttgttatgatgagaaataaatgaatatgtgaaaaaaatgcctgaaacatataaaacatggtataaatgaatgctttttaaataaaacaattctttttagcatggatagtggttttttttgtgtgtgtgtgagacagggtctcactctgtcacccaggttggagcctcaacatcctgggctaaagcaatcctcccacctcagtttcccaagtagctgggactagaggcacgtgccacatgcacccagctaatttttaaattattttgtagagatgaggtcttgctatattgcccaggttggtcctgaattcctagtgtcaagtgatccttctgcctcrgcttcccaaagtattgggaatactggcataagtcatcacactcggcaaaacagaattctcatttaaacttcctttgcaacgttacttccaaagacttgcctctttcaccttcatcaaagaaaaaagacttactgacaattcctgagagacttttacacagaaatgtttaaaacagaactttttatacattataattctataagctctgccaaatttatatcaaacctttaactgaatttcaaagtgaatggtgtaaaagatgaccacaaa

SEQ ID NO: 134521 - DNA, 414 bp, Homo sapiens
tcattagaactgttggcggatcttttagttctcccccttctgcaaacctgagaggattggaatccttctatctttgatgatagccatggccattaggcttggctttggttaatgaattatgagtagacataatttgtgtgacttccagaaaaaaaagtatttartagcaattacgtgttttgttatgttcctctctccctggtgactggcaaagtcccagatggtggaagctccgccatcttgagttcctgtgtgactgaggtgagatgagcatgttgcatgagcaataagtaaaacaagcaatgttttagccacttgaattttggaagtgtttttactgtggcacaacataatacagcctgaatgttctaacttcaaactagatagcaacaaataaaagaaatatgtcgagga

SEQ ID NO: 134522 - DNA, 410 bp, Homo sapiens
tagaactgttggcggatcttttagttctcccccttctgcaaacctgagaggattggaatccttctatctttgatgatagccatggccattaggcttggctttggttaatgaattatgagtagacataatttgtgtgacttccagaaaaaaaagtatttaatagcaattacgtgttttgttatgttcctctctccctggtgactggcaaagtcccagatggtggaagctccgccatcytgagttcctgtgtgactgaggtgagatgagcatgttgcatgagcaataagtaaaacaagcaatgttttagccacttgaattttggaagtgtttttactgtggcacaacataatacagcctgaatgttctaacttcaaactagatagcaacaaataaaagaaatatgtcgagga

SEQ ID NO: 134523 - DNA, 405 bp, Homo sapiens
cctcaagatttctggaatcccaaacaaaatattagcaaaggaaactcaatatttaccaaaaacgcactataaaaaagttagatgcatctcaggaatgcaatgatgttttaatataagaaaatgtgtaaatttaattcactgaattaatagataactggaaatmgccatctcctcatctcaatagacacagaataaataagtgacaaaattcaagagccattcacagtaaaactctcaataaactagaaatggaaggaaactaatttaatctgatacaagaaaacaacaaaaaattcttcaacaggcacaattataaatgggaaacaaattattttctttagatttagaaataagacaggcattcccacttttctacttctatttaatcctatattaaaagtccta

SEQ ID NO: 134524 - DNA, 537 bp, Homo sapiens
caaaaccataacacatctaaaagaaaatgcatgaagtaagaatagacaagtgtattaaataaaatataagaagtattagctttaagtgaaacaaaattgataatttagactgtattaaaattaagggattatctttatgaaaaggcatcttaaagaaaggtggaaatgtaagctgtaagttaagaaaagctattgctatatataaagttgaaacaaaattagtattgttatcattactgataataacaataagagatattcagaataaagagaagaaaatgagtaacactagaaatactgacaatggctatgagtaaatataatacaaagaaaaacttgtataatcaataaattgagaagtttatcatctctggaaatccagtaatctagaaatgcaaatcacaatctcaatacaatagtattttacaactatttycttgtcaaaaatgaagatatctgaaaatcccacatattccaaagggtatgaatgaatgaaatcttcttagacattagggtgagagtgtcaattgttaggac

SEQ ID NO: 134525 - DNA, 513 bp, Homo sapiens
ttaacctctccaaaaacaataaggcagatcaatatccttggatatggaatatcaaagcattcaaactactttttaaacagtgataagagccttggaatacattaatataagaagacaagggcataatgttattctaagcatccagygaggaatgcctgcttcaaaatttgcagactctaattctaccagaaataaaagatatggagcatttttaatcagaggaaaacatgtcttacccttagaaactcacctgtcctttactgtttctgttcttcccaatcctttgttcttctaagcaaagaaacaaaaggaaagtaaaaaagcttcatcctgttggggtcacaagtaaaataatgtaattcataagcatttcagtacgaatgagaaaagcagagctactttaaaaactattattatttaaaaagaaaaataaagaattagctcccaacagttaatttttgtaaagcgattttttaaaaaaagaacaaaaccataacaggcagaacactgatg

SEQ ID NO: 134526 - DNA, 421 bp, Homo sapiens
attttctttgtacagtcttcaatggatttgggaatagtcccacgagaaaacttgcattaacatccaagctgttgtaattcttgtgtgactttgaacttaacctcaatgaacctaagtttttctatcagcaaaaatagtgacaataataytacctctcctaagcaattcctgagaaataatctatgaaaagcagttagcactacttgtgatagctagtaggtgtttaaaaagtattagttagcatagttattattagctttttatattatattgttttctggattaaaaattatgtatttcaacagtgaagacagtattctaaatgtccttcatctggtaatcttctggctaaagagcattttttgtgtgagagaccttgctcatctatggaggcagagaccgttttaatttttttcttttg

SEQ ID NO: 134527 - DNA, 421 bp, Homo sapiens
attttctttgtacagtcttcaatggatttgggaatagtcccacgagaaaacttgcattaacatccaagctgttgtaattcttgtgtgactttgaacttaacctcaatgaacctaagtttttctatcagcaaaaatagtgacaataatactacctctcctaagcaattcctgagaaataatctatgaaaagcagttagcactacttgtgatagctagtaggtgtttaaaaagtattagttagcatagttattattagctttttatattatattgttttctggattaaaaaytatgtatttcaacagtgaagacagtattctaaatgtccttcatctggtaatcttctggctaaagagcattttttgtgtgagagaccttgctcatctatggaggcagagaccgttttaatttttttcttttg

SEQ ID NO: 134528 - DNA, 538 bp, Homo sapiens
tcagccttctgcttgtcagtttttgacgtttctggttaagcgagtcatgcaacatctatgtttactgctcattcatcttgcaagtagaaacattgtgtatagacatttgtatatgtaccatatatcagctaggcactcacagggtataaatgttataatgcaagttatattttttctttttacactgagcaaagaaccatatgtagcaataaagccatttgttcaatagaactatatgatcataaaattttagagcaaagatggatatagtagagtggatatgactatatcagtgacgtttttgatttcagtatgagtgaaagaatgttaaacactgtcatcaaaagtggattgtttagtattacaactagactaagttagatatcaagtaatccagatacaagtttattgctataagrtgaactttttagtttttttatgtttagttttgaaagtaattttaacatttgcattatgatgagaatttttgcttattcaaagctatgaccttacttgatttatattttaaaatatacta

SEQ ID NO: 134529 - DNA, 531 bp, Homo sapiens
tgctggtttaaagtctgttttgtctgaaattaggattgtgactcctgcttttgctgatttccatttgcatggtagatkttcctccatccctttattttgagcctatgagtgtcattgaatgtgagatggatctcttgaagacagaataccactgggtcttgttttttttttttttttttttcatctagcttgccactctgtgccttttaaatgggccatttagcatgtttacttttttttttttgatatttataagaatagcagatgtttattgaaggaattatcactatttcctgcgaaacaatttcatgactccagttttataacatcagaggctattaaagacagtctggtgactaaaaacaacctgacaatatgggcatcttttaaattttatattaaatggaaaaaacaatcaagaaaggaagtcttgctgagggtacagagctgcaatgaaatttagtcttaagggatttagagtcaacaactactaattaatcctaattattcagctacttaaagctgtttttt

SEQ ID NO: 134530 - DNA, 531 bp, Homo sapiens
tgctggtttaaagtctgttttgtctgaaattaggattgtgactcctgcttttgctgatttccatttgcatggtagattttcctccatccctttattttgagcctatgagtgtcattgaatgtgagatggatctcttgaagacagaataccactgggtcttgttttttttttttttttttttcatctagcttgccactctgtgccttttaaatgggccatttagcatgtttacttttttttttttgatatttataagaatagcagatgtttattgaaggaattatcactatttcctgcgaaacaatttcatgactccagttttataacatcagaggctattaaagacagtctggtgactaaaaacaacctgacaatatgggcatcttttaaattttatattaaatggaaaaaacaatcaagaaaggaagtcttgctgagggtacagagctgcaatgaaatttagtcttaagggatttagartcaacaactactaattaatcctaattattcagctacttaaagctgtttttt

SEQ ID NO: 134531 - DNA, 496 bp, Homo sapiens
ctcagtgtggaccagacatcatgtcccgccccctcactgtgccccctctgctcaccctgcctgactgtaaagagagactctcctcctggtgacctctaacctcctcccagggagcatgcccactctttgtgctctgagatgaggggccacagttactcctcaggggaggagacacaagttacactccagaaataataggtcttcttgtccatggaggtttatgtactttacagagtacatttcacatccactctctcatttaatttgtgcattcaattagcagatatttattgagggcatatgacatgctgagtgctgccctaagcaatgagcatgcagtggagaacatgatagatgaagaccccattctcacagggcttaggctgagagacaggcaacaaacaaggaaaggaacaagatacttttaggtaacgataagagagcccaagaagccakttatggtaaaggcaaattttgtgattctattgtttttttg

SEQ ID NO: 134532 - DNA, 581 bp, Homo sapiens
ttaaagctgaaaggcacctctgtgataattcttgcaaattttgaagataagaaaaataaggccaagatgtatggcttccctggggtcccagagtcaaggctggcatccaaggctcatgactctaggtccagggttctttgctctccccgaatggatggaagccatgctcaagcagctgaacactgtgaacggacacagctctgcctgtaaacgcttcctcagaaagaagtgagggtgttcacattgaggctgttctatgggtggaggctgctggcaccctctactggacggactgggtatgtcctctgctgtccagtcaggtccaaattgctcaactctaagtcaaagtgatgragctatggcaaccctctctccaggtgtccatggccaccatcagtgcctgtgttaaagcctctctgagattgtgagctagtcccaggcacatccccgtgttttccagctgatggatcatgcttcctgaacaaatgtaatgtcacttcagtcagggactctggagtctactttctcacactaagagcggggagcacagcttcccaaatcacagcagcccctcttccttc

SEQ ID NO: 134533 - DNA, 449 bp, Homo sapiens
attcttggaattccccccagttctacagaagaacagtaaatgtcatgaatcaagacctgagctctggcctttggctccccagtccagtgctcttcccagcagaccctccctctttactacgtgcagcagataatgtccacatgacacaggctcaaaaaatgtatgtgtgtgcatgtgtgtttgcatgtcagcctcaaccttccccccacctccaccaccaatgtcatcacacctgccattcctgggtcagagttgctaaggagaataaaaatgttatgctcaggggtttgtctgtatcagccagggttccccagagaaacagaaccagcaggagtgtgtgtgtgtgtgtgtgtgtgtgtgtgtgtktgtgtgtaaaaatatttacttttcatttgttttgagaaattggtctatgtgattttagagttggcaagtatgaaatctgcagg

SEQ ID NO: 134534 - DNA, 476 bp, Homo sapiens
aaggtgatggatgtgaaagtgctcagaaaaataggaagtgccttcaacctgtaaagttaagcctctgtcatcaggatcaggtttagaaaacgaggtctgaacacagggctgtaaagcagacaggttctgagacacgcctagctcaaatcctcattttacaggtgagagcaccatgggatacatgtcacagctactcacaggacagcggcrgggccagtcaggtttggatgggacactagaagccccaacacatattcagatgcccacccagtggccatgtagctgccacttgattatctttgcagacgaggagctcacctcctcaaaggcagcccctttcacctttgaaaggcttaggtgcttaggagactttaccaaaacatgaggaagaggaagaaattatggtggccttttctcttccaatcattggtgtcactgatgctaaaacagccccacagactgcatctacctccttt

SEQ ID NO: 134535 - DNA, 574 bp, Homo sapiens
gctgggttttcacccgccgtggtgagtttcctttcatgcatgtgcttatcagtacttagcccaagcttcaagaagacattgctacagatcgctagagatcgctctctgggcaagtccatactctgccctgcaaattcaagttaccttgttctccccaaagtctgatactgtcttctcaactgaacaagattamcaagccacatttttctcccctcaccctcacctcacactgtggcttagaaactgcctccaggattaagctggtacaatcctaggactcgcctcttttgttttctttttcttagagctcatattcctgtgctatctgctgtctgtaaactattgtttcatgcattttgttttgatggtttagttgtttaaagtgagagcataaattcgatcccagttactctattgtggctgttgctggaagtcagtatctataaggaattttaaaggatagatttccacattttccacgctgatctatcctgttatcccatttaacctcactattatcccttctgaacagccatattttagatctactggaaggggtttggcacaaatacag

SEQ ID NO: 134536 - DNA, 427 bp, Homo sapiens
ttcatgaaaaaaatctaagtggccaataaatatacaaaaaatgctcaacctcattaatcttcaaagaaacataaaataataccatagtaagatatgacctcacacctaatttttacaatggtaaaaattagaatgactgataatactaagtgttggtgaggwtgtggagaaactggagctctcaaacttgctggtgagagtataaattggtaggaccactttggaaaactggcattatctatcaaagttgaacatacacatcgtagtccccccttacccaagggtttggctttccacagtttcactttccacaattttagttacccatggtcagccaaggtctgaaaacaggtgagtatggcacaatacaataagatattttgagaaagaaagactacatttagataatttttattacagtatagtg

SEQ ID NO: 134537 - DNA, 427 bp, Homo sapiens
ttcatgaaaaaaatctaagtggccaataaatatacaaaaaatgctcaacctcattaatcttcaaagaaacataaaataataccatagtaagatatgacctcacacctaatttttacaatggtaaaaattagaatgactgataatactaagtgttggtgaggatgtggagaaactggagctctcaaacttgctggtgagagtataaattggtaggaccactttggaaaactggcattrtctatcaaagttgaacatacacatcgtagtccccccttacccaagggtttggctttccacagtttcactttccacaattttagttacccatggtcagccaaggtctgaaaacaggtgagtatggcacaatacaataagatattttgagaaagaaagactacatttagataatttttattacagtatagtg

SEQ ID NO: 134538 - DNA, 616 bp, Homo sapiens
ccagtgctaaatattcactcatcaccagaattttctttaaatgaaaaaatttgtattttggattttaggtattcagcattggattaatcataatcctagttatgactcaatgccaacattgtttcgcatatggcccacttttttactcattcgttcatttattcatgcattcattcattttttttcaccatctgttttagtccatttgtgttgctataaaggaatgtttgagactggatagtttacaaagaaaagaggtttatctgtcttgcagttctgcaggctgtacaagaagcatggagccagcatctgcttctggtgagggcctcaggctacttccactcatagtggaaggggaagggaaagggaagctggcttgtgcagggattacatggctagagaggaagcaaaagagagagagagggcaggtgccaggctctttttaacaaccagctgtcrtgggaactaatagagcaagagctcgctcaccccatccccaggaggagattaatctactcatgagggatccacccctataacaaaaacacctcccattaggccccacctccaacactgggatcaaatttcaacatgaggtttgttgggatgaacatcc

SEQ ID NO: 134539 - DNA, 581 bp, Homo sapiens
aatagccccaggaacctctccttctttgattcaattggttgtggatgcttttctccagggctggattcacaggtgggccacctgcacccctacgcagctgtcccatgctagctggtgccctgtggttagaaaggccccgcttggtttaatgctgtccctgtctagaattgctcaatactttttaacaaggggccccaygttttcatttagcactggccttgtaaattatctatgcttctcactctgagtcaggtctggctgggatagtgcctaactccaatggcaaagtagacatcatgtggtgaagtctcccaagagtcatcacatttctgcctcctctagtattcatttatataagccacccagcaattcatggcaatgactcatggaaaaagggtgaagtctcccaagagccatcacatttctgcctcctctagtattcatttatataagccacccagcaattgatggcaatgactcatggaaaaagggaaaattcatttccccaggatacaatctgacaccaaacttcctgagctcagcttgaaatttagctggaacaaagaaaagcacaaagatct

SEQ ID NO: 134540 - DNA, 494 bp, Homo sapiens
atagccccaggaacctctccttctttgattcaattggttgtggatgcttttctccagggctggattcacaggtgggccacctgcacccctacgcagctgtcccatgctagctggtgccctgtggttagaaaggccccgcttggtttaatgctgtccctgtctagaattgctcaatactttttaacaaggggccccatgttttcatttagcactggccttgtaaattatctatgcttctcactctgagtcaggtctggctgggatagtgcctaactccaatggcaaagtagacatcatgtggtgaagtctcccaagagtcatcacatttctgcctcctctagtattcatttatataagccacccagcaattcatggcaatgactcatggaaaaagggtgaagtctcccaagagccatcayatttctgcctcctctagtattcatttatataagccacccagcaattgatggcaatgactcatggaaaaagggaaa

SEQ ID NO: 134541 - DNA, 590 bp, Homo sapiens
atgaggtgattagatagacattaaccaacctggtcccaccctacctacttccaggattctggccatgtaactttaatatttttatcacttaatgtacatttatttcagttttctgctcyttgtagctgaaagctttctaaatgatagagttttgcctgtaataggtgtgctttgtggattttgtcaattaaatgttgggaacagggtgtgcagggtctgcccttggaacaggctaactagactgcctgtaagcaatgcgagtggtctaacagaaaaagaacataggcatcccaatgtttctgaggtccagttctgattttatgcctgactatgactttgatagttgggaatgtgagaaattaagacattaaagagtaaagtcttgactttggttgcatcacaaactaaagaaactcaatctagaacactgacttggtgtagaagtaaaattccaagtagacctccacctacttcctctggctggggggcacttgcttctttctgtaagtgatcaaatttaaataaaatgttgtttcttgggtctaaaaatctgctattagccaggttactgtgttctgtaattaagacct

SEQ ID NO: 134542 - DNA, 563 bp, Homo sapiens
gatatgcgcatgttaaagtggtccatgcatgttgaagtagtctgtgcatgttgaagtggtatgcacatgttgatgtggcccatgcatgttgaagtggtctatgaacgttgaagtggtttgtgcatgttgaagtgggccatgcatgttgatgtggtccatgaatgttgaagtggtctgtgcatgttgaagtggtatgcacawgttgacatggtcagtgcatgttgaagtggtaggtgcatgttgaagtggtctatgcatgttgaagtgatatgcacatgttgacatggcctgtgcatgttgaagtggtaggtgcatgttgaagtgatatgcgcatgttgacatggtaggtgcatgttgaaatggccatgcattttgaagtggaatgcacatgttgaagtggtccatgcatgttgaagtggtatgagcatgttgaagtgatacgtgcatgttgaaatggtccatgcatgttgaagtggaatgcacatgttgaagtagtctgtgcatgttgaagtggcatatgtatgttgaagtgctatgcacatgttgaagtggtccatacatgt

SEQ ID NO: 134543 - DNA, 609 bp, Homo sapiens
atatacggtatttactatattcggtttacaaactgatctcactattggcctattctctgtctgatcctcaccaggctctcatttctattttttttttttttaattttcagtatttccttaaagcatttggaacacgggatactggattcattcaggcaatactccacatggtactatgaggttagagctggctattactgtcccagtcgcaccacgacatggtgataagagacatgaactctgcagacagagcatttgggttgaaaacctacttctaccacttccagctatgctaacttgcgcaagttacttaatggctctgtgactgagttctctcagttgtaaaaggagaattataatagtatgaccctactgtatagtggtgtaagtttgagagtccgttatttcacatgaagttacgcatctggttttagaagagtgtctgccctagaaaatgctgagtgatgtaacagagaaaccaatgaagcaactctgcatatttcttcctgaatttatcaaattcataaatgtgtaatctaaggtccacagattytcagcacagagaagaagaataaagatcaactcatctaaccattcgtattgcacaga

SEQ ID NO: 134544 - DNA, 319 bp, Homo sapiens
caaactaactatcctagcagcgtcagctgccagctaacagcaagagctctgagggcatcactgaacagatagcaccttatgagttattatgattcaaaaatctcccttgctgttggatttaccaacacgtaggcttttatttcttcccattacatctgtttagccacagaaagcatygggccatactcactgcagaagataagacttcctcagaatcttatttgtttagtgcactcaattttacttcactgtctcatcacttgagagactggttaaggcaagaaacccatttcttaacattttttttgttttcaaacat

SEQ ID NO: 134545 - DNA, 685 bp, Homo sapiens
atcaattgtattgcctgaagaattctgcctgcctaattggagattgtcttctcactactatcttttagtgtaatcctgagtgaggctgtagtgcagaatggtcctttttattttttttggattgcactataaattaagccaaaccaatacatttgtgaacaaagcttatcctttttcctcgtccttcagccagataataggacacccacatgtgagtayagtttggttgagggagatgtagcagtattgcagtggtatatggcttgggagtctgggccagataataggacacccacatgtgaatatagtttggttgagggagatgtagcagtattgcagtggtgtatggcttgggagtctggatcacccgttcatgtagctcttgtcctgtacatgccatcctggatgtacctcttctaacaataaactgctatagatctggctgatcttatgactttgtggttctgacagaacatagctcatgatgagctgctgatgggtagctctggccaaatggttcctgttgtcccacgggtagatcctccatctctaccagatcccagctgcataacaaggactacttttcaaatggtgtttacttctctgctgccgatggtatgactggccttgctttagggccctggggatttctactgtggttctctaattgcaacttacacttcta

SEQ ID NO: 134546 - DNA, 488 bp, Homo sapiens
tttgctacatgggtagattgtatcttcacatgtgatagggcgaawaatgaataaatatgtaagatgatggatttgctattttgtttcactgcagcaatcattttactatatacatgtatcataacatcatgttgtataacttaaatgtgcacaatacattttttaatgaaatgaaatataaaaaatataaaaaataattttgaaaaacgctttgaaagcacgtatgaagaatagccatcattataaaacacagagcttccaaatttctgtaactaaataacaccttcagagaaattgcttatattacctaaacatctctgaataacttcttaaaattcccagaaaagccatatgtggatttttatgcatgcacctccaagaagctttaattatcttaatcatattcactactggtattaaaagtactacagataaattgctattaaatattatttaaacagtcattaatatttgatagatttaatgtg

SEQ ID NO: 134547 - DNA, 569 bp, Homo sapiens
ccactagagtctgatattttttcttccctcgttttggccccttcactagatattacagtttttatcggaaacaagaggcagtaaaaagtaatgtttaaaagcacaatctctagagacagatggcttgggtttgtatccttgctctgccatgtcatttactaaccttctgatgttgaacaagtccctcaacttgtttgtgactagttcagttatcttttgctgtgtaataaactaccccaaaatgtagtgtctcaagtaacattttaaaaattcatcattcatggttctgtgggatgactgggttgctcagttgggtgattctctattgaggcctcttacgcagttgcaatcagatggcagctggggctggagtcacccaaaggctcaactggaccagatgtccaaaatggctcactcacatggctggaagacgatgctttctagtggctgtgagctcagttggggctgtccgttagaatctctacatgtggtttctgtatagtttcwattctcacatgaagcagctggttctaaggagtatcccaagaatgggttttctatgagaccct

SEQ ID NO: 134548 - DNA, 569 bp, Homo sapiens
ccactagagtctgatattttttcttccctcgttttggccccttcactagatattacagtttttatcggaaacaagaggcagtaaaaagtaatgtttaaaagcacaatctctagagacagatggcttgggtttgtatccttgctctgccatgtcatttactaaccttctgatgttgaacaagtccctcaacttgtttgtgactagttcagttatcttttgctgtgtaataaactaccccaaaatgtagtgtctcaagtaacattttaaaaattcatcattcatggttctgtgggatgactgggttgctcagttgggtgattctctattgaggcctcttacgcagttgcaatcagatggcagctggggctggagtcacccaaaggctcaactggaccagatgtccaaaatggctcactcacatggctggaagacgatgctttctagtggctgtgagctcagttggggctgtccgttagaatctctacatgtggtttctgtatagtttctattytcacatgaagcagctggttctaaggagtatcccaagaatgggttttctatgagaccct

SEQ ID NO: 134549 - DNA, 404 bp, Homo sapiens
atttagggaagagagtcattaccctttcccacttcacatagagattatgaatttagtgtatgcaaaattcctaataatgctgttaaatgatttggcctggagaatattaaccatactaaattttactgtgttgtgcatatgactggggctacttttacttgcctggtacgggaaaattgtgtatgtgtctgtttacccttytttccctagaacctcattttggagggttgaagaaattcttcatgtgattcaacttcatattcccccacaacttagctttttatgtgtaatccttcttaatactactatataagctaatctgtatttgtggaagagaatagttgatatactgatggtagttttcatcatagtgctttcctaaggagcagactgaagctcagaga

SEQ ID NO: 134550 - DNA, 399 bp, Homo sapiens
tcaagctgaatttagagtttttgtggacagaggagtgagagggtgaaggaggaaagggaaccagatgagcracatgacagagctgggtcttgagaagagatgacccataaaaatacctgaatctggcccttcttgtgttagggctggccaggggacctctaaaaacagcaaggctgcccttcagttttctcactgtattagaaataatattacaagtataagatagtaaagtatatcattcattttaaactgtaaaggcaaaattagttaaattttgattgcaaaatattccattttgtctgttgatgttctgtaatagaagccctgcccccaatctttgcctccaaatccatagtaaaggtgattggtcacaacctctgtgggggtggggtttgtgag

SEQ ID NO: 134551 - DNA, 585 bp, Homo sapiens
tggtgtttagctctggaaaaagggaaactgctaaggcttctcttaacacaatggtttcgattaggacgaaatgagagccaggtttgcaaggacagaaaacttggtatgtgcattcttctcagtgccagaaaacatgcatttgcctcctgcaagtcctagtcaaatgctgtttgggttcacagtgaactcctagctgagaaaagcccatcagtccttattttcatcacttggaaacaatatttccacacaaggatggtcgtggtataatatagaaggaaaaaaccaaggcaacgaggaactcacaatcatcaaatcagtagattaaaaaaatgatttagatagtacattaattattcatatgacatatatttattgatatctactttattcaaaatagtaagtgaggttctggagaacaatcagaaatctcatttctggacatgcagtttcatttggtctagagtgrgatgtagaaacaggtcatttttttttaactcctgagatgagcctaaggatcaacaagtttggagtctactgatctgaaacagtgaacctcaatctctgcattgcctggtagattcagag

SEQ ID NO: 134552 - DNA, 576 bp, Homo sapiens
gatgcacacactatattgtaaattcttatctctgtatactgtacttctgcatacaggtgttacattaaagaattacttcatccccatgtgaccatctcacctcataatcaaatgaccctaaatccctcactaacctatccctgccctcactaaacttaataataaatgctggtatatccagtgcattggcggcatcacagtaccagaaggcgatgacccccctggacccagctttcattatcttgtgtgtgtctattatttcttgacctgccgatctgcctgggaacaaagaaagagccccattgcattgcaagctgctggccagatcccacaataatggagaaagacctatttmctgggtctctgctgtatagccttcttcaggcttatcgtactcagtgaacatccagtgctgggtgcagctccatcaccctcttgtgtgtttacatgtatctttctatgacaagagggttgtgctggtggcacctccactcttcttttctgtttgctgaatttgaattgtgaaacatctttgaccaatgggtgtctctgtgatgaaggaggttcaagaggctg

SEQ ID NO: 134553 - DNA, 601 bp, Homo sapiens
ttcctcatttttaaaatgtttaaatagtgaggtttattattgttccaaggtcaaatgtgggcagcaagcatttcaacccaggcttgtctgtctctaaatcrtgtgctgttaaaaaattattacatcatgctctgtcttataatattaacagttataaaggaaatgtttactgagtgccaatgtgtttactctttgattacatgttatgtgtttcaaatacatgatctcatttgagctaggtattattttacatgtaagatttagaaaggtcaaatactaaatggttttatgaccaccaaatccttggggtcttttattgatcttccaaatgcaatcatttgaaaattaatgtgtttactcgtagaattataataatcaatgcacaggaaaaacgagaaatatctttttctgttttaaaacttttagatgaggcaactgaattacaaacaattcagtggcctgcaaggtctgtagacagtgaggggtaaagccaaaattatagctcctgggtctgagtcatgctgtttctctggaatgctccttacctgaagaagctatagcgtttgttattccactgcccatcaagcttttgtgacctaac

SEQ ID NO: 134554 - DNA, 601 bp, Homo sapiens
ttcctcatttttaaaatgtttaaatagtgaggtttattattgttccaaggtcaaatgtgggcagcaagcatttcaacccaggcttgtctgtctctaaatcatgtgctgttaaaaaattattacatcatgctctgtcttataatattaacagttataaaggaaatgtttactgagtgccaatgtgtttactctttgattacatgttatgtgtttcaaatacatgatctcatttgagctaggtattattttacatgtaagatttagaaaggtcaaatactaaatggttttatgaccaccaaatccttggggtcttttattgatcttccaaatgcaatcatttgaaaattaatgtgtttactcgtagaattataataatcaatgcacaggaaaaacgagaaatatctttttctgttttaaaacttttagatgaggcaactgaattacaaacaattcagtggcctgcaaggtctgtagacagtgargggtaaagccaaaattatagctcctgggtctgagtcatgctgtttctctggaatgctccttacctgaagaagctatagcgtttgttattccactgcccatcaagcttttgtgacctaac

SEQ ID NO: 134555 - DNA, 550 bp, Homo sapiens
ttttttgtagtttaagaaaacatttttgggctgggtgcggtggcttacgcctgtaatcccaacacttttcgggaggccaaagtcaggagttcaagaccagcctggacaacatggtgaaaccccgtctgtactaacattacaaaaattagccaggcgtggtgataggccctgtaatcccagctacttgggaggctgaggcaagagaatcgcttgaacctgggaggcagaggttgcagtgagctgagatcacgccattgcactccagcctgggcgacmaagcgagagcttgtattataaaaaaaaaaaaaaaagaaggaaggaaggaaagaaggaaggaaaacattttttaactctaaatgtggggagattctgttgcttagaataaaagggccttaatttctcagaaaacaaggaactggtggaaaaaaaatttgtttatggaggatagaaaacctctatagaggtttaaggaaccaaggcatggaagactaatgaagcccaaaagtgaaaatagatgaaacttagaagaaaccaatgaaagcttcaaaca

SEQ ID NO: 134556 - DNA, 251 bp, Homo sapiens
gacacagcattccaaatactcaactctagcaagcaatatacctgaccttcatctaaagctgcttatttaaagacaaaatccctaacatcctctcctgtaaaatggagatgataatamctgctccatggggttgtttaaatgaggtagcattagatttgagagtgctaggcgtagagattggcacaacataaagagttcagcaaacatttcatgctgcttctgctgctgctgggaatgacaatagttaaaac

SEQ ID NO: 134557 - DNA, 651 bp, Homo sapiens
aacttggggagagctttaaatttttccaggcttggatgctattgggttaaaaaaaagtcttcattcaagggacagggatggacatcatctgccacagctttcccccaacttaccctgtgcccagatgccagcctgcttgctgctcccgagagccttgcacaagagacctttgtcctggctgttccctccgttgaaatgctttgcctctcactcctgtcactctkggaatgtgaccttcctgagaagccttccccactgccgaacctaagatggccctcacactgctctctagcaatgcagccctgttgtaatatttttacagctctcattactctcggacatctatactacataagtgcgtttattgccagtttcccccgacttgtacatgtgctctctgggggcagggcctttgccttttgtgtttacttccttgtctccagctcaaaagcactcaataaatactgagcagtgacaggcagatggcacagtgctgaacccacacccctcctcaggacagctcaggtctagcctgtgtacagcggcaccaagcacattcctcaagggctgctgctgaccttgatgatgttgtggttattttatctcttctctcattctctatcctccttaatctattttctgctgttagag

SEQ ID NO: 134558 - DNA, 597 bp, Homo sapiens
ggagccactgttatgtttaagtaaggggaggacgtgaaaagtcctgtattttgaacagcttcttttggcaaggtggcagcttagaggacataaccaaagagtggcactgggcctggggtgatttcctccctgaaggacccctggaaactggtgggtccatgggcaagatggtaccacttactgtgaaaatatgctttcccggtccttcattcaaaagactccagtgaaccattttccttcctcctatttaaaaacaartatttccattatatgaggcatttaaaatatccctggattgttctttctagttaaaaatgtattttatatagttgtactttgtttataaggctgcctttgcttttaaataatctgaaaatctactcagtggctgaagtagtgacaaatgttttgcttcactttgaaactcttccatattaatttctccttctgtgtctcctgtgttctgttctctgaactttggagacattaacatgcagctcagtttgtgtctgtcaccttctttctgcctgctgggatgtggggaggcatgtcagcttgccagtcccctttccagggccttgtactccgggcctgtca

SEQ ID NO: 134559 - DNA, 561 bp, Homo sapiens
tgagggtgggtggagaagtggaggggagtggatgaagacggaaactggagtaagcagtggccgacccagcttgccagccagaggctcctggccaggaggcaccctgccatgtccccagtataaataaggctgacacagaggaagaggcaacagacaggcagagggcaagctgcctacccaagggggtgaggtctttggttttacacatgcagccccctgtgcatgtacttttatggctgctatctttttatagcttgagaatgttatgttctgrgcaaagtcctctctccaggcctggccttggtctactcttcctgacatgcaccacactgctccatttacagctttgttgagaaagtatttgttgaacacttgttatgtgcaaggcacttgcctgcctctggggatgaatgatgaatatggtttccttgctctggatgagtgcccaagttaataggagagacagatcatttccattcagactgataagtggtgttatggagggaagcaaaagaaaaacatccgggctcactggggtggggttggttggggaaggcttct

SEQ ID NO: 134560 - DNA, 561 bp, Homo sapiens
tgagggtgggtggagaagtggaggggagtggatgaagacggaaactggagtaagcagtggccgacccagcttgccagccagaggctcctggccaggaggcaccctgccatgtccccagtataaataaggctgacacagaggaagaggcaacagacaggcagagggcaagctgcctacccaagggggtgaggtctttggttttacacatgcagccccctgtgcatgtacttttatggctgctatctttttatagcttgagaatgttatgttctgagcaaagtcctctctcyaggcctggccttggtctactcttcctgacatgcaccacactgctccatttacagctttgttgagaaagtatttgttgaacacttgttatgtgcaaggcacttgcctgcctctggggatgaatgatgaatatggtttccttgctctggatgagtgcccaagttaataggagagacagatcatttccattcagactgataagtggtgttatggagggaagcaaaagaaaaacatccgggctcactggggtggggttggttggggaaggcttct

SEQ ID NO: 134561 - DNA, 584 bp, Homo sapiens
aatttagccggtggtaagcctgagttatcacttacctattatcatcactgtcatggtcattgattttttttttttttaaaaatggggtctcgcactgttgcacaggctggagtgcaggggtacaaactgggttcaccacaacctccgcttctkggggttcaaacaattctcctgcctcagcctcccaagtagctgagattacaagcatgtgccaccatgcacagctaattttgtatttttagcaaagacgagttttcaccatgttggccaggctggttttgaatcccttttgagtccacccacctcagcctcccaaagtgctgggtgtcgtggtcactgtcaccatcatactttagtgcctagacaccaccagcagcacctcaaggcttcggtcttcctgctgctctggtccagctggtcaaggtcccctcagcaaggggctaagtggatttctcattccctacggctcatgatggaccaaggccctgggaaatgcccactgcatcaggcccatgcacagatctcacaactgagagttgtttgtggaaggcggaatgagagactgatgactcaagataagatag

SEQ ID NO: 134562 - DNA, 584 bp, Homo sapiens
aatttagccggtggtaagcctgagttatcacttacctattatcatcactgtcatggtcattgattttttttttttttaaaaatggggtctcgcactgttgcacaggctggagtgcaggggtacaaactgggttcaccacaacctccgcttctggggrttcaaacaattctcctgcctcagcctcccaagtagctgagattacaagcatgtgccaccatgcacagctaattttgtatttttagcaaagacgagttttcaccatgttggccaggctggttttgaatcccttttgagtccacccacctcagcctcccaaagtgctgggtgtcgtggtcactgtcaccatcatactttagtgcctagacaccaccagcagcacctcaaggcttcggtcttcctgctgctctggtccagctggtcaaggtcccctcagcaaggggctaagtggatttctcattccctacggctcatgatggaccaaggccctgggaaatgcccactgcatcaggcccatgcacagatctcacaactgagagttgtttgtggaaggcggaatgagagactgatgactcaagataagatag

SEQ ID NO: 134563 - DNA, 417 bp, Homo sapiens
ggcaatcagctccgactcgccactgcagacttctagtctacttgtaaaatgagtcttgtcatttatttgacagtccccaggatttcacagagggggagggacaaataaagccaagcccccagcagagtgttcccagtagcctcaagtgtggagtttgctgttcttgggrccccaggacttggttgaacctctcaacatcctggctgtctccaggctctctccattcatttcagccagtgtttgttgaatgccttctggaacggatgacatcagggcagatttcctctttagtggccagcaaagtatttctgtttcaaataaattcaacctggttccagaaatttacctcagagcagaaatgtccaatctgtacccctctgaccacctgctgcccttttgtcttctgttcactaagtg

SEQ ID NO: 134564 - DNA, 606 bp, Homo sapiens
cagggcttctgcttggcctggcaccctgcttctcagttgatgtcttccccacccacttcatgccttgggtttgtcttctgtcagtatcctcagcacccagaacagagccgggcacaaagctgcatctcaattaatatctgctgaatgagtgattgattgaaagaatgaatggcagaaaacagagaaacagtgaagggaaaaaaattatgaccccacagtcaactgtaactgctgcctactcttcagtatctcaatccacaacaccttctctcctttttgtagctttcctgggtccccaaccaggcttccctccatgcacacaccttgcccgtcacatccctttgttctcccccactccatctcccacccttccatgattgcatggatttttctttatctcttttctcttagaaagcctacaaagrgaagggaaggggaatggagcccgctggtcatgggtaactccactgggtaaatgtggtgcccttacatcaccgagcctgggtcacggcaatggaaggccctccttaacgcccaaggaacagaggagctgagtggcatcagagggtgcacatctgatgtgagcctggaagtgaagggtagagc

SEQ ID NO: 134565 - DNA, 606 bp, Homo sapiens
cagggcttctgcttggcctggcaccctgcttctcagttgatgtcttccccacccacttcatgccttgggtttgtcttctgtcagtatcctcagcacccagaacagagccgggcacaaagctgcatctcaattaatatctgctgaatgagtgattgattgaaagaatgaatggcagaaaacagagaaacagtgaagggaaaaaaattatgaccccacagtcaactgtaactgctgcctactcttcagtatctcaatccacaacaccttctctcctttttgtagctttcctgggtccccaaccaggcttccctccatgcacacaccttgcccgtcacatccctttgttctcccccactccatctcccacccttccatgattgcatggatttttctttatctcttttctcttagaaagcctacaaagggaagggaagggkaatggagcccgctggtcatgggtaactccactgggtaaatgtggtgcccttacatcaccgagcctgggtcacggcaatggaaggccctccttaacgcccaaggaacagaggagctgagtggcatcagagggtgcacatctgatgtgagcctggaagtgaagggtagagc

SEQ ID NO: 134566 - DNA, 606 bp, Homo sapiens
cagggcttctgcttggcctggcaccctgcttctcagttgatgtcttccccacccacttcatgccttgggtttgtcttctgtcagtatcctcagcacccagaacagagccgggcacaaagctgcatctcaattaatatctgctgaatgagtgattgattgaaagaatgaatggcagaaaacagagaaacagtgaagggaaaaaaattatgaccccacagtcaactgtaactgctgcctactcttcagtatctcaatccacaacaccttctctcctttttgtagctttcctgggtccccaaccaggcttccctccatgcacacaccttgcccgtcacatccctttgttctcccccactccatctcccacccttccatgattgcatggatttttctttatctcttttctcttagaaagcctacaaagggaagggaaggggaatggagcccgctggtcatgggtaactccactgggtaaatgtggtgcccttacatcaccgagcctgggtcacggcaatggaaggccctccttaacrcccaaggaacagaggagctgagtggcatcagagggtgcacatctgatgtgagcctggaagtgaagggtagagc

SEQ ID NO: 134567 - DNA, 606 bp, Homo sapiens
cagggcttctgcttggcctggcaccctgcttctcagttgatgtcttccccacccacttcatgccttgggtttgtcttctgtcagtatcctcagcacccagaacagagccgggcacaaagctgcatctcaattaatatctgctgaatgagtgattgattgaaagaatgaatggcagaaaacagagaaacagtgaagggaaaaaaattatgaccccacagtcaactgtaactgctgcctactcttcagtatctcaatccacaacaccttctctcctttttgtagctttcctgggtccccaaccaggcttccctccatgcacacaccttgcccgtcacatccctttgttctcccccactccatctcccacccttccatgattgcatggatttttctttatctcttttctcttagaaagcctacaaagggaagggaaggggaatggagcccgctggtcatgggtaactccactgggtaaatgtggtgcccttacatcaccgagcctgggtcacggcaatggaaggccctccttaacgccmaaggaacagaggagctgagtggcatcagagggtgcacatctgatgtgagcctggaagtgaagggtagagc

SEQ ID NO: 134568 - DNA, 584 bp, Homo sapiens
ttcatcattggtgccaactttaactgattgcaagtggcttcccagaggcctgtgcgcagggtctgcagactgtgctgaaactatgcaatgtgataggaagctccctggagatggagttagtgagagacacctgggttcaaatcccaaatcctctactcagtaattttgtgatctttgaaactccatttatggccttttcatctgcaaagtaaaaatcrtaaggcttttcttcatagaattgatgggtgacttaaatgagatgacatagacaagcctgtcaacccagagccaggcacgcagtaaggatcaacaatgttcattaaatctgaaacctacagtccattgggatacacaatgccaggcagaaaggcctttaggtatgtaactaatttctgctgaaggtagcagagcccatgttttaatagtctgtgacattttagaggaactttaaggttgtagtgaatgctgttgacatgatagaatatggaaaatataaaataaatacacttttctcatctgaaaaagtgagaataatacctgcctacaaaagatgcgtaaaagtggacattcaatgaggtaaaatt

SEQ ID NO: 134569 - DNA, 454 bp, Homo sapiens
tctacttctaaaccctgccttcccaacagttgtgaaaatagtcaatgattttcaaatcagcgaatgtgttcactttcgtgctttccttaattgtgactgaaatgatctgatggggttcccgcatggaacggaaacctgtcaatgttctctgtggccctagcatccaaggcaggcattctgagcatctggtccctttctaaggagggcatttattgagtctgtcaatcctttgttagtcatgcattttctgctacctcaaaatttgagctctccrcttctcagccaatggcttggtcattgctgtgtgtgtatgagcctcaggatcttcagaaagcacttctatcactttccccacctccttggttcaggaatcctcagtattctcatttttcatattattttttaaattgggttagaggttaaaaacatcaggaaatcctggcttaatgaaggg

SEQ ID NO: 134570 - DNA, 556 bp, Homo sapiens
ctttggatattctcatttagtatgcttggggtattttgaacaattgctgccaacccaatctaggcacagctaagtttgagaackattgctcaagacagcatggaagctatccgcagagagaactgtgggtctgtgtatcatatgtgtgcccagtatactaaagcctctgcatattttttttcattgacagcaaacttgaagaattggtccatttcttacaagtcatgtatcccaaactgtgtcagcactggcaagtgatctggatgatggctgcagtgatgctggtcttgactgttgtgctggggctctacaattcctataactcttgtgcagagcaggctgatgggccccttggaagatccacttgctcggcagcccagagggactcctggtggagctcaggactccagcatgagcagcctacagagcagtaggaaacctcacacctagccagtgccctgctctgagacactcagactaccaccctttccccaagtataacgtcaggcccaagtgtggacacactgccgcccatcccatcaggtcatgaggaagg

SEQ ID NO: 134571 - DNA, 430 bp, Homo sapiens
tatttaaattttctttattctccactgaacaaagagaaattggaagaatgcaagagatctccccacttcagacctacagtccacctcgccacagccagtcttcaaaagaggcaggtggagagccacgtgatggcattttcagctggtgcaaaggatcttccctgccctttcagaatgccccttcttcatgcctgcctccctggctcacacagaataaatccactcctttgagcaaagacmctctatcctgagaaggagtcatctgcaaaattgtatgcttttataaaggccaggccaccatcaaacattaacatgccaatataggtccaatcaagcaaagctgatttccaagaataggaagctggactaacgcagatgacttgaggctccacacagggcttgcacacaactggagtctacagatatcatt

SEQ ID NO: 134572 - DNA, 535 bp, Homo sapiens
ggaaactgatgccaagaatgaggagaagatacaaggctcactcataaaccctgtctgagagttcagggagggtggcagctgtgatctttcagagtcctggctggaaagctctgctcacagtgttgccttgttggaggactcctccatgacgacattgctcccattgggaatcaggacatgaaggtgggctgcaggatttctagggaaagcatagccatctggatacttcctttaaacttgtgatcccatacctgcaatgatctcccagcacctcccagccatcttaccaagatgttctagtatgtctgttttccttctttctcatataactcttttacacccctcctctctccacagaccttcctagacccctctacctctcactctcagcagatgaccttgccttccactttatagagaatacctaagctacattcccataggagccctctcactttccttcaccagatctccagcccarcaacttcatcatcatcttacctttgttacaaacaaggagagattctctagtttt

SEQ ID NO: 134573 - DNA, 449 bp, Homo sapiens
ttgctcctaataggtttttacatcatattttgaatgccaacacagaagttaaaactttattatacttttattgacatatgactttctcatttttttaaattttgtcctatattgtctgattaatattgaaactcctttgcctttttatattattgaatctttaagctcttttctatatttgtgttatatatcttgaaaggggcaagtagtggtattggctttaatagaatctcaaacaatttgcttttrtaataaagtagcttctaccacttaaatatattgtcaaaccagctatacttgccatattttccactcctttgatttttcatttatcaactatcttgcttttttattgataaaataaaaattttatcaattaccaacttcatgatttttaaatatatatttgagcttcccttaactttatgtgaatacaaagaatatacatc

SEQ ID NO: 134574 - DNA, 590 bp, Homo sapiens
ggtctgagacccagctcaagtcttctccctaaataatgcagatttgcctatagatgagggaacagcctagtcatacatcatgtattcacattgctttagcggaaaggaaacaatggtcaattctctggcagagaagggggccataagaaaattagagagtgccctttgataagttaatgggtgcagcacaccaacatggcacatgtatacatatgtaacaaacctgaacattgtgcatatgtaccctagaacttaaattatatatatatacacacatatatacatatacatatatatatatacacatacatatacgtatatatatacatatatatacgtatatgtatatatatatatatacagaaaagtagagagtgtggtgcttagagtgaattctggcagatcagtgggtgccgcctcctacattagaaagtatggaggagaggcaagggagagatggagaggccattctaaagagaggaaggtaaaacaattttggtcagattatgaagagtttgcatyacttgtataaagtgtgaacttcaacatttaggcaatgagccagagaaggaatatttcacagcaatgac

SEQ ID NO: 134575 - DNA, 546 bp, Homo sapiens
aatcaggaacaatgtattgtgtctgtaacctgtatccttaaatacttatacccacaaaaagccaactcagccttacatagtcctacatctgcaggaggcagtagattagagctaaagaacctaagatttggagggtaactggggtagggagaacactaagacccagaagcttccactgaaaacaagtttactggaggcaaaaactgactaagggtaaggggaggagataaaataccaggagggaaaaacttattctagctaaagtgtgaattgttgacactacagcaagaattgtggtttcggtgcagatgaaattccctgtagtccagaattcttgtaatccattatggttttgtttctcttctagttttaaaaagtctcaaagcagcraaacacagaactgcccctgatcgtgtacatcaatttcttatgatggtgataaatctatttcaactttctgcagtcttctgtatagtaatgctgtagagaaaacagcaatatttatagttccagctccaaaagtcaatagcagcatggtttatggtt

SEQ ID NO: 134576 - DNA, 589 bp, Homo sapiens
acatttaaattggtagagtgagtaaagcacattgttctccctaatgtgggtgggcctcgtccaatcagttgacggcctgaatggaacaaaaagactgatcctcctctgagtaaaagaggattcttcttgtctgactcccttaagactgggacatcagcttttttcctgtctttggatgcaaaccaaagcaccagccctgcctcagccttgagtctactggcctttagacagaaattaagcccttggayttcatgtatctccagcttgcaaactcaccctgtgtcaaatagatagatacatagatatatagataattcacccacacacacacaccaacacacaaaggagttaaatttgccaggatatttttatgaatggacttgcattaatccttcttttgtgggccttccttctctcagatctcttacctgcatgagcccagcaagtattgcacagtccatttttaaagcctgcccaagagctccttttggttccacagatgggtctcaaagcctaatggtttttagtattaaatataccaagcaagaaagcctaacatctcttttcacaggccagtaaaattcaaaca

SEQ ID NO: 134577 - DNA, 520 bp, Homo sapiens
ttgaaatattttgttacacagcagtagagagctaaaataactagaaagaaatcacaatttaccctcatgagaaaaagatgtatctctggacaaaaatgacccattcaacttatcctataaatctatggttctcacaataaaaactattaagatttgaagttgaaagaatgagatgtgtgcatmaagccagttaagtagctttttaaacatcacatgcattacagtactaactaggcttctaggaaatgaaatgatgagagtttagtatttattaaactgtgaatatgtacctggttctgcataaaggctttgtatggatcattccactgaatcctcatagttacccaagtgttaattaagatggacattttactgctgagaaaatggagttaaagagatgttgaatacacttaagtacagagaccagtgacactgtaaagcaaccatacaaaccagactgcataatgagctaacaacatgacaggatcaaatccatacatgtcaacactaaccttaaatg

SEQ ID NO: 134578 - DNA, 540 bp, Homo sapiens
tttaggtatagaaacatcatgggtttgaagatgaaaggttaaacttttaaaataatttcccataccttacttaatatgaatatttaattattcttcttgggcctagaaaatacgttgagaaacattgtttaggggacagtctatgatcacatatacacacatgctcacacgtgccctgggtcacaatttagaaaaatagtcccactgacttttactaatcattagcagtatttttcagtcttcttcacattcctattataagtcacagggcaggctcttctcgtagccatargtacccttggctcctatgaaactatccaaggtttcatccagctcccttggctctacagacagaggcagaaggaattatttctttgacgtcttaagaactgtgaactttgccctcctcctgtactcttatgactaaaaataaaggcagcgaaaaagaattgtaactgtgtttgaactgcaagctttcagagcagcactgctgttttagcagatgccactgccttatattaactgtgacagaagttgcat

SEQ ID NO: 134579 - DNA, 476 bp, Homo sapiens
aagaatgctaacaaaatttatgggacaacatctaaagagcaaatatttgaaatataggatatcaagaacaataagaaagaaaaaagccagaaagcttatttaaagaaatagcaaaaaagaaatgtccaaatctgaggaaacatataaatatcgaggcacaaggaaatcaaaggtctccaattagatgcaatctaaaaagaatgtatcaagacataagtaaactgtcaaaaaattttttaaaaaggaatctgaaaacagcaatacaaaataagcatatcacatatcaataacttccaggacgggtagcagtggacttcccagcagaaatcttacaggactagaggacatagagctaatgtactgaaggacaaaacttcccaaccaaccaagaatagtttacctagtaaatctgtaattcagaagcaaaggagagaaaatctkccccagacaaacctaagctgagagagttcatcacc

SEQ ID NO: 134580 - DNA, 420 bp, Homo sapiens
ctacctgtgtttaacaacttttctttattctgagctatwgaacctctggaatggcccaggtgaaacctattccttttggagatcagctctttttgtaactgaagacagcgattttcctgtgaatcttctcttctacagtggttaagagattgggctttgaagtgaaataaagttgggtttgaattctatattcacaacaaaacagtttttgcttttacaatagttatttaaatgttctgagtctgtttcctcagtttcaaatgtggaaataacatctacctaaacaggttattgtgaacattaaagtaagtaatgcaaattaaggacagtaaataagtgtggcatttggtctataatatatcttcaataaatttttctttctcattctcttcatgcccagatagctgtcatttttctaaa

SEQ ID NO: 134581 - DNA, 367 bp, Homo sapiens
tttatcttcccagtatgcaatgaagcctatgtaccttacctctaatattgtttctttctagaagattagatgttctatttcttaaaggtgcttaaagcacaatgacgtgagaaaggcagaaaaaatctttcagctacttcagaaggtctgtactttataaaatagacattcaagtagctatcaaatttatggccagtaaaattacggcccctgtaattctgagatagcaattagaaagagaaaaaaaggtatattatttagcaacctccamgcaatgattgagattgctgctttgaacaggagagcacaagtgaatcttcaactataatttttcaacccggtcctaatgatcttggatttactggta

SEQ ID NO: 134582 - DNA, 601 bp, Homo sapiens
gaagtagaatggctgagccattggtaaatagaggtttatctttctgaagaactgcccaactattctccaagaagctacagcattttacattcctacttggagcatacgaaggatctaattacttaccaaaacactattgtccatcttgttgatacagccatcatattggctatgaattgatatcttatgctttacatttcccaaattggtattgatttgagcatctttttatktatttcttgaaatattggcttatatactttgtccatttttaattgtttttttttttaatcattgagttgtaagagtctctatatattcaggatgcaagtatgttgtcagattacataatttttcaaatattttctcccattctgtgattgtctatactcaaaaaatttgaccatattaaaaaattaattaaaaataaataatacacctatatatgagctaagtatgtaaagagcaatcaaaattaaatcctttatttaaatttaattagggttaattaaatataattaaattagggttgtacaataatttcttaagtatgacaataaaacacaaatgacaaaatataaaatagatggaacattattaa

SEQ ID NO: 134583 - DNA, 594 bp, Homo sapiens
acggtaaagcaaggctgcttgccttcttctgtaaatgtgtcttcatgtcttcatcattcttgtacctcttcttatgatacagattttgtgaactggtattgatttttattagaattacactgaattaatagatttattaaaggccaatacatttttttataatactaaatcttacaaataatttaatcttttcaatgttttcctatgaagtcatacaattttctaaataaaggcaatgcattacttttgtgagatttargtacttatattagttttgtttggctaccataacaaaataccttggattgagtggtttaaatgacagaaatttattttcttacagttctgaagtctgagaaatccacaaccaaagtgctagccaattcagtttctggtgaaggctctcttccttacttggaacaaaaaacaccacacaaatgggtgcctccctgctgtgttaccccatgagggagagagagagcaaatttctaatgtctctcataagaacactaatcctattagatcagggctcacctttacgacctcatttattcttatctactttcatattcatcccacatagatgtatgcatg

SEQ ID NO: 134584 - DNA, 594 bp, Homo sapiens
acggtaaagcaaggctgcttgccttcttctgtaaatgtgtcttcatgtcttcatcattcttgtacctcttcttatgatacagattttgtgaactggtattgatttttattagaattacactgaattaatagatttattaaaggccaatacatttttttataatactaaatcttacaaataatttaatcttttcaatgttttcctatgaagtcatacaattttctaaataaaggcaatgcattacttttgtgagatttaggtacttatattagttttgtttggctaccataacaaaataccttggattgagtggtttaaatgacagaaatttattttcttacagttctgaagtctgagaaatccacaaccaaagtgctagccaattcagtttctggtgaargctctcttccttacttggaacaaaaaacaccacacaaatgggtgcctccctgctgtgttaccccatgagggagagagagagcaaatttctaatgtctctcataagaacactaatcctattagatcagggctcacctttacgacctcatttattcttatctactttcatattcatcccacatagatgtatgcatg

SEQ ID NO: 134585 - DNA, 320 bp, Homo sapiens
gtactcctccggagtatatcctgaawcactgggatggctttgaccctcagagtctagaggaaaaacacctcatagccctttgcacaaaggtttggccaaattatgatctgcaggaaggactggcttggcctcaggaagaaaccacttattttgatagcatcctataattggacattttctgtacatgtgagggcaaacggtctgaggccccatatgtgcaggctttctcttccttgcagggtaatcttgacctttgctggcaatacaggattgatctagccctcctgtttgccatctcaggagacgctgcaagggacaat

SEQ ID NO: 134586 - DNA, 474 bp, Homo sapiens
tttttatttttcccagttataaaacacgtgcactttgaagaaaagcaaataggaaatcaaggaaaatataaagaataaatttaaattaccataattctacaactcagaaataaccattaatagtttgttccaatcctcttttgatctgtaactagataaactttatcagcacacataaattataatacctttcatatatgatatgtatcacccagaaaaaaaattaacatttcttccagtcttttttygatttttcactagacaagtgtatgtcagcacatccataatgtatgtctctcataatcaggtgttacactggtcacagtaataacagtgaaaaacttgaagtaacttaagtgtcctttaataagaaatgcttaaataaaccaaaacatatttattctaggaaatactaaatgaccagtgttttacaaagtgctattgcaggaatgtgttaattgaaatagaaagata

SEQ ID NO: 134587 - DNA, 567 bp, Homo sapiens
tgctaggcagggggattaattgatgccaggcaggggyattaattgatggaaggtggtcaagaccaaccggggcaaaatagcaagatcttgtctctacaaaaaaattaaaaattaaccgggcatggtggcacatgtctgtatttctagctactcaaaaggctgaggcaggaagattgcttgagcccacgaggtcaaggctgcaatgaactgtgattgcactactgtattccaggttgagtgacaaagcaagaccctctatcaaaaataattaattaaaaacaccattcatttcagtgtttaagatccttttgagcatttcctgtagtaccagtctagtggtgacaaattccctcagcatttgcttgtatgggaaggactttatttctccttttataaagcttattctggcaggatacaaaattcttggctgacagacacactgtttttttttttccctttagcactttgaaaatgccatcccattgttttctggcatgtaagaattctgctgaaaagtcctcaattggtctgatgagatttgggatttcctttataggtgactagtca

SEQ ID NO: 134588 - DNA, 567 bp, Homo sapiens
tgctaggcagggggattaattgatgccaggcaggggcattaattgatggaaggtggtcaagaccaaccggggcaaaatagcaagatcttgtctctacaaaaaaattaaaaattaaccgggcatggtggcacatgtctgtatttctagctactcaaaaggctgaggcaggaagattgcttgagcccacgaggtcaaggctgcaatgaactgtgattgcactactgyattccaggttgagtgacaaagcaagaccctctatcaaaaataattaattaaaaacaccattcatttcagtgtttaagatccttttgagcatttcctgtagtaccagtctagtggtgacaaattccctcagcatttgcttgtatgggaaggactttatttctccttttataaagcttattctggcaggatacaaaattcttggctgacagacacactgtttttttttttccctttagcactttgaaaatgccatcccattgttttctggcatgtaagaattctgctgaaaagtcctcaattggtctgatgagatttgggatttcctttataggtgactagtca

SEQ ID NO: 134589 - DNA, 543 bp, Homo sapiens
aactttaaaaaacctgatccaactatatgctgtctacaagagacatgttttacattcagacataaaggagttgaagataaaagagtgtggagaaatataccatacaaacattaaccaaagtagaggtgtagtggctatactaacaacacacacgcacacacacacacacaaacaaacaaaaattgttattagagaaaaaaaaaaggacattttatcatgataaaagggtcaactcataaggaagatataacarttataagcatacatgcatcaaaaatatatcgggcaaaaactgaccaaatagaatggagaaattggcaattcaagaattgtataatttaacaatagacagaacaaagaggcaaaagataaacatagaaaactgaggagcagaacattataaatcaactaggcttaacgtatttctgtacaacactctacccaatggcagcagaatatacattattcccaagtgcagacggcacattcaccaggatagatcatgtattaggccacaaaacaagttccaataaattttaacag

SEQ ID NO: 134590 - DNA, 543 bp, Homo sapiens
aactttaaaaaacctgatccaactatatgctgtctacaagagacatgttttacattcagacataaaggagttgaagataaaagagtgtggagaaatataccatacaaacattaaccaaagtagaggtgtagtggctatactaacaacacacacgcacacacacacacacaaacaaacaaaaattgttattagagaaaaaaaaaaggacattttatcatgataaaagggtcaactcataaggaagatataacaattataagcatacatgcatcaaaaatatatcgggcaaaaactgaccaaatagaatggagaaattggcaattcaagaattgtataatttaacaatagacagaacaaagaggcaaaagataaacatagaaaaytgaggagcagaacattataaatcaactaggcttaacgtatttctgtacaacactctacccaatggcagcagaatatacattattcccaagtgcagacggcacattcaccaggatagatcatgtattaggccacaaaacaagttccaataaattttaacag

SEQ ID NO: 134591 - DNA, 543 bp, Homo sapiens
aactttaaaaaacctgatccaactatatgctgtctacaagagacatgttttacattcagacataaaggagttgaagataaaagagtgtggagaaatataccatacaaacattaaccaaagtagaggtgtagtggctatactaacaacacacacgcacacacacacacacaaacaaacaaaaattgttattagagaaaaaaaaaaggacattttatcatgataaaagggtcaactcataaggaagatataacaattataagcatacatgcatcaaaaatatatcgggcaaaaactgaccaaatagaatggagaaattggcaattcaagaattgtataatttaacaatagacagaacaaagaggcaaaagataaacatagaaaactgaggagcagaacattataaatcaactaggcttaacgtatttctgtasaacactctacccaatggcagcagaatatacattattcccaagtgcagacggcacattcaccaggatagatcatgtattaggccacaaaacaagttccaataaattttaacag

SEQ ID NO: 134592 - DNA, 597 bp, Homo sapiens
cacattcagatattgctaattaaagtgtagttttgtatcaacacttctaaagaatagtttaacaaaatatttcagaaataactttaaaaatccataacctttggtcaagattttttattttgaggaatttatcctaagaaaaagtatagacatataaaaccatatgtttgtatctgcaaatatattatgtacaatgttaattacaatgtagctaaaaaaatagtgaaacatttaaataacccaaatattcaatattagtcttgattatctaaattacagcttatctatttaacagaagatcacgtaactgttgtaaatcatgttatgccatatgcattctctttggggactaaattgatgcttcgggggagttaaaatcttgctctttctatataaagtgcacagatataaataagtgcacaaacagatatacaatgtatctgyggtattaaaattccatggaggaagcaattaggtaaaaaatgttttacacagctccttttgtgggacaataatgaaccaaacattgagaaatactattgtagaaaaatatttattgacaaggaaaatattcttgataattataaccgcagtaat

SEQ ID NO: 134593 - DNA, 245 bp, Homo sapiens
ggcttaattcctgggtgatgaaataatctgtacaacaaacccctgtgacatgagtttacctatgtaacaaaccttaacgtgtacccctgaacrtaaagtaaaagttaaaaaaataaaataaaataaatttagagaagaaagaaaacataaagacagccagtggagatgtgctctgattttcctaccaacaagtacttattatcatcctattattaacagctactcttcttcatagtgtttatttg

SEQ ID NO: 134594 - DNA, 620 bp, Homo sapiens
catgccagtgcactccagcctgggtgacagaatgagaacccatttcaaaagaaaataaaaagtaaacaaggtttggggactaagacaaggtagatttttattggtctcaatcaaagaatctttttgctactgtttatgggttcctagaaattcctaggataatttcaaggagagaaatagaatgtttcttgtttgctttatgaattaattatttaaatgggcaaagaggtaggggtgtgtgtgtgcatgtggtgggagaaggctgggagggggcatgctcttcccagttggtcctaacctatctctagctccagttwgttgcttctgttccatcccagcactatgtgcctgtgcattctccatggcggccactccaactcttatgatttttcagacagtgctctctctccttgggaattcttgcttaccgcctccacactagatgctgctttactctttgcaccaaggagcaacattctcatacctccatcataacacaaatccccttgcttcataatctgtatatgcatctgtgacagccactagcttgtatgaacaaatgggcatagaccacatcactagcacggggtcagtctacactgcagagtcagatatgtaag

SEQ ID NO: 134595 - DNA, 458 bp, Homo sapiens
acaatgacaaaataaaaaagaaagaacaaatagctttggtttagaaaaacggggaaagggatccaagtgttagtgggattaaaacttcaaacattgcctaaacccaaatgatcatcattatagtggtgctgaccagtgataagtatcaaataggaaaaaatttaaagataaatttctctcaaatataaaatgtatgtaacatgaacagcaattacagtaattataggaaacagattaccctcataaatttctttttgtgttcatacaatataaaagactgtagaattttactttcagaaataagtttttgctaataggctgccaatataaccaagattttgaaaaatagttgaygatgtcaaagataaatattgaaatttaaattatcagtttctccatgtaaatatgcatattttaaaattaaatcaagttcttgatcaaattaattcagctaatta

SEQ ID NO: 134596 - DNA, 565 bp, Homo sapiens
atgcctattacctgtgtactaagcggatctagtacataattactgactacttaactctatgtcagacactgtgctggacagtgaaatttctttagccrgagggcaggaagtgatgctgtagtactggcatcgtctgtgtactttgctactccatctcccaactctaaggtcacaaagacagaggctgtgacaaggtctctctgtatccacagtacatggcatagcacctgttacacagcaggagctcaacaaatcatttcagaatacatttttatgctaagatggctttgattgtaacattttgagaaagcaatattcatgcctaaataacccttaaaaaggcttaataaaatgccacataaacgtggcatttaataaatggtggactgcaaccttattttctaagactgtactctggctgaggtcccacttatagtcatgtttgtgtttctgaaaactagaaaattggtctgtttaattcatcctatacgttctgaagtcatgctgtttctgtttcaagccagttaagctctgtctgaaatctctccaatcggtagagcaggag

SEQ ID NO: 134597 - DNA, 534 bp, Homo sapiens
tttataaattataaatgacccagcctccggtattctgttatagcaacattaaaatgacaaagacagccagatactaggcatctaaggactacccctatagcccgaagccctctagaattttattcaaactagccagtccaaaactgcttactctgccctgccttgcctttcctttggaaaccccataaagagaggctttggcttagattctcctctctccactttctgccttgtgaccaatactcrtgctccccatgtgcacttgtgtagcatgacatggcccttctctgggaatgcaagggagaaaaatgttctttccatggcatgagcttccccatgtcaccacttggtaatctccataaattaaaaccccgtgggcacaaatgagacacatgtctgccctcagtttagtttgttatggtattaatgttatttgatataggataagtgatatggtttggctctgtgtccccacccaaacctcatctcaaattataatcaccacgtgtcaagggaggaaagagattagattat

SEQ ID NO: 134598 - DNA, 545 bp, Homo sapiens
ccggtattctgttatagcaacattaaaatgacaaagacagccagatactaggcatctaaggactacccctatagcccgaagccctctagaattttattcaaactagccagtccaaaactgcttactctgccctgccttgcctttcctttggaaaccccataaagagaggctttggcttagattctcctctctccactttctgccttgtgaccaatactcgtgctccccatgtgcacttgtgtagcatgacatggcccttctctgggaatgcaagggagaaaaatgttctttccatggcatgarcttccccatgtcaccacttggtaatctccataaattaaaaccccgtgggcacaaatgagacacatgtctgccctcagtttagtttgttatggtattaatgttatttgatataggataagtgatatggtttggctctgtgtccccacccaaacctcatctcaaattataatcaccacgtgtcaagggaggaaagagattagattatgggggtgatttcctccatgctgttctcatgatagtga

SEQ ID NO: 134599 - DNA, 542 bp, Homo sapiens
tgtaaacccttcatgctaaaaatctagcccyaatctcagctctcttttcatgtgtggcagaatagtaggtcatctcctctgaggagaccacctcaaatgcctgtgacacagccatgtcttgggcttgcagtcaccttgggcctcctggcttgaccacttgtgagctgtgatgttaggcagattactcaacctctcagtgattccatttctcgtctgtaaaatgggaacaataattgggcttatacatgaatttgttttgaggattaaaaatagataaaaggcttagcccagttgcctagttcatcataaatgcctatcaaattttagcttaaaaaagaaaagaaaaggtataattccatcttatcttgggctaatgtgcatacagattagggactaacaaataaacctctggtcaacttttcccgggagagtaaaaaagatcaaatgcctaaaagtagtaattacactttcagtcttcttattttctacaagtatgcagatgaatagaacatccacttttaaatggcaggtataaatcagtt

SEQ ID NO: 134600 - DNA, 606 bp, Homo sapiens
tctggtctccactgtaaaacttactgactttataaccaaaggtaaggttattttgggtggtggaaaaggtgaaaataagacaactgcagacaggactttttaaggaaattgaagttttccataaagcattaaaagctatagaaatataaggtcatatttattcagtcaccattttaagcacctataatatactctgagtagcaccaagtcctggggatacccaagtgcatatactgtcatcacgtggcatccatgaagaattggttccaggatcccctgccaataccaaaatctgcagatgctcaagtcctttatataaaatgtcyagtatttgcatgtaacctatgcacatcctcctgtatactttaaatcatctctagattacatatgatatctaataaaatgtaaatactatgtgaataattgttatattttattgtttagggaattacaagaaaataatctgtaggtgtgcagtacagacacaacaatcctttttttttccaaatgtttttgatccagagttaattgaatccccagatgtgaaatccatggatgtgaaggaccaatggtaacaaaccattggtgttttttattcattactag

SEQ ID NO: 134601 - DNA, 573 bp, Homo sapiens
aatactgggagctcatggtccccatggatccatgaactccaccgctaatcccatggtagtacacttaacagcaggttaaaggatgatgagtagagatgtgattttgccrttatcaaacaagtatttatctagtggaggtactgatttaacttgctagcagtttattcattccaagttaaccacttcaaagaggcatataaaactaaccaagcaaattgtttgctttttgtgtagataaaggccttaggcaaacaatttatacaacacacaccaatgaggacagtctttcactttgggttgtaatatgccatcattctataataaagcaatgctttcttggcaagcagggggttgagcaccatagacaaccctcctcagtgctatgcaaaggaaatgcatggaaacaatgtcgtcttggtctagcaattacagaattccaaattctaccctttatacatatgtcatctgtatctaggctgtcctaattcggaaatgcaaaatctcatttctatatactggataaaagaaagagttttagttattcctgagtaggtcttaagaggagacagaatt

SEQ ID NO: 134602 - DNA, 595 bp, Homo sapiens
tcttgtctttcatttagaatatagcaggactcaagagctgctcatcttcagggaatttcataggtttttggctagggaccaatctgggtcataaaaagaggaaacccccctgggcccaggtagatctctaaagaaaaagctttggttgcctgggctttgtttagcaaaagaatatttttttcttgtcctagagtcagcaaacatactgccaggtaatctgagaggcccacagggagactccaagaagacaagcccaatagtcccataccaaaatctttcatcttgaaggccattaatgtgccacatcttcactacatttccaaatgcctactgcctttgggtggcatcacagcaataaacacaggacttaattaaaagtcatttccatttcattgctaaagccaaggaaatctggtaccacagccttgaatttataagtaggaaaatggtacaaaaaaagtgagggtgggaactaatttaaaacactaaaagtcactcaacactgccagtgggtggtgcaggatattgccatggcactttctgttaaatttcttyctcccaattctttgcagaattctcctcacttttgtgtgca

SEQ ID NO: 134603 - DNA, 632 bp, Homo sapiens
accatttacagatgtaatacttttgtctttatcatgctatcatcattattatctcaacaaactctaaggatcactgacaagtgagaagctgatactgctgtccttggtctrtgaatgagtatgctgagctccaaagagcctcaagctcaagtaagaagaaaaccccagtcctctgttcccctctcccagtatgtttcccctagtgtctcatgctactttacccatatttttcttagctaagtgagtgaattggacctatttacccttagagttccagaacagatttcctagaatctatcagtttgcaggtcacctttttcatataccatgctttacaatgccaattccccatctgccagaacataagccttctttctgaagatgctctcaagcccatggggagctgagctcaaatgtactaattttctgatgtcaaattccaatcaggtgtttgtttttaatatgaaaaagaaactagacaaattcaaaactgtgcacatgcacttgtatattctgacataatccaataaagaacaacttcctatgtggtggagaatctcctagatttcatattattttttgagaatttagtttttatgaactaatcatgacttacccctgtttgcaccaaa

SEQ ID NO: 134604 - DNA, 572 bp, Homo sapiens
tctgccatagggtcaacttcatgggttgaataaatgaatgaatggtcattcagtcattcaacaagtacacctgctgttttcaagtcactgctgtcagtgttacgaagagaaatcctttttaaagttcttcattgtatgtacaagttatatataaagagtcactttgactgaatgttgctgctagatacttcagcacttggatacctgcacattctgctgaaggaaactcaccctgggacaatcagggttagagaagcaatggtatagtaacacatccatttagtacagtccgcagaaatarttttaacacatatgaaacacaaccatgtctaatgaagaaagtaaacctcttttaaatgaattgctaatattatagtctacttagaataaatattttcagacaaagacaagcccagtggttgcacaagctaagcaagcccagcttattgtccaggaatttaaataagtgcattttttaaaggtatgctaattctgagttggtttattaaaattaatcttggagatgatttttcagcaatcaatgaatttctttaagacgagttataccgttg

SEQ ID NO: 134605 - DNA, 553 bp, Homo sapiens
tctccacatcctgtcctgtccactttataagctaattaatcatctaaagtagacagttaatcaacctacatgctccccatagctacctggcaaaagttcaaacacctttacatggcattcaaattcttctatgaactgacttcagattacttgtaaagccttttcttctactaaacctatttgcaaactatgtctcagcccaaatagactctttgcattctcaaggacgtcttatttctctctaatcaagtccctygtctgcacttttctctttatgtggaatattttgcccccctcatctctgtccatcaaaattttacctgttcttcaagccccagttcaaagtacatttctccatgaagcctactctgattttacaactggaaatagtctcttccttggattcgccacagcactttggaactgcaattaacgcatttgtatttgtaattattttattcttcacactacatttcaagatcgttgagagcagaaaataccatttcaatcttgcatttaccatagcacctagcataaatgctcagtaaagtac

SEQ ID NO: 134606 - DNA, 402 bp, Homo sapiens
ttgctcaatgtcacaatatccctatttctaaaatgtaacttttttgtgtgctgcatcaaagggttctgtattagtgaagggaactaaaatatattaaaaatataggctgtgtgacctacaattaaagggggaaacttgatgtatttatgtaaagatgggaagccatcctcagatttcttaccctcagcttaagtacttggacttctggagtaaagaagcatttgattatgtaaaactttgctaccctagagtgtgttccatgtrttaacagcagcatctgccctgaaggattggttagaaagaatagcagtggcctacgttgttattctatttgtagttggaacttatattaaatatttaggaaatatatattgcttgaattaagaaaaacttggtttactc

SEQ ID NO: 134607 - DNA, 402 bp, Homo sapiens
ttgctcaatgtcacaatatccctatttctaaaatgtaacttttttgtgtgctgcatcaaagggttctgtattagtgaagggaactaaaatatattaaaaatataggctgtgtgacctacaattaaagggggaaacttgatgtatttatgtaaagatgggaagccatcctcagatttcttaccctcagcttaagtacttggacttctggagtaaagaagcatttgattatgtaaaactttgctaccctagagtgtgttccatgtattaacagcagcatctgccctgaaggattggttagaaagaatagyagtggcctacgttgttattctatttgtagttggaacttatattaaatatttaggaaatatatattgcttgaattaagaaaaacttggtttactc

SEQ ID NO: 134608 - DNA, 558 bp, Homo sapiens
tgattcaggtcttgaacaaaagtctgtattttaacttaaaactgcagaactgtgattacctacctttcaaagaatcagaatgtcaacttttgttcttagtctctgtgcctctgaggctcarggctcattgggttgtgctttctaacaggaagggtaaggccctccttgctgtgaaaatgcttagggaagagaacttgggactgcttctccctttattctggctgaagtattacttgccttacttcagtatttcataatatgacactgataatttattattcaatttactttagaatttttctttgcacatgaaaggcttttgactttacttggcatttagctactcttccttgatgagacacaagtctttttcctctagggattttctaaggggaataaaagttttcagagagattacttcatgtgaatttattccaaatatttgaattaactaacctataataaccttactgtctcttttatttaaaacagtgatgatgtaaaagtcatagattgtgtctacacataattattttcctgatggaatagcccaagaga

SEQ ID NO: 134609 - DNA, 278 bp, Homo sapiens
ttctgatcctatgttcatggtgaagtattcaggatcaytaataatagctatcatttattgagcccttctcaggtaccagccattattctaggcactttactttgttttaataaaacaacaaatctacgaggtaaggacagggatccccatttttaaattgatgaaagtaagggacagagagctttagtaaatggccaagaattgtaaatggccaaaaatctcataaaaatagtgaagctgaagttgtagctgaagcagtgtggctccagtgtccacat

SEQ ID NO: 134610 - DNA, 529 bp, Homo sapiens
aaactcccttaaaacttatagtcaggaagggaggcgtaaagccctgtctacctgcagctcgcacatcaccgtggttgtcctcttttttgttccctgtattttcatgtatgttagacctgtctcaaacttccctattgataaattcgttactgtgttttatacakttatcacacccatgctgaatccttttttatacacgttgagaaattcagagatgataaatgctataaaacacctgttgtgtaagaagctaactatagttagaataagagtgtccctcctcatgtagataaggatgtatgtagacaagctcttcccagtgaaattttcagacttctaagggtaattcaaggatcccacaatggaagacaggatttaggtgctccgagctcaactgagaaatcatcccattatgacatctgtttgaatttcaagatctcaacctctatatccagactgagagtggatggggggctttggctcaggtcctattgtgcatgttttaaattatggtttttctctattacac

SEQ ID NO: 134611 - DNA, 447 bp, Homo sapiens
taaaaaaagtcaaactcacgaaagacagagactagaatggtggtttccagggactgggtctgaagaaaatgaggattgctggccaaaggttacaaagtttcagttatgcagtatgtataaattctgaagagctcaggtacagcgtgttgatcataattagtaatacatattggatacatgaaatttgctaagagaatataccttaaattctcttatcacaaataaaggtaactgtgagataatsgatatattaactagctacatagtgttaatcacttcacaatgtatacatatatcaaacatcatattgtacactttaagtgcataaaatatttgtgaagtataccatagtaacactaaaatcaacaaaacaaactatgcttgaaagaaaacaacaaaagactttaccaatctgcttgctatggcaaaagcaggtgaaactggaca

SEQ ID NO: 134612 - DNA, 568 bp, Homo sapiens
tgcatcttttagcacttaccagtaaaacagcacagtgcttttaggcatattcttcaaattttagcagtcgtacatattacatttagggtagatgaatttaatccatttattaggtaagttgaaaatgaccaacttttaatggagcccgttacatgatagagaccttagctcattcagataggtatttatgggwctctttatctaaggctcttatgacataaagatccaatatttaactaaatgtataatgagaagaaagtgttccttggagccaatggtaagccaagtcacaaaaataacaacggaagcccttaaacactgctcccatgttggaaaatcaaaatttctttattgtagaaagttattgaattgatactgaatacaatttaaaaaatgagttaatggatgtattagtccgttttcacactgctgataaagacatacccaagactaggtagaaaaagaggtttaattggactttcagttccacatggctggggaggcctcagaataatggtgggaggttaactgcacttcttacacagtggtggcaagagaaaaatgagga

SEQ ID NO: 134613 - DNA, 605 bp, Homo sapiens
tatgagtgcaatctaaaaaaagtcaaactcacgaaagacagagactagaatggtggtttccagggactgggtctgaagaaaatgaggattgctggccaaaggttacaaagtttcagttatgcagtatgtataaattctgaagagctcaggtacagcgtgttgatcataattagtaatacatattggatacatgaaatttgctaagagaatataccttaaattctcttatcacaaataaaggtaactgtgagataatggatatattaactagctacatagtgttaatcacttcacaatgtatacatatatcaaacatcatattgtacactttaagtgcataaaatatttgtgaagtataccatagtaacactaaaatcaacaaaacaaactatgcttgaaagaaaacaacaaaagactttaccaatctgcttgctatggcaaaagcaggtgaaactggacaaatgctgcacagtactctccctggaaggtggtactgaagcaatgaagtaaaggaaaarcatcccggtgagcagtattttgaggattatgttaggttttccatttcatgtggaaagagaaatggcctgagttatgggtccacaaag

SEQ ID NO: 134614 - DNA, 527 bp, Homo sapiens
tcattgactctctaacatggcacaaatagctagggaaacaagccaacaactgtgtgccagcttactgcgttgcaaatcttaatgtgttggagacagccacttgtcattatattatatattctggttatatgattgtcccagtactttagccttatttattatttatggggaatgatccattatccattgccatgttaccataatcattgtcatttctaattaggggatatattttctagtaaataaagtaaagcaaattactcaccaccatagagttcactgctatgaccacatttcccatcacctggaaactactgtctagattgaacattggaatggcctcctaaaacgtgagtcatggtgccaccytgaacataccaccctaaaaacttggaatgctttcttctatgtgtctgacacacaggatgtgctcagtaattttagtcaacataaaccttgtgccacatatatttatgggagattatcttcacactgataaacattcccccatgcagcctaatcaaagt

SEQ ID NO: 134615 - DNA, 599 bp, Homo sapiens
tattatttatggggaatgatccattatccattgccatgttaccataatcattgtcatttctaattaggggatatattttctagtaaataaagtaaagcaaattactcaccaccatagagttcactgctatgaccacatttcccatcacctggaaactactgtctagattgaacattggaatggcctcctaaaacgtgagtcatggtgccaccctgaacataccaccctaaaaacttggaatgctttcttctatgtgtctgacacacaggatgtgctcagtaattttagtcaacataaaccttgtgccacatatatttatgggagattatcttcacactgataaacattcccccatgcagcctaatcaaagtccttctccatttcaatatgcacaaaatccaatcccacatgttcctatgattatcatttaaattatctagatttgtaatttttaaccaaataaattattttcttctcgaaaaggttcctatatcctacttgcactctaatgatagctgaacctaaatgttaaactggatgcaaagagggactgctctkggaaaggccatgagacccttgtagaggtggctttctgcacc

SEQ ID NO: 134616 - DNA, 574 bp, Homo sapiens
atttgcagaattttgtctgtttttgtcattccatgcagattggttactccttttgttgttgtcatctttaaaacatagtttgttttttattttctataactttattgaagtgtatttgacaaaaatgtataatatatatttaagatatgcaatgtgatgttttgttaaatgtatacattgtgaaatgattactaaaatcaacatgttcattacatcacatagttatcttttgtgtgtggtgagaatatttaagatgtattttcttagcaaacttcaagtgtacagtatggtattaccaagtacagtctctatgctgtaacttagctctccagaaattattcattctgcataactgaaactttgtcctgtttgaccaacatctcctcatttctccctccccacagtccctagcaatcaccattctactctctactcttatgagtttgacttttttttttttagattccacatttaattgagatcatgtagtctttaccttcagtgtggagaaaagggaacccttctacatagttgrtgggaatgtaaattgatacagccattatagaagatgcta

SEQ ID NO: 134617 - DNA, 343 bp, Homo sapiens
agtgaacgccagttccaataatgggtacatgtcacagacaaagtggtcaattgaagggataggttgcccctccacacctgtgggtgtttcttgttaggtggaacaagagacttggaaaagaaaaagacacagagacaaagtatagagaaagaaataaggggacccatgggacaagcattcagcatacggaggatccckccaggctctgagttcccctagtaattactgatgattcttgggtgtttctcagagagggggatgtgtcagggtcataggataatagtggagaagagatcagcagataaacacgtgaacaaagttctctgcatcatagacaaagtag

SEQ ID NO: 134618 - DNA, 430 bp, Homo sapiens
agggctggcaataatagtcaccacaatgagcaggttccccactgttgtcaccaattatgtgagtaaaacatgacaaataatgcatttgcacatcaggatcctgagagaagcccaagaggacaaattctgtattatttttattctgtctcatttamtcttctttcaggcttgtatcagagatgagagctcaggagaacagaacctgtaatgaaaacatgagcaggaatatgattacatccattgtgtcacagaagacatcttcattgttgtagcctcaatagtgatttacatgcaaaaaaaaaaaaaaaattagtaagtctctattgagttcttcacccaaagagcctatcttcccttgacaattctatttctcctcaaaggtttttagtttcagcacaggtaaatgcctctacctctaggttttaatgaa

SEQ ID NO: 134619 - DNA, 430 bp, Homo sapiens
agggctggcaataatagtcaccacaatgagcaggttccccactgttgtcaccaattatgtgagtaaaacatgacaaataatgcatttgcacatcaggatcctgagagaagcccaagaggacaaattctgtattatttttattctgtctcatttaatcttctttcaggcttgtatcagagatgagagctcagragaacagaacctgtaatgaaaacatgagcaggaatatgattacatccattgtgtcacagaagacatcttcattgttgtagcctcaatagtgatttacatgcaaaaaaaaaaaaaaaattagtaagtctctattgagttcttcacccaaagagcctatcttcccttgacaattctatttctcctcaaaggtttttagtttcagcacaggtaaatgcctctacctctaggttttaatgaa

SEQ ID NO: 134620 - DNA, 595 bp, Homo sapiens
aaaacacaggactctgaactgtatgaatagctatgatattatttatcacattgttccttgtagcaattacttgatctgactccttgtccaacttataaggagctgtgattctctccatttttccttgctgataccccagtttttatcacacttacattcaatatctgaattttcarcaatttattttgaactcaggtaaactaactcatggctatcaccaactaccaaataagcagtgagcatttttttctgaattattgggatgagctttgtagtgagagaggagaaaatagacactgtagaaagatgtacagagcagtgggactaggttttattcattacaccatatagatagcaagagtattcaaaaatagaatcttagttaccagattccaaaaagaaggatactccaagagaaattccaagttcagtgtaagaaggcatggatttgagtcattttccgaatgcatttacaagtctgtctcagtttgctcactttaaaatattggaattaaatttgagaaattcagaatcctttctagtcaactatctacagaactattagtgcatctctcctttatggtattctgctgac

SEQ ID NO: 134621 - DNA, 595 bp, Homo sapiens
aaaacacaggactctgaactgtatgaatagctatgatattatttatcacattgttccttgtagcaattacttgatctgactccttgtccaacttataaggagctgtgattctctccatttttccttgctgataccccagtttttatcacacttacattcaatatctgaattttcagcaatttattttgaactcaggtaaactaactcatggctatcaccaactaccaaataagcagtgagcatttttttctgaattattgggatgagctttgtagtgagasaggagaaaatagacactgtagaaagatgtacagagcagtgggactaggttttattcattacaccatatagatagcaagagtattcaaaaatagaatcttagttaccagattccaaaaagaaggatactccaagagaaattccaagttcagtgtaagaaggcatggatttgagtcattttccgaatgcatttacaagtctgtctcagtttgctcactttaaaatattggaattaaatttgagaaattcagaatcctttctagtcaactatctacagaactattagtgcatctctcctttatggtattctgctgac

SEQ ID NO: 134622 - DNA, 595 bp, Homo sapiens
aaaacacaggactctgaactgtatgaatagctatgatattatttatcacattgttccttgtagcaattacttgatctgactccttgtccaacttataaggagctgtgattctctccatttttccttgctgataccccagtttttatcacacttacattcaatatctgaattttcagcaatttattttgaactcaggtaaactaactcatggctatcaccaactaccaaataagcagtgagcatttttttctgaattattgggatgagctttgtagtgagagaggagaaaatagacactgtagaaagatgtayagagcagtgggactaggttttattcattacaccatatagatagcaagagtattcaaaaatagaatcttagttaccagattccaaaaagaaggatactccaagagaaattccaagttcagtgtaagaaggcatggatttgagtcattttccgaatgcatttacaagtctgtctcagtttgctcactttaaaatattggaattaaatttgagaaattcagaatcctttctagtcaactatctacagaactattagtgcatctctcctttatggtattctgctgac

SEQ ID NO: 134623 - DNA, 595 bp, Homo sapiens
aaaacacaggactctgaactgtatgaatagctatgatattatttatcacattgttccttgtagcaattacttgatctgactccttgtccaacttataaggagctgtgattctctccatttttccttgctgataccccagtttttatcacacttacattcaatatctgaattttcagcaatttattttgaactcaggtaaactaactcatggctatcaccaactaccaaataagcagtgagcatttttttctgaattattgggatgagctttgtagtgagagaggagaaaatagacactgtagaaagatgtacagagcagtgggactaggttttattcattacaccatatagatagcaagagtattcaaaaatagaatcttagttaccagattccaaaaagaaggatactccaagagaaattccaagttcagtgtaagaaggcatggatttgagtcattttcygaatgcatttacaagtctgtctcagtttgctcactttaaaatattggaattaaatttgagaaattcagaatcctttctagtcaactatctacagaactattagtgcatctctcctttatggtattctgctgac

SEQ ID NO: 134624 - DNA, 429 bp, Homo sapiens
gtggaagtcacttttgctgagctacagaaaagtctggctgcattttgtccctgctctaaggatctgtcaaactttgaacttgagaatgatgatttagggtatctggcagaagaaatttctaagcagsaaagcattcaagatttagcctggctccttctattagcctggctgcttctaataacctaagctcatataaaagagcaaagaaatgatctgaaaatggaacatatttaaatgggagcagagtgtaaaagtttgaaaaatttgcagcctggccatgtgaaagaaaagaaaagcccgttttcagggaagaaattcaagctggctgcagaaatttgcataagagtagccaagtgctaagctccaagacaatgaggaaaaaccctcaaaggcatttcacagaccttttcaacaggacttcccatcaca

SEQ ID NO: 134625 - DNA, 429 bp, Homo sapiens
gtggaagtcacttttgctgagctacagaaaagtctggctgcattttgtccctgctctaaggatctgtcaaactttgaacttgagaatgatgatttagggtatctggcagaagaaatttctaagcaggaaagcattcaagatttagcctggctccttctattagcctggctgcttctaataacctaagctcatataaaagagcaaagaaatgatctgaaaatggaacatatttaaatgggagcagagtgtaaaagtttgaaaaatttgcagcctrgccatgtgaaagaaaagaaaagcccgttttcagggaagaaattcaagctggctgcagaaatttgcataagagtagccaagtgctaagctccaagacaatgaggaaaaaccctcaaaggcatttcacagaccttttcaacaggacttcccatcaca

SEQ ID NO: 134626 - DNA, 491 bp, Homo sapiens
atcagtagataaatatgctgaggaaagtacctagtctactgtcatttaaatagatttataaaactgtgactgtgaaatataatgttacagatttttttgtcataccaaattttatcttttgaaaatgtcatgttcttagaaaactatgttaaatcattgtttttgtagaaaaatgttaacttagtagtttacattgaaggcctagtgatgcttttagtttttaaagtatagtatttttaattacttaaactatagagaatagtttaagtaccctgttttttataagtaaacatttaagttgctgaaagaattatcctattgaaatctagtttgatgatgtaagccggaaaaggcactaaaccttgcagcaagtattgtgtgaaaaaataacagaattgtttatagactacattattctcttgtattcttcagcgcgtgtgtctctatyggtctatagcttcaacaatgccagaactctggaatcagttgga

SEQ ID NO: 134627 - DNA, 368 bp, Homo sapiens
acattgtgactatggtggggaacctgctcattgtggtgactattattgccaccccatccttgggctccccaatgtactttttccttgcctgcctgtcatttatagatgctgtgtattccaccaccatttatcccaaattggttgtagactaactccataattaaaagactattttgttcccaacttgcatgggccagccacttacagaccacttatttggtggtgttgaggtctttttttctgttggtgatggcctgtgatcgctatgtggccatctgtaagccactgcactatttkaccatcatgaatcgacaggttttcatccttctgttggtagtggctgtgactggagttttgtgcgttctgtg

SEQ ID NO: 134628 - DNA, 419 bp, Homo sapiens
aggctggaatgcaatggtgccatcttggctcactgcaacctccgcctccaggttcaagcaattctcatgcatcagcctcccaagtagctgggattacaggcaccagccaccacactcatttaattttgtatttttagtagagacsggatttctccatgttggtcacgctggtctcaaactcctgacctcaaatgacccacctgcctcggcctcccaatatactaggattacaggcatgaggtactgcacctggctttattattatttccttgaattcagtatgttcttaaaatttttgtctgtattttgcttttattctgctgtcccttttctgtttatcctttttaaacaaattattttttaaaattcattttcatgaaacttttaacaccttatacattcataacaatattttcagt

SEQ ID NO: 134629 - DNA, 654 bp, Homo sapiens
ggtgtgattaccttattatttttctaaaacacttcagtttcatagcatatttaatggtcattgttaaacactgtttatgcaattatttgtttagttttttattagactgtgagctccattaaaatgggaagtgcatctgtcttgttcagtgttttatctcaagaatctatgcaagacccatgtctgcaatgaatgtacacatttttcttatttaatagctttattgttaatatagccatttaatatataccactccctcctcaatatacctgaatatatcatcagtcacaaaggttaatgtttaaaatctatactctccatcttctcactacatcagcctttgttatgtgtaatattttttgcacttggagtattagtacaaaccttatttaattctccatttttcagcttccccaaatttaactcaattctgaacaagttasaacatgtgacactcagctgctttaacttcttaacactgccatgttgaattcaatcaagaccatgtttctgtttttgagcagagcaagtaaatcaaggaagacttgaaggtgactatgaattttttttagttgattcaaactaattgacaaaggtcatatttttctaaattacagatcctggctctttttcacagctgcctaaactggtttt

SEQ ID NO: 134630 - DNA, 449 bp, Homo sapiens
ttatagcaactttatttataattrccaaaacttcaaagcaatcaaaattccctttatgagaggaaccacagactctctgaaggaagtagactgaccctgcaggacccaggagataactcaaatactgtgctggtatccacagctgagagtcccacagacaattcacatcacagcactctgtgcagacaacccccggtaccagcccagaggctggtagattttccaggtggctagattcagaagagagatatcacttactatagctcacctctcaggaagccacatctataggaaaagtgagagagtgctacatcaagggagctccctgtgggacaaaagaatcagaacaacagccttcagtcctagaccttccctctgacagagtctacccaaatgagaagaaatcagaaaaccagctttggtaatatgacaaaacaagtttctttaat

SEQ ID NO: 134631 - DNA, 597 bp, Homo sapiens
gataggccacaacatgagtctcaataaatttaagaaaatttaaattatatcaagcactctctgagaccacagtagaataaaactggaaatcaactccaaaagaaaccttaaaaaccatgcaaatgcatggaaattaaataacctgctcctgaatgatcattgggtcaaacatgaaatcaagatggaaattaaaatcttcttcaaactgaaagacaatagtgacacaatgtgtcaatacctctgggatacagcaaaggcagatagccctaaagtcctatattgaaaagtctgaaagagcacagacagacaatctaaggtcacacctcaagaaactagagaaacaagaacaaaccaaacccaaatccagcagaagaaaggaaataaccaagaacagagcacaactaaataaaattgaaacaaaagaaatacaaaagttaaataaaacaaaaagctgrttctttgaaaagataaataaaattgatagaccattagcaagattaaccaagaagagagaaaatccaaataagctctataagaaatgaaacaggagatattacaactgaaatcacagaaatgcaaaagatcattcaagactac

SEQ ID NO: 134632 - DNA, 597 bp, Homo sapiens
gataggccacaacatgagtctcaataaatttaagaaaatttaaattatatcaagcactctctgagaccacagtagaataaaactggaaatcaactccaaaagaaaccttaaaaaccatgcaaatgcatggaaattaaataacctgctcctgaatgatcattgggtcaaacatgaaatcaagatggaaattaaaatcttcttcaaactgaaagacaatagtgacacaatgtgtcaatacctctgggatacagcaaaggcagatagccctaaagtcctatattgaaaagtctgaaagagcacagacagacaatctaaggtcacacctcaagaaactagagaaacaagaacaaaccaaacccaaatccagcagaagaaaggaaataaccaagaacagagcacaactaaataaaattgaaacaaaagaaatacaaaagttaaataaaacaaaaagctgattctttgaaaagataaataaaattgatasaccattagcaagattaaccaagaagagagaaaatccaaataagctctataagaaatgaaacaggagatattacaactgaaatcacagaaatgcaaaagatcattcaagactac

SEQ ID NO: 134633 - DNA, 558 bp, Homo sapiens
atcatttgaaatttctgaagtaaaattaactccagaggtaaaactatgaaagcctttatacattttgcaaatttattaagctactcttctgtttttgctccatactcatgatttttctcttctctaraataaatttatcaatttaacacatatttattgaggatttactgctaacattagacccaggtttctgtgaccaagatgagtgatcttagataaacttcttgccctttatctttctaaatttcctcaccagtaaattaaagataatatattgtcttgcctttgtcagtgttctttgaagctcaactgaatccatttaaactactaaaaatattcatatttaagctactgtcacaacattttcctaagtgctgcaagtgagcagaaagtacacttcgcttccatcgggaagtttacaacttactcagggaatgagacataccacctaggaaaattcaaataatagtacatgacagtgtgtacttaagtgagaaatgagggaaaggtttttagcactatcttccaaatgcttgattgttgatatatcttgttttc

SEQ ID NO: 134634 - DNA, 558 bp, Homo sapiens
atcatttgaaatttctgaagtaaaattaactccagaggtaaaactatgaaagcctttatacattttgcaaatttattaagctactcttctgtttttgctccatactcatgatttttctcttctctagaataaatttatcaatttaacacatatttattgaggatttactgctaacattagacccaggtttctgtgaccaagatgagtgatcttagataaacttcttgccctttmtctttctaaatttcctcaccagtaaattaaagataatatattgtcttgcctttgtcagtgttctttgaagctcaactgaatccatttaaactactaaaaatattcatatttaagctactgtcacaacattttcctaagtgctgcaagtgagcagaaagtacacttcgcttccatcgggaagtttacaacttactcagggaatgagacataccacctaggaaaattcaaataatagtacatgacagtgtgtacttaagtgagaaatgagggaaaggtttttagcactatcttccaaatgcttgattgttgatatatcttgttttc

SEQ ID NO: 134635 - DNA, 652 bp, Homo sapiens
ttaggtaatataaggattatgaagaaaatgtgctcataccaatcaaactgtaaaccagcataaattatacatattgtttaataagacatttccttataggtgtgagtctatggaagttaacattttaaacactaagcttgtcaaaatcattttacacactgctaaccattttcagcagttgaaggattttttatatttacccaatttacaatcacagcttctaacttcttttagaaaacatataatttaaatcttttttcctaatcaaattctattgtagacaaaaatgttagcaatatcattaatgtgccacctgagtgtgtctatttagtattattgccaatgtttaatatagtggctgtagaattaagaattaatcttgcagctatgataatattgttcatgcaccatatcgtcaatgttttagaacgagactattacaactttaataataaaattaacattaataactttcaaataaaatttcagatttatttttaaaacccctaagttattctatgaaggttatttaactatcctactactaataartggaatacaattctcatttggagaagatgtgctttagacttccatgattaaaggctgacagaaagaaaaaatatatatagataattaacagagagtagtg

SEQ ID NO: 134636 - DNA, 557 bp, Homo sapiens
gctatttgggtggagatgagtggaggaaaaaaagtattaagaccgaaagctaacacaaagatttaagtctatatgactaggatattgktaatatcattaataggattaggtgaatctggtttggcagtagaagcaaagtgagggagaataaggggtgctgatgacaaccttggtttaagatacagttgatttaaagacgaaaatgttctgtggctaaaaagaaaagtggtgctgaagcttagaagaaaggacactcatatttggggatcttctattgatcagtggagtatcaaaatcatacacagcctctaagggaaagcacaaagatagaaaaggtgagggctagaaataaaatctgtgagattattcacacttcttagtcaaaatggaacagccagacaaagaggacaggaacaaggattttggctgctctggagatctttgctaaggtgcactcacctgcaagagagtataaccggaacgagaagaaaaaaatctcatggcttgggcctgggagattactagagatggaaatgtatttttgtcataaaaaattg

SEQ ID NO: 134637 - DNA, 441 bp, Homo sapiens
ctcaaaccttagttatagattagaagaagttacacagttacacgcagacatatagcttagaargtatataagctctggaaaacctcttaattttgaattggtctggcaatattttcctggccttctccctgtactcggttacagaaataaactctcttctttcccagttcacctgcatcttattattgggctgcgagaataagtatcccaatccttggttcggtctgggaacaatataagatagcaaacttatttgataaatgttgggtgtattctgatgatcccccatctctctccctctccttgggccctcctattccctgagacaaaacagtattaaaattatggcagttaataaccctaaaatggcttctaagtgttcagatgataaagagtcacatgtctctcactttaaatcaaaagctggaaatgattaaggca

SEQ ID NO: 134638 - DNA, 442 bp, Homo sapiens
gttatagattagaagaagttacacagttacacgcagacatatagcttagaaggtatataagctctggaaaacctcttaattttgaattggtctggcaatattttcctggccttctccctgtactcggttacagaaataaactckcttctttcccagttcacctgcatcttattattgggctgcgagaataagtatcccaatccttggttcggtctgggaacaatataagatagcaaacttatttgataaatgttgggtgtattctgatgatcccccatctctctccctctccttgggccctcctattccctgagacaaaacagtattaaaattatggcagttaataaccctaaaatggcttctaagtgttcagatgataaagagtcacatgtctctcactttaaatcaaaagctggaaatgattaaggcatgttgaaaacct

SEQ ID NO: 134639 - DNA, 441 bp, Homo sapiens
ctcaaaccttagttatagattagaagaagttacacagttacacgcagacatatagcttagaaggtatataagctctggaaaacctcttaattttgaattggtctggcaatattttcctggccttctccctgtactcggttacagaaataaactctcttctttcccagttcacctgcatcttattattgggctgcgagaataagtatcccaatccttggttcggtctgggaacaatataagatagcaaacttatttgataaatgttgggtgtattctgatgatcccccatctctctccctctccttgggccctcctattccctgagacaaaacagtattaaaattatggcagttaataaccctaaaatggcttctaagtgttcaratgataaagagtcacatgtctctcactttaaatcaaaagctggaaatgattaaggca

SEQ ID NO: 134640 - DNA, 602 bp, Homo sapiens
ttaattttatttgttttgttttattttggcctaggatctcagggcttcagaggcaaataattttatatgctcaggccaaaactggagagtgtcactgtttcccttccttttctatgaaatttcctgtcctagatttttaactctttatccttttctccctttgtatgtctcaagttacacattttggtctggctgtggccttccacctgcctctatagcttttaagagtggccccacatgttctgtcccagattcattactgaagggactctatggcaggaaggcacgtggcctaaggtattccttagtgctaaatttaactttatgtttgctatctccgtaagccatttcccttctctgtttgtgcctgcgtttttctcatatgaagtggagataataacacttaccttctgcagcccatcagggtgttatgaggattaattaaagttctttgtaggtgacaaatcccgagcatagttattattagctaagcaaactgcctattttaatactaagggtcttgaggaaggtcagatgagctcctttaagcacaacyctcactcccatttttcccatattactttttgccagctccagcatgc

SEQ ID NO: 134641 - DNA, 529 bp, Homo sapiens
aaagtaattgtttgcattgctgtgacagcttaggacaacttttcttttggaaattgcactttgtgttytgttcccatctctgaatgtcttgttgtagaacttgattaaacaataaaagctaacttctatctacaactttaccttgtctcccctccacagatacaactatatttttggcagccatatttttcttcttatactttatgaatagattactttctccaaggaatagtttaatgctatgagaaaatgcttatgacgtaatgtcatatgcaggaatattcttctcagatatatcaaatatttaagtgaaaacatagcttacttataactttctatatattccaaaaatgagcatttgctacttttataattaggaaataaaattatttagctgttaaaaatgagtcagggttgggtttattattaaagttattttattactcttttaaaaactaaaaagcaaaagaaacaggaaagtaaaaagacatatcaaacttgcagtatagtttaattccaagtataattt

SEQ ID NO: 134642 - DNA, 568 bp, Homo sapiens
tggcaggcagcactggcatcaccagggagtctgcaggagacgtggagtgtcgagcgccacctgcaggtgacttgttacacataaagatttgagaatcagttctctaaacatcaagagctgtttgggctggatatagacttctagattgggaattattttcccgcaggattttgaagacattatcatcatcccaaatcagatagctgataaaaaaatatctgtcactattctatccaagctctttggtgtgatgttccatatttttcttctctcctattgccccattgtttggaagtttcaaaataatattcttatgtccccgtgtgtgtgtgtgtgcatgtgtgtgcacgtgtgtgcttgtctstgtgcatgtgtgtatatgtgtgtgcacgtgtgtatatgtgtgcgcatgtgtgcacgtgtgtgcatgcctgtgtgtgggcatgatttattatgctgagcactcaagagctctggagactcacaagcatccttccattctgagaattttctcacattatttctttggtaatttttgtctgttttatttttcttggactcctagttg

SEQ ID NO: 134643 - DNA, 481 bp, Homo sapiens
aattcacattcctttgtatcatttcctccctacagataaagtatcatttttctctgttttcaaaatttttcttagtcttaattatcagaagtataatttatgattcatcttaattgcataattatgatgtgcctgcatttctttggttttatcatgcttgggaattgctcagctttctaaatctctaggtttatgtttcttgccaaatttgggaagttttcagccattatttcctcatgtactatttcagctctgctttcttyatcctctctttcctggacttgatgacacaaatgttaagtctttcattatagttccacaagtctctaagactctggttttcacttgtttgttttgttttgttgtctatgttcctcattgattattttctatttttctatcttccagttcttctatttttttcatgaatgcccatttattgaactttttcttcaataattgtatttataaagtctaaaat

SEQ ID NO: 134644 - DNA, 538 bp, Homo sapiens
gctagacttgtctggcacttgtaggagtgtagtataattgcttatacaattctatctttgtagacatttggaggtctaattaaaaagatgaatgtggaaccacatttttctaagcaatgacacatttataaaaatttcaattatttgacctaagatagcagacaaagttttatgccaaggtctgccccaaaccaagttaatctggcaggacaatttaatgaactcccaccagggtgggaaaaaatggaatataatacatttgaatttgttagttttattacagttttttaaatagtttaagtagacaagtaaaattaaaaatgaagcaaatgctttaaagtaacacttcaacatgaaactcagttttgaaaattgctgatctccataaagtattaacctcctaggaaaagagactgtcatacattttgatacctctgataatctgcagtgtttttttgtacaragtgagcatgcaataaatggtaatgatttgtaagtgatcatctaagtgttgaaagaacttggaaattatatgcaa

SEQ ID NO: 134645 - DNA, 528 bp, Homo sapiens
gaaaaagggtgcaaattattatcattaaagaaacatttctttatgtatctttataaatggataaacatggatatcaaagcactattgtattacattccatctgatagatatacaagaattttaatttaaaatagcaacacttaaaacacaaatattgtttcttgaagctatttataattaaagatgaaaaatactatatatcaattttaaattgtgtgtctacattttttcctcaaaattctttctgagcatagaaagtactccacacttaaaataagtcttagaatattgtttctcaaatttaaatgtgtgtgaattatttgagggatcttgttagaaggcagattctaattctatacatctggagatggaggaggctgaaactctgcaattctaacgcactcctgtgtccttatactaagggtatatacttatatcccttatactatacttagactatacttaggctatactatatatacttaggcttatactrtatatacttaggctatgctatatatacttaga

SEQ ID NO: 134646 - DNA, 566 bp, Homo sapiens
gttttccacttcccttgctttatgagttattctctctcttacctcacacatataaacacacatacacatacattttatgtatacataagtatgtatgcaaatatacatattaacacatacatatttaaatatatatattttgaaatatttaagattaacttgtagatatgataaacttctacttctaaatattttagtttgtatttcctaaaacaagaacattttcttgtaaaactctgttagagtwgtcaaaatcaggaaattaatattgataaaatgctattatctaatctatagatcttattcaaattaccagtagtctcactaatgcaatgtacttcttctaacccaagatccaatccaggatcacacattgcacttagttgttctattagtctgttttcacactgctgataaagacaaactggagactgagcaatgtacaaaacaaagaggtttaattggacttacagttccacatggctggggaagcctcacaatcatggcagaagacaaggacgagcaagtcacatcttacatggatggcagcagacagagagattgtg

SEQ ID NO: 134647 - DNA, 600 bp, Homo sapiens
caataaaagattttattgtttaagtcagctaagtagaatttcctattgcttacaactgaatgaataataaataaatttggaactaaaataatcccaattttaatgatgaggaaattaaggaacagagagctgaattgaattaacatcatatgtagttgacaagtggatgtactaacagttgagacccaattttccaactccaaatcccattttctttaatcgctayatgttgtattacactattgtttcccactctgctgttctcatgatctgccactgagtgttagaggcaagaagaaaaacagcaaaatcaaacaaacaaacaaacaccactaaacagaaaacaggatctctgtgtcccaagatattattatttctggaactctttcgtctattttcagcaagccaaattagaaaattgattcctcttttcaagccctgatcatcatagaggggcctctattatccttgaaggagtgtagccataataacaagggctggtgattattggatttgagctcaccagccttgctcgagaggaactatagaaaagggaacatgctgtggaatcagtaaatgcaatatctaaaaacagccaac

SEQ ID NO: 134648 - DNA, 600 bp, Homo sapiens
caataaaagattttattgtttaagtcagctaagtagaatttcctattgcttacaactgaatgaataataaataaatttggaactaaaataatcccaattttaatgatgaggaaattaaggaacagagagctgaattgaattaacatcatatgtagttgacaagtggatgtactaacagttgagacccaattttccaactccaaatcccattttctttaatcgctatatgttgtattacactattgtttcccactctgctgttctcatgatctgccactgagtgttagaggcaagaagaaaaacagcaaaatcaaacaaacaaacaaacaccactaaacagaaaacaggatctctgtgtcccaagatattattatttctggaactctttcgtctattttcagcaagccaaattagaaaattgattcctcttttcaagccctgatcatcatagaggggcctctattatccttgaaggagtgtagccataataacaagggctggtgattattggatttgagctcaccasccttgctcgagaggaactatagaaaagggaacatgctgtggaatcagtaaatgcaatatctaaaaacagccaac

SEQ ID NO: 134649 - DNA, 580 bp, Homo sapiens
agaatttggcatttgcaaaggagcaggtgctggtctgtgtagtagaaagggtagctgatagatgtgaagtggggccagattgtggttaacctgaatgtcagaaaaaggagcttggcgttgttctgatggaaaataaagttactagagtgttggggtggagaatgagagtaacaatcagctttgcattttagaagggttctttattagcaacactatgggccacatattgaacwatgcctgcgatatcacagcattctagttctcacaagcacttgagcacccaaccaataagactaaacccatcatgggttcttacctctatgttaacagatcaaaaggcaggctgtggatgaattgcccaaattactttgccaacataaggcagcagccagtctgagctatgatctatatcccagctagcaaagagtcaaagagcctcttaattcaatttcctataatctccaagtaagtgcaaaatttcaaaagctttccaaaattaatcggtttcaaaaattacactggattcaatgctgaagctaagtaaatgttcaggttttctccactttgtaactttgctgat

SEQ ID NO: 134650 - DNA, 580 bp, Homo sapiens
agaatttggcatttgcaaaggagcaggtgctggtctgtgtagtagaaagggtagctgatagatgtgaagtggggccagattgtggttaacctgaatgtcagaaaaaggagcttggcgttgttctgatggaaaataaagttactagagtgttggggtggagaatgagagtaacaatcagctttgcattttagaagggttctttattagcaacactatgggccacatattgaactatgcctgcgatatcacagcattctagttctcacaagcacttgagcacccaaycaataagactaaacccatcatgggttcttacctctatgttaacagatcaaaaggcaggctgtggatgaattgcccaaattactttgccaacataaggcagcagccagtctgagctatgatctatatcccagctagcaaagagtcaaagagcctcttaattcaatttcctataatctccaagtaagtgcaaaatttcaaaagctttccaaaattaatcggtttcaaaaattacactggattcaatgctgaagctaagtaaatgttcaggttttctccactttgtaactttgctgat

SEQ ID NO: 134651 - DNA, 580 bp, Homo sapiens
agaatttggcatttgcaaaggagcaggtgctggtctgtgtagtagaaagggtagctgatagatgtgaagtggggccagattgtggttaacctgaatgtcagaaaaaggagcttggcgttgttctgatggaaaataaagttactagagtgttggggtggagaatgagagtaacaatcagctttgcattttagaagggttctttattagcaacactatgggccacatattgaactatgcctgcgatatcacagcattctagttctcacaagcacttgagcacccaaccaataagactaaacccatcatgggttcttacctctatgttaacagatcaaaaggcaggctgtggatgaattgcccaaattactttgccaacataaggcagcagccagtctgagctatgatctatatcccagctagcaaagagtcaaagagcctcttaattcaatttcctataatctccaagtaagtgcaaaatttcaaaagctttccaaaattaatcggtttcaaaaattacastggattcaatgctgaagctaagtaaatgttcaggttttctccactttgtaactttgctgat

SEQ ID NO: 134652 - DNA, 454 bp, Homo sapiens
accataaattacattttctcttgaacatgttcaaattcagctataaccattgttcccactagcaaggtgcctgctgtgtaccagtcayaaagattgcatgagagaagtgagctattgctcagaactttctagttgtgccagacatatgctgggttgcattttaattctcacaacaagcacagaggaaacagatgattattacccattgacaaatgaagacagaatatgtcattggctggataatgggtagatgtgtggtttgacctgacgtttgtctgacgccaaagtccaggccctattctttagtttatactctatcctcttcaaagcccatactctacttctctgaattctgcagtgtgaaaagacgcatgtccaataagggcctgtgcagattgtgattccaatcagatggaagccagagtgaaagtcacagagtcttgcctccaaaata

SEQ ID NO: 134653 - DNA, 581 bp, Homo sapiens
atctattaaaaaaagataactcctgatctcaagctcttgcctcccacccaataaaccaatcaaatgttgatatttcctggggtttctttgttaagttggttgtggttgctatctgtcccactgtggtgagttgataacatgattcataaccatctttatcaagtctaataaatgacactttagccacctgaatctctgggtctgagagctagcccctcttggtatgatctggcccacaccagacaaaataaagtttcctctctcactccaggcttcctggacctgatgagctcttcaaactagagttcaaactaaatttttcccatttcagtctcaatggaagtggaaawtttctctggagaagagtcattatgcatagacttgagattccatggctcatctgagcccagctgctgggataaacctgagctagaaactttaatgcaatgtgaactttaacatgacaattagcacagggatcttttccctgaggcaattaacttctgctcttctgtctaaccatgatttcagcactggcagcaggcaggaaatgaatgtcaccattacagtcacagtcagtc

SEQ ID NO: 134654 - DNA, 353 bp, Homo sapiens
aaatttatagaaaaaacattcaaaacctatctctaaatcaatttgaaaatgtactcaactcaaaaaagaaaagaagaagaaaaaaggaaaagaaaagaargcctgggatatatcatcctggcagagaaggaggcggggtaatattgtgacattatcctcaaatctaagaagacagagagccagccatccttcactgagaaagacatgggaagaaatgtgactgattgtagtagaaaaacctcaagttagttataaaaaatccctttctgtgaagtgtaggaggtcctggaacaaatgagtaaaatataatttaaaaacgttctcctagagagcatgaggaaagtgtcttaaag

SEQ ID NO: 134655 - DNA, 459 bp, Homo sapiens
acttgctatgttgcccaagctggtcttaaattcctgggctccagcaatcctccaccttggcctcccaaagtgctgggattacaggcatgagccattgtgcccagcatcaactaattttctaggcccagtattttttactcttttagtcagttttcttttccattcattggtccttcataggaaagctgatctttaattcttttatgtttgtcacctgattagatcatgaacatggcaagaggyatcatccataaaaaataaatggcatgcagagggcccttcttccagtcccagctctgccatgttcatgaactgtgcaaatctggatgggccattttacctatctggacctcactgtaaaataaatagcttggaatagatgacttttgagtttatttctaacaaccttgagttcctgagaagccaacttgtcaattaaccaatacttcagaagaacta

SEQ ID NO: 134656 - DNA, 543 bp, Homo sapiens
actttctagctaatcaagggtacaaggcatctaggtcaaaggcccagctttgcatacagcaggtcgaatatctaggcttaatgttagccagaggggccagggccctcagcaaggaatgaatacagcctatactggcttatcatcaccctaagacattaaaacagttgcaggggttccttggaatcacgggcttttgccgactatggatccccggatacagcgagatggccagaccactctatactctaatcaaggagccccagagggcaaatactcatctagtagaatgagaaccagggtcagaaacagccttcaaaaccttaaagcgggccctagtacaactccagctttaagccttyccacaggacaaaacttatctctatatgtcacagagacagcagggatagctcttggagtccttacgcaggctcatgggatgaacccccaaccagtggcatacctaagtaagaaaattgatgtagtagcaaaaggctggcctcactgtttaagggtagttgtggcagtggccatcttagtgtcaga

SEQ ID NO: 134657 - DNA, 516 bp, Homo sapiens
ggggtcgtggagatcaaaggcaaggaaagygctcaaatggccacggtcatgggaggggattctagaagactgcctttgataactcagcaggaaatcagctttgtcggccagccgcctttgaaaactggattctgcatactcaaatcagccctttgtggtaccccttgggaaggataagaccctaacaagcaaatgattctgaatgggagttaattcaacattctgatgttttttgaaaagatggactttgtggaaatgaagccaggatgatgatgatgcttagtagttttcactgcaacctcagggagactaactttgtttggttcgtatttgaggcacttccagactgccttgaaaaggaaattctgataaatgtgtgtgaatgtctaaaattcttgtgcaatgtggagcttcaagaaagttgccaggcaaatttttggaaaacaatttaatagtgtcttgccccactgtttataaaacaatatctttctaagccaaaaaataaaagacaattcc

SEQ ID NO: 134658 - DNA, 575 bp, Homo sapiens
cagtaacaacatggtaacaataataacaatggtaataatggccaaatccttatatatcacttyctatgtgccaggaattgttctaaggactttacattaaaaactaattttattcttattacaatcaaatgagataaatgttattatccccattttacacatatgaaaactgaggcaaagaccagtttggtaactttgtgagtagcaaaggtagaattagaactcgggcagtctggcactagatcccatgtctttaaccatgatattgtacagggagaaacacagagactgtcttagaacttgcaggccctgatttataagaccattgctgtaaccattgagctagatgaggcttagcaaggtacagccacttgctctcggtcatccagggtggcagggcagggagtccagcaaggttggtctggctttgaggcctgcggtcttcccactcttcattgctttctttttccatcctgctctggcagatctacgaggcaaataggacatggcctgggccttggggattttataatctagttgggaggcataactgatatacacagggcaacagggca

SEQ ID NO: 134659 - DNA, 552 bp, Homo sapiens
actgggctttgtagctaatgtttggtcaccatgaccagagactgttatctacttggtagctgcagagggaagggaaacccagtcttcaacctgggagtgcagcagtaattagagggccttgactccccactctgccaggtgtgcctgggctggttgagatagcacctttcaggagctggaggtagttccatccagcccgtctcacaaatggctgtgaatgcctctctagatccttcagcaaagacaggtcagctattcccacagtctgaatagaaaccaactcccacagtcctttgctgtttggaaatcttccagttcttgagtcccccaaatcacattgcatcattctagcatrtggttatgtaggaggcaggatgcttcccagggcaccagtgggaggggctcactccctctccattgccttgtctaatgctcagggaagccctctcaatgggcaggtgctgtgcaaatctaatctgcctgtggaggcatttctttcaatcaccctgcaattgtgcattgatttggggaaagcccattgataagagtaga

SEQ ID NO: 134660 - DNA, 492 bp, Homo sapiens
taggtgatccacccacctccgcctcccaaagtgctggrattacaggtgtgagtcactgcgcccagcccatttacatctattctaatattttcctttattcatgcttatgtttaccaccttatagttttaggtcactcctctcctcatcaggcatacctgcatggccaaagtctggtggtttctgagtgttaaccaattgccaactgtatgatcttggaccacttacttggcctctctgtgctttaatttcttcatatattaaaaagtcatggtgagccctatcttttagggtcattgtgagtgttacaggagacaatacatgtaaagcatttagaatcagaatcaacacgtaataagtgctcaaaaatgttaattaattaaaataaagtttgggggatccaaaggaggcagtgacaatggggacacatgtgttggttccccaccatatgtgaataggactgatgcaaaagccaaagtaaaaacaaaacaaaa

SEQ ID NO: 134661 - DNA, 581 bp, Homo sapiens
agagaagtcaggatagtgaagtggaaaagagcgagtggtcattgccacacagaccagggtttggatttcagctctgtccacgtacagcagcatggtcttaggcaagctgctaaaccctgcctctgcttcctcatctgcaccacaggcaccatagcaatgacctcacagggctgctctcagcactaaatgcgatcatgtggatgaggcatgtggcaaatgcctggcatgtgagtacaccgtaaatgttacatcttgggtgtgagtatgtctgtgtgtgttttctgctgtactgttatatatggatagaatcctctcaagaaaagtccaaggcagaactcaatcaagaaatgagatggcagtgctctattatattagtgtaatttggtaataaggaaaccaattaattcattctttgttattaatagcaaggaacgtrtgcagagaaaggtcctatggggcaagagagagatgccaagagtgcaccccttccttcatgacagtagttcttaaacttcaatgtactcaggattacccagggagcttgttaagtgtgcagaatcatgggccagagcatcagagag

SEQ ID NO: 134662 - DNA, 471 bp, Homo sapiens
tcccaaagtgctggaattacaggtgtgagtcactgcrcccagcccatttacatctattctaatattttcctttattcatgcttatgtttaccaccttatagttttaggtcactcctctcctcatcaggcatacctgcatggccaaagtctggtggtttctgagtgttaaccaattgccaactgtatgatcttggaccacttacttggcctctctgtgctttaatttcttcatatattaaaaagtcatggtgagccctatcttttagggtcattgtgagtgttacaggagacaatacatgtaaagcatttagaatcagaatcaacacgtaataagtgctcaaaaatgttaattaattaaaataaagtttgggggatccaaaggaggcagtgacaatggggacacatgtgttggttccccaccatatgtgaataggactgatgcaaaagccaaagtaaaaacaaaacaaaacc

SEQ ID NO: 134663 - DNA, 492 bp, Homo sapiens
taggtgatccacccacctccgcctcccaaagtgctggaattacaggtgtgagtcactgcgcccagcccatttacatctattctaatattttcctttattcatgcttatgtttaccaccttatagttttaggtcactcctctcctcatcaggcatacctgcatggccaaagtctggtggtttctgagtgttaaccaattgccaactgtatgatcttggaccacttacttggcctctctgtgctttaatttcttyatatattaaaaagtcatggtgagccctatcttttagggtcattgtgagtgttacaggagacaatacatgtaaagcatttagaatcagaatcaacacgtaataagtgctcaaaaatgttaattaattaaaataaagtttgggggatccaaaggaggcagtgacaatggggacacatgtgttggttccccaccatatgtgaataggactgatgcaaaagccaaagtaaaaacaaaacaaaa

SEQ ID NO: 134664 - DNA, 589 bp, Homo sapiens
caaaagcagctttgaaaatgtggtatttctagggagcggctgggggtgagcctctcactggagaaggcaaactttagccaatcatttccccctccaatgggaacagaagcaggtggattaaactgctccattaggcgatctttygtttctaatagaataatcatcaacaacccttgatggttgaaggtcagggaagggagctagacctggctgagcatttgctgtgtgctcagctctgtgttggagcttctttcacatcaagttcagttgtctctatcactctgtgtttatgtcttagacccatttttcaaatgagtaagatgagatagagaagttgactgatttgatctaggtcacatggctggtaaatgatagctccaggttttgagctcaagtctgttcagttctggagtccataccttactatcacccatgtgcctaggtctatgtgctttacgggagaccgaaacagtggaaggcatgtgcttgccttcaggttctgctaagaacccaagatgcttcacttaccgcacaacgggttttaaggcacctgcaccgttagttcctgacttgataacatgggactgag

SEQ ID NO: 134665 - DNA, 560 bp, Homo sapiens
taatagtagttccaactgatacttacagagcacctactatgttccaggcactggattcattaatcctcccaatctttctgtgaaatcagcactattattcaccctgttttacatgggatgaaatgcaggcacagcaaggccttgcttagagcaagtcacttgctaagaattatatagctaaatcagagccacaacttgaactccattctgaaccaaggagtttgaaaccattcctcctgcatgakgcatgaaattttaataacctgccgacagcccaggaggtttgcagtttctctgagcccaagggaccagagccatctggtgggtgctttttcaagggagctggtgtgactgtttcagggtaaaatgcagagaaatagcatcactttttttttccccgtggtaaaaataacatgcaaggatgggaagaacaaatggaggttgggaggctgacattgcggggaggaaggagctagaatgctgggggctgtctacctggtgccatgtgctgccatctgcccagtatgggggcaacatcagcctgacctgccagcacctgc

SEQ ID NO: 134666 - DNA, 595 bp, Homo sapiens
aatctgacagcaaaggaagaggggaccaaaaaatctactgtctcagcagctcttagagcaattagtggtggttatgatgtgaatttctgtttgatgtcctcgtctttttgagaagatgtgagtgtataatgtacaacttcatgaatgaaaaggtaaaataaaattttgagtgctttgaacaggaagattatctggaaaattcactgactggggaggcctccttccctgacatggcatgcagaaagagctgtcttgggcttatggagaggttgacacctccagaaccatctgctctgcagagagttccctcagggggccagtgacatgccccagagtcgggtccctttcctccctcagtgccagctatgctttccctgccacatggcaacagcccaggcagggcaggggcctctagacacatgtctgctgaagacccagcaggagcctgtcagccttgcccaggcyggatttccagttctgtagatgtagatcataaatgtgggtgacagatgtgggagagacacatccaggagatgaaaagatatctccatctgcttggttctggagaaaatacggagaccataagtggatggtg

SEQ ID NO: 134667 - DNA, 272 bp, Homo sapiens
acattttcacagatttatgggattcagacgtgaacatctttgggggccataattccacctaccaccatagggataaattagtaatgtctgcccaggacctggtataggtttggggtgataaggatgccagatattcaccatccctagtctggcaactaacaacatgtagagttaggaaagggatatcaacacrctgaaaagggatgagaagaaatggaaactaaaacttactgagcttttactataggccaggcacttgctatatgattcaa

SEQ ID NO: 134668 - DNA, 438 bp, Homo sapiens
tgtttcccatacaatttaccaaataagcctaatcatttaatatctctacaagatgagagacatattctttcaagctctctgggggcttcactggaaaataccaaagctatttctaggtcaaaaatacttaatttagaattttggtcctggagaagcctgccaaacatgccaaaaagtttaaaacacttgatcaaaatgggatcacaggtcactgtgaaataattgtcattcattcaaccagagtgatgatcaaaattcttcaaaagcaatacagaaagttacacggattaaaaaaaaaaaaaacccttaacccttttaaagtctagcttccctaagtaataataaacctaataaagacaacgtcagaaattattttgataaagtgtaatwttttttttaggccagtgatgtggttaggctctgtgtcctcacccagat

SEQ ID NO: 134669 - DNA, 468 bp, Homo sapiens
tttatatcttatttttacctcaataaactgctaaaaatacatatttgtatagatctcactacagcaatagaaaaggtgtaatacctaaaaataatgaaggtgctattttgtgaaagacagtgactaagacttggatggataaaaagatatgacttgttcttggagaagagaaagaatgtaaaatacccttgagtttatctgtacatttaaygcaatatcaacaaataaaacagagtaaaatattaattaaacaaatcacatttaattggacaaaatctgattattcagtggatagttgggatggccactaaaagagggataaaaaataagagcctatttcactctcaacaccttaacatacactcagtggaaaaaagaaggaaaatattttgtgtaatttaaagtacagagggtaacttttctagagagcacacataacccagaaaccatgacgaaggaaatggatga

SEQ ID NO: 134670 - DNA, 417 bp, Homo sapiens
tatctaactgactgaagattttagcacttttgtcgttaactttgaaagcagcaaatttttgaaaacgtttgtcaagaaacctgaatattacaaagatgacacaatttcattgaaaggcattatatgtggataaatacaaggagatatttgccatatcaatgggaaataagtcttaatattgtaaagatgtaaattctccccaaattgacccacagagtacaatcctatcaatatcatcttcctgtttatagcctttgttactttcttctttatggtgctcttttayacattcttcattttaacgcaatcacttttgtccgtctttttcttatacttagtggttgttttgatcttcttcaatagatcatattaactatagctttatagttaatatctaggagaacaagtcttctcaac

SEQ ID NO: 134671 - DNA, 564 bp, Homo sapiens
ttttccccattgtcttggctattagtacttcccttccttttagttatgcaaatttctgcagcctgctttaattccttccgtgaaaatgggtttttcttttctaccatatggccaagctgcaaattttccaagcttttattctttattttccttttaaatataagttccagtttcaggtcatttctttgttcacatatatgaggataggcttttagaagcagccaggacaaatcctgaaggctttgctgcttagaaatttattctgccagataccctaaatcatctctctcaatttcaaagttccacagatcactagagcaggggcacagtgttgccaggttctttgctaatgcataacaaaagtgacatttgwtccagttcccaagaagttcctcatttacatctgagacctcatcagctggccatctctgtccatatcactatcagcatgttggtcaaaaccattaagtgagtctctaggaagttccaaactttccctcatcttcctgtcttctgagccttccacactcttccagcctctgctggttacccagttccaaagtc

SEQ ID NO: 134672 - DNA, 590 bp, Homo sapiens
aggctcctctcttgtctccttttgggcaccaggtctgataaccttccctcctaagaaggactaggagctaagaaaatgaagcagagctgcttgtctggacctctagttgaagaggaacaggctggcagcaccrtcttggaaaatccataaagaaatcgactgacagttttatttatttcagctgcttaatggagcacatttttgccagtggatattgaaatcttcgttcctttcagaggaatgattgctgcaccttcctctttaggaccactcacctcatgttcaaaatacagctttggaggagaatgaaatgtttttcaagagcacgtaggggttgcagcttttgcagtaagtttcctcatatagcttcagaactcatcaaagaatccactcccagcaggcctcggtctctgctctctcatcctgtgagcccaaactttcaggagcactaggccaggactatcctgaatcccctgccaaagatgcaaaattcaggctgatgcccattctctgaatcctctgacgtttccccaatcctgtatttaaaatgatccttatccttttcagctaggatgtgaccctaaaaaggc

SEQ ID NO: 134673 - DNA, 590 bp, Homo sapiens
aggctcctctcttgtctccttttgggcaccaggtctgataaccttccctcctaagaaggactaggagctaagaaaatgaagcagagctgcttgtctggacctctagttgaagaggaacaggctggcagcaccgtcttggaaaatccataaagaaatcgactgacagttttatttatttcagctgcttaatggagcacatttttgccagtggatattgaaatcttcrttcctttcagaggaatgattgctgcaccttcctctttaggaccactcacctcatgttcaaaatacagctttggaggagaatgaaatgtttttcaagagcacgtaggggttgcagcttttgcagtaagtttcctcatatagcttcagaactcatcaaagaatccactcccagcaggcctcggtctctgctctctcatcctgtgagcccaaactttcaggagcactaggccaggactatcctgaatcccctgccaaagatgcaaaattcaggctgatgcccattctctgaatcctctgacgtttccccaatcctgtatttaaaatgatccttatccttttcagctaggatgtgaccctaaaaaggc

SEQ ID NO: 134674 - DNA, 590 bp, Homo sapiens
aggctcctctcttgtctccttttgggcaccaggtctgataaccttccctcctaagaaggactaggagctaagaaaatgaagcagagctgcttgtctggacctctagttgaagaggaacaggctggcagcaccgtcttggaaaatccataaagaaatcgactgacagttttatttatttcagctgcttaatggagcacatttttgccagtggatattgaaatcttcgttcctttcagaggaatgattgctgcaccttcctctttaggaccactcacctcatgttyaaaatacagctttggaggagaatgaaatgtttttcaagagcacgtaggggttgcagcttttgcagtaagtttcctcatatagcttcagaactcatcaaagaatccactcccagcaggcctcggtctctgctctctcatcctgtgagcccaaactttcaggagcactaggccaggactatcctgaatcccctgccaaagatgcaaaattcaggctgatgcccattctctgaatcctctgacgtttccccaatcctgtatttaaaatgatccttatccttttcagctaggatgtgaccctaaaaaggc

SEQ ID NO: 134675 - DNA, 590 bp, Homo sapiens
aggctcctctcttgtctccttttgggcaccaggtctgataaccttccctcctaagaaggactaggagctaagaaaatgaagcagagctgcttgtctggacctctagttgaagaggaacaggctggcagcaccgtcttggaaaatccataaagaaatcgactgacagttttatttatttcagctgcttaatggagcacatttttgccagtggatattgaaatcttcgttcctttcagaggaatgattgctgcaccttcctctttaggaccactcacctcatgttcaaaatacagctttggaggagaawgaaatgtttttcaagagcacgtaggggttgcagcttttgcagtaagtttcctcatatagcttcagaactcatcaaagaatccactcccagcaggcctcggtctctgctctctcatcctgtgagcccaaactttcaggagcactaggccaggactatcctgaatcccctgccaaagatgcaaaattcaggctgatgcccattctctgaatcctctgacgtttccccaatcctgtatttaaaatgatccttatccttttcagctaggatgtgaccctaaaaaggc

SEQ ID NO: 134676 - DNA, 406 bp, Homo sapiens
gagtcacttgaactgaatattatggaagtttcactagagatttctttcttctctgaatggcaaatataataaaggcctaaaaataaatgacagtaatctgcaaagctttcttcctctctaacagaattggtcagattgtcccccttggggcttgaggtatacgtgtcatgcacactgccattcaagggttatggtgctttatatttgtttctagtgtgatggtatgagcagagtcaagayattttccagccaggtatcacacagggtcgattcaaggagactgctttctgaaaggaaaagagaaggctctttctggatgcagtctggccatcctcaaagcacagagtttcatagagcaaagcaagccacagagaatacagcccaccatggcagaccaccaagcctg

SEQ ID NO: 134677 - DNA, 410 bp, Homo sapiens
cttgtgcaaaaaaagcaagttaacacagcaggcctgggatcactgtcttaaaaaagataactgattgcatcaaacaaaagtagtggcaatgcattggaggtcttataatttaaataaagtaaatgtatgacaaaaaatcacayaaaatgctgggggggtgaaagtatttaagattcttttactatctataaagtgctgtaatattaaggtagactgtggtatgtatatagtaaaccacagagcaatcatttaataataacactaagaggtacagataatacattgaaaaatggagataaaatggaatcctaaaaatacacaatccaaaggatatggaaggtggcaggggatggtaggaaatgaataacacatgagtcaaactgaaaacaaacaacaaagtgagtgattta

SEQ ID NO: 134678 - DNA, 557 bp, Homo sapiens
tcactgtcttaaaaaagataactgattgcatcaaacaaaagtagtggcaatgcattggaggtcttataatttaaataaagtaaatgtatgacaaaaaatcacataaaatgctgggggggtgaaagtatttaagattcttttactatctataaagtgctgtaatattaaggtagactgtggtatgtatatagtaaaccacagagcaatcatttaataataacacwaagaggtacagataatacattgaaaaatggagataaaatggaatcctaaaaatacacaatccaaaggatatggaaggtggcaggggatggtaggaaatgaataacacatgagtcaaactgaaaacaaacaacaaagtgagtgatttaaacttgactatgacaatatttactttacatgtgaagggtctaaaccatgagtcagcaagctatgtcccatgggccaaatacagcccatcatcattttttataacgttccattgtattgaaacacagccacgcccattcattcttgtgttatctgtgctgctttcatgctataatagcagagttgtg

SEQ ID NO: 134679 - DNA, 410 bp, Homo sapiens
gtagatgctgagaaggatggggggaaagtagacattggttaacaaatacaaagttacagctaaacaagaggaataagctctagtgttctatagtactgtagggttacaaataatttagtgtatattttcaaaaagctagaagattttcaatgttcataacacaaagaaataataaatattcaaggtaatggatatgctaattaccctaatttgattayacattgtaaatatgtattgaaatatcactctatagcccataaaatatatataattattacatcaattaaaaaagaaattaataataaaggtatttgaaatattgatttatatccaccatcattagtggttaatcttgccctacatttattttgtataagaatattaactaagagtagcagaacatttgaaaa

SEQ ID NO: 134680 - DNA, 596 bp, Homo sapiens
tttccactcatcaatcattcttttttagaccaacacataataaaggacaaaatggaaaaaaaaatactgaagtcatcagaatttctacacaataccttcagtgttcttgcactttgcaatgctgccatttttctcttgtagctcttttctcatagcttctctctgaaaatggacaaagctacaattggtaatgaaacaaagataagtgagtctgaaaagcaaaatgaactctaagccaaaactagtgaaaaattacactattgctgccagtgaaaatcaaagcctaaaaatatatgactgcaygactgaatgagaaaaacagagaggagggacagaataagaagggaaatagagcaaaggaaaaaagagaggtggcatatgctacaaagaataaagacacaggtcctcagtcttcctgaactctggcagtgaccttggtaaagctgttccaaatcttgtctaaaattacatattagtctgatatgtggaagtaagcaattatgactgctccatattaataaaaaaaaagactttaagcattcctgaagactacctggagcatgcccattgaaaacttgtggatcataggcacccag

SEQ ID NO: 134681 - DNA, 624 bp, Homo sapiens
gttttgggggagaccgaaattggaatgagactgccaaggcagccaaggctggagggactagagatggggagtaaacccaacattcaacactagtttttccctcaagatatttgctgatttttaagttccatggaaagggagtctaaaatgtcaagcagaaaataggtgaaaagaagagctgagtttcttttttaatcatattgtaatgctggaaaggtaaaagttccaatttaaggccattaaaggggaagcagcactcaagaatttcakttgtaaaccaccatgagcaatatcctaggaggtacatcaaaggtagactgtatcttcctaggagtatagctcaaccccaatcatttcagcatttggctggactgagctaatgtgtcccttttctagctgccttccaacaaaaagggtgaattcactattgagggagataacttctaccaatacctcagttatttctcatataaaatatttgattttcaataaaaattaccaacaaacctcaaaacaaccaaagggaaaagaaacactaggaagagacccacagttgacccagatattggagttatcaaatgcaaacttgaaaaaaaatggattattattttgaagaaaatagat

SEQ ID NO: 134682 - DNA, 438 bp, Homo sapiens
tggtgaaaatgtgaaatgttgtagctacttttgaaaacattttggcatgtcctcaaaaagttaaacatagagttataatattacccagcaattccatttttaggtttatacccaagactaatgaaaacatatctccacacaaatatgtacatgtatgtttatagcagtgatatggtttggctgtgtcccccactgaaatctcaccttgaattgtaataatccccacatgtcaagggtggggccaggtggagataattgaatcacgggggcagtttccyctatactgttcttgttgtagtgaataagtctcatgagatctgatggtttataaaggggagttcccctgtacgtgctctcttgcctgccaccatgtaagacatgactttgctcctcattcaccttccaccatgattatgaggcctccccagacatgtggaa

SEQ ID NO: 134683 - DNA, 572 bp, Homo sapiens
gatggtgtttagtctgagctctgaaagagaagaaagatacatttataaacatgatatagaagagcatttcctgtggggaagcagctggtgagaatgagcaaagtacatttaagggaaaccagtargtgttgccttggatttcattacgattgcaatcagaagccactggaaagttttaagaacatgaatgatgtccagactcatcaaattgtatgcattaaatatgtggagtatattgaatattagttatacttcagtaaatctatttaatacaaacaaataatagcaacaaagcattcccctcccccctcaaaaagtaagacactttcaacaggcgtcattggaagtattctgtcccaagaacagcttcttccacaacactttattgtttcatttgtgatctgcatcagcaatcatcagctatcacttgctttctggctcaggttaaaaaatcttgtttcctgtcgtgaggaaagggcagaagggaaattggcaagggggaaatctggtgtgatccagtgactcacaagttcatccctaacttttgttgccagataatgtttaaacacttc

SEQ ID NO: 134684 - DNA, 565 bp, Homo sapiens
aggtgttgccttggatttcattacgattgcaatcagaagccactggaaagttttaagaacatgaatgatgtccagactcatcaaattgtatgcattaaatatgtggagtatattgaatattagttatacttcagtaaatctatttaatacaaacaaataatagcaacaaarcattcccctcccccctcaaaaagtaagacactttcaacaggcgtcattggaagtattctgtcccaagaacagcttcttccacaacactttattgtttcatttgtgatctgcatcagcaatcatcagctatcacttgctttctggctcaggttaaaaaatcttgtttcctgtcgtgaggaaagggcagaagggaaattggcaagggggaaatctggtgtgatccagtgactcacaagttcatccctaacttttgttgccagataatgtttaaacacttctggcttttgctttctctctgggggtcatttataattttttttctaaaatccttgccatcctttacctccctgagcattcaatatcccctctaacttctgctgggaatctaagatgt

SEQ ID NO: 134685 - DNA, 565 bp, Homo sapiens
aggtgttgccttggatttcattacgattgcaatcagaagccactggaaagttttaagaacatgaatgatgtccagactcatcaaattgtatgcattaaatatgtggagtatattgaatattagttatacttcagtaaatctatttaatacaaacaaataatagcaacaaagcattcccctcccccctcaaaaagtaagacactttcaacaggcgtcattggaagtattctgtcccaagaacagcttcttccacaacactttattgtttcatttgtgatctgcatcagcaatcatcagctatcacttgctttctggctcaggttaaaaaatcttgtttcctgtcgtgaggaaagggcagaagggaaattggcaagggggaaatctggtgtgatccagtgactcacaagttcatccctaacttttrttgccagataatgtttaaacacttctggcttttgctttctctctgggggtcatttataattttttttctaaaatccttgccatcctttacctccctgagcattcaatatcccctctaacttctgctgggaatctaagatgt

SEQ ID NO: 134686 - DNA, 526 bp, Homo sapiens
atatagccattgagaaaagtgacaaaatgcccaacccagagaagttgttgggaggtatatatatatatatacacatatatgtacacacacacacacatgcatatatatgtatgtgtgtgtgtgcatgtgtgtgtgtgtgtgtgtgtgtgtgtrtatatatatataaatattattgctggtggagccaatggcagacatagttgctcctctaaagaggtctcttgaacaatggacgaagcttaggtgaaagtaaacaccaccctgaggaacccatgcacatcacccacatggagcccctaatattagcaaaattctcaacatcagatgaaaccacatgactagaatgaggatggaaatacctcccaactaccatcaaaaggaaagtcacgtaaaaagataatgccttctcttttccttatccttgtcccacaccagaggacctaaaaccttctctccaaccccgtctactttatgcagccagggcttctggtttagtccgtgcaggatgggatatgagttttggatt

SEQ ID NO: 134687 - DNA, 574 bp, Homo sapiens
tattgacctgtacataagaaactgggtgtcaaattagaacatagaatgcttatttcctgatttaggacatgttttgtgttttttatttgtttatggacccacaaaagcaattgcttttgaaattttaactaattttctccctgtggaaatgtgagatgcctacaggaactgccaggatcacatcctccatgcctctactcaacaagaataaccccgaagcaggcaaaatggacaagtaccatatcaacaatgaaatacccactgattatgcactgacggttttaattgttgatgatcatgtttgtattcyacatcagaagcttgatccctttcatagataattaggaccaggagaacaatctgagcaatgaaccaattcacacatgtaccatcagtagagcctccacatttacccccctcttgatgtcctccatgtagggatgttagtcactagtacaagagaggtaacctgggtgctcaattacatgatttatgaattacactgatctgagcagagacagcaggtgaagcaacttgggtgtagttccaagatatatattctagtgaatagact

SEQ ID NO: 134688 - DNA, 596 bp, Homo sapiens
caggcatggtgggctgcaggtctccagccctgccctgcggggaggcagctaaggccyggcgagacatcaagcgcagcactggtgggctggcactgctgggggacccggcacaccctccacagctgctggcctgggtgctaagcctcctcactgcccggggccggcggggccagctggctgctctgagtgcggggccaccgagcccatgcccacccagaacttgcgctgacccacaagcgccacacgcagccctggttcccgcccatgcctctccctccacacataccggcaagctgagggagctggctctggcctcggccagcccagaaaagggatcccacagtgcaggggtgggctgaagggctcctcaagcatggccagagtgggcgccgaggctgaggaggcactgagagcgatcgagggctgcgagggctgccagcacactgtcacctctcaatattaccaggtattcctactacattttgtgcatcatcaattctcccctatttcctgagtgtacttctttctttttccttaaaactcccaacttcatttttgctctcagctgagagtaccaagcttcctatttcactaaa

SEQ ID NO: 134689 - DNA, 599 bp, Homo sapiens
agaagggaacctgctgccttgaagggaaggacccattcctggcaggattcaccacctgctgactaaagagccctggggccttgaataaatatcaggcagtactcaccatgggccttgcaggagacccagtgccatrctggctttaagtgtgacccagcacatttcaagctgtggtggccatgggaagagactcctacttgaggaaactagagtgaagagtagagggttctagcagctggggtcttgtcttgcagcttgggtactagctttgtcacagcgaggtacaacaccaagcaggctcctgggctccttgtccaggccttggctcctggacagcatttctggacttgcaatgggctagaggggagcctactgccctgaagggagagacccaggcttggcagcattcaccacaagctgactgaagagcttttgggccttgagtatactccttggtagccaggtagtactcgccacaggcctggggcagtggtggccatggggagagactccttctgcttcaggaaaggagagggaaagtggaaaaatctttgtcttgtggctttgatgcctgctcagccacagtagaatagagcacc

SEQ ID NO: 134690 - DNA, 599 bp, Homo sapiens
agaagggaacctgctgccttgaagggaaggacccattcctggcaggattcaccacctgctgactaaagagccctggggccttgaataaatatcaggcagtactcaccatgggccttgcaggagacccagtgccatgctggctttaagtgtgacccagcacatttcaagctgtggtggccatgggaagagactcctacttgaggaaactagagtgaagagtagagggttctagcagctggggtcttgtcttgcagcttgggtactagctttgtcacagcgaggtacaacaccaagcaggctcctgggctccttgtccaggccttggctcctggacagmatttctggacttgcaatgggctagaggggagcctactgccctgaagggagagacccaggcttggcagcattcaccacaagctgactgaagagcttttgggccttgagtatactccttggtagccaggtagtactcgccacaggcctggggcagtggtggccatggggagagactccttctgcttcaggaaaggagagggaaagtggaaaaatctttgtcttgtggctttgatgcctgctcagccacagtagaatagagcacc

SEQ ID NO: 134691 - DNA, 592 bp, Homo sapiens
tatagtaaaaggaaagtggtcaacagcattaattttatagatcagtcaatgattgcagagtatgataaaaatctacttgtttggacttgtgagaagtttaagatcttgggataagtgggacagaatatatattgcagatggttaaggagtaagtatatgacaagrgagtggaggtagaaaaggaattctgtgaagaaaggaagaagaattggtaacagctcgatatagaagtaaaggaataaatcaatcaaaaggacttattgaagttgtaggaaattgaggtgaaaacaaagtgttgggaaaaattctaaaggaaacaaaaagagttgggattgaaaggccacctggacaatttaatattggaaaggcacttttttttgaaggggagaagttcagagcatttacagtacatgaactctgtgttctaagtgatgtaagaggcaaaatcaaatgctgagaataatggacacagatcttgtatttctgaaataaaattggctatgtattatttcatgaaagattgtgagatttaatttgctgaaatattatttagaattttagtacttatattcatcaataatattggcttgct

SEQ ID NO: 134692 - DNA, 580 bp, Homo sapiens
gtgctgtaaacagtttttgagaatgtaaaggatcatcaatattttaaagagttacttaattataaatctggcccattacacaagtttagagcattatggttgatagcatttgtgaatttaagaatttactaagcagtcaccttctcctataaaagctaaaaagaacaacaaaagggaaaaaagaaatgggttcataaagtacaacatcaggcaagtgaaaggtatccaattttccactcccttagttacaagcaaattttggaagsggggaaaaacaccacatcaacagtatagtacctacttcagcgttttcacattctggttacagcacccattatagctctctgtttagacagtgatagtagttacaaagtgcaaccaaaacattaaacgttggcaagcacttctacgcttaattaagaaacgcttttgtcagcttcttctttgaataagggggttattaattcaaaactggagaacatgctctggtggtttctctgtgggaattgtggctgcacatatgctacagagaactgtcttaattatttcgattaatcaaacaaaattcccaccaaataca

SEQ ID NO: 134693 - DNA, 586 bp, Homo sapiens
catcataactaaccattggtcctagttctttctatcccttgggaacataaacaaattcaaactcaaagatttacctcctgtgagaagtcttctggccttgccaatttccctgcccctctgttccaataatgctttgtgcttttctttattagggaatcaatcacattatattctaatcattatttacttgtgttatctccctactcgtctacaattttcttgagaacagggaatgtttttcatttctgtatcccaagcgcctaacagtacagacatccaawaacacatccagaagtattcaataaatagctgctgactgattaaacaaatcgattcatcttgaaggcagctaaataccatcagttccttcagtgtttctcatacgaaatattttcgtggcccttcctattcatggcatttgtcttctgaacccaatttaatatgactttatcctttttgatgcaggatactcagccaaatgtcacctatatatgacctataatcagtacaggtatgtgggtatgccctagaagacaaatggtacctacttcatcccaggcttccatctctgggaacaagaagttta

SEQ ID NO: 134694 - DNA, 582 bp, Homo sapiens
aaatgacagaacagagtacctgatggaagcaaagacagttaagaggctattgcaaaataatccagggaagaagattacagtgacttagacagtacagtagcagcagaaaggaagagcaatcatctgaatgcattttgaatttagggtcatgggatttaatgatattttggatgtagtatggagaaagagagaagttgaagaaggctaacagtaaagaacatacctttctctaaacaaataccaatagtacttaggtgtgtacacacagttaaaatgtagtatttctgacattatattttaggacatgctctcactatggcacatgaaacagtcaataaggaacacctccattttctatcctttttgttttattatcaaagcaagacaaattttttatagaaatctggaatacatgtaaaagtaagcaggcatrtataaaaacctgtaatctcaccacccagagatgaacactgtctgtcatttatcaaagaaaacatataaatataacttcatatggaatcataatatctttggtattataatctttttgttttcccaaataatgacataccgtgaacatct

SEQ ID NO: 134695 - DNA, 564 bp, Homo sapiens
aaaagcgtacaaattgggtccagtgtataccactccggtgatgggttcaccaaaatctcacaaataaccactaaagaagtcactcatataacgaaataccacctgtttgccaaaaacctgtggaaataaacattttttaaatgtcatatattataaagatagctgcccacactgtgcacataaataagccagttattcctacagaaatctccaggcactccttcaytgtggagagcctttccagtcatttgagggctacatgatctactactggtgtttccttcattgtttgaagttctcttatgactatgcttgatatataagtcaccatattttaagaagaaaagaaaattaatgcttggttctacacaaaaagtacagttcaggatacacatggtacctctgaaaaaaaaagtatttacaattattgaaacacacaagtggggcctaaacaagttgggctatcacagcttgagagtcctcctggacaactggtagagttgaactgggttcccagttgagcctgaatatttgagagtagtccttgttttggagggattgctg

SEQ ID NO: 134696 - DNA, 571 bp, Homo sapiens
tctcaattttgctcaccacttgggagagcatataccagatgccatggagtccttcttatccttctcatagtctttgagcccttgtcttttaattttttttycagaaagccatatctctgacagcatcctatgctcacatcactgccattattgttaagaatcatgaagcatctgagattttaccctatttgcaagctaatgagctagcctaccccagtttcagagatgttgctagaagacagaacactactgggtcagagacattcacagaggtaatataaatgagctcagttggatgcctgtacacatagtgggttgtgttacataagagaaaacctgaccataggtacctgaatctattatactggatagtaaacacacctccctttactctggaaaaatatactattacgatttcccagggaagttcactttacagttcatcttgaacaaggcagaggttagggacactgaccctccacacagttgaaaattcacgtattactttagaatactccaaaacttaagtagcctaatgttgcctgaaagccatgctgaaaactgaaacagt

SEQ ID NO: 134697 - DNA, 512 bp, Homo sapiens
tcacatagaataggctgaagagggggagtggggaaggggttgaccttgacattgggaggtggcagaggagcaagaagtggaggagcttgaaggaagtcaggagaggcaagcacacttagtgtaactttacagaaatacatcgttatttctgtctcactttttgctttttttattttgctaaaaatatttctatacagtaccaattcttcttccaccatttgytttcgtttctgtgctgttatcatagaagggtccattttgtaaaataggtcaatagcagtcatgaataatctgaacccttctccttctgccagatggttcaatgtcatctgctttctggcaccgcttcttcttcatcttccttctcatcacctgggactgatgtggaagcactcatctctgtcaggttatgttctgttgcttctttttgtgtgatttctatcagttcttgaatctctccaagacacatatcttgaaacatttcacctctcacccttttttccatacccaca

SEQ ID NO: 134698 - DNA, 512 bp, Homo sapiens
tcacatagaataggctgaagagggggagtggggaaggggttgaccttgacattgggaggtggcagaggagcaagaagtggaggagcttgaaggaagtcaggagaggcaagcacacttagtgtaactttacagaaatacatcgttatttctgtctcactttttgctttttttattttgctaaaaatatttctatacagtaccaattcttcttccaccatttgctttygtttctgtgctgttatcatagaagggtccattttgtaaaataggtcaatagcagtcatgaataatctgaacccttctccttctgccagatggttcaatgtcatctgctttctggcaccgcttcttcttcatcttccttctcatcacctgggactgatgtggaagcactcatctctgtcaggttatgttctgttgcttctttttgtgtgatttctatcagttcttgaatctctccaagacacatatcttgaaacatttcacctctcacccttttttccatacccaca

SEQ ID NO: 134699 - DNA, 570 bp, Homo sapiens
caacacttgagtttactgcaatagaaacaggtggtggctacaaaattattgcaatagtacagtattactgcagctgattttatgcaattatgattgaaagctgcatctttgggtttgtttacatttctcttaattgcaaatggtgccatgtacaatatgtaagcataggcacaagttttgaaaaattttaactttttataataaatcagtgtgtattttatgatagtaaataatgaaatagcctagtaggtatacgtattttatacattcatggcataactaactttgtcttaatttttttatatttctaggttatgcagttcatttgtgagttttttcagatttgtcacaaatctcaaaaaactcttccaatatatttattgaaaaaaatccaataaaagtggacctscataactgtacaaagattctcagaaagctaatttagaacaaaggggagtaactgcctctgctcataggatgcgtagaaatgtgagagagctatggaaatggcttcccagcaatattgtaataattataataaatgtaataagagattttgaaataacctta

SEQ ID NO: 134700 - DNA, 570 bp, Homo sapiens
caacacttgagtttactgcaatagaaacaggtggtggctacaaaattattgcaatagtacagtattactgcagctgattttatgcaattatgattgaaagctgcatctttgggtttgtttacatttctcttaattgcaaatggtgccatgtacaatatgtaagcataggcacaagttttgaaaaattttaactttttataataaatcagtgtgtattttatgatagtaaataatgaaatagcctagtaggtatacgtattttatacattcatggcataactaactttgtcttaatttttttatatttctaggttatgcagttcatttgtgagttttttcagatttgtcacaaatctcaaaaaactcttccaatatatttattgaaaaaaatccaataaaagtggacctgcataactgtacaaagattctcagaaagctaatttagaacaaaggggagtaactgcctctgctcrtaggatgcgtagaaatgtgagagagctatggaaatggcttcccagcaatattgtaataattataataaatgtaataagagattttgaaataacctta

SEQ ID NO: 134701 - DNA, 618 bp, Homo sapiens
caacatatgcaaatcaagaaatgtgctgcaccacattaacagaatgaacgataaaaatgatgtgattatctcaataggtggtttttcatgaaaaattcaaaggaatagattttaagacttcaaacaattttgttgtccttttgaaagggaaaaaagggtatagaacaaccaagagaaattttaagagactgtaacaatggggtaatgaggtattgtttattttagaaatataaaaattttagaccacaataaaaggagagaaacagttctgagtataggtgaaatgtagtattggatacatttataatttttaattagtgggaaaattatgaagtatttccaaaatgcttttgaaataatttatcatcctttagttgaaaaagttcttatatctttatttcaatataaatgccaaaaaagtgtggaatggaataatttcttaagatgaaaagaaaaccttgaaaccatttaaaaagacaacattttaaaagktgtatgtatgtcataaaacctatgctaaaccatgaaggaaaatgtttccatgatcttgtttaataatataaatgtctacacttcaacacaacctctaattttattataatacaacacatgtgccaa

SEQ ID NO: 134702 - DNA, 560 bp, Homo sapiens
tttttctttataaattaccccatcttggatatttcttcatagcagtataaaaatggactaatacagcatgtattacctcatgaacttctgttagtctttattttagaaaagaaaaaggtgatgttagtagaaatcaataactctctcactataacccatctagtaactggaagaatccaatctgtctgactgtaaactcattctctttttacctaccccacacaacatcataagagattggagttgttaggacagcagtgagaaaatttcctatttttaatccatcaattaactttttaaagtgtaattggttgtataatatgatggattaggcacctttgtataccatgtttaattgtyttgactttacttcttaagtccatttgtgtccatcaattatttgctgtctacaagtaccttaatacaggcacatccagaattaaactcactttgtaaacctatgtggaattcatacatatgcatgaattcatccagaagtaggaggagccaaatgctcagtgggctacctttgaataatggggacataataaaagtaataa

SEQ ID NO: 134703 - DNA, 543 bp, Homo sapiens
ttaggcatccaccattctagacttgtaaattaactgaatccccgaaaactgatttcataattctacttgtaggagatagttaagtaatttaacaccagctccctgtttgattttactcagtaatattactagttaygtccttttcgcattttatttaaaaattgtttatgcatttgaaattgacaaataaaacttgcatacatttatggtgttgtacagcatgatgttttgaaaatgtgtatacattgtaggatagctaaattaagctaattaacactgcattaccttatatagttgtctgttttgtgtttagaacacttgaaaaatattctgttaacaatttttgggtatataatgcattgttactaactatagttaccatttgtataataaatctcttgaacttattcctcctatctaactgaaatttagtaacctttgaccatatctccccaatctcccttcccagatcctagtaaccacctctctactctctgctactatgagtttggctattttgggttccatacatacattagataa

SEQ ID NO: 134704 - DNA, 484 bp, Homo sapiens
aaccgtccgatacagaaacagatataaaaatgttccattcaaatttgtcattgatctgacctgagctggcaatgtaattcaggtagttattaagattattttactcatccatgagtaaaaagataaaagttatctttcagtaactttaggtaatatcggggaaccagcccccagtgtttcaatgtaggttcttcctattttccctaagtgtcggccagtctgagaaataaagtgtacaaagagaggaattttacagctgggcctccgggggtaacatcacatatcagtaggtctgtgattttccctgagccgcaaaaccagcaagtttttattagggattttaaaaggggagagggtatatgtacagggaakatgtcacaaagatcacatgctttaaagggcaataaagatcacaaggcaagggcaaaatcagaattactgatgagggtctatgtcctgttgtgcacgtattgtcttgataaac

SEQ ID NO: 134705 - DNA, 318 bp, Homo sapiens
tttaggcttttgaaggaactcccagactatttttcaaaatatcttcwctatttcacacccatgccagcagtatgtgtaggaagtgttcagtttctccacatctttacaaacacttgatatcatctttctgttatagtcatcatagtgggtaggcagtgatgtctcattcttatttttacttgcttttcaccactaaataatgatttctagcatattttgatgttcttattaataatttgtacttcttaggaaaaggctctattaagatcttttgtccatgttttagttggggaatttgtctttttattattgagttgt

SEQ ID NO: 134706 - DNA, 559 bp, Homo sapiens
aataaaatgaacaagaaattgagatatacaactgtccttcagtactgytacatctcaaaattttcatacttttataagactgagcaaaattcactaattgttaacattatattggtactcacagaccataaaaaatggctatatagttgacaaagtttttacttgctctcaaatgtatgtcatacctaagtgtctaccttagttttcaatattaaaaatgaaagacacttccacattttgcttaagatgaagaaaatcagaaagagactcttgtcctagcaatctatccctaccaacaagagaaagcggtattatttacaaagccataatttatcgaacccaacagagggctgaggtcacagggcatccaacttgtttgaaatctaagccaggcaacttcaaatagagacagaaagtgagctctagctaacctgaaacagagccccagaggaagacatggtcaccgtataagctaaaatgaataattcagctaaatttttgaagaattgctaaagggagagtgtgagatactgtgatagtatagaactcctgggagatg

SEQ ID NO: 134707 - DNA, 559 bp, Homo sapiens
aataaaatgaacaagaaattgagatatacaactgtccttcagtactgctacatctcaaaattttcatacttttataagactgagcaaaattcactaattgttaacattatattggtactcacagaccataaaaaatggctatatagttgacaaagtttttacttgctctcaaatgtatgtcatacctaagtgtctaccttagttttcaatattaaaaatgaaagacacttccacattttgcttaagatgaagaaaatcagaaagagaytcttgtcctagcaatctatccctaccaacaagagaaagcggtattatttacaaagccataatttatcgaacccaacagagggctgaggtcacagggcatccaacttgtttgaaatctaagccaggcaacttcaaatagagacagaaagtgagctctagctaacctgaaacagagccccagaggaagacatggtcaccgtataagctaaaatgaataattcagctaaatttttgaagaattgctaaagggagagtgtgagatactgtgatagtatagaactcctgggagatg

SEQ ID NO: 134708 - DNA, 517 bp, Homo sapiens
aaaaaacatgaagaaagattcttgagcatactgctgcaataataatataaatgacggattctatgataattaayacatgtagaagagtctaaagacagaaggaacttggaagttcaggagaaaattctgtggttaaaaagtctgaaggaagatttaatgaggctggagaatagtttttgttgtaatgaaggagaaagttgaaaaatgggaagctgtaaaaagatgataagattgttttaattataacttttatacctagagtacttctggaggacaaaaaagtcctcgttgcttggagcagaaatggttgagatgcaataagagtgattatttattggaagtgtataaaccttgagtctacttgattgctggatagaccatgcatatgattatagacgtcacccaaaaaagaactacagaagtggagagggaaatcaaaagaaggtgttgtcattgtcggggatgggctgaggagagtggccaggagttcatagagtggaaatgaagcgtgtggatt

SEQ ID NO: 134709 - DNA, 517 bp, Homo sapiens
aaaaaacatgaagaaagattcttgagcatactgctgcaataataatataaatgacggattctatgataattaacacatgtagaagagtctaaagacagaaggaacttggaagttcaggagaaaattctgtggttaaaaagtctgaaggaagatttaatgaggctggagaatagtttttgttgtaatgaaggagaaagttgaaaaatgggaagctgtaaaaagatgataagattgttttaattataacttttatacctagagtasttctggaggacaaaaaagtcctcgttgcttggagcagaaatggttgagatgcaataagagtgattatttattggaagtgtataaaccttgagtctacttgattgctggatagaccatgcatatgattatagacgtcacccaaaaaagaactacagaagtggagagggaaatcaaaagaaggtgttgtcattgtcggggatgggctgaggagagtggccaggagttcatagagtggaaatgaagcgtgtggatt

SEQ ID NO: 134710 - DNA, 517 bp, Homo sapiens
aaaaaacatgaagaaagattcttgagcatactgctgcaataataatataaatgacggattctatgataattaacacatgtagaagagtctaaagacagaaggaacttggaagttcaggagaaaattctgtggttaaaaagtctgaaggaagatttaatgaggctggagaatagtttttgttgtaatgaaggagaaagttgaaaaatgggaagctgtaaaaagatgataagattgttttaattataacttttatacctagagtacttctggaggacaaaaaagtcctcgttgcttggagcagaartggttgagatgcaataagagtgattatttattggaagtgtataaaccttgagtctacttgattgctggatagaccatgcatatgattatagacgtcacccaaaaaagaactacagaagtggagagggaaatcaaaagaaggtgttgtcattgtcggggatgggctgaggagagtggccaggagttcatagagtggaaatgaagcgtgtggatt

SEQ ID NO: 134711 - DNA, 561 bp, Homo sapiens
aatggagcatccatattcattatttctaggagaaactaagcctttgaatgacaaaatggtaagtacaaattttctaggacaaaatgtcataaaaaagccacttggtattgtcagaagcagttattattattgatgacctgccatctgtcagcaatatcaatgtatttgattaaatttacattggtataatgaattgttgcccttaaaccttggcttttctaccataagttacaaggtagcaataacgacatggcaaaataaaagtaaaattacagctacacatataaaatatagaatcaacagactgtcagaaacatattaagtgaccttaaaaacttcagatgagrtaaaatagttcattgtattatcaacaatataaggtaagaaatatattctcaaatgcctaaagcatcataatacattttcttctaaagtaaggcctggggataccaactcaggtgcagttttactgaaattttcacagggaatactgtaaattgagatagactcaagccaatgaaaacaaaatggctaaaacctttcatggatcaagaaagtgac

SEQ ID NO: 134712 - DNA, 370 bp, Homo sapiens
ttttcgcactctgacttacagttgaattatatgtaaatgtgagttacctcccctactacactttaagttttttttagggcaggatctgtgcctggctcacctttaggtgttgagaaatgaatagcacttggcatatacttgttgcattaatgaatggagcagggatgtttctgcagatccttttagtgtgttttactggtaaatgcattttacttataatattttttaaatgggagacataatmttttcttcatttttaatcccctcattcaactttataagtgaattgtgtgtctctgtaggtattttggatgaaacgaatgatgatttacttagtagggatatttttaagtggaaatgaactaatgtc

SEQ ID NO: 134713 - DNA, 495 bp, Homo sapiens
gaaattccaaagcttgtcttctcccactggccaactaaacagaaaacaaacacttaaggtacccttctcagaagcttaggagaaactgagttctccaaagactatgtccatgggctcctctgaagcttaacartcaaatttcccttcatgggaatttctgcctcaagtcacccaaaacatttattttttttaaaagaaacaatacctgtgctttccagataacaaggtggactaaaatactatctggtgtcacaactattcaggctcattttgcagtatgtgcacctctgtcttgtgtacctgtgagctgacactctggtctgataatatattctgcagctgtacatattaatttgtaagttgaacaatctctccgtgagggcagttaggaaaccaagattgaaattgctaatgtcgggtgacttcagctgtcgatgattatgtagtcaagtcttgactaaggtttccagaaccctggctaaaaatggaagtttt

SEQ ID NO: 134714 - DNA, 470 bp, Homo sapiens
agaaattccaaagcttgtcttctcccactggccaactaaacagaaaacaaacacttaaggtacccttctcagaagcttaggagaaactgagttctccaaagactatgtccatgggctcctctgaagcttaacagtcaaatttcccttcatgggaatttctgcctcaagtcacccaaaacatttattttttttaaaagaaacaatacctgtgctttccagataacaaggtggactaaaatactatctggtgtcacaactattcaggctcattttgcagtatgtgcacctctgtcttgtgtacctgtgagctgacactctggtctgataatatattctgcagctgtacatattaatttgtaagttgaacaatctctccgtgagggcagttaggaaaccaagrttgaaattgctaatgtcgggtgacttcagctgtcgatgattatgtagtcaagtcttgactaaggtttcca

SEQ ID NO: 134715 - DNA, 543 bp, Homo sapiens
aacaatggacagactccaggcaaccaaacgtaaaaggacaatgagaaaccaaaccacagccacatggctgatgtgctgcttgagggtgctgtgtcaagcagcaaatgggaaactgaagcaatccgtactacccatgctgtccttctgaagaagccaccaggctggaagtcaggtaatgtgggttctttcactggcaaacctactaaaactcatgctacatgagcccagctggtggaaaaggcaaagcattcagtcaaacgatcctgtttttttgctcaaactcaattgattcttcttgtcaatgggtggattcggtgctttgaggtcacgcagatctagcctaaataactatgcgtgtgccctttttacygtgctttctatagctccatttcctcacctgagacatgctgatggtgccaatgaaccttcataatacctgccacttccctttcacctggggaccctaagaggattaattagatattatctgtaatatactttgcactccttggagaaagattctatataaaagcaaagtattat

SEQ ID NO: 134716 - DNA, 573 bp, Homo sapiens
actggctacaagatttggtccaaactccagactcctgccaacttctctagtccatctctagcactagtccatcttcatcgcctcacactctattgtctgatgactggcatttcctgtgacgtgccaggctgtttcatgtctgtatcattgcacagagggcaagctctttcatcaatctggggagaacttctccctttctctacttgrcaaacttctacacacctttttaaaatttagttcaaccttttccctcttgagtacactcctctgagtttctaggccattccagcctttgtactttcattgtaactcataatctacctctattatggcaccatcatgcttaagcgcatcttttggttaacatatgtatctctcttgctagtttcaacttcttgaagcttttcatctttgttttcccagtgccttgtgcaaaggaggatcgaaaaaaggttaggtgaaccaagtgcaatataataacttacatcagtcaagatgggctagtttatgctgctgtgacaagtaacttaacacaataaaactttaattctgagtcatgctataatcagtcag

SEQ ID NO: 134717 - DNA, 486 bp, Homo sapiens
atgaagagtatggccgtaaacacagcaaggtttattatgcagattttggttgatgtcttctccattgattaagagtgtcttggctgagtggtggctcaagcctataatcccagcactttgggaggcccaggcaggaggatcatttaagcccaggaattcaagaccagccagggtgacatagtaagaccctatctctacaaaaagttaaaaaaaaaaaaaaaaaaaaaaaaaaaaaacataaaaataaaagtaaaaagtatgtttagagatttagtcttcctggtatgagagggaaacaccctygcaaatggagatttcctttatagacataaatttctctcacaaaagggtaacttttcagaacttcacctgtgtctgcagtttctcaagataaccagctcaaaataatcttatatcaaaaaggcatatttgggagttgtaaattctggtctttcgcagtcctgtattgaggtggcatgccctgag

SEQ ID NO: 134718 - DNA, 486 bp, Homo sapiens
atgaagagtatggccgtaaacacagcaaggtttattatgcagattttggttgatgtcttctccattgattaagagtgtcttggctgagtggtggctcaagcctataatcccagcactttgggaggcccaggcaggaggatcatttaagcccaggaattcaagaccagccagggtgacatagtaagaccctatctctacaaaaagttaaaaaaaaaaaaaaaaaaaaaaaaaaaaaacataaaaataaaagtaaaaagtatgtttagagatttagtcttcctggtatgagagggaaacacccttgcaaatgragatttcctttatagacataaatttctctcacaaaagggtaacttttcagaacttcacctgtgtctgcagtttctcaagataaccagctcaaaataatcttatatcaaaaaggcatatttgggagttgtaaattctggtctttcgcagtcctgtattgaggtggcatgccctgag

SEQ ID NO: 134719 - DNA, 486 bp, Homo sapiens
atgaagagtatggccgtaaacacagcaaggtttattatgcagattttggttgatgtcttctccattgattaagagtgtcttggctgagtggtggctcaagcctataatcccagcactttgggaggcccaggcaggaggatcatttaagcccaggaattcaagaccagccagggtgacatagtaagaccctatctctacaaaaagttaaaaaaaaaaaaaaaaaaaaaaaaaaaaaacataaaaataaaagtaaaaagtatgtttagagatttagtcttcctggtatgagagggaaacacccttgcaaatggwgatttcctttatagacataaatttctctcacaaaagggtaacttttcagaacttcacctgtgtctgcagtttctcaagataaccagctcaaaataatcttatatcaaaaaggcatatttgggagttgtaaattctggtctttcgcagtcctgtattgaggtggcatgccctgag

SEQ ID NO: 134720 - DNA, 441 bp, Homo sapiens
gcgctaagacggaagaaactttccgattgttagcagtccttttgggattccgaggctgctcctgtaattagtgtcggggcagggctgtggagtcagactgcagtttggcgtaccctcccctaggtcgtaggtggggggtcagcgagagaggccatcctgcagtggggcgacgttgcgaggaagctgaccctgaaaagtgatcccggtggttaaggkttctctccgaaaaggaagctgaaaagcatcgagtctagaaaaaatgttcgtcctagagttttagaatcttggaaaggcagagataagtgggaccgctagtttttaacctttagggatacaaggactttttagcaaacgatgcagaacaaggcatatcttgttaagaagctcacagccccgtccccaaagtcagggacccctcgtgaagaacactttatgttcagt

SEQ ID NO: 134721 - DNA, 587 bp, Homo sapiens
ttaattttggaggtacatgtttatcatttcaagggtcagaggccctgcaaccttgcactataaaaacaaagtcagacctcttattgagtctgttatattttcagggagaaactcaaggaggggagactgaggaggcagccacttcattcctcagagaaaatttcattattttattcttgcgacccccaagttaggtttgtcaggtgcttctttaagtgactttgattagtcaccaaggtaattcatgatgcaagtgctatgatttagagaatgcccacgtactctattctgcgagtttcagttgaactaattaactgtggtggtgtgtatgatggcgtggttttcagagattcagattgaaattcattctgaccccattacaagaaggaagatgaataaaatgttagattcgaatctgatcttagttctgtgaagttgcartgcatatagattcatctagttgttcatgtactgaagtctccttggcaaaagtttacctcttgtcatttttgtagtatcatttttatacaggtcattgactgaactcatgattacacaaagattaagtctcaggaaactcggagctt

SEQ ID NO: 134722 - DNA, 627 bp, Homo sapiens
attaaactcaggttttgatttcagtgtctacctcttaatccctgtggcatgcatttctttctaatctaagtatcatacaatgtatacataaattttttttttttcaaaaattcctcctataaattcaacagggtggttccaggaatgaggctctaatactagggcactaattttaatgyatcttggaagtactgaatcatttgtgtaatgaatcccagagtgagtgatcagacagatatcacaaggtttgggggcttaatgggcttcatctccaacatgtttgagaactttcccttgtacatctgtcatcctttcacagtcctgttaaaacatcgttattctgcttgtactcctacccactgcctggctggaagcttttcttgcagttcagtttttcatgctcagtgttgcttcacagaggtaggatgataaaataactgaagtcatatacaaaatccagcaacagactattaaaaatagtgcagattgcatagaactgcaagcatgttttatcttaaaaatctatctggaacatttgcttaactggaacaattttgcatattcacttccatctgcctgtgaaatattcccttagataaaactactccttgttctgaatattcaaca

SEQ ID NO: 134723 - DNA, 627 bp, Homo sapiens
attaaactcaggttttgatttcagtgtctacctcttaatccctgtggcatgcatttctttctaatctaagtatcatacaatgtatacataaattttttttttttcaaaaattcctcctataaattcaacagggtggttccaggaatgaggctctaatactagggcactaattttaatgcatcttggaagtactgaatcatttgtgtaatgaatcccagagtgagtgatcagacagatatcacaaggtttgggggcttaatgggcttcatctccaacatgtttgagaactttcccttgtacatctgtcatcctttcacagtcctgttaaaacatcgttattctgcttgtactcctacccactgcctggctggaagcttttcttgcagttcagtttttcatgctcagtgttgcttcacagaggtaggatgataaaataactgaagtcatatacaaaatccagcaacagactattaaaaatagtgcagattgcataraactgcaagcatgttttatcttaaaaatctatctggaacatttgcttaactggaacaattttgcatattcacttccatctgcctgtgaaatattcccttagataaaactactccttgttctgaatattcaaca

SEQ ID NO: 134724 - DNA, 615 bp, Homo sapiens
aagtagtttctttaagagaagaagaatgtcattgctttctaaatatgaaaaaattatatggcttggatacatttggcagtttgtatcaacacacccatctctggaaagtgcttattattgtatgaatactgtgccttatccgaggttcaatgtgtagattcaatgcgtatcagaatgttgtgtataacattactgagtgtaatctttttaaaaagagctaatagaagtactaaatatttgagtttcaaatacttatattaatgtctatgatagcaatatctgagggtgcaacttataatgagaggccaattaagcatgttaccatttttgaagggtacagacttaatatcttgccaacagagcacaattttacccttcctgtttcttccttagatattatgtggttactgatcttgatgtatttaaaaattatttttaccttgtattttcttatttagaatgtttatctttaagttacattttttttctttgtgcatagaarcatttgaaaaagaaagcagcagcagctgcttttgaattcaaatccttttgttatgatcatcaggttttctcactggttagtggatttttcttctacagaagaaaagacctcgt

SEQ ID NO: 134725 - DNA, 615 bp, Homo sapiens
aagtagtttctttaagagaagaagaatgtcattgctttctaaatatgaaaaaattatatggcttggatacatttggcagtttgtatcaacacacccatctctggaaagtgcttattattgtatgaatactgtgccttatccgaggttcaatgtgtagattcaatgcgtatcagaatgttgtgtataacattactgagtgtaatctttttaaaaagagctaatagaagtactaaatatttgagtttcaaatacttatattaatgtctatgatagcaatatctgagggtgcaacttataatgagaggccaattaagcatgttaccatttttgaagggtacagacttaatatcttgccaacagagcacaattttacccttcctgtttcttccttagatattatgtggttactgatcttgatgtatttaaaaattatttttaccttgtattttcttatttagaatgtttatctttaagttacattttttttctttgtgcatagaaacatttgaaaaagaaagcagcagcagctgcttttgaattcaaatccttttgttrtgatcatcaggttttctcactggttagtggatttttcttctacagaagaaaagacctcgt

SEQ ID NO: 134726 - DNA, 431 bp, Homo sapiens
tgccttttatgttgtcttaccatcaataataaagtttccagcaacaaagtttgtcattggcaggtctctctttattaaatggaggcacctctgtggctacagatgtccaaatttcttgaatatttatttattaattagtatttcaacatgaaatttcattccattcgttgccaagatttgacactgtaacttgtgtttgtatctgaggtttggggaggtaaaagatggtcttagccaagaagattgaaaaaaaattgtgcttgttaagaagaaagtgaatcttctttagaaaacagcaggaagatgagtgaaaaaaattaataagtattttattaactcaagggacatgyataagagctccatggggtaaatgttgaaatagtattcacgtattattttccccaactcgtgttgaggattttttttttttt

SEQ ID NO: 134727 - DNA, 543 bp, Homo sapiens
agaagatcccattattaaaaaaaacccagtagttaaagatattatgtgtaaatttattcaatattttaatatgagcacctatatattttttcctgtatttcagattaagataaactttgtccactgatatgctttctttcagtagttaatgaaagatttgcaactaggagagattaggaaaatggtggataggaggcaggactaaattgcagctcctacctggatggacagaacaacacgtagagattcacattgtgaaattttgctccaagaaccactacaggaacatacaagtgaagccaagagaatgcacagacactttgaaggaagtggattgctcctgcaggccccaggagacagcccaraaactgtgagtgcccaaagtgtgaaagtgggaaagggagattatctgcccctgaacacacaccctccctggataacctaaagatccagatcatgggagaagggtttgaccttacctggagctgagactattttagagaacccagtgaaatacaggggtagaagaagagtgggaagagc

SEQ ID NO: 134728 - DNA, 521 bp, Homo sapiens
aatattttagcacttcaaaatttatttttaaatgtatcaaactatttttgtgtattcataaacatttatttttagaaatgagctaaagaccttctatacactcctaattggtttgaccaccacaataaaagagcctkcaagtcattatttccatttgaatgtaataaaattgatattccataatatacttcaaagcattatattagacatcatatagtacataataaaaacatgcaatgttatcttttaatttcaaaacttgtatcaaaaattgtagacaatatatttatttcaatatgtttctaccaggctcttttatttacaaaatccttttaattacagcatctcatcccatcctcagaacaatctgggaactgtgtaggctgggtcttatcttcattttacagatgaatatactgagggttgtaaaggtaaaagtgaattgtccaaaatcataccacaaaaacaaaaattgagtaccagagctaaaattgattcttaggttagtgttttttatattg

SEQ ID NO: 134729 - DNA, 463 bp, Homo sapiens
ggtagctgtgctctccctggggcagctgaagtagtttgagcttatgtcattgaaatgattatcttcagtagggcaaagcwtcaaggggcttcttcaatttatcttcactgcacccagattatatagtcaagattcaaagcctaaataattacaaaatctagaaaacacatgcaaatgggtgagaatgattgagtgtaagaaacaaacaatatgacaaagtagggaccgtgggaaaggaacgaagtcatatcccaccctaaggaggtggctgctactgacttccatctgttgctatgagaaaatggggacccagtggaggagggtgtacaatgattaagagaagctggaaacttgaatatattttgtctgtgtatggaatttcccaatttaaaatattgattgaaaaacttatgaaaccctgagccaaaccacgtcatgcttacaggacaaattcagtcaaagg

SEQ ID NO: 134730 - DNA, 463 bp, Homo sapiens
ggtagctgtgctctccctggggcagctgaagtagtttgagcttatgtcattgaaatgattatcttcagtagggcaaagcatcaaggggcttcttcaatttatcttcactgcacccagattatatagtcaagattcaaagcctaaataattacaaamtctagaaaacacatgcaaatgggtgagaatgattgagtgtaagaaacaaacaatatgacaaagtagggaccgtgggaaaggaacgaagtcatatcccaccctaaggaggtggctgctactgacttccatctgttgctatgagaaaatggggacccagtggaggagggtgtacaatgattaagagaagctggaaacttgaatatattttgtctgtgtatggaatttcccaatttaaaatattgattgaaaaacttatgaaaccctgagccaaaccacgtcatgcttacaggacaaattcagtcaaagg

SEQ ID NO: 134731 - DNA, 463 bp, Homo sapiens
ggtagctgtgctctccctggggcagctgaagtagtttgagcttatgtcattgaaatgattatcttcagtagggcaaagcatcaaggggcttcttcaatttatcttcactgcacccagattatatagtcaagattcaaagcctaaataattacaaaatctagaaaacacatgcaaatgggtgagaatgattgagtgtaagaaacaaacaatatgacaaagtagggaccgtgggaaaggaacgaagtcatatcccaccctaaggaggtggcygctactgacttccatctgttgctatgagaaaatggggacccagtggaggagggtgtacaatgattaagagaagctggaaacttgaatatattttgtctgtgtatggaatttcccaatttaaaatattgattgaaaaacttatgaaaccctgagccaaaccacgtcatgcttacaggacaaattcagtcaaagg

SEQ ID NO: 134732 - DNA, 501 bp, Homo sapiens
ttgggggaaaaaaaaggtaaatatttgaaatggaggaagagatgtctaagttacatttaagttaaaaaagatccatcatgatcacaaatgctctgtagaaaacaaggagataattccgcttcgctcttcggaggagatggggaaatgaaagagagaaaaatgaagagagcatagagagagtaggtgtattagtccattttcacgtgactgataaagacatacccgagactggacaatttacaaaagaaagaggtaaaattggacttatagttccacgtggctggggaagcctcacattcatggcggacagcaaggagaagcaagtcacatcttacgtggatgatggcaggcaaagagaaaagcttgtgcaggcgacaagctctttttaaagccatcagatytcatgaaacttattcactgtcacaagaacagcatgggaaacactttccctcatgattcagtcacctcccaccaggtccctcccataacatgtgggaattc

SEQ ID NO: 134733 - DNA, 491 bp, Homo sapiens
gcaaataatagaatactagactcatggtygcttacatcaatgggagtttatttaaaatcagagctatgtagcagttggcatggattcagctgttcaacgatgccatcagggacccagacactgtctatatttccactttaccatccttgttctgttggcttttgtgctcatgcttgccacattatggtcttagggtagttgctatgggctcacacattacgtttatatttcaaggcagggagaaggaaaatgaggaaaaaggtaccaacaatggccatgttcttctttaagaattaactaacttaaagatagttagttctttcccagaaatatcctcaccaagtttctacttgcatcacgtggcctccctgaatataagggatgaaaggaaataatttagcttttatatcttctataatagatgcaggcaagggagaaggcatggtgctggatcaaccaagcctataatatctgccatatttatggaattc

SEQ ID NO: 134734 - DNA, 599 bp, Homo sapiens
ctgcttttggcttggtgcaatggctcatgcctgtaagctgggaggctgaggtaggaggatcacttgaggtcargagttagagaccagcatggccaatatggtgaaaacccatttctactaaaaaaaatacaaaaattagccaggtgttgtggcaggcacccgtaatcccagctgcttggagggctgaggcataagaatcgcttgaacccggcagatggaggctgcagtgagctgagattgcaccattgcactccagcctgggtgacagaatgagactctgtctcaaaaaaaaaaattctgcctttaacacattccaataccatttatctctgatgagggtaccaaagtataactttctgtctctttttctttctctttcccccacaacccaagcctgtgaaggtcaaacaaacaacatcaaaaccaaaactggttggcaaggtggggaatgaggataagaaaaacctggcagaaaaggagaaaaaaaggccgatttcttcaggataaagatggtgagaagaagatttatagatttgttagggtgtgcctggtggattgacacctgtgtgttggggcggagggagtaggattgggcagag

SEQ ID NO: 134735 - DNA, 599 bp, Homo sapiens
ctgcttttggcttggtgcaatggctcatgcctgtaagctgggaggctgaggtaggaggatcacttgaggtcaagagttagagaccagcatggccaatatggtgaaaacccatttctactaaaaaaaatacaaaaattagccaggtgttgtggcaggcacccgtaatcccagctgcttggagggctgaggcataagaatcgcttgaacccggcagatggaggctgcagtgagctgagattgcaccattgcactccagcctgggtgacagaatgagactctgtctcaaaaaaaaaaattctgcctttaacacattccaataccatttatctctgatgagggtaccaaagtataactttctgtctctttttctttctctttyccccacaacccaagcctgtgaaggtcaaacaaacaacatcaaaaccaaaactggttggcaaggtggggaatgaggataagaaaaacctggcagaaaaggagaaaaaaaggccgatttcttcaggataaagatggtgagaagaagatttatagatttgttagggtgtgcctggtggattgacacctgtgtgttggggcggagggagtaggattgggcagag

SEQ ID NO: 134736 - DNA, 610 bp, Homo sapiens
ttgcatgcccaggcattgccatttcattggcaggcgatgcaaccaggccatcaggaattcagaagctccccaagtgattctaatgtgcggcaaagttgagcaaccaatattctggaggaagktatatagtgccttgatgttaaacggagacattacagttactttccctgcctgaagtggcttctttttctgtggttcccacctgggctgcccaattcaatcatcttgaggcttctagaacatacttatactggcttctcccttatagattctgatccaatgatctaaatttggaccaggatatagttttaaagctccccagatgattctaaaatttaatcagagttgaaaccccctatataaggaggacacaatggaatcctacctgttttgtaagttattttgaaaactctaggtattggtggaaaggaaaggaggtttgcatagcaaagctgagtgtttccagctgcccctgacaggaagtgttgacacatatttgcagaacttctccatcagcattgagcaagtttgtgctgtttttgaagaacagccaaatagccaaatgaacacttgtaacctaggattcataagaaatacaaaaaacaaagtg

SEQ ID NO: 134737 - DNA, 557 bp, Homo sapiens
acaaaaaaatagcgaggcatggtgacgtgtgcctgtggtcccagctactcaggaggctgagttgaaaagatcacttgaacccaggagttggagactgcagtgggctctgagtgcaccaccacactccagcctgggtgacagagcragaccctgtctctgattaacgaaaaaaagaaagaaaattgaagaagaagaaatagattctagatccaaaactttcttatactgtatgtggaaaaatcaaatttgaaatgcactatcacattcataaattgtctggtgataactttccacaggcgtgaaatatctgtttatcacctacttcattggtcgtgttactttaatatcataacgatttatagaaacagtgtcattccaagtttctaacttctatttttgccctttcctatgtttctgtcattaaaagacaatgttgcttcccttccttgcatcgagtattacttttattgaaaatgtgaagatatcagacaacaacaaaatctggatttataccttttaaaagttgggaaactggttttttatcttgcagaaatacc

SEQ ID NO: 134738 - DNA, 557 bp, Homo sapiens
acaaaaaaatagcgaggcatggtgacgtgtgcctgtggtcccagctactcaggaggctgagttgaaaagatcacttgaacccaggagttggagactgcagtgggctctgagtgcaccaccacactccagcctgggtgacagagcaagaccctgtctctrattaacgaaaaaaagaaagaaaattgaagaagaagaaatagattctagatccaaaactttcttatactgtatgtggaaaaatcaaatttgaaatgcactatcacattcataaattgtctggtgataactttccacaggcgtgaaatatctgtttatcacctacttcattggtcgtgttactttaatatcataacgatttatagaaacagtgtcattccaagtttctaacttctatttttgccctttcctatgtttctgtcattaaaagacaatgttgcttcccttccttgcatcgagtattacttttattgaaaatgtgaagatatcagacaacaacaaaatctggatttataccttttaaaagttgggaaactggttttttatcttgcagaaatacc

SEQ ID NO: 134739 - DNA, 557 bp, Homo sapiens
acaaaaaaatagcgaggcatggtgacgtgtgcctgtggtcccagctactcaggaggctgagttgaaaagatcacttgaacccaggagttggagactgcagtgggctctgagtgcaccaccacactccagcctgggtgacagagcaagaccctgtctctgattaacgaaaaaaagaaagaaaattgaagaagaagaaatagattctagatccaaaactttcttatactgtatgtggaaaaatcaaatttgaaatgcactatcacattcataaattgtctggtgataactttccacaggcgtgaaatatctgtttatcacctacttcattggtcgtgttactttaatatcataacgatttatagaaacagtgtcattccaagtttctaacttctatttttgccctttcctatgtttctgtcattaaaagacaatgttgcttcccttccttgcatcgagtattamttttattgaaaatgtgaagatatcagacaacaacaaaatctggatttataccttttaaaagttgggaaactggttttttatcttgcagaaatacc

SEQ ID NO: 134740 - DNA, 626 bp, Homo sapiens
ctaacccaccaccactcccagctccagaccctgttaatcaccgttttactttctacttctataagatcaagtgttttagatttcacatatatgtgatctcttgcagcacacgtctttgtgtgcctggcttctttcactaaacataatgtcctaaaggtacctacatgttgttgtaaatgacagaatttccctctttttaaaaggccagatagtattctattgtgtatatgtaccacattttatttatccattcatctgtcaattgactccgtagtctagccattgtgaataaygctgcaatgaacatgagtgtgcaggtatctctcttcaatttattttttttcctttggatatatttattttcctttggatatatacccagaagtaagatttgctggatcacatggaatttctatttttaatttttggaggaactttatgcagttttctgtaatggctgtgttgtttttgttttttttttttttggtttttggagacagagtcttgctctgttgcccaggatgaagtgcagtggagtgatctcagctcactgcacctctgcataatggctgtaatttatatttccaccaaaagtgtactagggtcctccttttttccacatatct

SEQ ID NO: 134741 - DNA, 626 bp, Homo sapiens
ctaacccaccaccactcccagctccagaccctgttaatcaccgttttactttctacttctataagatcaagtgttttagatttcacatatatgtgatctcttgcagcacacgtctttgtgtgcctggcttctttcactaaacataatgtcctaaaggtacctacatgttgttgtaaatgacagaatttccctctttttaaaaggccagatagtattctattgtgtatatgtaccacattttatttatccattcatctgtcaattgactccgtagtctagccattgtgaataatgctgcaatgaacatgagtgtgcaggtatctctcttcaatttattttttttcctttggatatatttattttcctttggatatatacccagaagtaagatttgctggatcacatggaatttctatttttaatttttgraggaactttatgcagttttctgtaatggctgtgttgtttttgttttttttttttttggtttttggagacagagtcttgctctgttgcccaggatgaagtgcagtggagtgatctcagctcactgcacctctgcataatggctgtaatttatatttccaccaaaagtgtactagggtcctccttttttccacatatct

SEQ ID NO: 134742 - DNA, 539 bp, Homo sapiens
ctggagcatgtttgtgactaggctttaaaccaggtaattgaaggcataaacaaaaaaactctaaccagatgtatttatgtccatgtgacccaatggagcatgagtataattaaaatagacccactgtatttgaccacatgaactaggccagtcttctcattgcctgagttgttaacacagatgacaggcattcacggatgtaatgctaattgttttaatgaggtaggagtgggaaagtagttcataccataaattttggaggctgacagtcttgaagtggaaaagtggtgaatgccatgggttttggagtctgacagtcctggattcaaatcacagcttcactatgaactatcagtatgacgtgaaaagtatttaaactctctgagctatagcttgaccatctgtgaaatamgaaaaatagtaagtccttcacatcccgggtaaatgttaccatccacatccagcatcccagtggttggaacatagtgaacattcaaaaaatgttttctattattattattattgacatcattaatgtt

SEQ ID NO: 134743 - DNA, 597 bp, Homo sapiens
ggcagtcttcacagacatagaaaaaactgtcctaaaatttatgtggaaccacaaaagacccagaaaagccaaagcaatcctgagtaaaagaaaaaaamaaaacaaaactggaggaatcacattacctgactttaaattatgtttcagagctatagtaataaaaacagtaaggcactggcataaaaacagacagatagagcaatggaacagaatagacaacccagaaacaaattcttacatctacactcaactcattttttgacaaaggggccaagaacatacattgatgaaaggagagccttttccataaatggtgctgggaaagctggatatccatatgcagaagaatggaactagacctctatcttacacaatatacaacaatcaaataaaaatggattaaatacttaaatctgagacttcaaactttgaaactactaacagaaaatgttgagaaaattccccaggacattagaataggcaaagatttcttgtggaatataccacaaacacaggcaaccaaagcaaaaatggacaaaaggaatcatatcaaattaaaatatttctgcacagcaaagaaaacagtcaaccaggtga

SEQ ID NO: 134744 - DNA, 406 bp, Homo sapiens
atgtatgcatgcacgtgtgtatgtacatatggaaggtgtgtgtctccatttgactggagctctccaagggccaggtcttattcatatctaaatttgaaatacgcaacacaattcctagtatgcagcaggacaggtgtgcttwttaaattattgcagaataaacagatgatggataaaagaatgattagactaagggtctgcttgcaggtctcatatgaccttggaaaaaatcaggtaatttctcactgcttaagtttgttctttcattaaaaatacaaattattttaaagacttataataatacatgttctatgaaacagatgctcctgtgaacaacaaactaggatacacttgtaaacccttccacttgctgtgaagtaccatgcctgtgtgtgagaattaaaaa

SEQ ID NO: 134745 - DNA, 428 bp, Homo sapiens
ataatcaatatcgtcacaagaaatattgccttacatatgtcctttttatggaacattctcttctaccttgtttttctagcaatttctgctcatctatcatgattcaacttaaatactaggttttccatgaaatgtcttctaayctttagacgtttatcagtttcttgtctttgctgtcatcctagaatatgggatgtttcatatttcacagtaattataaattcacatgtctgtttcctcccaattagactcactttgtgggaagagacatgatctcttccccagtacttgtaacaatgcatggcacatagtaggtccttagtcatttgtatacatgataataagagcatctatgtgtacaaaatttagtagaaagtcaacatccagcagtttaatagcattattcataatcaatcccaaaacaagtg

SEQ ID NO: 134746 - DNA, 570 bp, Homo sapiens
tcacctgtaaaccggatataawtgtgtccctaactcagagggttattttgaagatgaagttaaatactgcttgcacaatgcctagcatatagctagtgcccagcataaactactatgttttctttctaaacagctttgctttcttagatgtcatagggcagcagttcccaatctttttggcagcagggaccaatcggtttcctggaagacaatttttccacctaggcgacagtggagggatggttttggaatgaaactgttccacttcagagatcatcaatcatcaggcattctcataaggagcatgcaacctggatccctcacatacgcagctcacaatcgggtccgcacttttatgagactctaatgccacagctgatccaacagaaggtagagctcaggcagtaatgctcactcacctcttgctgtgcatcccagttcctaacaggacacacactggtacaggtctgtggcccgggggttgggagcccctctcatagggtagaattattccatatagataaaacttttaaagtgcacagtttatatagcaatagatatgggagaaat

SEQ ID NO: 134747 - DNA, 661 bp, Homo sapiens
gacagttttgtgctggagtgaaggataaacacaggggaaaggcacattttcaaagcagcaatctcttgactagccatatcctgctttttactcacttaaacctctaaatccacagctgcaagcaaccaaaggccacaagtcccaaagaagcaatctaatcaaagaaaacattgaatcaaactggcttctctcccttctcctcaactggcatgaaaaatgctaaaggtggtaataataataatatatttaacatttctcatgttttttgtttctaaaacatatggtttcttgctacatgtagagaattgctaagacattcatttcagctttcagytcttgcaaattaaacatacgttgtgtaaaaactactttaaatgaatgatttttgaaatgaagttttaaaaagtactctttgagagatgaactcccttttttccatatatgtatctggatttctttatgtcttttttgagtagcatcccctcacaagagtagcatcccgaaggaaacttcatagcattaaccatcatggtaatagattaattactaatacaagtatttgtttaaggtctaacttattaactagagggtgagatctctaacagcaggggtcctgcctgttcaccacttcatcatcaaaatctagaaaggagctaggcac

SEQ ID NO: 134748 - DNA, 661 bp, Homo sapiens
gacagttttgtgctggagtgaaggataaacacaggggaaaggcacattttcaaagcagcaatctcttgactagccatatcctgctttttactcacttaaacctctaaatccacagctgcaagcaaccaaaggccacaagtcccaaagaagcaatctaatcaaagaaaacattgaatcaaactggcttctctcccttctcctcaactggcatgaaaaatgctaaaggtggtaataataataatatatttaacatttctcatgttttttgtttctaaaacatatggtttcttgctacatgtagagaattgctaagacattcatttcagctttcagctcttgcaaattaaacatacgttgtgtaaaaactactttaaatgaatgatttttgaaatgaagttttaaaaagtactctttgagagatgaactcccttttttccatatatgtatctggatttctttatgtcttttttgagtagcatcccctcacaagagtagcatcccgaaggaaacttcatagcattaaccatcatggtaatagattaattactaatacaagtatttgtttaaggtctaacttattaactagagggtgagatctctaacakcaggggtcctgcctgttcaccacttcatcatcaaaatctagaaaggagctaggcac

SEQ ID NO: 134749 - DNA, 578 bp, Homo sapiens
agatttcaaaatttctgtgggagtgttgatggccgtggccatttcccactcctgaatactaattttgcatgttcccaaactgcaattctttggagtctcttgagtcatcttttagttggtaatattgttgttgcttcctttgctaagtataatctactaaacaatcttggagttctgattacagaccactgcagtatcttttaagtaactctgggaaacatgaagcctaatgttttggttcgttagtattggttagtattcattagtattggttcgttggtattggttagtattcattagtattggttcrttggtatttggttcagcagtattggttaatatgatttcaagtatggaggagagcaccgcccaacaagaatgctgtgtgtgccacacctcccttaccatttgaactaagtgcaacctttcattgtttctttttgcgagtgggtgggggggggcactgagggtgggagggcaactcctatgtaccagacatggaatcaggtgctggagattcagtgataaaccaggaaagatgaatgaaacccaaaaaccaaactagaaaggttagcaaa

SEQ ID NO: 134750 - DNA, 578 bp, Homo sapiens
agatttcaaaatttctgtgggagtgttgatggccgtggccatttcccactcctgaatactaattttgcatgttcccaaactgcaattctttggagtctcttgagtcatcttttagttggtaatattgttgttgcttcctttgctaagtataatctactaaacaatcttggagttctgattacagaccactgcagtatcttttaagtaactctgggaaacatgaagcctaatgttttggttcgttagtattggttagtattcattagtattggttcgttggtattggttagtattcattagtattggttcgttrgtatttggttcagcagtattggttaatatgatttcaagtatggaggagagcaccgcccaacaagaatgctgtgtgtgccacacctcccttaccatttgaactaagtgcaacctttcattgtttctttttgcgagtgggtgggggggggcactgagggtgggagggcaactcctatgtaccagacatggaatcaggtgctggagattcagtgataaaccaggaaagatgaatgaaacccaaaaaccaaactagaaaggttagcaaa

SEQ ID NO: 134751 - DNA, 527 bp, Homo sapiens
tttttgtcttggaaaatggtgaaaacacattcttccccgtatattcttatatcgaaagctatgtgggcttctcaggagcctttgtttgtccccaggtgtgcacagactactcagatttttatcactggcattggcttttttycctgatacccaacacagcatcctaatatacaatgttctaaaataaaatggatatattttttaaaaattcttatcttctactcaaggaattctctcttacatattacatatgctctctaggatatactatgtgaataacaatataatctcatttgcttactattcccagtttgacatagttaaatacaaatgtttgacctgatcctaaatcacttgcattattatcttagtgtgctccaattctcatttcatatcaaaactttctcaggtgaaacaatactggttttttttttctacaaacttttcttgactctttaaactcttaggatttagttcgtgttattttttaaatgcatttaagaaacaatgaaaatgacaaatgtttc

SEQ ID NO: 134752 - DNA, 540 bp, Homo sapiens
tggctatagttcagcaagaaatgaatctttttaacagatatggcatgatgactttgatgaattgaacttttaaatatatggagcattagaaaagatatgcccttagaaatgaattaatttagatacaacagcatactgtataccataattcattgtctccacgttcatcactgcaragtggttctgtccatgtgacaaggtccctcttcaaattcctatttgggcttcacttgaattcattaacttaaaaaatgatgacctagcttggacccaatctctaagttttctattaactcttaacaattctataaatttagtgttttatgcactctgaaactttacatggtttgaagataaaaatttcaggaaaatatccttctgaaagattctttttatctacttagcagaaaagtttcagctacaagacaattccaacaagacaagtcaatatcttggtcaatttctatatatgcatcactttgaaagttgtttaaaataaattaaaatcttataaatgccaaatattaaaatttaatactc

SEQ ID NO: 134753 - DNA, 520 bp, Homo sapiens
catctagtgttacttaagaaaactratgattcggaatttttgttcatcctgctttaatatcatcaataaagaaaaggtttgctaagaaaattggtagttgagttttatatttctaagaaatatttcttttcagtatatgaataattaaagtactaattaataatttaaaagtactaagtccaaatgatttacagtttcttttcagtcaggtccatcataattttctgaaaatgtttagttagcagttagttaaatgtatatattagtaatggaaaataatccttacaaatatttatatttcattaaatgtgaatatattggaatttcaccgatcaacaaccacctgaataaaatcacaacctttttaataagacagtgtttaggtagtaattataggcctgatttttctacaagggcaagttcattattgtcattcaataaatagttagcctttatgatgatcccattttaaaagcagagaaaaaaacttgtttttttttttttggtaagttaccggtaa

SEQ ID NO: 134754 - DNA, 520 bp, Homo sapiens
catctagtgttacttaagaaaactgatgattsggaatttttgttcatcctgctttaatatcatcaataaagaaaaggtttgctaagaaaattggtagttgagttttatatttctaagaaatatttcttttcagtatatgaataattaaagtactaattaataatttaaaagtactaagtccaaatgatttacagtttcttttcagtcaggtccatcataattttctgaaaatgtttagttagcagttagttaaatgtatatattagtaatggaaaataatccttacaaatatttatatttcattaaatgtgaatatattggaatttcaccgatcaacaaccacctgaataaaatcacaacctttttaataagacagtgtttaggtagtaattataggcctgatttttctacaagggcaagttcattattgtcattcaataaatagttagcctttatgatgatcccattttaaaagcagagaaaaaaacttgtttttttttttttggtaagttaccggtaa

SEQ ID NO: 134755 - DNA, 520 bp, Homo sapiens
catctagtgttacttaagaaaactgatgattcggaatttttgttcatcctgctttaatatcatcaataaagaaarggtttgctaagaaaattggtagttgagttttatatttctaagaaatatttcttttcagtatatgaataattaaagtactaattaataatttaaaagtactaagtccaaatgatttacagtttcttttcagtcaggtccatcataattttctgaaaatgtttagttagcagttagttaaatgtatatattagtaatggaaaataatccttacaaatatttatatttcattaaatgtgaatatattggaatttcaccgatcaacaaccacctgaataaaatcacaacctttttaataagacagtgtttaggtagtaattataggcctgatttttctacaagggcaagttcattattgtcattcaataaatagttagcctttatgatgatcccattttaaaagcagagaaaaaaacttgtttttttttttttggtaagttaccggtaa

SEQ ID NO: 134756 - DNA, 626 bp, Homo sapiens
tcctatgattgaacttatatttcaagtggcatgtaaaaataattcaccctaaccatgtggaaggagaaacttaggaatattcaaagattaaaaaaaatgttaggaaataccagagggaaattataatggaaagtactttgactgaccgttgtctcacctacaacaatggtgccagaaaggcccagccctgatttgtacatgtcttagaggcctctaattattacttatttattgggaagtagcttatttgccattttctccctgaagaatgtgtctttcaacagtggatttcatcaaataaaaacaatagattgcacaaatgtttaagaaataacttgaataaatttttacttaacagacagaagattatgaaaaaaatgattaaagaagcactcacatcttttgaagaaatcaaaaaccaaaatatgaatatttctgaacatatctggattaaatattcaatcagaaggtttaaagaaatgaatcaaatgctgtggaaaatctgcttgycatactgagaattgaagaacaggatgcaagcaaactcaaacagcacttggcaagacagacatctattgaatatggtagggttttacaaagcatgtcataatatttgacagagaaga

SEQ ID NO: 134757 - DNA, 550 bp, Homo sapiens
taaaaagacacttgcaatcgcctagcctccccaactgagtttcattgcctccttcagaataaacacagttatttccttacagttaaatctcagattcatactgacaggcaaattccctagaatacaaaaacatcatgagtagatttctatgaataaaatgtttccccatatgatttcataataattctagcactttactgctgctatatctatcacacagcaagtaagcattttccaatgaaactacagacgggccaatccaagacatgattttaacttctgaggttgagtttcttttctatgttgcataggaactaacacagaatttttaaaattatcaaaagccttgatatacrcacactcttttgcccttaagtaataaagaaaacatacaccaaaattttattggctttccatctggcatctttcgtactaatgaagatgggaagcttcaaagcatgctgaagtttggacgagtgtcagaggcctaactacaagtgccaatcaacttaaaggacttatgaaaggtccttgatcaagtagaccaaga

SEQ ID NO: 134758 - DNA, 435 bp, Homo sapiens
aattagctgggcttggtagcaygtgcctgtaatctcagctactcaggaggctgaggcaggagaatcgcttgaacccagaaggcagaagttgcagtaagccaagatcacaccactgcactccagcctgggcaacagagcaagactccaactcaaaaaaaaaaaaaaagtggataaaagagggtaaggaaggataaaaaaatgaggtacagccccagtgcagtggttcacatctgcaatcccagcaccttgggaagcagaggcaggaggatcactgcaacccagttcaagaccagcctgggcaaaacagtgggaccttgtctctaataataataatacagcataaacacagctagccacatgcactgcagcttaccatgagactacattcaccggaatttttgtttgaaataagactggataagtaagccccgtcca

SEQ ID NO: 134759 - DNA, 344 bp, Homo sapiens
catattcatgatctttaatcatatttggttaagtaratgtttcattttagaataattacaaaatccatgatcctgattttactgttgaacattttggttgcccacacattttggctactatttctttttttattatactttaagttctagggtacatgtgcacaacgtgcaggtttgttacatatgtatacatgtgccatgttggtgtgctgcacccattaactcgtcatttacattaggtataactcctaatgctatccctcccccctccccccaccccacaacaggcccggtgtgtgatgttccccttcctatgtccaagtgttctcattgttcaattccca

SEQ ID NO: 134760 - DNA, 401 bp, Homo sapiens
gttctactgtaaaaattgacaagttcttttccaacaactcctctatttttctcacctaaataacccaacatataggattaattttaaaatacataattcactaattaccttaagaacaatgatgagcagtgatattttttatgtaattatcaaaagatgttgaacccggggttctaatgagtattacatgggagccctctgttttttatgttatttagatatatcagacttaaacggcttcctatttattactattctttcacaattgtacataattagattttgmcacctaaattttatgaaaattttctagatatattccttcctttccaccctcagtgaaactgttctattttcagctatctcccacttcagttgttgcaatcaactctcttaaatta

SEQ ID NO: 134761 - DNA, 578 bp, Homo sapiens
ttgggggcgggttcccccgatatttcacgatccatgatatcaaccatcttaaaggataagatgtgaatcagtgaggcagtgraatcatcagcattggttaaatccattatcatcacaaagagaagaggtgggctgcttgataacatggaaaaattacttgtcatgtggatggaaaaccagatacagagatgcataccgcttagcctactgatgacttaggctagggtaagaagtgtgttctataagttcaaagagtacaccaatgatcctacatatatacaaatgtttatagcaagacatggccagttccaacacttgaaaatgcatcataattttcataatatgaaggtctgtggtgaggcagcaagtcctgatattgaaggtaacaaagcttttgggaagagccacatagggtaagtgtggatgagaagtatttaccagcacaaatatttaaagtcaatgaaatgagcttattctgaaagtatacaccagagcatacatacattcaccacgagtccaatgccagggtctacggcattcaaaggctgtgtaacactgctttcgggtgttacaggaaa

SEQ ID NO: 134762 - DNA, 461 bp, Homo sapiens
atatattttctgggttttctttgtgcagttgggttaatggaacattttcccttataaatatttctaacaaaattgccctgttgaggcaccaaagaggaacaagatcatgaattgtttggagttaccccttatggttgtattgacaaatcttaagaggaagaactgatttgggtcagtattatttgattyttttttgtttgtgtccaccttgatataaaaataaattgaaagttaatttatctgagtgcaataaatatagaatttaatgagatcgtccaaaagttaaaaaataaaaaagacaacataaatagaatcctatatggtagattatatttccttttatgggaaagagttgaatgcatctgaattttttttcttatagtgttttaaactattgggtaatataagaggtcacattttgctttttattagaattaaaaatggtttgacagtgccagaaa

SEQ ID NO: 134763 - DNA, 461 bp, Homo sapiens
atatattttctgggttttctttgtgcagttgggttaatggaacattttcccttataaatatttctaacaaaattgccctgttgaggcaccaaagaggaacaagatcatgaattgtttggagttaccccttatggttgtattgacaaatcttaagaggaagaactgatttgggtcagtattatttgatttttttttstttgtgtccaccttgatataaaaataaattgaaagttaatttatctgagtgcaataaatatagaatttaatgagatcgtccaaaagttaaaaaataaaaaagacaacataaatagaatcctatatggtagattatatttccttttatgggaaagagttgaatgcatctgaattttttttcttatagtgttttaaactattgggtaatataagaggtcacattttgctttttattagaattaaaaatggtttgacagtgccagaaa

SEQ ID NO: 134764 - DNA, 595 bp, Homo sapiens
aataatgtctttttgtattcacttcatctcagattataaaaataatatctctagctttactgattttgtaatactcttccccaaacatctttcattattatgcactcttagtatattgtgacttcttcccatccactaatggttagtattaagagtagaggcagagattgtgagcataacttataatacatacatatcaaatgtaataatrcaatcaaaacatgcacgtagaaatgagtgtgtagataaacacattttgggctgagtactgtaaaattctgtaagagtaatcaccgactaataaaaaataacatctctcttataaagaaaaaaaggaaagtatagaaaattataaagaaacaaaatatgctatccataattcaactatccaaacaaatcacacaattagaaaatttattcctggtcttttcatgtatgtttttactatatttgagatcattcaataaaagtaattctataccatttttcttcatccaacatatgttaatgtagctatttcaataactgctttttggcaataatattgttagtatcattggattttttggaatttatatagttaagtgatacctat

SEQ ID NO: 134765 - DNA, 615 bp, Homo sapiens
ggggaatggtgctaaaccatgcatgaaaaatacgaccctgtgatccagtcacctcccaccaggccccaccaccaacacttgggatgacaattcaacttgatttttggtggggacacagatccaaaccatatcagagatctttggtggaagagcatggagtagaataaattactaggttatagttatatacttgaaattataaaattgagaatcataggatatctaaatttcacatatttatataagatacttcttagtaagggttttattttagaacagtttagatttatgaaattattgtgaagatagcccagacaattcccatataccctacactcagttttctcttagtattaacatcttacattagtttggtacatttgctatacttaatgaccaattattgttacattaaattaattaaagttttagtcctatttagatttccttagtttgaacttaatgtcattattctattccmggatcccatccaggataccacattacattttgtattcatgtctccttaagtgcctcttggctttgacaattttttagacattacttgcttttgaagcctttaagagttttaataagtatagggttaggtttttg

SEQ ID NO: 134766 - DNA, 475 bp, Homo sapiens
aaatttaactctgatttaaggaataaaggtataaataattattgtactcccaagttggtgatctgacatatatatcagctacaggtgtagaaaaccagtttctactccagatgcacttgctaaactagttggaaaggcaagatttacatggcaaatgataggatcgagatattatggtttggtatctaaagatgaaatgctacawctaagtctgagtagacctgcttttgtaataaaattaggtataaaattatgtattcaatgttttaacatgttctttataaccattcatggctcagtggttcttatactttccatttatgaacaaaaccagagtaccccttgcctgagtcattccattgctctctcaccattgaaatatacttgtcgcctattctctcccaactttattcttcagagatgacagatacataatttgataaaaatcattctgaagcattatttgcatttcagc

SEQ ID NO: 134767 - DNA, 490 bp, Homo sapiens
cttctctgtgtgctttatacaagtttacaccatatttccccaagatctcttacaagcaaaccaaattcaccttacaaaaaataaacctatgccctctcctctgcctccaccccccgcaaatctgctccagctccagtgcttctgatttcaaacactgcagccaaaaagtcaaagccaaaaaggagagaaacatctttgacatgctgtcttcctcattcctgcattcaatcacctaggtcctgacaaattcaactcctaaatatctctcaaagktggtgtcctatcccactcttaggctatcatcgtttcctgtgtaagtcatagcaacagctttccaactgatctccccaagaagaaaacttttcttgcccttcaaaactctctccatatctcagcccatagaatactatcttgtcccaaggaaaagcaactgtgcaattgtgtatgttgcaaactaaactggccaccctttcatggaataccatttttg

SEQ ID NO: 134768 - DNA, 490 bp, Homo sapiens
cttctctgtgtgctttatacaagtttacaccatatttccccaagatctcttacaagcaaaccaaattcaccttacaaaaaataaacctatgccctctcctctgcctccaccccccgcaaatctgctccagctccagtgcttctgatttcaaacactgcagccaaaaagtcaaagccaaaaaggagagaaacatctttgacatgctgtcttcctcattcctgcattcaatcacctaggtcctgacaaattcaactcctaaatatctctcaaaggtgktgtcctatcccactcttaggctatcatcgtttcctgtgtaagtcatagcaacagctttccaactgatctccccaagaagaaaacttttcttgcccttcaaaactctctccatatctcagcccatagaatactatcttgtcccaaggaaaagcaactgtgcaattgtgtatgttgcaaactaaactggccaccctttcatggaataccatttttg

SEQ ID NO: 134769 - DNA, 490 bp, Homo sapiens
cttctctgtgtgctttatacaagtttacaccatatttccccaagatctcttacaagcaaaccaaattcaccttacaaaaaataaacctatgccctctcctctgcctccaccccccgcaaatctgctccagctccagtgcttctgatttcaaacactgcagccaaaaagtcaaagccaaaaaggagagaaacatctttgacatgctgtcttcctcattcctgcattcaatcacctaggtcctgacaaattcaactcctaaatatctctcaaaggtggtgtcctatcccactcttaggctatcatcgtttcctgtgtaagtcatagcaacagctttccaactgatctccccaagaagaaaacttttcytgcccttcaaaactctctccatatctcagcccatagaatactatcttgtcccaaggaaaagcaactgtgcaattgtgtatgttgcaaactaaactggccaccctttcatggaataccatttttg

SEQ ID NO: 134770 - DNA, 460 bp, Homo sapiens
gtctcttcttttcactgactcccaaatatttgcctttcaaattttatctttatgctgagcttctgagttatacttttagttttgtattgagtacttaaaactttttttctcataccacattttaaaacataaactcaatctctctctaacacatacacatcctcttctaccctctgcctgaaattagggacttatcatgcatccattacagggtcaattaccgaccatacaaatcataccacaaataattcaaaatcattattttaaatctctcttgaattaactctctcatcttcattyccactacttttatttaggtgcctcttcatttctcacaattattacaacaggtttcctatgggtttaactccctgaaatagtatcgcctcatgacaactccagctgactttttaggctaatgattcagtctggcactcccttgttttaaatattcctggcc

SEQ ID NO: 134771 - DNA, 647 bp, Homo sapiens
tcattgttactatcaaactttcgctttccatcatcaattaaaattgtgattttaaaaaatactacaactcaacaattaagaggtagataacccaatttaaaaattagcaaagtttttacgtatacattttcttccaggaagttatgcaaatgattaatgagcacagaaaaatacgctcaacatcattattcattagtggaatgttaataaaaattacaatgagatactatttcacacactaaaatgacaataataaaaatgatagagggtagcaaatgttggcaagaatattgagaaaatcgaacagtcattaattgctgttgaggaaaggaaatgagatcaccatcatgaaaaataatttttcagtttttcccaatgttaactgtagagttatcatatgactcagcaatttaactcttaattatatagcaacaagaagtaaaacttatgtccacacaaaaagatgtacattcatattcacagcagtattattcacagtagtcaaaaagtagaaagaaaacaaataaccatggaatgatgaataggtaaraaaaagtgtttcatctattcaacataatattgttcagcaataaaaaggattgaggtactgatgcattataccatttagatgaaccttaaaacaatta

SEQ ID NO: 134772 - DNA, 550 bp, Homo sapiens
aaggtaacagaagccagataggaaagaatacatactgttttattcaatttatatcaaatattcagaaaaggaactgatttatggtggaaaaatcaaaagtggttaagtttgtagagacaggaattcttttggaggtaagtgaaatttccacatgatgaggacrtgggttgtacaaaatgtatacaattgccaaattctatcatactgtgcacttgattttcactgtatataaattatacttcaatgaaacatatgaaaacatacaagctcagagattctataaaatactcatcacgaaaattgcactacaatgagatttgtagaaaagatgaagataacaatttaaatttccaaagctgaaaattttcatagctgaaaaagatatgtcttgagattaaaaagttccactgatactgactagaattagtgaaaacaaacccacatgtatatacaccagggcaaaattaaaaatctcttaaagagacagatttttaaatggtctcaaacctgagacctgctatgccttatccattgttacagtacttaggat

SEQ ID NO: 134773 - DNA, 569 bp, Homo sapiens
tgaattcaacccagccaaacaaaaacatgctactttgttaactgataggtgttcctaaattcaaagttatgaatggtgacaaacttgcagataatgaaattctagtggaaaaaatgaggataaatctacaaaatagrcagagataaaagtcttaaatgtgcttagcaattaggctactgcataagaaacatatttggatatcgaccaccattaaccagaagtcaatgacattgtgatgtgtttaggcaaatgagttttaaaattaaaaaaaaaaattatcctgtagaatactcatttaaggcagttcctgtggaaatcaaagtgtgtcaaagatatacatgccatcaatatccagttgctagctcagaggagaattggaatgctgatgaaagtactttattcagatcagtacaattggttaacttgtttgatgaaatgacaaacattggtttgctgaatccatgcagagagagagtgaatgataacacattattttgcacttgatgaaaccactaatgtagtgagggactgaacttaatatttacagggagggaggaaggatactgcta

SEQ ID NO: 134774 - DNA, 218 bp, Homo sapiens
gtgtgtaaatgcttccaaaatcagtggtaagaacttttaccatcagcatacttctaaggcacttttccttaagttgccactaatatatagaaatgaagcttaattttcagcttttactagatagaagcaaaaatttgaataacagcctgcaggccagtgcctgccttttgtatcytcttatcattttcttttacatctcttccttacaatagcatcat

SEQ ID NO: 134775 - DNA, 438 bp, Homo sapiens
  misc_feature (1)...(438): n = A,T,C or G
tgccctgtacatattttagggcctttgcattgcttttycctctgcctgggatggtttgtctnctnccttcacctcacatccacatgggtcattcttgtagctctttctttccttttctcaaatgttttcatctcaaagtctcccctgaccacgttacttgaattaatactcacccctgtctactttttccttacatcttctttggttttattttcctttatagaaagtttcatgttctaatataccatattatatacacattgattttatgtgttgtatatttcccaagtagattcaaatttccacaaagacacatacttttgtctgtttttttccatgctatatctgaattctaaacaatgttgggcttatattaggtacacaatatgatgtgttcaaagaattgaattttttcctcactcatttcttttaccaaca

SEQ ID NO: 134776 - DNA, 438 bp, Homo sapiens
  misc_feature (1)...(438): n = A,T,C or G
tgccctgtacatattttagggcctttgcattgctttttcctctgcctgggatggtttgtctnctnccttcacctcacatccacatgggtcattcttgtagctctttctttccttttctcaaatgttttcatctcaaagtctcccctgaccacgttacttgaattaatactcacccctgtctactttttccttacatcttctttkgttttattttcctttatagaaagtttcatgttctaatataccatattatatacacattgattttatgtgttgtatatttcccaagtagattcaaatttccacaaagacacatacttttgtctgtttttttccatgctatatctgaattctaaacaatgttgggcttatattaggtacacaatatgatgtgttcaaagaattgaattttttcctcactcatttcttttaccaaca

SEQ ID NO: 134777 - DNA, 408 bp, Homo sapiens
attaggtacacaatatgatgtgttcaaagaattgaattttttcctcactcatttcttttaccaacatagaagtagtacattawtttttttttccttaagtctaacatagctatattcatgtgtaggtaatttatgattaaacattatttttatcaccctcctttaagaaccacttttcttgtcacccactcttgaatagtataaagttgacttcagtattttactttcaatacaatttcaatctgaaaaaccagaatattaacattcttttatataatcaatgtttccttagttttacacatatattgccacatcgttgctcatatcttattgttcctgaagcattcatttactttttttttgctgaagaatttttctgatatttttaatttttatagtgcagagaat

SEQ ID NO: 134778 - DNA, 377 bp, Homo sapiens
gaattctaaacaatgttgggcttatattaggtacacaatatgatgtgttcaaagaattgaattttttcctcactcatttcttttaccaacatagaagtagtacattattttttttttccttaagtctaacatagctatattcatgtgtaggtaatttatgattaaacattatttttatcaccctcctttaagaaccacttttcttgtcacccactcttgaatagtataaagttracttcagtattttactttcaatacaatttcaatctgaaaaaccagaatattaacattcttttatataatcaatgtttccttagttttacacatatattgccacatcgttgctcatatcttattgttcctgaagcattcattta

SEQ ID NO: 134779 - DNA, 614 bp, Homo sapiens
agaaggtttacacaatagaatgtttgactatagtagatggtataatgcatggagaccaacaatgaaaaccaggtaaaaagacctgctatgagactgttagcataatcctgtgatcattgttttcccaggaagaaagaaaatgaagatatttgaaagcagtttattaaaataattggtaaaagtaagaaaaaatgtgaaatttctgttttgagcaactggatatttaaaaatagaaacatagaaaaagaaaatttttgaggaagcaaaagagtttagtttcgtcatgtcaaacagtttacaacagagagtgtaactagtgtattctcagggagtagtagctgaggaaagaagaaaggtttccaaaaggaggagtcacagttaaaataatttatcaaggttttgcttgcatccctctggataatgcctcatttggccaaaggtagttatggaagtaaaccagtgttaatacacggggcactactcaaggtatgaataccakgatgtctggaacattggaagccgctgacatgtcagcctaccacaaaaagcatgaaagaaaatacagatccctgctatagaatttattgttgaaagcttctgaggctgtagttgtc

SEQ ID NO: 134780 - DNA, 614 bp, Homo sapiens
agaaggtttacacaatagaatgtttgactatagtagatggtataatgcatggagaccaacaatgaaaaccaggtaaaaagacctgctatgagactgttagcataatcctgtgatcattgttttcccaggaagaaagaaaatgaagatatttgaaagcagtttattaaaataattggtaaaagtaagaaaaaatgtgaaatttctgttttgagcaactggatatttaaaaatagaaacatagaaaaagaaaatttttgaggaagcaaaagagtttagtttcgtcatgtcaaacagtttacaacagagagtgtaactagtgtattctcagggagtagtagctgaggaaagaagaaaggtttccaaaaggaggagtcacagttaaaataatttatcaaggttttgcttgcatccctctggataatgcctcatttggccaaaggtagttatggaagtaaaccagtgttaatacacggggcactactcaaggtatgaataccatgakgtctggaacattggaagccgctgacatgtcagcctaccacaaaaagcatgaaagaaaatacagatccctgctatagaatttattgttgaaagcttctgaggctgtagttgtc

SEQ ID NO: 134781 - DNA, 535 bp, Homo sapiens
cacatattatattatattaatttcatyctataaatcttttagtcattgtgttttataatctctgacctattacaaatcattgctatatttaatatactgctctgattctagtgattgataaataagaacagtggtgaatttatcctctcacacaagaggaaaatgtaactctaagcaaaaatgaatttccaaaatgctgagtaaattgttcaatattttgtccttttgtttttgtttcttcatttctaaaatttctttagagattatatcctcttgtgcacctcagatatccttgaaaataaaattgttcttaatttcttgcctccatcccttaattattctaaaggagttgaattacctgttgcatatatcattaagagtcctaacctcattgcaaataaaggaaaaaaatgcaaagtgagtttctttttcagtacccatgactctcattaaagaacagtctgctttcaaagagtataaaattcttaacaattagagtctgacttttccacctggagctgctggcaaaggttag

SEQ ID NO: 134782 - DNA, 558 bp, Homo sapiens
tatgtctttatagcagtgtgaaaatggactaatactggcagcttgctgtgtctattttattatactggaaggaaggttgaggccattgttcacaaagtatagtgaagaggctaaaamcagataaccttcatatttttttttaagacctggaactgagaagggctaaaactttagttcttattagttataacaattcatatttaactattagcctttcagaaattctaacttctattctttattgtgtgtgtggtggtggggttggtggctgtttgtcagtacacacacacacacacaaacattccactttttcaagcttcagtatctaggtactcaaccagtactgtcataattgggttgtgtgtagcaatactagggaatgatagaaaacaggagataggttagttctactttttacttttttcaacttcaagggacaggaatccaattatagaaaataggcatttagctttttaatagttttttttttattttctatgtgtgtagatacagacatagatgctaaattttctaccactcttatcaaaagacaaacca

SEQ ID NO: 134783 - DNA, 558 bp, Homo sapiens
tatgtctttatagcagtgtgaaaatggactaatactggcagcttgctgtgtctattttattatactggaaggaaggttgaggccattgttcacaaagtatagtgaagaggctaaaaccagataaccttcatatttttttttaagacctggaactgagaagggctaaaamtttagttcttattagttataacaattcatatttaactattagcctttcagaaattctaacttctattctttattgtgtgtgtggtggtggggttggtggctgtttgtcagtacacacacacacacacaaacattccactttttcaagcttcagtatctaggtactcaaccagtactgtcataattgggttgtgtgtagcaatactagggaatgatagaaaacaggagataggttagttctactttttacttttttcaacttcaagggacaggaatccaattatagaaaataggcatttagctttttaatagttttttttttattttctatgtgtgtagatacagacatagatgctaaattttctaccactcttatcaaaagacaaacca

SEQ ID NO: 134784 - DNA, 558 bp, Homo sapiens
tatgtctttatagcagtgtgaaaatggactaatactggcagcttgctgtgtctattttattatactggaaggaaggttgaggccattgttcacaaagtatagtgaagaggctaaaaccagataaccttcatatttttttttaagacctggaactgagaagggctaaaactttagytcttattagttataacaattcatatttaactattagcctttcagaaattctaacttctattctttattgtgtgtgtggtggtggggttggtggctgtttgtcagtacacacacacacacacaaacattccactttttcaagcttcagtatctaggtactcaaccagtactgtcataattgggttgtgtgtagcaatactagggaatgatagaaaacaggagataggttagttctactttttacttttttcaacttcaagggacaggaatccaattatagaaaataggcatttagctttttaatagttttttttttattttctatgtgtgtagatacagacatagatgctaaattttctaccactcttatcaaaagacaaacca

SEQ ID NO: 134785 - DNA, 580 bp, Homo sapiens
atacacagtgagccatgggagttgaagtggatcagtgattttttttgtaccacagagcagctgatctaccaacatgaaccagagtgtgcattctagcaaaatcaggagctgtgagtttgtgtgggtgtgtgcaagtgtgtgtgtatgcgaatgtgtgtgcatactgaaataaatatggaaacaaattcttaacatttcagtaccaaagcagccttgctattgaaatacatcctcaactactcttacaaccaccaatgaatttaaccctgaaaaaatttttcccattttatgaagcctcagaaacctcaaatatcatgagttttgatagtgtgattggagtaaatcagtagaaatttgcccctcaaaagagatgtaaacccttgcagggaaagatataccagccgttgtgtcactcaccaaaaaactgtaaagagtaggagtgctgtaagacaattcagtgaactagagtctcatccaaaggtgtatatcccagaaatggcagagtttgaaagtaaacaattaatggcrgcacaggtgaacttatgggtgcagttaagatgactttgggagtcgtaacgaa

SEQ ID NO: 134786 - DNA, 428 bp, Homo sapiens
tggaccggttttatgtgatattttgtgaaagtcaatcatctgtgtcacttttaactttaatttagtgttttcatgtagaaatgcctaataaccatattgcctgaactaccttgatgctaggagttattatttagttcaataaataatttttccttacattttactttcattaaaaacttattcagaatttatcttcatatttttatgacatcagtgtaaataatggttaggtttcaggaaaatgattttcagataaacaggctttttaaaattgttttcactttgtcactcatataagtcattgactccttccttcttcagtcctatggctatcycagggactctctttcaaatacccactttcctttcctgtaatgaaatgatgatatggtttggctgtgttcccacacaaatctcatcttgaattc

SEQ ID NO: 134787 - DNA, 539 bp, Homo sapiens
tagtcccaaattctttcttgtatgagatacaggaaccctctcttggaatctggattaggactcctttttggtaacaagtagatgcagaagaagaaaatagataaattgcatgtcaccaagttttggtgtacagattgtttcttcacacaggaaatgaacatagtacctgataggttgttttttgatcctgcccttctcctaccctctaacctcaagtatgccttggtgtctactattaccttctttgtgtctgtgtgtaccggttgtttacctcataagtgagaatgtgcattgtttggttttccgtttatgcattaattcacttaagataatggcctccagcttcatccatgttgctgcaaaaaatatgacyttattcttctctatggctacatagtattctaatgtgtatatgtactacattttcttcatccagtccactgttgataggcatctaggttggttccatgtctttgctattgtggagtgttgcagggaaatatgcatccatgtgtctttatagtaaaaagacatattcc

SEQ ID NO: 134788 - DNA, 539 bp, Homo sapiens
tagtcccaaattctttcttgtatgagatacaggaaccctctcttggaatctggattaggactcctttttggtaacaagtagatgcagaagaagaaaatagataaattgcatgtcaccaagttttggtgtacagattgtttcttcacacaggaaatgaacatagtacctgataggttgttttttgatcctgcccttctcctaccctctaacctcaagtatgccttggtgtctactattaccttctttgtgtctgtgtgtaccggttgtttacctcataagtgagaatgtgcattgtttggttttccgtttatgcattaattcacttaagataatggcctccagcttcatccatgttgctgcaaaaaatatgaccttattcttctctatggctacatagtattctaatgtgtatatgtactacattttcttcatccagtccactgttgataggcatctaggttggttccatgtctttgctattgtggagtgttgcagggaaatatgcatycatgtgtctttatagtaaaaagacatattcc

SEQ ID NO: 134789 - DNA, 611 bp, Homo sapiens
ctttcctctctttttaaattagtgggtttggagttaagaatcaattctgaatcaaagatttaaaaaccatatctatattgttaatactgctgtctatcattgttacctctagagttcctagttcattggtctgccattctactatatatcctagtttcatggtaggtcttaacactacagtattgacacatatatttgttgcacctgtttaatgttagtctaatttaaaagtctgctcttgtagttttataaggggttcatttgaagttgacttttgaataaggacatttaatgctctttttatgtgcttaacccattttttcttttaagaagaatttgcttagatattttactttgttggtgaaatcaatttcaagacattcagacatgttccaagtaaaaattctcttacatttattaccygagctttatttctcttaatgacatggatttatcccaaatacaaaacaggttcttatacatgaatcagatttttgtaaaatctttcaaatatgagcttttaaaaataaattcaaaaggcaatggtctcagagtccagtctgattccagataattaaatggaaggaaatagagggcatggatcactacct

SEQ ID NO: 134790 - DNA, 628 bp, Homo sapiens
ccagtctctggtgccaaaagggttagagaatcaaaacaccctctcttagcagaaaggcccagggctatctccaacacaaaggcctttgctcctcttcccacctgtgaaatatcttctctggctctctgcttacaagaggctagtcccaatgtgggtacacagctccagttcctcctgaaccccggtgctgaaaaacagagggcttggctccccaggctgccaaatctagtactctcatgaacactacattggcttaattattttaattgaaaaaaataggcgactaatgattacagctctctcagccaatacataatggagccgtgaagctaaaagaactgaggtccactgtgagtttttaaagccttgttatttcagaatggctttcatgtttgggttggaccagggagctgccacccttcggggagggatagttaacatagttgatgtcaattcattccttttgcttttcatggaaaacccaccccacrggtctgcctgagtcaaaagtgttctggagtgcttatgatttcttgctcaagaaaaagaatagccttttgcataattctcagagtaagcaaaatgactctccagcacatcttggaaaattccgagatacacaatgcat

SEQ ID NO: 134791 - DNA, 543 bp, Homo sapiens
ttgctctacgtctgtgtttttgtaggcccttttgatgaaagagcatcagtttacacatttctgagaggaggtgttttcctgcagtagctawaatgtgcatttacaactttatatttattattacacggtgccaatgcaagccagtggcaaataattcaatgttttctatttctgattttgccttgatcgtccccaaaagtgcagttattaatccttctcttaacagtggctctccattttttatttttatgtatattaaggaattcagaatttgtagtagttatcaaatttttagattttagactcagtgaaaatatgtgataattctttttgtcataattatttagtaatctctgtaagacactttcattatgtgaatttcttgggtatttctatgggtttttccacccagtgtggattgttttctcttttgttttaaaccttgcattgtgagcttatcttcagcagggctttgtctgtaaaactcctgtgcagcctgggttaagaattgtctttcagaatagttttgggtttacttctgca

SEQ ID NO: 134792 - DNA, 562 bp, Homo sapiens
tgactatatttcttgggccacttcagcaaactaaagtttgagaatcacctttaccaaaagtttttcttcatagcaaccctttattagaatacttaatattcaacaccttccaaaaaatacatggtttcttatgtttcttttttaaaatcatcattcaagaacactacaattaaggaggatgaaattaaatcaagatgagcaagaattaaccaaaagtttttcataaacccagaattaaacataaatcttttaaaagctgtgggttttgaggtgtttttattttttggcaaraacatagaaaacaataaaagaaatctgacctcatcacaagatgataatgaattttctgattttttcaacattattaacaattaataagggcttactacgtcccagacactattctaagtgatttgtaggtattaaattaatcttaaccacagtcttataagattgttaatattattagtaccaatttacagatttaaaaaccagagcttaccaaaattaaactgtggcttattgaagtagaataataaactgagggtacaataggagatat

SEQ ID NO: 134793 - DNA, 478 bp, Homo sapiens
ggctctccattcagacccttcctaacctgccttgctaacttcctgtgatgcagcctttctaagtcatttacagtttccwgccactgtcctgcactcctttctactccttgactgactttctcactgtctgcctaaatcagtaattcgcagccctggttgcacatcaaaatgacttgaaaactatgaaaaattacggctgcccagctcccagctgcagatcaattaaatcagaatttctgaatgaagatggatttctagcttcaatgtattaaagctgcacaggttattttaatgtgcagccaaagttaaaacgtaatgatatcaaaggacaaagtagaaaaggcactggcttattccaattccttcttctcaaagctctccttaaacatcatactctccatgaagctctccccgaattcctactcccacttccgcacattagccatttcattctcggtcctcctgaagcacttgggac

SEQ ID NO: 134794 - DNA, 651 bp, Homo sapiens
taacctcataaataataacaataaaatgttttaacattcctacagttttcaaatcccacattaactcatagggtcctccaaaaaccctgtgagatgtgattttacttacctctttttacagagagggacctgaggttcaagaaggtacagaaaataagaaaatgyagcagggagcagaacccagggcttctgactctgaatccacagtcagattctagtcttgcatctgtgattactcaacggcctggtatacattggatattgaatctaagtctttgattcctttattgcaaaaaggatgagaaggagaaggaagtagacaaaggttggaccagttgatatttaaagactgttagtttccacagttccataaatccaaaagcctttttaggatatttgagtggccatggcctcttctctgatttcttgagagcaatcaataacggcttttagcctcttctttgtgtaagggagaagtcaactgaagttacagtgaccttgagatttccatcaaatcagcaaatgcacatctaataagaaggctgttgctcttctgaaaatctctgcaaatctgtgtggtatatgccctacagtctacatcaagttttctgtacccactgaaatctagactttagcctcaagcagctgcta

SEQ ID NO: 134795 - DNA, 651 bp, Homo sapiens
taacctcataaataataacaataaaatgttttaacattcctacagttttcaaatcccacattaactcatagggtcctccaaaaaccctgtgagatgtgattttacttacctctttttacagagagggacctgaggttcaagaaggtacagaaaataagaaaatgcagcagggagcagaacccagggcttctgactctgaatccacagtcagattctagtcttgcatctgtgattactcaacggcctggtatacattggatattgaatctaagtctttgattcctttattgcaaaaaggatgagaaggagaaggaagtagacaaaggttggaccagttgatatttaaagactgttagtttccacagttccataaatccaaaagcctttttaggatatttgagtggccatggcctcttctctgatttcttgagagcaatcaataacrgcttttagcctcttctttgtgtaagggagaagtcaactgaagttacagtgaccttgagatttccatcaaatcagcaaatgcacatctaataagaaggctgttgctcttctgaaaatctctgcaaatctgtgtggtatatgccctacagtctacatcaagttttctgtacccactgaaatctagactttagcctcaagcagctgcta

SEQ ID NO: 134796 - DNA, 584 bp, Homo sapiens
cttcatctgggaattgtagygtatgcctgttcagaaatttggtatatgctcttccttattcaattcatttcaacagctatcaatctatgataacatctttaatatctgtggctatccatccatcacccatccattcattcactcatccatccatctggacagacttattttgagtttagaaattacaaatagtaagctagaactgtatgtctcttatattaactactttgccaataattattgttcattaattttttaccgtttctcataatttcgtctattcctcttacaactctatgtcttatatatatttttacttttaaccttcttctggtacatgctttctttttctctcagaagtgattatagacagtgaggccactagatgggagggaggagggcaaagtttaaaaaactaactgttgggtattatgctcacgatcaattgtaccctaaacctcagcatcatgcagtatacccacataatgaatctacacatgtgtgccctgaatctaaaataaaagttgaaattataaaaataaaataaaatcctatattccatctaaaaacaaaacaaaatgaaa

SEQ ID NO: 134797 - DNA, 637 bp, Homo sapiens
ggaaaaaaaaagagtccaagtcaactttttgaaagattccagagcaatggactactttagaatcatctgtctgagtgcctgtatccttttttcagagccctttaaaaacctgatgaaagtgctagatgttctcattagtgatttgtatataaaccatatagtttattttgtatgtaaattcaggatggatactaagagaaatttttcaggaatctgccaggttaaaaaacacgtttctataccttccttcagtaaaggaaggtcctggtctgttgtgggacccaaaatatgaatgaggtcaaaagatagaattagttaatgatgtagtatcaagctttggagtaagacataagtcttcccccaaatcatccagttcaatcctctggaaaactgagagatgtaaaatatggcagaaatattttatctaatttaagtagccattaagagccctgtgcagcattaggtttaccatgaacagaatgcttttagtttattaattcagaactkttttcttacccaacaagtcccttcttaaatgtcattcagggaagaagtttttaagcactcaatatctaaagatagtctatgtcattctcatcataatgtcttaatttcctttttagcaaatttgacacca

SEQ ID NO: 134798 - DNA, 554 bp, Homo sapiens
tacaagttacattctttcttatagtttttgacacactgtatatttatgaagttgagaacattttacccttctaatttgactacattggatgccatggagaaaaggagggtcacaaactcaaaagccctgagggttcaggcacacaaactaagtcagcagagagtaggctgcagtgcatgggtggagtgtcctgtccgaaggggcatctgctactctgcttcacttattgctaccatgtgggaatgtggaggcccaagttgctagatattctgatttgtcaatagaagttctcagtcctgctttttatgggaattctgcatagttttaaatgtgggcaattattytgaataaaaatcaaaacattatgaatgttaacccaaacatggctctggattggatgtctggggctgcttgggttcaacccctagactttgctcttgactcactactggtagactttgcatttatcatttgcttaggttctataactgtcaagtagcataatttatttacacattttccttcttactctggttagtactgcataaagaaca

SEQ ID NO: 134799 - DNA, 379 bp, Homo sapiens
gtcatatccatgcagtcttcagtgaggtaattagcccttgatttgctttttttagattattcaggtctcaaagcacawtgtctccctattcttttgtgcatggatgaaaatcatgagctgataaagctagagatgacattactttacataccttatgttattaataaggggacagagggccacagtgtttaagtgacttggccaaagtcacacagttagctagtgacaaaaataggacaaagagctgggtcttctaactttgaagccattattttctgctctacaacacctccaacaacaacaacaacaaaccctgatgtttctacctcacattgtgtgctcacaaacagatttatggcaccactctatgaggtcatca

SEQ ID NO: 134800 - DNA, 446 bp, Homo sapiens
ttttaaacactgtagagtcaagcaattaatattgtttttcttctactttctcattcagcaataaaaaacattttttaaaaactttagaaattattttaaattttttggctggatgcggtggctcacgcctgaaatcccagcactttgggaggccaaggtgggcagatcacttaaggtcaggatttcgagacaggcctggccaacatgatgaaatcttgtctctactaaaaatacaaaaattagatgggcgttgtgccgggtgcctgtaatcccagctaatcgggaagttgaggcaagatgatcacttgaacctgggtggtgraggttgcagtcagctgagatcgcaccattgcactccagcctggacaacagagcaagactctgtctcaaacaaacaaaaaaaagaaattatttaaaaatttttagtagttgcataatagttcgtt

SEQ ID NO: 134801 - DNA, 390 bp, Homo sapiens
tgttttacaattatatataataataaaattatgcacataattttaattatgtaaaatataatttagatataacctattacataaatataattttaaaaaataagaattaacatttattgaatgttaccatatgcctgccatatgcaaggcactgttttaagtacttactatcccaaaatcaatctcagaagctaaaattggggtcagtggagcctgatggtacaccagtttatgcttcacaagttcttatcagatagttaccaatttttacctccattttatagatgaggaaaccaaaacacagagaggttaaataayttgcaaagaacatgcagctagtatttggatagtcaaggtttgtcatagcccttcattcttaagtaactacac

SEQ ID NO: 134802 - DNA, 503 bp, Homo sapiens
actttaaaactacatattaaagtgtctgtgtatgctacatcaattatatatttaaaagatttctgaaattttgcaaatccaattgtaaaatcataaagccatagtatgggtttggctgttatttctgggaataactgaaastggtggctcgattttcaactctgaagaatttactggcaattttgacgcgccttttcttttcatttttactttggttaatggctgcatgtggtctgaggttgtgtgggggattaaggctgctggctggttttgtctctaaagaaacatgatcttctttgtatactggactaatctggcctagtgaggctcatcctggtgctgcagctatttagagttactgaagtaatggtagaataataatttttcatttcatttattcccttatttataaaattttggcatgtttacttaaagctctagaagtacatttttttttttgggacaggatcttggggttatttatgaggctttggatgttcaga

SEQ ID NO: 134803 - DNA, 503 bp, Homo sapiens
actttaaaactacatattaaagtgtctgtgtatgctacatcaattatatatttaaaagatttctgaaattttgcaaatccaattgtaaaatcataaagccatagtatgggtttggctgttatttctgggaataactgaaagtggtggctcgattttcaactctgaagaatttactggcaattttgacgcgccttttcttttcatttttactttggttaatggctgcatgtggtctgaggttgtgtgggggattaaggctgctggctggttttgtctctaaagaaacatgatmttctttgtatactggactaatctggcctagtgaggctcatcctggtgctgcagctatttagagttactgaagtaatggtagaataataatttttcatttcatttattcccttatttataaaattttggcatgtttacttaaagctctagaagtacatttttttttttgggacaggatcttggggttatttatgaggctttggatgttcaga

SEQ ID NO: 134804 - DNA, 600 bp, Homo sapiens
accaatccccagggaagatggaggcaagactgtattgtatttttcacactaaatatttcccattgtgtgtgtatgtgttttataaaacaacttctagttcctgctgcatagaatcttcccttaatatttgtggtccatttttaaaccattctttctcaggtggtatctactcatttggtactatctttaataatggtgggattcctctgttgttttgataacttcctaatgagctcatgttcccctgatagaaccagtttctctgcctgatcctattttctggggaaaaccaaggtggaggtcttagtcttgttcctccagaagatccagaacagagttgagtatgtttagacagccccaagcaccaagaaacaaccaatgaggcttcccatgagggcaggctctctgyagtattactggcttctcaccctcctctcagatgaccccatgtaccttttgcctgaggcattgctgaagttccggccttctatgtcatgagttctcactcagatcctcattcgatcatcgaatccaacataatttcctttttcaaacccttcctatgtgactcttagaaatttaagcctctagttaacaaat

SEQ ID NO: 134805 - DNA, 600 bp, Homo sapiens
accaatccccagggaagatggaggcaagactgtattgtatttttcacactaaatatttcccattgtgtgtgtatgtgttttataaaacaacttctagttcctgctgcatagaatcttcccttaatatttgtggtccatttttaaaccattctttctcaggtggtatctactcatttggtactatctttaataatggtgggattcctctgttgttttgataacttcctaatgagctcatgttcccctgatagaaccagtttctctgcctgatcctattttctggggaaaaccaaggtggaggtcttagtcttgttcctccagaagatccagaacagagttgagtatgtttagacagccccaagcaccaagaaacaaccaatgaggcttcccatgagggcaggctctctgcagtattactggcttctcaccctcctctcagatgaccccatgtaccttttgcctgaggcattgctgaagttccggccttctatgtcatgagttctcactcagatcctcattcgatcatcgaatccaacataatttcctttttcaaacccttcytatgtgactcttagaaatttaagcctctagttaacaaat

SEQ ID NO: 134806 - DNA, 598 bp, Homo sapiens
tgatttattggctcctttccttccctgttgcatttctccactcccaaacaagtgtttcctggaatcaacttttaaataaatggcttggccctgaattttgtctcagtcctgcttataaataaacccaaaccaagactgtgccaaaaattacttctctcttttttctttctycatagttctctgatgtcctaaataccagctataatggctcatgccttagtgacactacactgcctcctaaatatcactctttaataatttgtttacaaagagaaagaaaacagcgaatgcaaaaacatgaattacatgaattttgcccctcccatttttaacttaaaaaggagaatcattcagcataagtagttctagaatcttttctttaataccttttcacgcccaattaacacaaaaatagttgcagttacacacagctactgaaaaccaccaaactgcctatctgaagggagagtcaaggatccttctcttccacctctgaccttatgagagaatgatattttttgggtattttgggtattaaagagagagcattcactgagatattctgtaaactaaactcatcagatattctgtaaagctt

SEQ ID NO: 134807 - DNA, 592 bp, Homo sapiens
tagtttgactgaagagaatgttctacctccagtacccctgcatacaattaatatgagaaaatttcaagacgctgcagggataagataccacttagaatgtgtgcattgtcttgggttctgttttcctcgggcaggcactctggggttgctgggcatacgttttgaaactctggctttagaacgaattgctcaggaagcctgatagaagtgacaattctctgcctacccctagaaactgtgattgagtagatctggggaggggcctatggatctgcwctccaactacagcccaggtgggtgttcagaccatagctagaaactggtttgagaaactggagaaagaatctgggctttgatgagagtgacaagagttttccctccagccctgccatttactccatgtgtgacctctgacatggttcctagactgctctctaattcagtttcttagatataaaagagtgataattgtaaaggttaaataaaatatgtaaagctctctaagattcttggcacaaagtttactagtgtttgagccccttcaccttctcttctatacagtaacattttttttgaatgcttattatggacc

SEQ ID NO: 134808 - DNA, 592 bp, Homo sapiens
tagtttgactgaagagaatgttctacctccagtacccctgcatacaattaatatgagaaaatttcaagacgctgcagggataagataccacttagaatgtgtgcattgtcttgggttctgttttcctcgggcaggcactctggggttgctgggcatacgttttgaaactctggctttagaacgaattgctcaggaagcctgatagaagtgacaattctctgcctacccctagaaactgtgattgagtagatctggggaggggcctatggatctgcactccaactacagcccaggtgggtgttcagaccatagctagaaactggtttgagaaactggagaaagaatctgggctttgatgagagtgacaagagttttccctccagccctgccatttactccatgtgtgacctctgacatggttcctagactgctctctaattcagtttcttrgatataaaagagtgataattgtaaaggttaaataaaatatgtaaagctctctaagattcttggcacaaagtttactagtgtttgagccccttcaccttctcttctatacagtaacattttttttgaatgcttattatggacc

SEQ ID NO: 134809 - DNA, 601 bp, Homo sapiens
gatggtgctatcaatgagtaactcagggcatatgagacaatctcccagcaatgaatgaatggatttaatctgttggctgagttacttcagttcaggaagacaagcttcttctgggtgagtggttgtgtcatactcaggctgagtgctccaagtagcaatatatctgtggtctaaattgattgattctctcacaggctgtttgtgaatctgcagatcctcaactctccctgtcagaggtaccaggcacataagacaggaaagccctggcagtctcgctttgagtgggctttcttggattggcaagtgttttcaatggaggagaaatgttattgcggaaaaccctgtggatcgtggattgggtagttgccatctgcgaagcttgacgatgatggcatgtgcttattgcagagatctttgctttttggaacagctgtgcctctggtgaagctgccatggagatggtgagctagagggctcagaagcaagggggtgatgttgctctagggacctggcacgttaagagtcayggaaatgattgtctggaatagtgttacaatcttcaaatgctttgttttatacagaagtagtcactgtggcttaa

SEQ ID NO: 134810 - DNA, 595 bp, Homo sapiens
atgaaaaaggcttaaaagggtgcctggtatgtaataggtacaacgtatttcttagctgctgttatttcttccttttttggtaatttcctgggtctgtggagatgtgaggaggggaaagaataatttggagaaaagtcatgtccaacctccactgggttatttatttgcaatttatagcaatattgtatatccaactacacttacgtgtatatcctcatgatttctgaatagcattagagttgagtataataatgttgatgaaaacttgaatcttttgactcatttagtcatgcatttgtgtttgttcatttattaattaaatcttaatttgagtaagtcactaggcaattaaaaaaatctgtatagagcagaggctttttctcctaaggaattacagccacttagttaatggtataaaccattaacaaataaccagagtgttcatgtttgtaaaattctgagaaatcctaataaataaagctaaccagaaatatatggtttaggaaaaatatttcgtgagaaaatttagtttctatactgagaaactgatagccatattcatatatrccatcagtcttctgactgtaggtattgt

SEQ ID NO: 134811 - DNA, 449 bp, Homo sapiens
tggccaaaactgttttctttcctcattcaccaaagggaagcaaacattttaaaaayagttcttcaaacacccgaaaacagaggatgcagacaactgcataatgatgcagagatgatgatgaataataagttctcacactttttggcagtaatgacaaaccaagctaatctaatttccacatctattgattcttgttttctgctgttctttcacctatatgtgtgattccctccccaatttaatgacattttttccccagctggagagagaaaaggctgttctgtttttcccatctctttcacttttgtagacaccgttggaccctaacaccctgcaagtgagattaggaccctgtggttttcctttggcaccagtgcaagctgtctcattctccttagtgaagtggttattaaaaaatgtgactcactcaggtacctgagaatcccata

SEQ ID NO: 134812 - DNA, 523 bp, Homo sapiens
aagagaataaggggtgacaggaaagaaaggcctctttacacaagcaaaaatggtctctggggacagtcagctggtacaaaacgtgaaccaagtcttataatctctttgcactgggttttttttattttttattyttttttcctgcaggctggtggaataacagctctctggaagcctcagatctgtcagcttatgttcctctttcatgatttttatcccccctctaactctgcctcacttagaaaaagaacatatggactttgttgagaggccgttgaggaatgtatagagtgacaaaggcaaaatatgcaaaagaacccttgaaaatgtcacattattggcttaatggctttgtacagatgggagtaaggtgatgcctttgaaaactttttatttggttggctgactttgccagttacagctcatttctcaacccaaaggcaaaataccattcagattcagtgaccaagcaagttaaaaactccagtataaaacaaatactttgagcatatggcattttcct

SEQ ID NO: 134813 - DNA, 523 bp, Homo sapiens
aagagaataaggggtgacaggaaagaaaggcctctttacacaagcaaaaatggtctctggggacagtcagctggtacaaaacgtgaaccaagtcttataatctctttgcactgggttttttttattttttattcttttttcctgcaggctggtggaataacagctctctggaagcctcagatctgtcagcttatgttcctctttcatgatttttatcccccctctaactcygcctcacttagaaaaagaacatatggactttgttgagaggccgttgaggaatgtatagagtgacaaaggcaaaatatgcaaaagaacccttgaaaatgtcacattattggcttaatggctttgtacagatgggagtaaggtgatgcctttgaaaactttttatttggttggctgactttgccagttacagctcatttctcaacccaaaggcaaaataccattcagattcagtgaccaagcaagttaaaaactccagtataaaacaaatactttgagcatatggcattttcct

SEQ ID NO: 134814 - DNA, 609 bp, Homo sapiens
acttggcaaagtaactgctattttgtacacatctgttttacatctgttcaaacctaaattccttcagaggaggggcaatgtcatcctagctcaaaataggcattaataaatmttatgctaaatcaccaacatcttttggtaaaatagctgtgtttaattaatgaaagacttccagattaacttctgatgaggtcttctaggtatcttcagagtgttttatgatgttttctctccctagttattgttaatatattctgtgacctttccacaacagaaagtcattttaacatgtggctcacgtagtttctgaatttttctttctttttaaaggatcatgctgctgctttttgggatgattactgatgtttatagtgagccccatcccccactttttaaactccataaatatttaagacaaataaccctaaatatttgtccatgatagagatcctgggtcccctcctttgattggtgcatgctttgtttaacattttgccagtgcttcccagtagcaaacaatcaatgcacattttgaacttgtattcttaaaaaatctgcagccacaaacatggcccatgtcctaaatagtaggtactgctgaatagatct

SEQ ID NO: 134815 - DNA, 541 bp, Homo sapiens
tttacttgcaaagtagtatgttacacagtctttattgtacttgattaagctcacaccaggacaggttatctggctcctaccagagttcyatcaacagcctctcattctaagaacagatctatgatgtcaacccttaatccatctgcctcccccaccttcttcctctcctcactatcttaagctttgccacactgaacgattaagagcttgggtcaaaatgatgtggttatataaacactcactatttctgtcttatggaaatacttcccctgtgagttgctcaatatgcttcgcagctaacagaatacatctcctttctggtcttgccttaaaaataataccatttggcctaataccactgacaaattgctaaaccttttaggaaggaccgctgcatgcaccaagagacatgactatgactatgatttgaacagggcctgcagcttataaccaagccagatatagtgcagaagtgacgagctgcagggggaagcctgggcaaaatgacctgtgttcttgttctagcttcagctctgccaac

SEQ ID NO: 134816 - DNA, 541 bp, Homo sapiens
tttacttgcaaagtagtatgttacacagtctttattgtacttgattaagctcacaccaggacaggttatctggctcctaccagagttctatcaacagcctctcattctaagaacagatctatgatgtcaacccttaatccatctgcctcccccaccttcttcctctcctcactatcttaagctttgccacactgaacgattaagagcttgggtcaaaatgatgtggttatataaacactcactatttctgtcttatggaaatacttcccytgtgagttgctcaatatgcttcgcagctaacagaatacatctcctttctggtcttgccttaaaaataataccatttggcctaataccactgacaaattgctaaaccttttaggaaggaccgctgcatgcaccaagagacatgactatgactatgatttgaacagggcctgcagcttataaccaagccagatatagtgcagaagtgacgagctgcagggggaagcctgggcaaaatgacctgtgttcttgttctagcttcagctctgccaac

SEQ ID NO: 134817 - DNA, 573 bp, Homo sapiens
acaatattgtaagttattttccagaaaatagtagcctttcattattaccaaacatccagtaaagtctcatwattagttactgtggcttctctgctgaactgtggtggattaaagagataggtctttctcatataaggttggaagacaggagaagatccttctttcttacctaccacagatgctgttgtgagcaatgtccttagaaaagcctctgaatgatgcagtaatctcatggggctcaagatggccaggtggcaaggagattaagcaacagcagcagaggagcccattggtaactttctgtggaaggcacgacgcgaacatccctgaaatgactgagaaactctctgaggagggctatttctgaaaagaaaaaaataaaaggaagaaaacttgtatttgaagtcaaaaagtttaaacctttttcttattataaataataaagtatagaaggtaaatgatttaagttttaacagtgaggttagtgtacattttgattttagagcttcagttttatcctggtatgtccgaaaatatgctctctaatgtggtatcccatagcatttaaaaaaa

SEQ ID NO: 134818 - DNA, 585 bp, Homo sapiens
tattggctgcttaaaattttcttatatacatcatcatgaygtctacaaataagaatagtttaatatctttctttccaatttgcatgccttttatttatttttcttgcataatttcccaagctagactcttcaggaaaatgttgatcaaaattgtaagagaaaacgtctttgtctgattcctgattttcacgggaaagcatcaccattaaattcagtgttagtgtgggtttttgtagatgcccttcacctggttgaagatgttcccttttattcatagtttgttgagtgtttttattatcaaaaatatggaatggttcgcaaagttacatgtcatctttgttcatggtccatactaatcttctttgtatttttccaattctagtatatgctgccaaaatgagtacaatgtaacatggttttaatttctttatatttttaaagcttactttattatataatgattgcctttttactccttcatttcctactccagatagtataaactcatttacagcaggactgaaatcactgcagtcattatcaaatctctagttcttagctctgtgacttcacattttatgcgtt

SEQ ID NO: 134819 - DNA, 597 bp, Homo sapiens
attggctgcttaaaattttcttatatacatcatcatgatgtctacaaataagaatagtttaatatctttctttccaatttgcatgccttttatttatttttcttgcataatttcccaagctagactcttcaggaaaatgttgatcaaaattgtaagagaaaacgtctttgtctgattcctgattttcacgggaaagcatcaccattaaattcagtgttmgtgtgggtttttgtagatgcccttcacctggttgaagatgttcccttttattcatagtttgttgagtgtttttattatcaaaaatatggaatggttcgcaaagttacatgtcatctttgttcatggtccatactaatcttctttgtatttttccaattctagtatatgctgccaaaatgagtacaatgtaacatggttttaatttctttatatttttaaagcttactttattatataatgattgcctttttactccttcatttcctactccagatagtataaactcatttacagcaggactgaaatcactgcagtcattatcaaatctctagttcttagctctgtgacttcacattttatgcgttcaatcagtagtta

SEQ ID NO: 134820 - DNA, 526 bp, Homo sapiens
tatatcctgcagctgttagacgaagtattctaaaagtatctactaggttcatttgatctatagtgcagattaaatccaatatttctttgttgattttctgtttggatgagctttcactgcagaaattagggtgttcaggtgtccagctagtattgtattaatgtctatctctctctttaattttaacatttgttttatatatctttgtgctccggggytcagtgcatatatatttacaattgctatatcttcttgataagttggtcactttattatcacagtgatataattttacccttctttgtctcttttgatagtttttatcttaaaatatctttatctgttatgagtatacttacttctgctgttttggtttccattgcatggaatatcttttttcatctttttattttaagtctatgtgtgtctttctagttgaaattagtttcttgtatgtagcgtattgtttgacctcttttttaaaaatttattcagccactttatcttttgattagataatttagtt

SEQ ID NO: 134821 - DNA, 452 bp, Homo sapiens
gctggaaaaaaaatgaaggaagagaaagagtagtggaagataaagctaaaaagtcaacagcagctataacatgagaaccttataggtcattagcattttgtgtaaaagaagaacagagtaacaatgacctaacatatgcagcatattattctgacttccatgttatttatagatttggtgttggtggtagaataggaagcaagtatgtgaaaatggatattattaagaggctattgtaataattcagttaagatattttagtagtttggcttrtgatattagcaatggaagtagcaagaattgttttgattctggatattttttaaatagtgccaaaattataagctatttggatgtgagaagtggaaaaaaaaaagaaatcaggaatcaaaaacgacagtcatttggccagcacaactgaaagtggctcttcataaggaaaataagacatg

SEQ ID NO: 134822 - DNA, 467 bp, Homo sapiens
tgagaggcagtgttatgttggcttcaagtctgacccagcacagtcctagtggtggtggccacaggggtgtttgtgttaccccttcccccgcaccagacagctcagcatggaaaaagagtctccatttgtctgggggaaagtaagggaagaggacaagagtctctgcctagtagaccaccaaggatgtacccctattattctgcaagattcacagcatcartgggcttgaggtgtcccctaatgcagatactactgcaatgacaaaagagttagataacaacactcaatttcttttgaatacttgcaatgccttcccaaggagaatgggtacaaataggcccagactatgaagatcacaataaatacttaacttttcaatactcagacagacaaaaatccacaattgtgaagactatccagaaaaaaacatgacttcaccaaatgtactaaatacagcaccagtgacc

SEQ ID NO: 134823 - DNA, 559 bp, Homo sapiens
ccatttttctaaaaatctttgatttcttttgttgaaaaattatgatattagaaaccaaaatctatgccagttatgaccattgatacagggatatgattgcttctaagatctttcatatgtgtatttgcaggtttgagtgtgacgtaagttgtctagaggtgtcaaactgacaaatgaagagtcttatgtttgggaaggcttatgaagtttactcacaaagtaaaaggtatcataggtcaatgaaagtttaggaaagtaggaggtatatctcctctaatgagatgaggaaaaagtgaaagtgatsatgtagattatcattgaggattagtggtcaacgtttagtaacttcaacaatttttatttatacatacatatatatacttctatatataatgatctatatataatttttctctatatatattttgatctctatataatttttcactaaggtgaaaaattgaccctcaaatatgtccaagttctgggagttaccccagagcatatgaatattatattatatggaaaaatggaactttccaaatgtgattaaattaaa

SEQ ID NO: 134824 - DNA, 559 bp, Homo sapiens
ccatttttctaaaaatctttgatttcttttgttgaaaaattatgatattagaaaccaaaatctatgccagttatgaccattgatacagggatatgattgcttctaagatctttcatatgtgtatttgcaggtttgagtgtgacgtaagttgtctagaggtgtcaaactgacaaatgaagagtcttatgtttgggaaggcttatgaagtttactcacaaagtaaaaggtatcataggtcaatgaaagtttaggaaagtaggaggtatatctcctctaatgagatgaggaaaaagtgaaagtgatgatgtagattatcattgaggattagtggtcaacgtttagtaayttcaacaatttttatttatacatacatatatatacttctatatataatgatctatatataatttttctctatatatattttgatctctatataatttttcactaaggtgaaaaattgaccctcaaatatgtccaagttctgggagttaccccagagcatatgaatattatattatatggaaaaatggaactttccaaatgtgattaaattaaa

SEQ ID NO: 134825 - DNA, 559 bp, Homo sapiens
ccatttttctaaaaatctttgatttcttttgttgaaaaattatgatattagaaaccaaaatctatgccagttatgaccattgatacagggatatgattgcttctaagatctttcatatgtgtatttgcaggtttgagtgtgacgtaagttgtctagaggtgtcaaactgacaaatgaagagtcttatgtttgggaaggcttatgaagtttactcacaaagtaaaaggtatcataggtcaatgaaagtttaggaaagtaggaggtatatctcctctaatgagatgaggaaaaagtgaaagtgatgatgtagattatcattgaggattagtggtcaacgtttagtaacttcaacaatttttatttatacatacatatatatacttctatatataatgatctatatataatttttctctmtatatattttgatctctatataatttttcactaaggtgaaaaattgaccctcaaatatgtccaagttctgggagttaccccagagcatatgaatattatattatatggaaaaatggaactttccaaatgtgattaaattaaa

SEQ ID NO: 134826 - DNA, 513 bp, Homo sapiens
ttcacacagcattgtctctcattaagrcactcactttaaggctaaagaagtgtggcagtgagctcatgctcatgaaattcactggtcttaccttgttctccatcatcctgaagcagctggattgacagaatggtggaatggccttttgaagtcacaattgcaatgccaactggtgacaatacttttcagggaaggggcaaagttctccagaaggccatgtatgctctgaattagcatccaataaatgctactttctctcccatagccaggattcacgggtccaggaatcaaggggtggaagtggcaccacacaccatcacccctagtgatccacaagcaaaatttctgcttcctgtttccatgacattatgttctcttggcctagaggtcttagttccagagggagggacgccaccaccaggagacaccacaacaattccattaaactgggagttacgattgccacctggacactttgggctcttcctacctttaagccaacaacctaagaag

SEQ ID NO: 134827 - DNA, 598 bp, Homo sapiens
atctaggatatcttccagggtgttcatagttttggattttacattaaagtatctaatccatcttgagttggtttttgtatgtgstgtaaggaaggagtccagtttcaagcttttgcatatgcctagtgagttaacccagaaccatttaatgaatagggagtccgtttcccattgcctgtttttgtcagatttgtcaaagatcagatgcttgtaggtgcgcagccttatttctggcttctctattctgttccattggtctatatgtctaaaaacaaaaaacaaaaaaccttttttgagatagaagcctcagcttgaaattgcagttacatctcttagtgactatgtgattaacatcaaagcaagcaatttatatgagtctttcttttcatattaacaaaatagagatgtagacttgcacctgcattatagaagcttataaaattcactaagaaatacagataattcataaggagcaattctaaatgcagagagtgttatgcaagtataatgtgttcattttatttctctgatactttcagtttgagccacactccctatacaggattcgggataaacagacaccatttgcaactactgt

SEQ ID NO: 134828 - DNA, 376 bp, Homo sapiens
aaataatgacttcaacgaaagttytgtttaatttttgaagtgtgatatgacctaaatatttttcaacaaatttattttgcaaatatttatagaatactgcaacacatcagttactattctagacagaaaggataagatacagcagacaaaatccctattctgcaatgttcttcttgatatttgtttaaaataaaaataagttttgacttagtcatctcaatgcaatataacttaatggtattagaaatgttgcagagtatatcgaaggacaatttactctgcatgaggttatattaaatgtaaataaaatatttatatagaaaagaactcatgctttctttggcttgttccaactctcttctccatagttccctca

SEQ ID NO: 134829 - DNA, 376 bp, Homo sapiens
aaataatgacttcaacgaaagttctgtttaatttttgaagtgtgatatgacctaaatatttttcaacaaatttattttgcaaatatttatagaatactgcaacacatcagttactattctagacagaaaggataagatacagcagacaaaatccctattctgcaatgttcttcttgatatttgtttaaaataaaaataagttttgacttagtcatctcaatgcaatataactkaatggtattagaaatgttgcagagtatatcgaaggacaatttactctgcatgaggttatattaaatgtaaataaaatatttatatagaaaagaactcatgctttctttggcttgttccaactctcttctccatagttccctca

SEQ ID NO: 134830 - DNA, 540 bp, Homo sapiens
taacatgagaagttcagtttgggtctttcttaaaatggctatttcatctttcagcacttgaatggtcttatttgattgtttgactgccttgaattgcttttccactttcttctagatctcagtgagtttcctttctgtcaacattttgaattccatgtctgccatttcagttatttcagattggttaagaaccattgccagggagctagtgggttcctttggaggtgaggggacacttscttcttgaattgtcagagttctcttggtttatctttatcttcttgaagggtgggtgttctttcagttatggtaattgagtataatcagttgtctttgtttctggaagtttttagaaggcaaaggctctgtacagtacctttgttgttgaattattgcccttggtttctcaggaggaaaaattagcagtttttggtgtagtttagtctgcgatccagtatagggcactggagagcaataggccgtaaataagctcttagccgcgcagcgctgctcttttgcatatactcatgtttgctgctg

SEQ ID NO: 134831 - DNA, 540 bp, Homo sapiens
taacatgagaagttcagtttgggtctttcttaaaatggctatttcatctttcagcacttgaatggtcttatttgattgtttgactgccttgaattgcttttccactttcttctagatctcagtgagtttcctttctgtcaacattttgaattccatgtctgccatttcagttatttcagattggttaagaaccattgccagggagctagtgggttcctttggaggtgaggggacacttccttcttgaattgtcagagttctcttggtttatctttatcttcttgaagggtgggtgttctttcagttatggtaattgagtataatcagttgtctttgtttctggaagtttttagaaggcaaaggctctgtacagtacctttgttgttgaattattgcccttggtttctcaggaggaaaaattakcagtttttggtgtagtttagtctgcgatccagtatagggcactggagagcaataggccgtaaataagctcttagccgcgcagcgctgctcttttgcatatactcatgtttgctgctg

SEQ ID NO: 134832 - DNA, 438 bp, Homo sapiens
gaattctaaaatgatctccaattgtccctcatcctttcataatcctctcctygagtgtgtgaaatctaatgggatattactcccatgattaggttagttgactttgagttaatcatatttgggtgggtctaactttatcaagtgagcccacaagataaactgggtccttcctaaacccagagaaatttcaaagtgtgagagatacttcaacaggagggtgattctttatttctggctttgaaaatgcaggaagccatgtgccaatggatgtgggaagcctctagaagctgagaacagtctaaggatgacagccagcaaggaaatgaacaactcagttctgaaagattgaggaccctggtcagcttggaagcagactgttctctacagcctccagaaaggagtctagtctggtggacaccttcatctgaatcttctaag

SEQ ID NO: 134833 - DNA, 574 bp, Homo sapiens
cctcgtggtattttttagtaactttgcttgggacacattgacattcattgcaattgtggagacaacaggcacagttcccaccacagcgtttaaccaggagacaacctggccagaaaatggtatcggttctctttagttcttcccttatggacactgagaagttacgaggtgtgcagctgtataatcttacctcctctgttagaaggttcagatccaccactatatggtataaaagaaagcaaagaaaaatagatgttgatgctttgagcctgaatgtatttcattaagctcttttcataaagaaatcttacgttatttcatgaacaatatccataacaatatccgctcttattgtaagtagattttagagatatacaactacaaattggaccttctagttcatagcaaacaaagyttcattatgacttagcgaccagtaaagagatgccattgtgtaatattaagaacagagccaacaaaacagttgaaagctataaataggaaactttatacagacaaaaaaggccacacgttttaaccttagtaaaaaaaaaaaaatagacatggagaacac

SEQ ID NO: 134834 - DNA, 583 bp, Homo sapiens
tgtgacactgttatagaaactatctctcaagatacaattccactttcatcttcgctttattttttgttatctcagcgggaaataaattcacatgttacctttcagtggtcatctcttctgtccgttctatgcattctacctgcaccagaacagtgatcccacatttcttgattttctccgcttcatactgtctcttaggtatcttcaattaattttattgactaactcccttctctttacttcatttgaccccctccacttgtcagataaatgtattcattgatttccactgtcttctacaactgccttattatttctctagttcttcycattgccagtttattgaataaatattccaaaatgttatctccaatttctcatcaaacaatttaaacaagttacaaattggctttcaagaataacaacaaatgacactaagattccttgctggttattcctgcaccccagccattcctcttcttaatccacctttcctacatgcctgttatcaggaacaaagatgtttggcatttctttcattatcattttccccttttattccctttgttatcattagacttga

SEQ ID NO: 134835 - DNA, 564 bp, Homo sapiens
ggccaaggtaggtggattccctgagctcaggagtttaagaccagcctgggaaaaatggcaaaacccatctctactataaatacgaaaatttaggcagggatggtggtgtacatctgtratccaagctactcaggaggctgaggctgaagcatgagaatagcataacaacaaaaatgtccagatctcaattaaaacatcactcagtgtatcaggaaccagaaagatctcaacttgaatgagaaaggataatcaacagacacaaacatagagaagacaaagatgttagaattatcttgcaaagatctcagtcattattttaaaaaccatccacaatttgaacataagtgaaagaaataaaaaagagggctttagcaaagacataaaagatataaggaagaaccaaattaaaatcttaagattgaaaaaagtcaaagctaaaatcaaaaccctcaattaccaatagaaattactcaatctgagttacagagatgaaatagactgaaaacacacaaattttaaaaggtgaacaaggacatatgggattataataaaaagtctaacatt

SEQ ID NO: 134836 - DNA, 584 bp, Homo sapiens
agaaaaattcatctaaaattcacatggaatctcaagaggtcctgaatagctaaaaacaaaattgaacagaaaagggattagaagcctcatgcttcctgatttcaaaacttactataaaatcatagtaatcaaaacagtaagattctgtcattaagactgacatatagatcaatgtaatagatgagagatctcagaaataaatccttgcataaatggtcaaatggtttttaacaaggatgtcaagggcactccatggaaaaaagcaatcttttgcacaaatggtgttaggaaagctagatattaatatgcaacttttttttcaatgaagttggactcttagcttacaacatacataaaacttaacacaagttaaggtgtctaaaacttaacacaagtttctaaaggcaaagctaaaactataaaactcttagaagaaaacaggggaaaaccttctagtgttgaatttatcaatgatttcctagratatgacatcaaaacacaggaaacaacaacaacaaaatagaatagttggactcattctaaattaaaaactttgcacattgaaggacactatcaacagaaca

SEQ ID NO: 134837 - DNA, 514 bp, Homo sapiens
agatgaaaacattctagaagtgaatggtgataatgattgtacaacaatgttaatatactcagtgccacagaactgtacattttaagatggttaagcataaacaaaatggtaaaatttatgtcatgtatacttaaccatttttcaaaaatgggagcaacatatctttctgtatatctaagaaawtcttcaaactcaagttattcataaagagatctctgaaatatgtctcaattcttctcttcacactcagaatttatcaaatgtatgtaccatttatttgtcaaaatgtatgtaccatttatttgtatagtcttattgattgtactagatattttataagttttgcattttctaaataattcttgaaatgagcaggcaaaaagatgcatatatgtacacacacacacacacacacacacaatgtaatgtcttagataattcaggtcagcaaaagtggttttgattgattgattagtttatttttatgtatagtgacaacatcttttgatgaata

SEQ ID NO: 134838 - DNA, 514 bp, Homo sapiens
agatgaaaacattctagaagtgaatggtgataatgattgtacaacaatgttaatatactcagtgccacagaactgtacattttaagatggttaagcataaacaaaatggtaaaatttatgtcatgtatacttaaccatttttcaaaaatgggagcaacatatctttctgtatatctaagaaaatcttcaaactcaagttattcataaagagatctctgaaatatgtctcaattcttctcttcacactcagaatttatcaaatgtatgtaccatttatttgtcaaaatgtatgtaccatttatttgtatagtcttattgattgtactagatattttataagttttgcattttctaaataattcttgaaatgagcaggcaaaaagatgcatatatgtacacacacacacacacasacacacaatgtaatgtcttagataattcaggtcagcaaaagtggttttgattgattgattagtttatttttatgtatagtgacaacatcttttgatgaata

SEQ ID NO: 134839 - DNA, 597 bp, Homo sapiens
aaaaatgaatataaatccaatatatgcttattaaatatctactatacgtaaatctatctactatatatcaatgtagtgtacatgagcttaaaatgcaattcatcaaaaatactacttttataggatatattttataaagataatattttatatttttacttacatttctgctccctaaaatttttttttaaaagttgctataatatgctaatacatttatgacatgcttcaataatttcctttccattaagcaattatattgttttccccacctcaacccctgattaggaaaatggagagcaggctacagactagcaatacgtaatgcaaaacaaatccaaaattagtcactcccttgtccctttccaatgagcacagaaataataattactaraatcttaattacaatgttctttttaggccacataatacacagataagtgaagtgtttaaattcctaaaacacttaattgcaaagacttttttttgggccctataaattacaaaagctgagctatttgatgtattgccaccatcaccttctcatgcaaaatatgaatgaaaataaaaggcaaatttgtgtctgtggcatcagtg

SEQ ID NO: 134840 - DNA, 537 bp, Homo sapiens
catcttgcctcttcttctttttcaataacttctgtcatggcttcatttgtctgttatccattacaattaaacaattaaaataattgtttacacaggcattatgtattttctcagttcataattcaattgcaatatattaawatttggatttctgcctgattattctgttaagtgtcatcaaaactatcatgtccccaaagttattggtcaattctctggctcatcttatttggccactcagtatcctttaaagtaaatgatcacttcctcattctcaaagctttcttacctttggtgacagttttagttttggttctgctgaaaatcatataatttgagacaatggcttgtatcaaggcagtttaggaaggaggtagttctcaaagggcaggactgaaggaatggaaagcatgaagcaggggagaaaagtaaagaaggtgagggtctattagttatccgcagtcagcaatggtggcccaattttgctcgaatctctgagaagtatagtaaacatctcccagactggcccatctgaaa

SEQ ID NO: 134841 - DNA, 582 bp, Homo sapiens
gcaaatttcagtcttaggatttcggcttgcgccagcaggattccagcacattcctaatcttctctttccttcttaatcagcccccacaattgcataagccaattctcaatcacagatgtatatatctatctaatacatacacacacacacacacacaaacatatacacacacatatatgcaaatatacacatgcatatttataacatgtgtgtatatgtgtaacagatacacaaatctattcaatgtacacacacataaacatgtatacayatatacacatatatgacatacacatatgcatacatataaatgcatgcatatggaataaataacatatacatatggatgaatagatagatatagttttctggttatatttctttggatgaaccccaaaggaatcaatgaacaaatcaaccttagagatcattcaaatacaggatagcttgcacaatgttaggggaaaaccttccactaacatttgaagtagtactgtacacttcttcaaaatatgaggcagatcacattactcttttccagtcagagcacaagcccttaccttacagtgacctacacagccc

SEQ ID NO: 134842 - DNA, 582 bp, Homo sapiens
gcaaatttcagtcttaggatttcggcttgcgccagcaggattccagcacattcctaatcttctctttccttcttaatcagcccccacaattgcataagccaattctcaatcacagatgtatatatctatctaatacatacacacacacacacacacaaacatatacacacacatatatgcaaatatacacatgcatatttataacatgtgtgtatatgtgtaacagatacacaaatctattcaatgtacacacacataaacatgtatacatatatacacatatatgacatacacatatgcatacatataaatgcatgcatatgraataaataacatatacatatggatgaatagatagatatagttttctggttatatttctttggatgaaccccaaaggaatcaatgaacaaatcaaccttagagatcattcaaatacaggatagcttgcacaatgttaggggaaaaccttccactaacatttgaagtagtactgtacacttcttcaaaatatgaggcagatcacattactcttttccagtcagagcacaagcccttaccttacagtgacctacacagccc

SEQ ID NO: 134843 - DNA, 582 bp, Homo sapiens
gcaaatttcagtcttaggatttcggcttgcgccagcaggattccagcacattcctaatcttctctttccttcttaatcagcccccacaattgcataagccaattctcaatcacagatgtatatatctatctaatacatacacacacacacacacacaaacatatacacacacatatatgcaaatatacacatgcatatttataacatgtgtgtatatgtgtaacagatacacaaatctattcaatgtacacacacataaacatgtatacatatatacacatatatgacatacacatatgcatacatataaatgcatgcatatggaataaataacatatacatatggatgaatagatagatatagttttctggttatatttctttggatgaaccccaaaggaatcaatgaacaaatcaaccttagagatcattcaaatayaggatagcttgcacaatgttaggggaaaaccttccactaacatttgaagtagtactgtacacttcttcaaaatatgaggcagatcacattactcttttccagtcagagcacaagcccttaccttacagtgacctacacagccc

SEQ ID NO: 134844 - DNA, 594 bp, Homo sapiens
  misc_feature (1)...(594): n = A,T,C or G
atcataagtaaataaaagtgtaaaatatgattttattaaatttaatttctcctcatggcaggtatttttcaaggaagcaattgtgctttgttcatattatcaagaccatgaattctaattatagtgacctctaatggagcaaaacttctagaaagagtttcctaattgaataaataaattgcacaagagtgtacatctaattaaactattaatattttaatcaaatttaatcaaaataaacagaaaatcacaaaattaacagaaatttaggaacattagtaattgtattggatcatkgggttgctagaagcaaaatcttttctctgttatatcacatttcaaacaattggaaaaacagtttccaaatcagcagtcaaaaactatgtaggctttgctgtaaatagtaccaaaaaggacacaaaaaaagggtggttgtattaccaatttgagagaataccaagtgttttcttaactgtggtgtgcatgtaaaagcaaaatctatatttttagctgagtggtaatttcattcacagtatttgattacatgtcatctatgtccaacattntatttttgcctaattcatattttaccca

SEQ ID NO: 134845 - DNA, 594 bp, Homo sapiens
  misc_feature (1)...(594): n = A,T,C or G
atcataagtaaataaaagtgtaaaatatgattttattaaatttaatttctcctcatggcaggtatttttcaaggaagcaattgtgctttgttcatattatcaagaccatgaattctaattatagtgacctctaatggagcaaaacttctagaaagagtttcctaattgaataaataaattgcacaagagtgtacatctaattaaactattaatattttaatcaaatttaatcaaaataaacagaaaatcacaaaattaacagaaatttaggaacattagtaattgtattggatcatgkggttgctagaagcaaaatcttttctctgttatatcacatttcaaacaattggaaaaacagtttccaaatcagcagtcaaaaactatgtaggctttgctgtaaatagtaccaaaaaggacacaaaaaaagggtggttgtattaccaatttgagagaataccaagtgttttcttaactgtggtgtgcatgtaaaagcaaaatctatatttttagctgagtggtaatttcattcacagtatttgattacatgtcatctatgtccaacattntatttttgcctaattcatattttaccca

SEQ ID NO: 134846 - DNA, 594 bp, Homo sapiens
  misc_feature (1)...(594): n = A,T,C or G
atcataagtaaataaaagtgtaaaatatgattttattaaatttaatttctcctcatggcaggtatttttcaaggaagcaattgtgctttgttcatattatcaagaccatgaattctaattatagtgacctctaatggagcaaaacttctagaaagagtttcctaattgaataaataaattgcacaagagtgtacatctaattaaactattaatattttaatcaaatttaatcaaaataaacagaaaatcacaaaattaacagaaatttaggaacattagtaattgtattggatcatggggttgctagaagcaaaatcttttctctgttatatcacatttcaaacaattggaaaaacagtttccaaatcagcagtcaaaaactatgtaggctttgctgtaaatagtaccaaaaaggacacaaaaaaagggtggttgtattaccaattwgagagaataccaagtgttttcttaactgtggtgtgcatgtaaaagcaaaatctatatttttagctgagtggtaatttcattcacagtatttgattacatgtcatctatgtccaacattntatttttgcctaattcatattttaccca

SEQ ID NO: 134847 - DNA, 536 bp, Homo sapiens
catcttgtgtgatgcaagtatttaaaatccttttctttttctctgagctggatagttatgtttctgttctttgaggatacagaacgatgacaaggtgggctaaatgtaagtgcttggacaacatttttgaacaagtgtkaataacagccagatgggaggtgcaaataatgtgcaatgcacttgctgctcttctgatcatgctcactggtgaacggcttctcactgaaacattggcataaccttgtctgtctgtctgtcttttttgttccaagttcacgtgtgacaaggaccatcagcagagcattacaatggccagctgctttggtctgcagctgtaggcaacactaattctttctcttttcattcattcttttaacacaaaattggtcttgacaatgcatttttataatcagtgtgttcacttttcagtgtcaccaattttttacacatgacatgctggttagtttaagaaattgatattgttcagagagttgttttgctagtgtgtttactgagttgaaataaaagttaaaaag

SEQ ID NO: 134848 - DNA, 536 bp, Homo sapiens
catcttgtgtgatgcaagtatttaaaatccttttctttttctctgagctggatagttatgtttctgttctttgaggatacagaacgatgacaaggtgggctaaatgtaagtgcttggacaacatttttgaacaagtgtgaataacagccagatgggaggtgcaamtaatgtgcaatgcacttgctgctcttctgatcatgctcactggtgaacggcttctcactgaaacattggcataaccttgtctgtctgtctgtcttttttgttccaagttcacgtgtgacaaggaccatcagcagagcattacaatggccagctgctttggtctgcagctgtaggcaacactaattctttctcttttcattcattcttttaacacaaaattggtcttgacaatgcatttttataatcagtgtgttcacttttcagtgtcaccaattttttacacatgacatgctggttagtttaagaaattgatattgttcagagagttgttttgctagtgtgtttactgagttgaaataaaagttaaaaag

SEQ ID NO: 134849 - DNA, 521 bp, Homo sapiens
cacaaccactcccaacttaataaagatgaacctggaggagcatttgctatccctgatgtacagaagcagaatagaactaatgtatcascagttttatcagtagtcaacatagagtatccccctaaaatgagatacgacaatgttgaaaatgacactcctctgacttatggaaccatgatatagttatagagctgccatagtgatctgtagttcagaaaagcctgacttcctttctctatatttagtaactccttaagtagacaggcttaggtattttttcaagtgaagcagaatcccacatctactccagggaatccgacatcctaaccagagctggaatgatgtcaaaatataactttctcttttcatgagcaaaacactttatgtgtattttaattaatattttctgcaagttcttactttgtggcacaagaaagtcaaatcagataaactgtacataattttacagctgtggcagaatcgttttgccatttctgtgagatatattccttctgagcata

SEQ ID NO: 134850 - DNA, 490 bp, Homo sapiens
tccttgggacaaacaggaactgacagcaagagatgggctatgtaattatgataaaatgaattagcgtactttagatgacttttagaagtactatcaataygtagggaaaaaaattactaagtttttagtgaaacgaacaattgcaggaggaaactgaatatgaaaataaaatgttcatgctagttactggaaacacatatctttttcaacatttcaacttgaagttcctctttttctgtcctttttaactccaaatcacttttttagggagaaatacttttttacacagttcctctattaaataccagacaagcttcagttattattttaatacaagtggaatgaaataaaaagaactccaaaaccattttatcatttgaagatcagaaaaaaacactactttatcatatcaccctgaatgtcacagagattaaagtggagaccttgaataataaaatccagaccaaaaaggaaaattttctttcattta

SEQ ID NO: 134851 - DNA, 558 bp, Homo sapiens
gaaaggttacatgacttgttaaagtttctttgtttttttgtttgtttgtttgtttgttttttgagacggagtcttgctctgttgcccaggttggagtgtagtggcgcgatctcagctcactgcaacctctgcctcccaggttcaatcgattcttctgcctcagcctctggagtagctgggactacaaatgtgagccaccacacctggctaatatttttgtatttttagtagagacggggtttcaccatattggccaggctggtctcgaactcctgaactcatgatcctcccgcctcggcctcccaaagtgctgggattacaggcrtgagccaccacgcctggctgacttgttaaagtttctaaagttgatttgtgaatggagaaagaaatagaatgtctttcttgcaatgtcaattcaatatcgaattcaatattttttttggtgctcatcttcttttaagatctgtaagactgaaatgtttatgtgcgcactgtaaaaaaggttctgtctaaagcctgaaaaataatttttttttgcaaagagtttctatgttcatt

SEQ ID NO: 134852 - DNA, 561 bp, Homo sapiens
ccattgtatgtattttctgcaaaaaaatttagttcattttttatgtctagttctatgctattctctatggacaacatacaatcacataacacagttcctgtcctagaagagtttttctgtctattaggggaaatataaatgggaagagaaagaagaaaataattcatggagtcgtggattgagactggttgtattgtgaaagacattttgctatatgaaagtcagcamaaagtcccagccttatcatttaccagttataaaaacgtacatgttattttagccttcagtgctagcttttctcatatgtaaaaggggcataatatatgtatccatttttagaattgagtttgcttttgtgcgtcatatagaatagtgccttgaacttaataaatgctggctttttctctcttattctgattggaaatcaccaatttttggctgttggtcagcggatgccctcagctgctagaggtcatctgcagttcctttttacatgggttccctaacatggctgtttactttctcaaaactagcaaaagagatgccagcaagatggatgct

SEQ ID NO: 134853 - DNA, 581 bp, Homo sapiens
tactgaaaacagtttttaatcaattctattacagagattattcagstatccaaaagttttcaaagatatgatctttcatctgctttgtcgttttagtcttggaaatatagtgatataaagagtaaatgtttatcttctcaaattttatcatattttaacattgatctgaaatgttaatgataaattaattttatgtaagacaaaggacagatggaatgaataatagattatgtgctttgagtgcttctggtaatgttagtactttagcatttttatataatgtgatcatgactcacagtgaagttacagttaataattgtgtaaaaattttctgctgctgaaggaattcatatttgctttaaactgtcctgctacagcttatcagtatttcaggcagatgtccctcttaactgtgtaactcatttatctcactgccagctgaaatagtatgaaacaactcaattctgccagttagcagaagtcaatgacaagacattaactcaatgcttataaccacctgggtaataaaattatatcagcagtagtctgcttatgctactgtaagaaaatggaatgatgta

SEQ ID NO: 134854 - DNA, 581 bp, Homo sapiens
tactgaaaacagtttttaatcaattctattacagagattattcaggtatccaaaagttttcaaagatatgatctttcatcygctttgtcgttttagtcttggaaatatagtgatataaagagtaaatgtttatcttctcaaattttatcatattttaacattgatctgaaatgttaatgataaattaattttatgtaagacaaaggacagatggaatgaataatagattatgtgctttgagtgcttctggtaatgttagtactttagcatttttatataatgtgatcatgactcacagtgaagttacagttaataattgtgtaaaaattttctgctgctgaaggaattcatatttgctttaaactgtcctgctacagcttatcagtatttcaggcagatgtccctcttaactgtgtaactcatttatctcactgccagctgaaatagtatgaaacaactcaattctgccagttagcagaagtcaatgacaagacattaactcaatgcttataaccacctgggtaataaaattatatcagcagtagtctgcttatgctactgtaagaaaatggaatgatgta

SEQ ID NO: 134855 - DNA, 569 bp, Homo sapiens
ctggtgacttactctctctgtcccacaactgtgaaagaagatgattatggggctaagctgacagggttggagtaatgaataaatgaacctatgtgtataaatacttgaactaatgcctggcccatagtaagcattatacctctttactgttattattaaatcccgtatcctgtagttgtttgctcctrtttaagacaaataatgtacattgaattaagttggatttctgttcatagtgactatttttcagtattcctttggtattgggctatatcctgggattaaatatccagtttgcagtaatagaattgagatcctcagagtcctcactttcagcaaaaaaagagatcttttgctgaaaaccttcccctgaatatcttcatgacaaccaagaaatctggtgaatttcttttctggaaaagttgactgactggattgcccctttgagaattaaatttttggatggaaaaatttagtcaactgctcctgctttctccaataaatgaatcccttcaggagcagcattttaaatgtgtttattgcacataatggtagaaaaaacaaaaatg

SEQ ID NO: 134856 - DNA, 569 bp, Homo sapiens
ctggtgacttactctctctgtcccacaactgtgaaagaagatgattatggggctaagctgacagggttggagtaatgaataaatgaacctatgtgtataaatacttgaactaatgcctggcccatagtaagcattatacctctttactgttattattaaatcccgtatcctgtagttgtttgctcctgtttaagacaaataatgtacattgaattaagttggatttctgttcatagtgactatttttcagtattcctttggtattgggctatatcctgggattaaatatccagtttgcagtaatagaattgagatcctcagagtcctcactttcagcaaaaaaagagatcttttgctgaaaaccttcccctgaatatcttcatgacaaccaagaaatctggtgaatttcttttctggaaaagttgactgactggattgmccctttgagaattaaatttttggatggaaaaatttagtcaactgctcctgctttctccaataaatgaatcccttcaggagcagcattttaaatgtgtttattgcacataatggtagaaaaaacaaaaatg

SEQ ID NO: 134857 - DNA, 587 bp, Homo sapiens
aacctgaatcttatttttttaaaaaatgatgcttccattggcatgcaacttttcagtttgtaatgtgtgggtgtgtgtgtacacatacatatatatatttctcagttaattttcaaaaatattctcagggtaataagtttaagatcaatatagaatcaaataatttcaaagttggtgatcacgtgttctaaacttttgaggtccataaaaataatgcagtttttctaataccacacaactaattaggwgtatagctataaacatagatatagggaacactctgtctaaatttttttaatttacaaatatgaaaagcatatgctgttaaaataaatgtcattttattctgagtcttatttatttatcctcttaatttttattaaatatacaatcttaacagtgttggttatattaaaattacaccatctaatgcagtagtcactaccctcagatggctatttgaggttaaattaatatattattctgttctcacactgctaataaagacatagccaagactgagtaatttataaaggaaagaggtttaatggattcacagttctacatggctgggaggcctcacaatc

SEQ ID NO: 134858 - DNA, 587 bp, Homo sapiens
aacctgaatcttatttttttaaaaaatgatgcttccattggcatgcaacttttcagtttgtaatgtgtgggtgtgtgtgtacacatacatatatatatttctcagttaattttcaaaaatattctcagggtaataagtttaagatcaatatagaatcaaataatttcaaagttggtgatcacgtgttctaaacttttgaggtccataaaaataatgcagtttttctaataccacacaactaattaggagtatagctataaacatagatatagggaacactctgtctaaatttttttaatttacaaatatgaaaagcatatgctgttaaartaaatgtcattttattctgagtcttatttatttatcctcttaatttttattaaatatacaatcttaacagtgttggttatattaaaattacaccatctaatgcagtagtcactaccctcagatggctatttgaggttaaattaatatattattctgttctcacactgctaataaagacatagccaagactgagtaatttataaaggaaagaggtttaatggattcacagttctacatggctgggaggcctcacaatc

SEQ ID NO: 134859 - DNA, 526 bp, Homo sapiens
tgcacagaatcacatacttaaaacctctgttctttttgagctgaaacattcaaattgattttggctgatgaattaaatgagcctctcagcaattagtaggcaacctcagcatgctctgatccttccatatgcagccttttggtcttagtgttaattacaataaacataaataagtatttatgtttaaatataaataaatatttatatttaatartattttccattactggaaaattattcggagctgtaagcagggaatctaactgaagagagaaacctcagaaaacaataagagaacaaaattattaggaaatatggattcaaagaaaggaaatatcattatagagtaagaagaaaaaggcacttcatgtagcgagactgaacttcctttgaagcataataagagtttgagatgggaaaaaggaagggaggctcctctaaatcgaggatgagcagtcctgaagattcaaatatacacataatatgacaagagtggagattggggaacagacactgaggaagcatg

SEQ ID NO: 134860 - DNA, 581 bp, Homo sapiens
atgttgtttaattgccatgtttttgcatagtttccaaaactgctcttggtattgattttaattttataccatactgttatgaaaattacttgatatgattttaattttttgaaaatttgttgaaacttgttttgtggcctaacatatagtctatcctggagaatgttccatgtgcttataagaatrtgtattcttcagttgttggatgaaatgttctgtaaatgtttgttagtcttatttgatctaaagtccggtttttcttgcttaagtgcaatgtttctttgtttattttctcttctgataatctgtctaatgctgaaagtatgatgtggaaattcacccattatgattgtataaaagtctctctctctctagatctggtaagatttgttttatgaatctgggtgtcccagttttcagtgcctatatatatatttagaatttttgtattgtcttggtagattgatctctttattattatataatgcccttttttgcctttttttcctgctgttagtccttaaaagtctgctttatctgatttaaatatagctagtcttgcctgtttttggtttcagttt

SEQ ID NO: 134861 - DNA, 621 bp, Homo sapiens
ttttgttcctgttgtattattaattgttttctggtggcttagtatagtcttttttctttttctcttgatcgtccttgtgatatgctttttctgtggtagtaactatcatttgagtcttttttattacttatttgtatgtacttaacagtgagttttatattttcatgtgttttcatgatgatgactattatcctttaacttccaagtttaggattctcctgagcatttcttgtaagtcaggtctagtggtattgaattacctcagcatttgctcatctgtgaaagagtatttctttttatgtgtgaaggataattttgcttgatatagtacccttgggtattaragtttttatcagccttttgaatatatcctcccattctctcctgtcctgtaaggtttatgctgagaaagagatccaagtgggcaacttgaagaaaaagtgcctatcattgattttagacagtttgactataatgtaccgtggagaagatttgtggcattgtgtctgattgaggattgctgggcctcctgaatctgggtgtctagatctcttcctagatttgagaaattatcttctattatgttgttgaatagttttttgaacccttctctctttgctt

SEQ ID NO: 134862 - DNA, 583 bp, Homo sapiens
tttgttcagggcagttctgtttgtttactttcccaaagtaaaataaaaaatagtactctctcttcttctcaaaaaaaccaatttttgctggataaacataaaataagttttctgttcccattaagtatagttcaactgtatacatttgtactttgacattccatcatgctatgataaaaataattttgactagcctttgacctttatacactactgaggccattttcaaggacaggtgtattcacagaggggaaattttaaaaattccaccattctaggtcctctgtcattaatatattaattggtagctgtagaatcttttagcaagaaggtggctgttgagcccagactctctgtgggagctgcctaaggagtcacttcatccaagggcaagattcaggaacaaataggcagggagaggaaatascactaagagagtaaatgctcaacatctacctccctataactaaaaattaggtaatgtaccaaatttatgtaatttccactattacagaaaacttacgtaaataggcattttatgtaaaatacaaaaaaatgcaaaataatgacaataaccgaaaca

SEQ ID NO: 134863 - DNA, 609 bp, Homo sapiens
ttataaaaaattaaaaacaggcaaaactaaacttctgcttcaaagtagactgtagtaagtaatgtgaggccaagaawactgctgattaaactacaaaaactgaataaattacaaaaatcatattgttaaagataacagaaaactgaggaatcaagcagtactagatgcactaaaagttcagacaggcgaaaacatttcagaagttgctgaggatcagcagcttttgtttccctggggcatttgcctatatgggctgaagcatgaggattcggtattcacctaagcaaagcatcactcctgggagaaagagatcagcaatgttttggtgcccactcagcaaagaagtaacaaaatcagagaacacatagctggtttataattcaatacattctgaggttttgaatgaaactaaagtgctaaagcaaaagcctctgaaagtcacagtaaaattattctcacctttatcatgattaaaagtctgaaaatcctggtggtaaaatcggtaatggtgaaatgacaatgcagagtgctggcacctttttcttaaggatgcttaaggatttgggagtcagctggaggataagaatccaaggtaaccacaggcagaag

SEQ ID NO: 134864 - DNA, 631 bp, Homo sapiens
acacagtatggagattcctcaaagaactaaaaatagaactaccatttgatccagcaatttccctactgggtatctactctaaggaaaataaattattattttacatagatatctgcacttatatgttatcacagcacttttcacaatagcaaagatacgaaatcaacatgtgtctatcactggatgcttgaataaagaaaatgtggtatatatacacaacaggatactattcagccataaaaaagaatgaaattaagtctttcacagcaacatggatggaactggaggctattatcttcagtgaagcaagccagatacagaaagacaaatattgtatgttctcactcataagtggaagctaaatgcgtatgcaaatacatagagtstggaatgatagactatggagacttggaagggtgaaagtgtgggagggggctggatgatgagaatttacttaaagggtactatgtacgttacttaggtgatggatacactaaaacccctgacttcaccactaggaaatctatgcatgtaataaaattccacttctactccataaatttatacaaaaataaaattcagcttcataaaatttagtaaattaattacaaaatagtaaatgttgcacctg

SEQ ID NO: 134865 - DNA, 631 bp, Homo sapiens
acacagtatggagattcctcaaagaactaaaaatagaactaccatttgatccagcaatttccctactgggtatctactctaaggaaaataaattattattttacatagatatctgcacttatatgttatcacagcacttttcacaatagcaaagatacgaaatcaacatgtgtctatcactggatgcttgaataaagaaaatgtggtatatatacacaacaggatactattcagccataaaaaagaatgaaattaagtctttcacagcaacatggatggaactggaggctattatcttcagtgaagcaagccagatacagaaagacaaatattgtatgttctcactcataagtggaagctaaatgcgtatgcaaatacatagagtgtggaatgatagactatggagacttggaagggtgaaagtgtgggagggggctggatgatgagaatttacttaaagggtactatgtacgttayttaggtgatggatacactaaaacccctgacttcaccactaggaaatctatgcatgtaataaaattccacttctactccataaatttatacaaaaataaaattcagcttcataaaatttagtaaattaattacaaaatagtaaatgttgcacctg

SEQ ID NO: 134866 - DNA, 554 bp, Homo sapiens
tctggtctgccttaaataataacttagtgagggggacttgccaactgtcttgcatctcctaatcaactcaccctccttgatcttttcttttttaatttctaactcctgtgaattgggaaaatgcttcattgcaatgaaacagtgtccaccaactgacaaaagttccataatgaaaatctgaaaaaatggctaacttgtagtatcgttatagacaaaggagatataaaactctcaaaagaaaaaggcagaaactgtggaaatctttagttacacattttgaggttaatctcttgggaataactactattctragcagtggcgatacacagacatacatgtctgtatatattgagtgggtgtgtatctatgtatcttgcatcataaactcttactcctctaccctggttttcttgtggtaatcagacagcactacatggaaatgggaaggttcagcctgggacctgaaggctatttaattttcatacacttttacactgaagtgaaaacacacatagaaaagtacacaaatcagctaattaccacaaaggagacat

SEQ ID NO: 134867 - DNA, 469 bp, Homo sapiens
gaaaagtacacaaatcagctaattaccacaaaggagacataagcatgcaacttcccaatctacaaggcttctggagggggtgtgtcagtttgaatccccgaccaaactctcaaaacacaattaggcttatgcagcaccaaatttatttagcttaaaaaaaagatgcagatcaaggactaactgcagcatcatcacagagacttcaggtgttcagatgcagcttctgatgccccaaatcaccatacatagttgcagtttggttacaaatttgatgaaaggctgacacaaatggattatatcagcataagaaagcaaccaagcctgggaccttgaacttaaataccttgttgtgtatmcccattcttttgcctttaaattataagttatacagtgaacagtctaatggccattcatacaccagtgttcaatatatagcaggccctgagaaaccttttctatcttcagagtt

SEQ ID NO: 134868 - DNA, 453 bp, Homo sapiens
tattgatttgtgcatgttgaaccaaccttaaatcccagggataaagcctatttgatcatggtagrcaagtttttgatatgctgttaggtttggtttgccagtatttccttgatgatttttgcattgatgttcattgaggatattgacctgaagttttgtgtgtgtgtgtgtgtgtgtgtgtgtgtgtgtatgcacatgcacgtgtgtatgtgtgtgtgtgtgtgtgtgtgcttgccaggttttggtatcaggatgatgctggccacacagaatgcattagggaggacttcctcctcttcaattttttttttaactttaagttctgggatacctgtgcagaacatgcaggtttgttacataggtatatgtgtgccatagtggtttgctgcacctattgacccatcctctaagttccctccccttgctccccaacccccaacaggcccttgtgtg

SEQ ID NO: 134869 - DNA, 453 bp, Homo sapiens
tattgatttgtgcatgttgaaccaaccttaaatcccagggataaagcctatttgatcatggtaggcaagtttttgatatgctgttaggtttggtttgccagtatttccttgatgatttttgcattgatgttcattgaggatattgacctgaagttktgtgtgtgtgtgtgtgtgtgtgtgtgtgtgtgtatgcacatgcacgtgtgtatgtgtgtgtgtgtgtgtgtgtgcttgccaggttttggtatcaggatgatgctggccacacagaatgcattagggaggacttcctcctcttcaattttttttttaactttaagttctgggatacctgtgcagaacatgcaggtttgttacataggtatatgtgtgccatagtggtttgctgcacctattgacccatcctctaagttccctccccttgctccccaacccccaacaggcccttgtgtg

SEQ ID NO: 134870 - DNA, 559 bp, Homo sapiens
ctgctgggaagccccacccagtgaagaaggatgggtcagggtcaggcctgtagaggcagtctggccgcagtctgccacagccagtgttttggactgygggggacacctcttgggaccaagccatccagcttccctggctccagcaggggaaatgcatggcctggagctatagagatgaatgctacccttccccattccagggagcttagcatgttaggcatttatgagccccagtgctggctgctgcccctcccccaggagctcaaagggcttagcaggcagctgcaactgtggtgctggtctcctctcctctcaggagctcaggaggcttaggcaggttccagctgagaggcttttgaggatctgcagggctccaagattgggatcctaggacctgctgacatgggtttgtgagtgggttgtaaagttctgtggaaaaagcatggtttccctggctggttagcacactacctcactgcctcccttggctgggggccgtggggtgggatctcccctgccctgtgtggctctcagatgggccactgtaccacactgccct

SEQ ID NO: 134871 - DNA, 590 bp, Homo sapiens
taacaataacttactgtgtatttcaaaataactaaaagagtggaattggaatgttcttaatgcaaaaaaagataaatgcttgtggtgatatacatcccaattaytcggatttgatttttacatattgcatgcttgtatcaaaatatcacatacaccccataaatttgcacagctaatatgtatctataataactaaaaatataaaaataaaaaaatatcccttcaaactggatgaaatataaaacaccagcctgttacttgcaaatgcttttgccatgtaaggtaaaactaatacaaagtttagcaattttgttgcaatttgttccaaagcatgcagtctgacaaatctatagggctgcttggagctaggaaagatttccttagtcgtggctcataatcacttctattcaaaatgttgacccttcttgaccccatcctgataaacagcatgagttagttaacaagtctggttaacttgtcttttgagaagtgcctgtcatttagtgatctgcttgtgaatgacacattattcattttaaccaaaagatagcatttcagacacatcaaaactgaaaagagaagccaagaag

SEQ ID NO: 134872 - DNA, 550 bp, Homo sapiens
gatttagcattattcttaatggtgctaaggytttcagaatggtcaatgagtattggcttcaacttagagtcttcacttgcattagcccctaacgagagagtcagcctgtcttttgaagtcagttattgacttctctctagttataaatgttctcaatgacatattttcccagtagaaagctgttttatctccactgaaaatctactgcttagtgtagccaccttcatcaatgatcttatcttgatcttctggataacttgctacagcttctacatcattacttcctgcctccctttgcatttttatgctatagaggcagcttcttaaaccttgtaaaccaacctctgccagtttcctccttttcttctgcagcttcctatctctctcagccttcatggaattgaagagagttaaggccttgctatggatcaggctttggcttaaggaaatgttgtggatgatttgatcttctctccaggcccctgaaactttctccagatctgcaataaggctgtataattttcttgtcatttatgcattcactggagta

SEQ ID NO: 134873 - DNA, 550 bp, Homo sapiens
gatttagcattattcttaatggtgctaaggctttcagaatggtcaatgagtattggcttcaacttagagtcttcacttgcattagcccctaacgagagagtcagcctgtcttttgaagtcagttattgacttctctctagttataaatgttctcaatgacatattttcccagtagaaagctgttttatctccactgaaaatctactgcttagtgtagccaccttcatcaatgatcttatcttgatcttctggataacttgctacagcttctacatcattacttcctgcctcmctttgcatttttatgctatagaggcagcttcttaaaccttgtaaaccaacctctgccagtttcctccttttcttctgcagcttcctatctctctcagccttcatggaattgaagagagttaaggccttgctatggatcaggctttggcttaaggaaatgttgtggatgatttgatcttctctccaggcccctgaaactttctccagatctgcaataaggctgtataattttcttgtcatttatgcattcactggagta

SEQ ID NO: 134874 - DNA, 590 bp, Homo sapiens
taacaataacttactgtgtatttcaaaataactaaaagagtggaattggaatgttcttaatgcaaaaaaagataaatgcttgtggtgatatacatcccaattattcggatttgatttttacatattgcatgcttgtatcaaaatatcacatacaccccataaatttgcacagctaatatgtatctataataactaaaaatataaaaataaaaaaatatcccttcaamctggatgaaatataaaacaccagcctgttacttgcaaatgcttttgccatgtaaggtaaaactaatacaaagtttagcaattttgttgcaatttgttccaaagcatgcagtctgacaaatctatagggctgcttggagctaggaaagatttccttagtcgtggctcataatcacttctattcaaaatgttgacccttcttgaccccatcctgataaacagcatgagttagttaacaagtctggttaacttgtcttttgagaagtgcctgtcatttagtgatctgcttgtgaatgacacattattcattttaaccaaaagatagcatttcagacacatcaaaactgaaaagagaagccaagaag

SEQ ID NO: 134875 - DNA, 520 bp, Homo sapiens
tggaggcagggtgagatcacaggaccacaggaccagggcgaaattaaaattgctaatgaagtttcaggcaccattgtcattgataacatcttatcaggagacagggtttgagagcaactggtctgaccaaaatttattagatgggaatttcctcttcctaataagcctgggggtgctatgggagactgggatttatttcacctctayggtttcaaccatagaagatggccacacccaagggggccatctatagacccatccccaggcacgtattctctttcccagggatgttccttgctgagaaaaagaattcagtgatatttctcccatttacttttgaaagaagagaaatatggctctgttccaccccactcaccagtggtcagagtttaaggttatctctcttgtttcctaaacattgctgttatcctgttcttttttcaaggtgcccagatttcataatgtttaaacacacatgctctacaatttgtgcagttaacgcaattatcacagggtcctg

SEQ ID NO: 134876 - DNA, 520 bp, Homo sapiens
tggaggcagggtgagatcacaggaccacaggaccagggcgaaattaaaattgctaatgaagtttcaggcaccattgtcattgataacatcttatcaggagacagggtttgagagcaactggtctgaccaaaatttattagatgggaatttcctcttcctaataagcctgggggtgctatgggagactgggatttatttcacctctatggtttcaaccatagaagatggccacacccaagggggccatctatagacccatccccaggcrcgtattctctttcccagggatgttccttgctgagaaaaagaattcagtgatatttctcccatttacttttgaaagaagagaaatatggctctgttccaccccactcaccagtggtcagagtttaaggttatctctcttgtttcctaaacattgctgttatcctgttcttttttcaaggtgcccagatttcataatgtttaaacacacatgctctacaatttgtgcagttaacgcaattatcacagggtcctg

SEQ ID NO: 134877 - DNA, 581 bp, Homo sapiens
ggaactgtgagtcaattaaaactcttttgttcataaattacccagtgtcaggtagttctttgtagcagtgtaagaatggactaatacacaagatatgaattttttttgtggctcttgatttccaaattgtcttccaaatgaacaaaatcttaaaattttaagactgaaatctccctcagctggtgttctggtgacgggtgtcatcattctttcctggcccttaagtctttaggctttatttatgctgggttattctctgccttctgcttaagcttttcgtcttctcattgaaytttattattctccagaccaaatatgaggctctgaatggtgatcagcttaatgacacatgaaatatataaaatttcgagtcatatagacatgacttcaaatttcagctccatcacttacctgcactgtgtgcttgggcatgttccttaacctctctgatcctcagttttctcatctgtgaaggaagggtaataatttctacttcaaaattattgctgtgagttattggggtcaatgtatgtgaaggcttaaaagtgtctattgtttttcttaaaagtgtctagtgtttt

SEQ ID NO: 134878 - DNA, 589 bp, Homo sapiens
actgtgtaatgttgtatgagatcacaggggagggccactacattaggttggtcggagttggtgttagtcatggaaggtttgcttgtagagtcattggtgggtcatcatgataaagccagataytgagaataaatttctgaccctgtatcagtatgtcagccagtccaccaaccaagccaaaagatcaaacgttactacacaaaacatttttcaagttagatgtttccagcagtgcaggcttccatgtcttttctggccatggtcaatatgtgacagaagctcaggtgtctgtgcatactcggaacaaaggaaaaattaccagagagaagaaaacccttcctaagtagaggttttctactactgctcagtgtagctatctttgttggctttgtggcctttctagcttgggacatcccttcctcatggcctgtgataactacctgttctgtctgactttgctgacctgaacttgatccctctgattattacgcaatgcctgtcctggctccatagcctctccttttctgtcaccactcctatctaggtctgacatgtgttcttctgtacttttaacccatatttcacaaag

SEQ ID NO: 134879 - DNA, 583 bp, Homo sapiens
agattgcacattctccaaattcagaaggaaggcacagggccctgctggtacactaggcacagataggccctcacatacacttagcttccacctttccctctctcaactcatctggggaatatgttttctcaaccaagatattgagacactaaatgactgagagttaactgaattagatgttcattccaaagtagattactttagctctttggacatttaagtttgttgtgtaatatttacagatcatttcctattaactgtaataatttaccaatcagttaccattaactatagcaaacatgtctcctttttggggagtcacaataaaatttaattctagaaaactgatggaaacagttctaaatgataaagatgctgtacattccaataacgatttatttgtgtatttyggtgcaggaatattcttggagtaaggcaagggcacacatttctgaactggatatgaattgtttgctgtaaattatggcacaaaatagacactgaaagaaccagatgttcagttcgttttcattttgggcattctaaaaataaacttttaggaaaagctattgttaagaacagt

SEQ ID NO: 134880 - DNA, 548 bp, Homo sapiens
tttagttataaagctgaatacaaagtaaatttttaaaacaactttaaaaccagtaaaattcaaatgaacaacattagcttaatgctagagaacattgtttgaggcaatgttgtcaatgctgtgggtaatagcagaataatacatttttctatattatgttttatttgtgatcgagggtaccttttaataccttgagtatgatacatcattctcactattattggtatttttcttctaaattattaaacttatcattagccattgatgcactattttgaaatggcaatcaattacagagttcctmccaaaaagtaccctttgcagaatattttccattcattatatctgtaccactatattttctgacaatgaactgtgacagttgtaggaacaaagatgagacccatgtgttatgtccctttagtaatataagtattatattgaatgttagaggtgagtttcttttgagttctgcatgccgttgcttgcttgatgagaactcaatttcctggtcatttatttttctttcagaactgccatgacctgtc

SEQ ID NO: 134881 - DNA, 548 bp, Homo sapiens
tttagttataaagctgaatacaaagtaaatttttaaaacaactttaaaaccagtaaaattcaaatgaacaacattagcttaatgctagagaacattgtttgaggcaatgttgtcaatgctgtgggtaatagcagaataatacatttttctatattatgttttatttgtgatcgagggtaccttttaataccttgagtatgatacatcattctcactattattggtatttttcttctaaattattaaacttatcattagccattgatgcactattttgaaatggcaatcaattacagagttcctaccaaaaagtaccctttgcagaatattttccattcattatatctgtaccactatattttctgacaatgaactgtgacagttgtaggaacaaagatgagacccatgtgttatgtccctttagtaatataagtattatattgaatgttagaggtgagtttcttttgagttctgcatgccrttgcttgcttgatgagaactcaatttcctggtcatttatttttctttcagaactgccatgacctgtc

SEQ ID NO: 134882 - DNA, 547 bp, Homo sapiens
ccttaagatgggggcaggtaagactagtttaatttgggatgcatttcttactgtgcattcttctttccactaagataaaagtggttaggaggaaaaatccctgggaaaggttggagtagggagaattctcttgttactctgttactctgtgcaggacatggcatgctactgaaagttataagcaggcttctaccttatcataacttttatttggtcttagaaatattttatttttatttatatgcatacaagcaggaccagccaccagtataggcctaacactgtgccttcagtgckctgggcttcagcctgtctgtcttcaggtctcctggggagctccaaggacaccaatacaccaaaggagacatggcagcgctcatcaacattgaatttcactgtgaaagtgtgtcaggttgttattcttcatggatctctgagaatcaggcatcatggatgagggctcagagatgagaatttttggaatctggagcatgtagtggcagtgtgaggtccctgagcatctggaggtaagggaacatggtggtag

SEQ ID NO: 134883 - DNA, 616 bp, Homo sapiens
tttttaagactattttttagagcagttttaggctcacagtaaaatgagaggaaggtaaagatatttcccatttatcccctagtcccacacatgcctagtctctcctgattattagtatgcccctccagagtgatacagttgttgcaattgatgaacctgtattgacacatcataatcatccaaattccatagtttactttagggttcactcttagtgttgtatattctataagtttgaacaaatatgtaataaagtgtatccatcattagagtatcacacagagtattttcactgccctagaaagttatctgtgctttgcctattcaccccttccacaaccctgatcccttgacaatcactgacctttttactgtctccatagttttaccttttctagcatgtcgtatatttggtttccgtattttttttaacttttyttttaggttcaggagtacacgtgcaggtttgttttataggtaaacttgtgtcacagaggttggttgtacagattatttcatcacccgggtactaagcctagtacccagtagttattttttctgattttctccgtcctcccaccctccatcctcatataggccccagtgtctgttgttt

SEQ ID NO: 134884 - DNA, 616 bp, Homo sapiens
tttttaagactattttttagagcagttttaggctcacagtaaaatgagaggaaggtaaagatatttcccatttatcccctagtcccacacatgcctagtctctcctgattattagtatgcccctccagagtgatacagttgttgcaattgatgaacctgtattgacacatcataatcatccaaattccatagtttactttagggttcactcttagtgttgtatattctataagtttgaacaaatatgtaataaagtgtatccatcattagagtatcacacagagtattttcactgccctagaaagttatctgtgctttgcctattcaccccttccacaaccctgatcccttgacaatcactgacctttttactgtctccatagttttaccttttctagcatgtcgtatatttggtttccgtattttttttaacttttcttttaggttcaggagtacacgtgcaggtttgttttataggtaaacttgtgtcacagaggttggttgtacagattatttcatcacccgggtactaagcctagtacccagtagttattttttctgattttctccrtcctcccaccctccatcctcatataggccccagtgtctgttgttt

SEQ ID NO: 134885 - DNA, 559 bp, Homo sapiens
tttttctttcagatgcacagggaatgcacctattattgctatatagattgttcctcctgtaatttcactaactttttattcatgcacttcaaacaaactttactactacattatatgatatataataaaaaaagttaatttctgcacatactcgtttggtcacttgacatttctaaagcttcacttctcatattattttcaaggtaaaatagcggrttatcatctgatgcacactgataattttgatagccaaaagtttggctggttggaaaaaaagactttcaattcctctataccctactcctaagatttttctcttgttatgaattatttgcatcaatcatttgaaccagcatagcttattatttttttgtttgcagtgtctcatttttaattcaatttttttcaaaatgtagaaagtcttttatcagaacatatacaaataaggaggagagatgctttcaagaattttttaattcccagtttacaccactgggtacacccagtggtacaccactgtctgtaaacagatggtgcagaattttagttctaaactagt

SEQ ID NO: 134886 - DNA, 336 bp, Homo sapiens
aaagacacagatattggagggggcagggcggtctgcaaatcctggcatctatttcattaaatgattgtagttacttgtattactacttacagcaaaaggcagcaaatattaaacacctccattatctgcttatcttctaacttttagcacccgactgtatatatatatatatattctcccccctcacttgtctagttcattcttgaagcaagttactggaatccggattagcatatccatttycttatcctatcactgtttaatataacctagaaaatcaatatgtatgtatcctttttgtgattctgacatactccctctctgcttcttggaatt

SEQ ID NO: 134887 - DNA, 559 bp, Homo sapiens
ttgggaaccactattttaactgaattttcaagcaatccactaagaaaaaatttatcaaactggttgtttgataaataaaatcctaggagatgttgagagacctggaagaccctgccataagcggtatgatacaaaggacttctctccatctcactgtcactactgctacagccctgatgaacatgatctttttcagtttgttagattagggaaggaaaaaaatgccctgtcaatgctgctctctagttcttctgttaaatatgtcacgagtcagygaacccagaaatagaaaacatagattatagtttcccaggtatttttagaaatacttagaatttgttcccccgagaaaatgcctttttctccagttatggtttcctcagccccaagggcccgtgctccctaagtggtagtatggagtggaggctgctactcaattgatgagaaattactatggctgggctcagtggtatgtagcctatagtcccagctactcaggagggtgaggcaagaggatagcttgaggccacaagtttgagaccagcctaagaaatacagc

SEQ ID NO: 134888 - DNA, 586 bp, Homo sapiens
aataaatatatatgctttttatgaaagaaatgtaaaataaaatggcaggtcaaactamaacccaagttccaggggagaattcaggctggtccaaacaaaaaagtggtagcaatgttcattcagactaaagcaaatcaaatgaaaagtatgaaatcacaaaaagatgccatgttacactgataaacattcaactgatactgaagagaaagctgcacgaagtgtatgcactaaataacacatataagttaaaactctcagaaataaaaggaaaagcataattgtgtgggagacttgaagatctctgcagcctatacagatcaaaaggtaatagaccaaaaatatagtttttcaaaaaccattaccaaaattggcccaagaactagtagaaatatgaatagaaaaataaccataaaagaaatagaaatgtagtcaaaaatataacaagtcaaaaagcactcataccagttgctttgaaagaatactttgcattttatataaaatctccctgagaattaaataacataaagttagccaacttattttactaagtatatgaccctaaagtcataactaggcaaggaaaacg

SEQ ID NO: 134889 - DNA, 525 bp, Homo sapiens
gagagagagaacaagagagagggacagaaaaagaaaaagaaagacggaaagacagaatgacaaaagaaagaaaaaggaaacaaaaagaaaggaaagaaaagaaagagagaaagagagagaaggcaagaaagctagatagattgattttgaggacaaagctctgattttttatcttgcccaaattcctatgtaaggggtctggggagtcatgccctccaaaccataaattctcctcagatgggttttatttgaccatgtatatcatgacttactttccaatatgactgtggcataacaaggaagaaaatcaaaatgttttaccccaaaatatattttgttgccataccttgaaattgccctgcaaagtctmttgtgggaaaaacccacattctataggaatcccctttcccctttgttttccttccttccttcccagatccaggagataatcagctaagagccaggtatccttttaggtctgataaggaacattttacaacctgctctttctctccgaagtttgct

SEQ ID NO: 134890 - DNA, 527 bp, Homo sapiens
catggaatgggctgcctttacatataataagcctgctgacattagaattgtttagacagaggttgaaaatattaacaattgtattctttgcatatcaacacatgtcaggccaggcacgggggctcacacttgtgatcccagcactttggaaccctgaggcaggagcatcacttgaggccaggagttcgagaccagcctggccaacatggtgaaaccctgtgactactaaaaataaaaaaaaattagccaggcatggtggtgcacacaaggttgaggcacaagaatcgcttgaacctgggagatggaggttgcagtgagccgatttcatgccactgcactccagcctgggcgatagagcaagaccgtmccttaaaaaaaaaaaaaaaaaaaaaagacatctcaagtctctgcctcttgcctaggctccaaccactctgaatcattctgtgatggagtttctgtagaactctcctgttgccaaattgtttgactctacaacatctcttaaaaattattataaactattt

SEQ ID NO: 134891 - DNA, 578 bp, Homo sapiens
aatacagaaaaatcaattgtattmtatatatcagcaaaaataattataaattaaaaatgtttaaaagatataatttacaatagcataaaaaatcaaatatctaggagtaaatttaatagaagatataaaagactcttacagagaaatttattataaagatattttaaaagaccaaaacaaagggatatattatattcatagatcagatgattccataatgtaaagatgtcatttctcatctatttgatctataaagtcagtataatccctttcaatcttccagcagatctttcggggacattgaaaagatagcttaaacatttttaaagaactgcaaaaggccaagaatgccaagacgattttaaaggaaaaaatgttaagatatttcactttctgatctcaaaacttattacaaaggtagaatgagtaacaacagcgtgacactgccaaaggtatagaaaccaaaggaacagaagagagaggcctgaagcagatacttatttttggacatttgctttataacacatgtagccttgaggagaagtagggaaaatgaatactttttcaatagatggtat

SEQ ID NO: 134892 - DNA, 495 bp, Homo sapiens
ccagcttcctagtcctctctggaggatctgtatatgtgagagtcttgtgccaactgctgtttgccttgatgccaccactactttgctttcctcttcaaccacataaagtatgactgatmtttttcttagattattgtgggttgttttataacagttgccctctttaccactaacaggagctattgaagtgactaggaaataccaacctctacactattattctcctagaggagtcactttatagggttttgtaggttaaaagtttggcaatcctctcctttccacagatacaaagctttgaggtctgagatgtgtcactccaatctgactcttaggcccttatactgagtctaatgcctcatgcctaatttcttactgtttggaagtttttcttccagaggctctgcagtttatttttacaatttagtttctttatggcctctccaacccctttactaggcacatttacataggtcaaccctcggtatacacagt

SEQ ID NO: 134893 - DNA, 495 bp, Homo sapiens
ccagcttcctagtcctctctggaggatctgtatatgtgagagtcttgtgccaactgctgtttgccttgatgccaccactactttgctttcctcttcaaccacataaagtatgactgatctttttcttagattattgtgggttgttttataacagttgccctctttaccactaacaggagctattgaagtgactaggaaataccaacctctacactattattctcctagaggagtcactttwtagggttttgtaggttaaaagtttggcaatcctctcctttccacagatacaaagctttgaggtctgagatgtgtcactccaatctgactcttaggcccttatactgagtctaatgcctcatgcctaatttcttactgtttggaagtttttcttccagaggctctgcagtttatttttacaatttagtttctttatggcctctccaacccctttactaggcacatttacataggtcaaccctcggtatacacagt

SEQ ID NO: 134894 - DNA, 576 bp, Homo sapiens
ctcacataaaaatagaaattccaaattctatgtttgctttatccccattctttattctgcctagatattttacagttgcatcaccaagctatagcatgcaatcgtaatctgatgtgtgttggtgagtataaacacatttctgaataatgctattattttagaaaatagctgctcaatacatttgtgagatgaagcaattacgctctctgaactaattaaaaacacgttacatatgtgtatgtacatgtgtgtatatacacacacactcacacatacataaagagacagagagaaaaattgtatacacctattctaggtgtaaccatgagcttaatgaaatgaaccctaaaaaaawacttgcaacatctacatttaggccttgaataaaatgagaagtatgagcgtgggcaacacccaaccatactaagaggcaagtttgtctagctgggtatcattaaggtgacaggaatagccttcatttcacaaattgtggcaatgatgtggaaggacggacataaggaaagaaagaaataagaaaggaagctacttccgtgaaaatggcctacctcatccgca

SEQ ID NO: 134895 - DNA, 576 bp, Homo sapiens
ctcacataaaaatagaaattccaaattctatgtttgctttatccccattctttattctgcctagatattttacagttgcatcaccaagctatagcatgcaatcgtaatctgatgtgtgttggtgagtataaacacatttctgaataatgctattattttagaaaatagctgctcaatacatttgtgagatgaagcaattacgctctctgaactaattaaaaacacgttacatatgtgtatgtacatgtgtgtatatacacacacactcacacatacataaagagacagagagaaaaattgtatacacctattctaggtgtaaccatgagcttaatgaaatgaaccctaaaaaaatacttgcaacatctacatttaggccttgaataaaatgagaagtatgagcgtgggcaacacccaaccatactaagaggcaagtttgtctagctgggtatcattaaggtgacaggaatagccttyatttcacaaattgtggcaatgatgtggaaggacggacataaggaaagaaagaaataagaaaggaagctacttccgtgaaaatggcctacctcatccgca

SEQ ID NO: 134896 - DNA, 586 bp, Homo sapiens
agatcttcttttccctccaatcttcttttcccctcgactttaatttgcccagttatacctcagtgttgtaacagtgctgtgatacctggmacagtgctttaatctcatgataccctctgtactgacctgaaggagacctaagagtcctttctctttttgagtttgaatcatagccttgatgtggtctctcttttatgtccttgttcctaatgtgaaagtgcttaactgcttcttccttgtattaggtagcactgggataagattttaactgggtattcttgaattacttttacaataaaccaagtctataatattaaaaataaaaaagaaagaaaacaaagccttattgctggtatggagaaagtttaagtggtctggacagaagaccaggccaaccacaacattcccttaagccaaagcctaatccgtagcaaagccctaattctcttcaattttatgaaggccgagagagataaggaagctacagaagaaaagtctgaagttagcataggttggttcatgaggtttaagaaaggaagacatctctatgatataatagcacaagatgaagctgcaagttctgatg

SEQ ID NO: 134897 - DNA, 525 bp, Homo sapiens
tgttagacaaaacaaagtaaaagagcaagttttttgaggtatgcatattttgaaaaattgttcaggtgtgtatagtgttgaaaacaatattcaaaaattatctgtctttgagtcayatgttttatgaaaaaaaaggtctttccaaaaaggtaattaaagaaatattaggtcagaaatatccttttttggtataaagcagttttccttttctgtgcaacttttttatttaatagtaataataataataattattatttgagatgagatttcactctatcactcagtctggagtgcagtggcgtgatcttggcctcccaggctcaagcaatcctcccatcttagcctcccggttggctgagactacaggtgcacatcgccacgcctagctattaataatttttctatgttttctttgtagagacagggttttgccatgttgcccaggctggtctcgaactcctggactcaagcgatccacccacctcagcttcccaaagtgctgagattataggcatgagccaccat

SEQ ID NO: 134898 - DNA, 525 bp, Homo sapiens
tgttagacaaaacaaagtaaaagagcaagttttttgaggtatgcatattttgaaaaattgttcaggtgtgtatagtgttgaaaacaatattcaaaaattatctgtctttgagtcatatgttttatgaaaaaaaaggtctttccaaaaaggtaattaaagaaatattaggtcagaaatatccttttttggtataaagcagttttccttttctgtgcaacttttttatttaatagtaataataataatwattattatttgagatgagatttcactctatcactcagtctggagtgcagtggcgtgatcttggcctcccaggctcaagcaatcctcccatcttagcctcccggttggctgagactacaggtgcacatcgccacgcctagctattaataatttttctatgttttctttgtagagacagggttttgccatgttgcccaggctggtctcgaactcctggactcaagcgatccacccacctcagcttcccaaagtgctgagattataggcatgagccaccat

SEQ ID NO: 134899 - DNA, 553 bp, Homo sapiens
ccctctgtaagcaacttgactcatctttttagctgcctttaatttttttctttttcattaaccttgatgaatctgatgactatgtgccttggggattgttgtcttgtatagtgtcttgccaggattctctatatctctatatttcttaaatttgaatgtcaacctctctarcgatattaaggtaatttttgtgaactatatccttaaatatattttccaagttgtttattctctctccttctctctcgggaatgccaatgagtcgtggattttgtctctttacataatcttatatttctcagaggttttgttcatttttattgattattttttcttttgtctgactgagctgatttgtagaaccagtcttttagctctgagattctttcctcagcttgatcagttccaacgttagtacttctaattgtattatgaaattcttgtagtgaattttttagttctagaaattcagtttgattctttatttaaatggttatttcatctttttgttcttgtatcattttaccagcttccttatattgggtcacaactt

SEQ ID NO: 134900 - DNA, 463 bp, Homo sapiens
gtctctgttaacacattttcccactaaagtattttgtaaataaataaaagatttttcaaaatgaaattatattaaagccatgcttcattatgaaatctggtatacacatataaattagcttcrtaaagtattccattggttctgaaactagattcactgcctagtaaaaatacagataatacagagagcacatttattcttaaaagttaccaccacatgcaatctatcaaaacactgtggcagtaatgtgttatgtgacccccgttaatgtctcatcatgtagaagcttatttttgaagagcttctaatcgctttcataattcacctatagggcacagaaaaccttactcttatgctagccactactagttaaaattcccaagcttaaggtaaatgcccatcatcagtataataaatttttgaaaagaaaggaactgattgtctactttgtggccatatctta

SEQ ID NO: 134901 - DNA, 463 bp, Homo sapiens
gtctctgttaacacattttcccactaaagtattttgtaaataaataaaagatttttcaaaatgaaattatattaaagccatgcttcattatgaaatctggtatacacatataaattagcttcgtaaagtattccattggttctgaaactagattcactgcctagtaaaaatacagataatacagagagcayatttattcttaaaagttaccaccacatgcaatctatcaaaacactgtggcagtaatgtgttatgtgacccccgttaatgtctcatcatgtagaagcttatttttgaagagcttctaatcgctttcataattcacctatagggcacagaaaaccttactcttatgctagccactactagttaaaattcccaagcttaaggtaaatgcccatcatcagtataataaatttttgaaaagaaaggaactgattgtctactttgtggccatatctta

SEQ ID NO: 134902 - DNA, 565 bp, Homo sapiens
cacactctttccaagaaatacagcaaacgttttattgagctggaagatattactactgcaagactgtttggactcctagttcccaaggaaccacagctgagaaaagaaccactgtctttaaagggtaattgaacctaataaacaggagattgctctagttttaagcaataggkactagaagtatggaatgcaaattatttacttgggcatctcttgattctcccttaactgtttacaattgtgaatggaacttagcagcaactggcttgagaaggggtatgacaaccaaaggctcagaccacttagaaatggggatataaggaaaccacaaagaccttccaaggtcatagcaagagggggaagagataagaatagagtaggaagaagagaacaaggtaacagttgtgtcctcaagaccaactgcaccaacagggacggtagtttatcctactaacctcacttttgtcagtttcccctcagcaagagagactcacaggatttatgaaagagatatccctaaagtttcatgtgtaagtgtatctctttggggcaagctgtagactgt

SEQ ID NO: 134903 - DNA, 565 bp, Homo sapiens
cacactctttccaagaaatacagcaaacgttttattgagctggaagatattactactgcaagactgtttggactcctagttcccaaggaaccacagctgagaaaagaaccactgtctttaaagggtaattgaacctaataaacaggagattgctctagttttaagcaatagggactagaagtatggaatgcaaattatttacttgggcatctcttgattctcccttaactgtttacaattgtgaatggaacttagcagcaactggcttgagaagrggtatgacaaccaaaggctcagaccacttagaaatggggatataaggaaaccacaaagaccttccaaggtcatagcaagagggggaagagataagaatagagtaggaagaagagaacaaggtaacagttgtgtcctcaagaccaactgcaccaacagggacggtagtttatcctactaacctcacttttgtcagtttcccctcagcaagagagactcacaggatttatgaaagagatatccctaaagtttcatgtgtaagtgtatctctttggggcaagctgtagactgt

SEQ ID NO: 134904 - DNA, 565 bp, Homo sapiens
cacactctttccaagaaatacagcaaacgttttattgagctggaagatattactactgcaagactgtttggactcctagttcccaaggaaccacagctgagaaaagaaccactgtctttaaagggtaattgaacctaataaacaggagattgctctagttttaagcaatagggactagaagtatggaatgcaaattatttacttgggcatctcttgattctcccttaactgtttacaattgtgaatggaacttagcagcaactggcttgagaaggggtatgacaaccaaaggctcagaccacttagaaatggggatataaggaaaccacaaagaccttccaaggtcatagcaagagggggaagagataagaatagagtaggaagaagagaacaaggtaacagttgtgtcctcaagaccaactgcaccaacagggackgtagtttatcctactaacctcacttttgtcagtttcccctcagcaagagagactcacaggatttatgaaagagatatccctaaagtttcatgtgtaagtgtatctctttggggcaagctgtagactgt

SEQ ID NO: 134905 - DNA, 520 bp, Homo sapiens
tataagaaccaaccctagactaatatattctctactgattttgatttttatatcattttaaaccctaagacaatgtattattattattaattattttatttatttatttattttgagatggagtctgtctgtcactcaggctggagtgcagtggtgtaatctcagctcattgtagcctcagcctcctgagtagctgggattacaggcacccaccaccatgcctggctaatttttgtatttttagtagagatggggtttcaccrtcttggccaggctggtcttgaatcctgaccttttgatccaccctcctcggcctcccaaagtgctgggattacaggcgtgagccactgtgactggccgacaatgtattctttttaacgttattgtttaaaattatcagatggtattctatcctcaaaattcctaccaaggaaactctccaaacactagcaaaaattccagtgcagaggtatgaagcaaacagtagggaataaaaggaatataaattgaaattctgtca

SEQ ID NO: 134906 - DNA, 509 bp, Homo sapiens
gaattcacgtgctagtgttctgatccatataagaaccaaccctagactaatatattctctactgattttgatttttatatcattttaaaccctaagacaatgtattattattattaattattttatttatttatttattttgagatggagtctgtctgtcactcaggctggagtgcagtggtgtaatctcagctcattgtagcctcagcctcctgagtagctgggattacaggcacccaccaccatgcctggctaatttttgtatttttagtagagatggggtttcaccatcttggccaggctggtcttgaatcctgaccttttgatccaccctcctcggcctcccaaagtgctgggattacaggcgtgagccactgtgactggccgacaatgtattctttttaacgttattgtttaaaattatcagatggtattctatcctcaaaattcctaccaaggaaactctccaaacactakcaaaaattccagtgcagaggtatgaagcaaac

SEQ ID NO: 134907 - DNA, 429 bp, Homo sapiens
tttaattatggttataccatatacattcataaataagattatctacagttttcgtctatctttsaaagtttgggaaaacaaggctatttttgcttgataaaatgtttctacaaaatgttctataactttttcacattgaaacatattatacagcacagaaattttttcttgaaagtgtgaaataactattgtaagcattctgcatccagtgcaaaatccagtcttgattttgaaagtcaagatctcacaataggatctctattacctaccatagtatacatggcatagtttctgttgaataaatgtagaattctgtaagacagatatgcacagttttatgacagtatataaaaagggcatcctcctcacaatagtaggtgagaaagctttcctagaaaaggtaatagataagaacaatccttccagttt

SEQ ID NO: 134908 - DNA, 511 bp, Homo sapiens
tggagtggtaagcccaatgttaaatcccatcatctatagcctcaggaataaagaggtcaaagaggctgtaaagaaagtcctgagcagacatctgcatttattgaaaatgtgaaaaaccttgggcatgygatatcctcaatggggcaagagagcttgtcttttgtatttagatactgcaaaacctactgtcacgagagcttgtgtgtttgcaaaaccaactattagattcccattcttttcaacgtagaattttcatgctcatgtaaccttcttaatagtgccttgtctgctgggtttgtagctgtaagcagttctgcaaactggccctataaaaatattgatgctgtccattaaaatgaatctctctctctcactcagtctctctctctgtctgtctctctttcttctctctcctgccatgtgtgtgtctctctctactcctctgattttgtcctctctctctattctgctactctctctcctctcctccgtatattttctttctcttcct

SEQ ID NO: 134909 - DNA, 461 bp, Homo sapiens
ctgtcccttaataaaacgaatggaatggaaatcacttttcatagaaaataaggacattgataaataatatgggtaaatccaaactgtcactgactttgtaaaaaagggcaattaggggacttaaaaacaaaataaaaatgaaatctaagatacaaataacatggaatatgatgagaggggttagaaatcagagataaacattttgaagtccttcaggacttcaattcaggaggattacaaatakattaagtagagatcgcattaagttaaacatccatcttaaaaattgcaacaatctgtatgtgtgtgtgtaactttgtgcacaaatagtagaaactgttaaaatccaatgaaatgtttataaaactaaggatgcattgggaaagaaaacaagtctcattgaataccaaagaatcagtatcattcaaatcacaacctgtgtccaaaatacaacatattag

SEQ ID NO: 134910 - DNA, 546 bp, Homo sapiens
actttgggaggccaagacaggaggatggcttgagctcaagagttggctgactgcctgcggaacatagcaagacctcatctttacattaaaaaaagaaaagaaaagaaaagraaaaaaaaaactgaaaattagcctgggcaaggtgacatgtacctctggtactagctactcagaaggccgaattgggggtttgaggggaatattgcttaagcccaggaattccaggctgcagtgagatatgatcacaccattgcattccagcctaagagacagagcaagaccctgtctctaaaattcagaatcaaaattgcaattctccttcagagaaatatcagcatcattaataggcaaaataaccttttttataataattttttaagaatgtctcacagttcctcttgtcctcctgaaatacttccttgtatttaatttattcctcaaactgactctgaaattaatataggaaatatagataaacaacagacttaaacggtggctgcaatttacgacctgtgtgacttttatataagcctaaattttcttatc

SEQ ID NO: 134911 - DNA, 420 bp, Homo sapiens
cttacaataccagtaggagaactgctcttcctagtttatccaagcagaagtgcctttcccttcctgggacttccccttcaagggatttacatatattctgctataaacgcatttaacatacagcactgtaattgtgacccamctaagtctgtgacccacttaagttaccctcatcctatggccagtctcagcatggtgaaactgcaaaagaaactaaatccataaccaaatgtcttaaagaacgttgtacatctttattgagattatcaagacacactgaggtaaggtcacataaaaccagcatcaaagctttcccaaaatcccatgtagctaatttttccttttcctctaatcctatttttgctgtatcagtgtaaatatcttcccttctatctttaaaatctccagtatgcactgggt

SEQ ID NO: 134912 - DNA, 512 bp, Homo sapiens
cattataaatttaaattattttaatacaatgttaccatattttgaccaaataatccagaacaaatagaaaatgtatgaaatattactagccagcagatatctgaccattttaaccaacattattatctgtaaccaaacatttttcttcacactatgttatacctaacaaaattgctgttcttcagttactaaaacaaagttatatgtgaaagttatgcttcaatggtaatttaatcttaattgcagaagagtcttgtgggctaaaagaataaatagaaaagacatttttaggaaaaaggacttttggttattcctaatttaggacaaatatgaatacctgaactatcctcctaagaatattgactagagaagaagtattacttataaaatagtaagggaaaaaattgagataaaattattcttgtttgtctttttcaatacagattagkaaatctttctaggtcaccctattgttctgcctgatatacacgatggataaaaagttgacctca

SEQ ID NO: 134913 - DNA, 524 bp, Homo sapiens
aatcagcactctgtaaaatggaccaatcagcgctctgtaaaatggaccaatcggcaggatgtgggtggggccaaataaagggaataaaagctggctaccccagccagcagcggcaacccgctggggctcccttccgctctgtggaagctttgttctttcgctcttcacaataaaycttgctgctgctcactctttgggttcacactaccttttatgagctgtaactctcactgtgaaggtctgtggcttcactcctgaagtcagcaagaccacaaacccaccagaaggaagaaactccagacacatctgaacatcagaaggaacaaactccggacacaccatctttaagaactgtaaccctcaccacgagggtccagaaggaaaaaactccagacatatctgaacatcagaaggaacaaactccggacacaccatctttaaaaactgtaacactcaccacgagggtctgcagctttattcttgaagtcagtgagaccaagaacccaccagaaggaaccaattcc

SEQ ID NO: 134914 - DNA, 509 bp, Homo sapiens
ggaccaatcggcaggatgtgggtggggccaaataaagggaataaaagctggctaccccagccagcagcggcaacccgctggggctcccttccgctctgtggaagctttgttctttcgctcttcacaataaatcttgctgctgctcactctttgggttcacactaccttttatgagctgtaactctcactgtgaaggtctgtggcttcactcctgaagtcagcaagaccacaaacccaccagaaggaagaaactccagacacatctgaacatcagaaggaacaaactccggacacaccatctttaagaactgtaaccctcaccacgagggtccagaaggaaraaactccagacatatctgaacatcagaaggaacaaactccggacacaccatctttaaaaactgtaacactcaccacgagggtctgcagctttattcttgaagtcagtgagaccaagaacccaccagaaggaaccaattccagacacaaaactatccctgtttgcagac

SEQ ID NO: 134915 - DNA, 509 bp, Homo sapiens
ggaccaatcggcaggatgtgggtggggccaaataaagggaataaaagctggctaccccagccagcagcggcaacccgctggggctcccttccgctctgtggaagctttgttctttcgctcttcacaataaatcttgctgctgctcactctttgggttcacactaccttttatgagctgtaactctcactgtgaaggtctgtggcttcactcctgaagtcagcaagaccacaaacccaccagaaggaagaaactccagacacatctgaacatcagaaggaacaaactccggacacaccatctttaagaactgtaaccctcaccacgagggtccagaaggaaaaaactccagacatatctgaacatcagaaggaacaaactccggacacaccatctttaaaaactgtaacactcaccacgagggtctgcagcttyattcttgaagtcagtgagaccaagaacccaccagaaggaaccaattccagacacaaaactatccctgtttgcagac

SEQ ID NO: 134916 - DNA, 397 bp, Homo sapiens
ttcccttgcaattcctaactgattaatggcaccaccaaatctaaactatcaaaacttataaagttggactcctagacatctttcacatctgttaactaccctccagctattcttagtactatttccacattatgcctccatttgattactgcaaggtactcccagttggcctttctaccttcattttcaacaccatcgctagcacctcagtctattctccataattttgtctgcgttatctttccaaaaaatcaatctgatcatggtaagcctctgtcaaataaaagctgcatgattttgggcccgttacttaagcctcaattttcttaatctgttaataatattttaagrtaaaaatgtgcaactaaagaagctaataggggatcaattgaatatc

SEQ ID NO: 134917 - DNA, 587 bp, Homo sapiens
actatccacacaataaaaagcacattcataagaaccaaaacagctgcgcaatcatagcacctggttgtaacttcatatcactaaaagaggcaaggaagagggtagaaaatatagccctgaatctctgataacatgcctccttcatgaacccataatgatcatcagatcactagaagctactgtgaacaaygatatgccaataaactgaaaaacctagaagaaactgataaattcctagacatatacaacctaccaagattaaaccataaagaaatccaaaacttcaacagacctataacaagtaatgagactgaagccaaaataataataattttttctttcccagcaatgaaaatcccaggacccaatgtcttcactgctgaattttaccaaacatttaaagaactaatgccaatcctactcaaactattcaaaaaaaagcttccaaactgattctataagcccagtgttaccatgattccagaaccagataaagacacatcaaaaaaaaaaaagaaaaagaaaaagaaaactacaggacaatatccctaatgaacattgatgcaaaaatcctcaacaaaatccta

SEQ ID NO: 134918 - DNA, 343 bp, Homo sapiens
cccatggtcacgtagaaatagggtgggagaggggtggggttttggcctttctttgtctggctgactctcctctgtcaatgctcagttccaaggtcatgccctcggagacggcttcctcctgctgcacctgccccgagggaccccagacgcctcctctgtggcctatagcaccatggcgccctgagcacagaaaacaaacacaagagaagctccgagaagcaggaggccagggagcctggagcgtctcagggaagactgggcagaaaggagagaagtcaaagaggtctgggacagcctatgaggggccagcaacraacacgcagagtggaaggaaacaagcagg

SEQ ID NO: 134919 - DNA, 609 bp, Homo sapiens
cttatcctctggatttcaggtcataagacacatctattagtgccttcacctagataagacagccatcttccttgagatgaaagaaccagatatccaaaagttagcaataggcctcaagatccacacatccccctaaaaactgaggtctccgcataagtgaaccttccagaaaacagaatctactctttcaaagcttccaagatacttttgaatgatttttactgacaagtctttttaaattattgttaaaagaatctaccatttgtttagtacatattacatgtgaggcattcacatacactagtgaccggaccttttcaagttagagtatgagcatcaattacaatcctcttactgccttgggacatgctaatagacatgcattataggagactgctgtgttgcmatacccaacctactctgtgtgcacacgcccctgcaggctgtgaaaggctgccttttagactcctcgtctctggagcgctaagcttcttgggtttcagtgtgtgttggtttctacagctttagtttctcctcaggaccaagaagtcagtggtcacatcctgacgctgccattcttaactcccagacccatctcctcctctaaac

SEQ ID NO: 134920 - DNA, 435 bp, Homo sapiens
catcttctcatagaagtttaagatggagacatacttccattgtgaatcatgatgctaaccagtattcagatttgttggaaatggactcagttttaaaattgcttctctcttgtgggctggaactgcaaatgattgtttgggratttttccccttttcttctatggagttattcaacttggcatgaccagtgatttgagctgagaacatggaacccttgatttgcagaaatcaagcccccaaaggtacagatacagtggtcattgtctgaagggtttcttttgttcttggccctcctgtccctgctcttactgtggcagctgcagctgcaggtgcctctgaagccttgccatccatggtcacttcctgcctgctccccacccacccctgggaaagagcccccaagtgtccaaaagcactgtgttgcctaatgcttg

SEQ ID NO: 134921 - DNA, 574 bp, Homo sapiens
atttacattctcaccaacagtgtaaaagcattcttacttctccgcaacctcaccagcatctgttgtttcttgactttttaataatcaccgttctgactggtgtgagacagtatctccttgtggttttgatttgcatttctctaatgatcagtgatgttgagctttttttcatgtttgttggctgtatgaatatcttcttttgagaagtgtctgttcatgagagagacatatttgctcctctgagtaaagggtaaggatgcttacgtctgtgtgacagccttctctcwttttcagaacctcactgtggatcgccatcgttggcctgtactgaaggtaaagcagatagaggcagtctcatctgtcagatgaagacctcatacacctgttgattaagaggctttcttcagatcatggtttagagcggtgttttacaaacttgatgtgcttggagtcttctggaaatcttgttaaaaggcagactctgttgcagtaggtccgggtgggttctgaagttctaacaagctccccagtgaggctgatgtttcaggtccactgtgaggaggcagggcttaga

SEQ ID NO: 134922 - DNA, 546 bp, Homo sapiens
atggtccaagaagagctaagatacatttgctgagaagttaggggagtttccctatcaggtatcaataattattttacagttagcacaatgagcamaacatgtctcagcactgggatctgcagggtgaaaatgcagcagctcaaagggcttagtaatgtgcctaagtatatgaggaaacttgccatatgaccgaggcaggtggcatcgcttattcatatggaaaaaatgaaattgatttgtcacctcacattatgcacacaaattctgatgttttaatgactttaatgtaaaaagaaaagtttcagaattcttagaaattagagaaagatttttatgacatcaggtcaggaaagatttcttaaatcaggcaaaagatttttaaccatgaaggaaacggattggcacatctgattacattacgattaagaatttttgttcatcaaaagaaatcataagactaaacaaaaataagccacatgcactgaaagatattttcaacatacaagcaataaagagtaactattcagaatacatagagagtgtata

SEQ ID NO: 134923 - DNA, 666 bp, Homo sapiens
atttctacctctttattgtctgttttcaaagttattcctatagatagtaaacttagttggagccactgctcgctgtttccaaaagagaattgaaaacctgagggtgacactcataagattggcatgtcatttcaaagctggtgggtttaagacacatctaggcatgaatcacgtgggctgtccaggtgcttatttgcacatgggaccaaaaagcatcccaagaaaacactcaacatgaaggaaggagtcaactccattagtctaagcctattaaaatgttttcagtaactggaagggagagaaaacttctcaatttggatgatgcctatcaactagatttgtcttccaaaatgcaaaggagtggattctatggaaaacagagaactataaaacaaacaagcaaacaaaacaaacaaacaaaaaaacagaagaacaatttcggtggaatatctacagcagcttcttctccacccacataatcatggacattgtctcatgagcttccaagcatcttgggtcctgggaccccgcagaaccttagtgttctagggagcactctcagtaccagagatagcagatttgtgcagtacatttgaaacttccaaggaataccagggtgacwtttcaaatacattagctagggtgagaaccagtgacattaggtca

SEQ ID NO: 134924 - DNA, 574 bp, Homo sapiens
agtcatcatagtgcatgcatgagatgttataaaattttatattacctgcttctggtagaaaaaatagagccaaggagaggttgtgttaggaattaccatagagacaatgcagccaagatttcagggtgcttttacctgaccaaaaagtgtgctcacatctccccgtcagcagaccttccaaagttcttgattgagtcattttataaaccttgattctttataagattttatactaactcacacaggtggatatttaagatttatggaagaactatgacacaactctatgaaatgaaagtaaacatatcaayaaaacatgaaaaaagttttatttcacaatacataaataacggttgattttaaaccaaactgtaccatgtatgtaaatcgagtcaattatttagttgtcatatgctgtatttcttacaggttccatctgatgcattgattccaagggaggggatttctagctcagattgaagtgttgaaggggcacagctaacagggacaggtagaggtcctattttgtagcagagtatgattattccacttactcagggtgtattataaatta

SEQ ID NO: 134925 - DNA, 369 bp, Homo sapiens
ctctcaatccctgcttaggtggaatagaatgactagggtgggttgaagttgggtatttttcactccctgtgtggaaggctagagcgggctagagttggatatcgtcctttcccccaggtcagttgggttctaataatgccccaggaagttagtctcaggttagctagtttctgtggagggcagaccttattaagaagaaaaagtgctctggcataccttacaatgattacttttaccctcctttgctggaggcatgagggactttttmtttaatatttactatgaaaacctactaaaactcctggagataaagctcacaaaaatgtgtaggtggacctatgactgagtctccctggagttttaatcttt

SEQ ID NO: 134926 - DNA, 564 bp, Homo sapiens
tagcactaaaactttaggagctctctgcatgttgtagctaatagaaaagcaaaggtctgagaaatggtaatatagttctggaatttacggtgccatattatgattgtaagaagtaaaggtatatttatttctctgtgggtaagaaggtagtactttaggagtgagtataattaaggaagtgttttaggtagggactaagtaatttaatttccataaactattaaggcaattccagtgttatttttccctaagccaccaagaaaatgaaaatgtattttaccagcagtgttttttggttttttttttgttttttttaaccagaagtttggtacattatggtcttcagcattttgtttatgtttaagatgtactttcaaagagttttctcccttaaactataaaagttacctctaacaacttgtggggagttttcctgcattttctgcatagtttgccaattccctggtaagttttttaatacctttagamaccaaatagtctcttgcctaagaggatacatacaaaaatgctctttaggctaacaagaggttattattacatcat

SEQ ID NO: 134927 - DNA, 446 bp, Homo sapiens
agttctcatatctggttttcacatacctttggaaaatagggtaaatagatattataaaaggagaaaattgacatttatttaacataatgctgcatatactttgtataccttccttcatacagaaacaaacttgggcagtcttcacagtgctagcgcttgtgcagaacaggatgttgaagaygccccatcgtggtgttttattttgatggacagaggaagaaaggactaggaaatgtgtcctcatctgacagcagcataacccatagactgatgaaagttcctgcagtccttccttcatgactttcctgatggaatctgagcccactgcaatccaaaactcttttattcattttttgttttatatgctggtatatagcagagtggctgtcctgtagtaagtacttgctaatgaatgcgtgaatgaatgataagataaggcataaatt

SEQ ID NO: 134928 - DNA, 553 bp, Homo sapiens
tcctttcaaagctgcagtatttcttctttcttgtatgtcaaattaatctttgttcttaaaattatgaccaccaagaggaaacttaacttgttgtggtaaagaatttgctggactaaacaaagcatatgttttacttgacattctattctgctgcaacagaacagcaaattgtcatctccactttagggacctgtcattgaaagtagcagtgctgattctcattttacaaagaagagttctggctaactagacggtcttacttatgaagggttgtcatatataacaaatatggcaaaatatgacartatatttgaattatattataattataattataatctgtgcatactgaaatttttaaaaactacattatggagcacaaagaaaactagctagtggtttggcttttgttaaaccttatttaacatattcctatttgaaagctttgccactacctatctttttcttgttgctttagaattttgctatactcattttcccctagaagattccaaagatattgagtacatcttatctggggaagagtttgatt

SEQ ID NO: 134929 - DNA, 562 bp, Homo sapiens
ttaagaacataattacttgttttagcaccaactattaatataycccacaggctttgtagttttctagagagagcaaaatctctgactgtattcctataaactaggctggactggcgcattaacatagaataattttcataagtactcgacaccagatttgctaatcaccagaaaattccattcaaagctaaaatatgcacatatgtatttataaatatagctagaataaagaaaatataatgttaatcattattttgaatgaacaatatcccacaagtagtctgaaataaatattactttacattgcgagtcaaatcaccattttaacatagattaagcttgggctgttgctgtctcagtcatgactctagaaactaaaaatattaatcgtttttaaaatactgttttatgaatgtgcaaactgttgataactgttgcattggcaagacctcattcaatcctcatgaccatcatatgataaaggtatctttattttaagataaggagaccagagatgattgagaccactcgtcttccccaggacctcatagcaagtaagtgg

SEQ ID NO: 134930 - DNA, 379 bp, Homo sapiens
agaaacagaaaaacagaaaagcaaagtaaacccaaggtaaacagtaggaagaaaataagaaagattcaartactaatttaaaaatatagagaatgaaaaaataataaaaatcaataaatgaataatcaaaagttggttcttcgaaaaaaatcaacaaaattgagttttactagactgactctcttgtgcccttctcttccctccaagaggatagaagattcaaattactaacctcagtaatgaagaagacaatatcaccacagattttacagaaatgaaaaggattataagattatactatgaacgactctatgtcaaaaatttgataacttaggtgacatgagccaattcctggacaaacacaaacaactgaaaatga

SEQ ID NO: 134931 - DNA, 379 bp, Homo sapiens
agaaacagaaaaacagaaaagcaaagtaaacccaaggtaaacagtaggaagaaaataagaaagattcaagtactaatttaaaaatatagagaatgaaaaaataataaaaatcaataaatgaataatcaaaagttggytcttcgaaaaaaatcaacaaaattgagttttactagactgactctcttgtgcccttctcttccctccaagaggatagaagattcaaattactaacctcagtaatgaagaagacaatatcaccacagattttacagaaatgaaaaggattataagattatactatgaacgactctatgtcaaaaatttgataacttaggtgacatgagccaattcctggacaaacacaaacaactgaaaatga

SEQ ID NO: 134932 - DNA, 595 bp, Homo sapiens
tctgaccagtgactctggctcaggtactccctgagacacttacacctgcactttgatctgatgactctcctagcttctgctgtctctctctcctttttcctaacgaggattttggtctctgcctcttggagaacctgaagcaacacacctgttatatattctcctgacaccatgttctcctatcctttctataacatgcatttccktttatacctgcatgtttatttgtgtaattgtttgattaatgtctatttctcctgctaggctgatagaccttgaagagcgaagactgcatctgttttgctcccattataatttgtatggctagtacagagcctggcatataccagctgctcaataaatactttttgaattagtaaagaaagaatttagaaatgaagaaactcaaattaattatgatggttggcatgtcagagtagtaaggggtgactaaagagttttgagcattcttttgagattatcagaggattttttttctctgagcaaatggaatgataagcatattatcataaatctgaagaaaaggtttagtcatattcaattattttttcaaaaacaattctttttccatagc

SEQ ID NO: 134933 - DNA, 470 bp, Homo sapiens
ctttttgtttattatttaggtagacagaggcagttccagtggcttctaagtagtcttttctaccgtaatcaccctcactccacgggcaaaaatattgagagtggtttagtgaggcagtggtggcttaggatctctcatgagattacaatcaaggtgttggtagggacttcagtcatatgaaggctggaccrgggctagaggatctgctgtaatcaagacaatgaagaaatgatcaaaggattaacatagatcaattgaatgatagagtccagaaataaacctacatgtatatgaacaaatgatttttgccagtgaattaagtgggaaaaagaagtgatattgaaacaattggatatccatacagaagaaagctagcatcaagccttacattacatcagactccaagattaacttaaaatgtcacacaaacccaaatgtaaacgcttaaactataaaacttctaggagaaa

SEQ ID NO: 134934 - DNA, 470 bp, Homo sapiens
ctttttgtttattatttaggtagacagaggcagttccagtggcttctaagtagtcttttctaccgtaatcaccctcactccacgggcaaaaatattgagagtggtttagtgaggcagtggtggcttaggatctctcatgagattacaatcaaggtgttggtagggacttcagtcatatgaaggctggaccggggctagaggatctgctgtaatcaagacaatgaagaaatgatcaaaggattaacatagatcaattgaatgatagagtccagaaataaacctacatgtatatgaacaaatgatttttgccagtgaattaagtgggaaaaagaagtgatattgaaacaattggatatccatacrgaagaaagctagcatcaagccttacattacatcagactccaagattaacttaaaatgtcacacaaacccaaatgtaaacgcttaaactataaaacttctaggagaaa

SEQ ID NO: 134935 - DNA, 633 bp, Homo sapiens
tacagacagcagctgagtaattatcaaggcaaaatagctcctttcacgtggactgtctttctggatttgagaaaagaatgagacatcaatgagaggccaatctaaaaaagtaccataacaaatgctatgcatccattcttaatcatttgcatwggtaataaccagaattaaaggaaatttcatgaataaaattgcttctcctcatgaagattttaaattatgttggaaaattacctttgatatgtttaaaatatgagtgacattttgcataaattctacgtgcaacattgctagcttacgccagtcccttgttacaaacaaggtcaaaaggatatttaaaaatcataactgaatgttgacaaaatgacgatttttcctctaatgtgaattgaggataattctctaattctttgaatttttacaggagatgttgtgttcttaactaacaaaaaaatcacagagtcactgataatgcagaggttatagggaaactgcattttgtcttatctcttcattttgaggaatgggaatctgaggttagtggctcaagccagggtatcccaggtagaccagtagacccaaatcgcagcaagcagaaattagtcccaaacaatttcccctgaagctgtagcc

SEQ ID NO: 134936 - DNA, 633 bp, Homo sapiens
tacagacagcagctgagtaattatcaaggcaaaatagctcctttcacgtggactgtctttctggatttgagaaaagaatgagacatcaatgagaggccaatctaaaaaagtaccataacaaatgctatgcatccattcttaatcatttgcattggtaataaccagaattaaaggaaatttcatgaataaaattgcttctcctcatgaagattttaaattatgttggaaaattacctttgatatgtttaaaatatgagtgacattttgcataaattctacgtgcaacattgctagcttacgccagtcccttgttacaaacaaggtcaaaaggatatttaaaaatcataactgaatgttgacaaaatgacgatttttcctctaatgtgaattgargataattctctaattctttgaatttttacaggagatgttgtgttcttaactaacaaaaaaatcacagagtcactgataatgcagaggttatagggaaactgcattttgtcttatctcttcattttgaggaatgggaatctgaggttagtggctcaagccagggtatcccaggtagaccagtagacccaaatcgcagcaagcagaaattagtcccaaacaatttcccctgaagctgtagcc

SEQ ID NO: 134937 - DNA, 590 bp, Homo sapiens
ggggaggctactcttctttgggtattcacttgtctagagaatgcttgttaaattgcactgactgttctcattagagataattgaagtgcctcaccttggagtgccaaatcatctttactttgagaattttgtaagaatctttctaaaatgcaaagctcattgcaatacccttcaaaaagaatacaccaacataatctaacctttttgggtaatttgcggttgtcagattttaygcaggaattttcacaaggccttttgagtcaagactatttggttcttcattaaatggatcccactgctaagtcttctccctttagttttctcttcttagccataatctgtccttagggtgtcatttcctagcaacacaaactttttatcttctccatagtgcttcttctcttccattaataaagctataacgaatagttttaaatagttataaataacatcaccattgaaaaacaaaataaatcacattggaagagcagaattgacttttattttcaacaattaactctagccaaccagaaataaaaaatacaaacaaacaaaagaaaaatgcattgattagcaaaaccaaggccctg

SEQ ID NO: 134938 - DNA, 582 bp, Homo sapiens
agagagaacttcaaggatttggcaaaggcaaggatatatcttaacctatcccaaattctcattttgaacatgtaaaatttcagtcacttaaaaaaataaatttaattatgtgtagttcagtactttcttcacagaactggtactagaaatagtttaagaacaaactgttctaggttttatttttactggatctgtaggtaagactgccaaaactgtcacttaaaaatgttgtttgcaaccagattttggagtcctcatttctggttcagaactttgaaattagcagccaaatgtttggatacttgttcagttgtgcagattwaaaaaaaatccaggttgggccaaaccattcctatttctaaatggaagcaaaaaaaaatgaaaataaaaattaataagagagaggatgggagggagggagaaaggcaggaaggagcgggggaaagcaacctaatgggaaaagttataaacactgtgttttgacctactttggaaacttttcctttctaccaaattatatttgcaaagacaaagtcagcttcctctcagagtaacatgattattctctcatgacaccttagc

SEQ ID NO: 134939 - DNA, 633 bp, Homo sapiens
ataatatctctttgttctagcatatctgtgaattagggccactgtcctttagttaactcaagtctcaggtatgatatatggatttctaaaatagtactaccaaaggacttsgaggatatcacactttaatatagggatggcaacctattatagagcccaaagccatgtactgtgtactgaaagacacatgatcagattttagtcctcagagtgttattaactagttgaccccaggtaagtttcttaatttctctaggcctaggtgtacttatttgtgaaataagaagataagacttgatgacctctaacacatgttccaactctaacattcataaattatagtcaaatacctaagaaacagtcaaatgagaaagtttaaaacatttacaatgaaattttactatttttattttatcccaagctccactatgattacttgagcaataacataaactaagaatgtaatatttagagaatgtgtcttggagtaaggagacaaatataaaataaaaaaaaagatggttcgactttctttctctcttttgaaaaatggagcatatacttaacgaaaaaagcaaaagaaaagttagagggaaaacatattcaacagcacaaatgctataaataatctgt

SEQ ID NO: 134940 - DNA, 358 bp, Homo sapiens
tggaacagttacatagtgaatatatgtgaagcatatggaagagacaggattagctagatcacaaatcttttcctttaatcaaaattcattttcttcggagggggcaatagggtgtatagggttagaggaagattctttttgtttgaattgtcyattaatttgatgaatgcttctattttgtgactgcagacttaactaaagtgaagactgaaagctcactgaattagttttgaaacaaccttagagatggactactattttctgatttctgattctgcagaggatatcaggaaaatgtaatgtccatgtattattgaactgaggatattttcaaggagaaaatgatctcattgttact

SEQ ID NO: 134941 - DNA, 366 bp, Homo sapiens
aagttgatatttttccaaagtaacactacagtcatgcgttggttgacagtggagaaatgtgccattagacaattccatcattgtgcaaacatcatagagtgyacttatgcaaaactagatgatatttagtctatatggcatatcctatatctcctaggctagaaatctgtacagcatgtcactgtattgaatactgtaggcatttgtgccaaaatagtaagtattagtatatctaaatatagaaaaggtacggtaaaaatatagtattataatcttatgggaccaccattgtatatgcagtccatcattgactgaatcatcattatggagcacatgactatattaatttatataatttttattaag

SEQ ID NO: 134942 - DNA, 491 bp, Homo sapiens
ttgcttcatggcctgcttctggacactatgtgtgtcaatctaaataacaaaaagaaagaagctctctaaaataagatgaaatatcatttcatcttatatttatttggggatagggcatttcaataggaatatgtgtgtcatagtaaactacgtgcataatcaggaaggtaaaggaagacaaagatttttaacaaaacgatcaggaggataacaattgttttagataaagagcttcagtgatagggatcaytaataagtgtggtgccaatctgaggttggactggcagttgttgggcagatgtctttacaggagtattttttggtgtaaggctgtgatggcttttgtgcaaggtgcagtttttgaaatcttttatgatagcttttgttatcaggtatttgtgcatgagaactctctttttattacctttacatatcaataaaaattttcatagtactcacacatgttaccatttttaaagtttgaaaaagtc

SEQ ID NO: 134943 - DNA, 444 bp, Homo sapiens
aatgtttctgcacagcaaaagagtttgaaggttacataaaaaactaaaagttgagctaccgtatgatccagcaattctactgctagagtaggtttcttttggtatatatcctcccccgcaaaaaacaaacaaacaaacaaaaaaaaaaacaaagcagtatgttgaagacatacctgcactcttatgtttgttgcaacactgttkacaatagtaaagatttggaagcaacttatgtgtccatcaacagatgaatagataaagaaaatgtggtgcctatacacaatggaataccatttggccaaaaaaagaatgaggtccagtcatttgcagcaacatggatgaaactggagattgtcatgacaaatgaaataagccaggcattgaaagacaaacatcacatattctcacttatttgtgggatctgaaaatcaaaaacattgaact

SEQ ID NO: 134944 - DNA, 444 bp, Homo sapiens
aatgtttctgcacagcaaaagagtttgaaggttacataaaaaactaaaagttgagctaccgtatgatccagcaattctactgctagagtaggtttcttttggtatatatcctcccccgcaaaaaacaaacaaacaaacaaaaaaaaaaacaaagcagtatgttgaagacatacctgcactcttatgtttgttgcaacactgttgacaatagtaaagatttggaagcaacttatgtgtccatcaacagatgaatagataaagaaaatgtggtgcctatacacaatggaataccattyggccaaaaaaagaatgaggtccagtcatttgcagcaacatggatgaaactggagattgtcatgacaaatgaaataagccaggcattgaaagacaaacatcacatattctcacttatttgtgggatctgaaaatcaaaaacattgaact

SEQ ID NO: 134945 - DNA, 444 bp, Homo sapiens
aatgtttctgcacagcaaaagagtttgaaggttacataaaaaactaaaagttgagctaccgtatgatccagcaattctactgctagagtaggtttcttttggtatatatcctcccccgcaaaaaacaaacaaacaaacaaaaaaaaaaacaaagcagtatgttgaagacatacctgcactcttatgtttgttgcaacactgttgacaatagtaaagatttggaagcaacttatgtgtccatcaacagatgaatagataaagaaaatgtggtgcctatacacaatggaataccatttggccaaaaaaagaatgaggyccagtcatttgcagcaacatggatgaaactggagattgtcatgacaaatgaaataagccaggcattgaaagacaaacatcacatattctcacttatttgtgggatctgaaaatcaaaaacattgaact

SEQ ID NO: 134946 - DNA, 444 bp, Homo sapiens
aatgtttctgcacagcaaaagagtttgaaggttacataaaaaactaaaagttgagctaccgtatgatccagcaattctactgctagagtaggtttcttttggtatatatcctcccccgcaaaaaacaaacaaacaaacaaaaaaaaaaacaaagcagtatgttgaagacatacctgcactcttatgtttgttgcaacactgttgacaatagtaaagatttggaagcaacttatgtgtccatcaacagatgaatagataaagaaaatgtggtgcctatacacaatggaataccatttggccaaaaaaagaatgaggtccagtcatttgcagcaacatggatgaaactggagattgtcatgayaaatgaaataagccaggcattgaaagacaaacatcacatattctcacttatttgtgggatctgaaaatcaaaaacattgaact

SEQ ID NO: 134947 - DNA, 505 bp, Homo sapiens
gtgattcccataaaaaatgtaacattctttttcagataattagaaaatatcctaaaatttacatggactcaaaaaagagcccaaatarccagagcaacgttaagcaaaagaacaaatctggaggcatcacattaccagaattcaaattatactacaaggctatagttaacaaaataacatggtatggttataaaagtatgcacatagatcagtggaacaggatagagaaccccaaaataaagccaaatacatatggccaactgatcttcaacagagcacacagaaacataaattgggaagggacaccctatttaataaatggtgctgtgaaaactggcaaggcacatgtggaagaatgaaactggatccctattgctcaccttatcaaaagtcaactcacgatggatcaaatacttaaatataagacctgaaactataacaattcaaaagacaacattcgaataactcttctagacctcagcctaggcaaagaattcataactaa

SEQ ID NO: 134948 - DNA, 556 bp, Homo sapiens
gccaggaattggtcatagcatgaataaactcaatataggttgagtattccttacccaaaatgcttgataccagaagtgtttttggattttggattttttttttgaatatttgcattatatacttaccagttcagcatccctaatccaaaactgaaatctaaactgctccaatgaacatttcctttgagtgtcatattggcactcaaaaaggttccaattttggagcattttcaattttgggttttgggattagggatactcaaccagtggtaggtttgggatgatatcagcatgctaaggtcaaagagacctagctgggaagggtgggaggaacatggaattttcattctctgggcaccccttgaacagtcttactattagggccccaaatttgttctaagtgtgtgtgtgtgtgtgtgtgtgtgtgtgtgtgtgwgagagagagagagagagagagaattttctttcttcctttatattctaagttcctcaggacaaaattttgggtttctttgtattctccctgcagctcctcatgtagttctaagcaaataaa

SEQ ID NO: 134949 - DNA, 579 bp, Homo sapiens
tataaccacctataattatctcaataaaattttcaattgaaaatttgaatgagtagtttaaaatcttcctaaaaagaaaacaagctttgatggttttataagctaattctacctaacagtcaagaaataaataactccaatgttgtaccattgaacattcttcaattcattttaagagatggtataatcatgacacttaaacctaagaaagagggcacaagaaagaaaattatagcttgccctcaataatgaccatggatttaaaaatcctacacaaatattaagtcagatacagcaatgtataaaaaagacagtacattacaaccaagttgaatttattttagtaatgcaatattgtttcaacatttgaaaatcaatataattcagcatattaaagattaaggaagaaagactatataatcagatccaataatgcaattacttggctaaaatcyaacatctattcataatttaaataaaaaacaaccattagcaaactaaaatgaacctacaacaaacatcatacttatctgtgcaacaatgaagcattctctttaagatttattacaagacacagat

SEQ ID NO: 134950 - DNA, 526 bp, Homo sapiens
tgagactctgttttatatatatatatatatatacacacacgtacatatacatgtatatatatacacattattattgaaagcagccaaagaaaaataacacattatatatagagaaagagcaaatgatgagtgactttatatgtwtatatatgtgtgtgtgtatatatataatgtgtatatatatacatatatatatataggttaagaaccttcagcacatgtatacctatgtaacaaacctgcatgttcagcacatgtatcccagaacttaaagtgaaaaaaaaaaaaaagaaccttctgcatgccagtaactgtgctaagtgattaggatgcaatggtaataaaaacaaagtccctctccttaaagaattttctatttagaagggaaaactggtaaataaaaaataaatatataaattacaatttgtgaaaagtgctacacatgaaagagtgctgagacagacatcaatggataaactttagattgagaagggctctgacaaagcaacatttaaggtgcaacctg

SEQ ID NO: 134951 - DNA, 577 bp, Homo sapiens
actccagtttcaatttcacaagtgcaaattacctatwtgcctcaaaaccattttccgtgaaaaaaaaaagttcagcttaggatggcatccaatgtgttttagacttttttttttttgagcatttaaaccatgaatagcctatatgatgaatttatagatgcaaagggcttgattgacaaagaactaatctgtcaaaacaagcctgtagaaacaaagtggataggcatttttggagagctggaaactaattcctacaagtccaaaatttctgctgttggcaggaagtaaaatcctaagcgttccatgttcacatgcttttgtgagaaaatatttagctttatgtcatcacattggactgatatccagattcagcacagtgtgggcttgctaagagcggagctgcaagtcaaagtgaattttatgtttcactgctcagtactgatattacacaaaagaaaagaagcatgctctaaatgctacaagcagttcagacaaggattatggtaaaggaagcagaaagtaaaaatatagggcagaaagaaatgtcattattattttttattcaatgtaggcaata

SEQ ID NO: 134952 - DNA, 577 bp, Homo sapiens
actccagtttcaatttcacaagtgcaaattacctatttgcctcaaaaccattttccgtgaaaaaaaaaagttcagcttaggatggcatccaatgtgttttagacttttttttttttgagcatttaaaccatgaatagcctatatgatgaatttatagatgcaaagggcttgattgacaaagaactaatctgtcaaaacaagcctgtagaaacaaagtggataggcatttttggagagctggaaactaattcctacaagtccaaaatttctgctgttggcaggaagtaaaatcctaagcgttccatgttcacatgcttttgtgagaaaatatttagctttatgtcatcacattggactgatatccagattcagcacagtgtgggcttgctaagagcrgagctgcaagtcaaagtgaattttatgtttcactgctcagtactgatattacacaaaagaaaagaagcatgctctaaatgctacaagcagttcagacaaggattatggtaaaggaagcagaaagtaaaaatatagggcagaaagaaatgtcattattattttttattcaatgtaggcaata

SEQ ID NO: 134953 - DNA, 409 bp, Homo sapiens
acgttcttctttccccattaacaatgatccaccattctctttctttatccactgttactcatcctcataactgaaacatcatttcctaaggatggccattcctggttcagtcagtctatatttcatcccccatcacatactcttgttttaccctatatttttccttcaaagcacttatttaagttgtaattatgtgttgtttattttatgtctgtctgccytcacagaatccacagtccaggagaacagaaatcctgcctcttttatttataccacatccacagtattattagtgcctgtcacctagtaggtatgcagtatgtacctattgaataaatgaattgacttctgtcttttagatcgtctactcattttatcattgatgacaaacataataccttacattcgt

SEQ ID NO: 134954 - DNA, 546 bp, Homo sapiens
cattttacaagaagagtctagcttttgggaaaggctcttgttatttaaactgtaaactaaattccttcccaaagctagtttggcctatacccagaaatgaacaaagacagtttagaggttagaagcgagatggagttggttagctcaagtattttttagtgtaataatttccttagttayagttttggaaaggcggtttcactcttattccgtgaatggacactcagcctcttatcagcagagctgggaagagaacctaaatctttccaagtcttatgctgtgccctatctatcacagaatgcttctggaaggagaagaagagctccctttttgtatttctcacatccaccataatcttttgaaattagaaccctgcagcagtcttggaaaaagtaccattccactcttcccagtcaaggactcataaaacccaccgtaaggacaatgttaatattactgttgcagttgaaaattttctttaccatcagcaattacttttacagtattttgaacaaaattgaatgctgggtcagagaaaacaaatt

SEQ ID NO: 134955 - DNA, 546 bp, Homo sapiens
cattttacaagaagagtctagcttttgggaaaggctcttgttatttaaactgtaaactaaattccttcccaaagctagtttggcctatacccagaaatgaacaaagacagtttagaggttagaagcgagatggagttggttagctcaagtattttttagtgtaataatttccttagttatagttttggaaaggcggtttcactcttattccgtgaatggacactcagcctcttatcagcagagctgggaagagaacctaaatctttccaagtcttatgctgtgccctatctatcacagaatgcttctggaaggagaagaagagctccctttttgtatttctcacatccaccataatcttttgaaattagaaccctgcagcagtcttggaaaaagtaccattccactcttcccagtcaaggactcataaaacccacygtaaggacaatgttaatattactgttgcagttgaaaattttctttaccatcagcaattacttttacagtattttgaacaaaattgaatgctgggtcagagaaaacaaatt

SEQ ID NO: 134956 - DNA, 522 bp, Homo sapiens
gacttatttctcatcagttccagtatcaaagccatttaaaacttaaggataagaaaccattacattctccctaattctccaaactggtgccaactcacaatgagcttctaaaaccccgatgtctcaagtctgaaatgtaggagcatatgttgattgtaacaccaaaaggttatctgtaaggacctatataaggcatgtatgcataaactgtattagcatatatatacatagccatttagttttgaaaagataaagctgtaaagatcatagtataaaacctatgatagctttaaattcaagttmagccagatgtacatcactatactgaaattcaactagctagatgcattttactatattagtcagtaattagatcattttccttctttagaaacttgtacaggattgcctatccccaagtctctgttttaaaagaaaaagggcttaagggagttgaaggctagttcccaatattacccaaagagtaacagtgtccaaaagtatcatgatttcaaggtatgt

SEQ ID NO: 134957 - DNA, 428 bp, Homo sapiens
cattattggtggaattagacaaattctaacatagcactcttggaatctgtgtgtgtgcgtgtgtgtgttatatatatatatatatatatatatatatatatatatatatatatagcctatgatttttaaaacatatgatgtgtttgtgtgttttaaattttaagtgttttaacatgttgaagtctatcttatgcatatgctagctctttctgggtgggtctttgaagacatttcctaaagttatttctgattctagtcaagggtctagaggcaaagctgggcactaaggttggatgttgaaaawtatttccacccccttcaaagagctctgtctcaaattatgtcattataggtattcaaggaaggggtaggttgtcttagatggtggatgcaggggggctgctgttgccagtaaaggaagttcaatg

SEQ ID NO: 134958 - DNA, 599 bp, Homo sapiens
tctgttgctgactcaaggagatgctgagatatttctggatgttgtcyctacttctttcaaatcttgttccttgtatccctggtttcacctctttatcatcgtcattctagctcacctccttctgccttcatccaatctgtcaattttatctagactccaataggcagaaagaatttgttctatcaggactgatacttctctttgtcattttgcctttcatgtaaacgtctgcttttggaactcagaagtcaaaactttgactcctcatttctttgggttcattgcctggtaatgggttccagttggtgaatttcttagaaaggaacaggtctctaggtgccagggaatggagagtataggaagggaggtgagggataaaaatacatatgaaaccactatatcatgattgaatgaatgaaaattttctacaattataaaaataagaatgtatattacactgttaaagggtttatttacataaagtctttgaaaatgtattagatattgtggctaaataaattatccagacttcagtttcgaatctccatccaagttcattgcaaagtttggtaatctataaaagaaaaaaaataaaagat

SEQ ID NO: 134959 - DNA, 562 bp, Homo sapiens
ttatactaagaaaaaatttttctcttgattctttttcttccaactatcatcttgctgtagtcagaaaaaaacctaacctccaaatatccacatcctaattcctaggacctataaatatattaggttacatggaaaagagtaattaaacttgcagataaaatcaagattgctaatcagttgactttaaaaatagagagatttccctggatagtatggctgggcacaacatagttacatgtgtccttaaaaaaggaagagggagctagaagaaagcaaaagatagtagcataagaaggccccaacctaacaatcctggctttgaagagagaggagaaggttcacaagccaatgaatgcaagtggtctccaaaatcaggaaaagacaagaaaatgggttctctcmtagagactctggaaggaatgcagtcttgctgatactttcagtccagtgagtctcactttggatttctgacctccaaaacactaatacattaaattatgccattttaagtcactaaatttgtggcaatctgtaatagcagcaattagaaactaatgcagac

SEQ ID NO: 134960 - DNA, 613 bp, Homo sapiens
atgcttcaaatttaaatagagctaaaattatatattagaattttagcattacactgtcttgcagatattgtcctataggaatataaaactcattttttcccttcatttatgaaacaccaaaaattactttcatgtgtatttatgtctcctccgatcatgggttctattactaaaatgacatgaaaaagagatatgattcagatctatcagaaaagctgatggctcagccaaattaatctataatcwgaccaagacagggtatgacaaattttagacttttgctttaaaaactttgttggaaacactgcatgttaacaggctaactttgaaaaatttgaaacatttacacaaaaaggtacgggggtgtatatgtgcactttctttaaataccagatagcagatgatgtttgagcccataggaaatccttgggttcttctgagtaataagtaccttatgatatgcctacttaaaatgaatctgctagtatatagtacaaagtgaaaaggattttgtctcaaaaatatctaatttttgcttagcaaattttagattgtaattataatcaggcactccccatcttgagattaaaaatacacaaacattgttttcaat

SEQ ID NO: 134961 - DNA, 609 bp, Homo sapiens
tttgagtgaggctcacttaaatttcacacaaaatacattcagggttctaggctactgcagtgatctgactagttttgtgtgtgaacctgagctttcgcacttgcccatgttataaccacattgctacctctctgtctctttcaactaagtgcagtgaaattggtrgcaggcatttttttacaaaagatagctcaagccagccatctaactttacaactcaaggaaccagaaaacataaactatgctgaaaaatagcagaaaggaggaaacaatagagattagaagatagaacaataaagtagggaaaaaatcaatagaaaatatcaaggaaaccaaaagttggttctatgaaaagactgttaaaatttaaaagccattacctagttacactaagaaaataagagagaagatccctaatactaaaatcagaaactaccaccaattctacagaaatagaaaggattataaaagtactaagaacaattgtataccaacaaactcaacttagatgaaatgggcaaactgctattaacgcaaaacttaccaagactaaatcacaaagaaattaaaaaatctgaatatgcctatagctaataaggatattgaata

SEQ ID NO: 134962 - DNA, 557 bp, Homo sapiens
aaccttcatacactgttggcagaaatgtaaattagtacagccaatatgaggaacagtatggaagttcctgaagaaaacaaaaatagagctaccatatgatccagcaatcctgctgcgaggtatatgcccaaatgacaggaaatcagtatactgaaggcatttctgcacttccatgtttattgcagtgctattcttaatagccaagatctggaagcaacctaagtgttcctcaacagataagtgaatattgaaaatatgccacgtatacacaatggggtactattccgccataaaaataatgagatactgttgtttgcaacaacatggatggaatgggaggagattattttaagtgaagtaagccaggcacagagagacagagtttgcatgttctcactcattttgtgggwgctaaaaattaaaacaattgagctcacagaggcagagaataaaaatgatggttaccagtggctaggaagggtaatgggggagaggggacaatgttgggatggtgaataacaaatatacagttaggaagattgaataagatctagcat

SEQ ID NO: 134963 - DNA, 583 bp, Homo sapiens
aaaactgcagaagacagacaagactctttctttattcaatagtggagaatccagttcctgagatcaatttcccactgttaagaaaggctaagaaaattattaactaccaatgatcccaaactcttgtaattcaggagaaattagtctttgacacaacagactttaaatttaatttcaattattatggctacattagtcatacatatttgtaggacacatgatattttgatacaggccaacaatgtacaacgattaaatcaaggtaattgggtatccatcacatcaagcatttatcatatatttgtgttaggaacattttaatttcaatcttttagtcatttcaaaacataaactaaatcattctaactatagtcatcttattgtactactataacacagcagactttcgagattaaaaaaaaaaggtcttcacttgtattctccctgagaattctcacactgctctaattttatacagtgcataatacctcaraggataatagcatatgtttatccatgtggaagattaataatgattggctgaaaagcagcatatattaaaacgtcatagcccaccacttaa

SEQ ID NO: 134964 - DNA, 233 bp, Homo sapiens
aaactagcagttgttgcttataagaattatctgaaaagaaggtgtcttttctcaaaccttagctgaattatggtactaatrttgggatatttcaaagccaccaaagaacatttctctgttccacagaaaatctgagtaaaactgaataagtttgattgtaatgttgaagtgtgagatatgccttatggcactctggaattgcggcagagcctttgttgctgcagtctccactc

SEQ ID NO: 134965 - DNA, 599 bp, Homo sapiens
ctttaacagaacatgcaatgaatcttctgcaaactcaactgctatacctgtgcttgagagacagttttattcagcttgatatctattagtatgtaataactttcttttctctttttatttttaggtataccctaatcatggtattttaactcttgcttttctttagttttaaatatttgtgggtacctagtaggtgcatatatttkgtattttaacttttaacttcatcttttaatctgctaaattttagcctctatttccccattagaaccaaacgtgacttctttccattaaccacaatagggagaaaataattgaaagaatgagatggttgaggcatgttttgtttgttttttaaaattgtttccatcttctaaaaccttgagagatggatagatagatatttagatatacttagagatattaataatataatagctacatatactatttattatataagtaatgcctattacttatataaatgtggtaccaatttcttatatgaaagtaatgcttattacttatctaatatgcttatttaatagacatttcctaaattccttttatggattaattcaaccaattttgaggctata

SEQ ID NO: 134966 - DNA, 599 bp, Homo sapiens
ctttaacagaacatgcaatgaatcttctgcaaactcaactgctatacctgtgcttgagagacagttttattcagcttgatatctattagtatgtaataactttcttttctctttttatttttaggtataccctaatcatggtattttaactcttgcttttctttagttttaaatatttgtgggtacctagtaggtgcatatatttggtattttaacttttaacttcatcttttaatctgctaaattttagcctctatttccccattagaaccaaacgtgacttctttccattaaccacaatagggagaaaataattgaaagaatgagatggttgaggcatgttttgtttgttttttaaaattgtttccatcttctaaaaccttgagagayggatagatagatatttagatatacttagagatattaataatataatagctacatatactatttattatataagtaatgcctattacttatataaatgtggtaccaatttcttatatgaaagtaatgcttattacttatctaatatgcttatttaatagacatttcctaaattccttttatggattaattcaaccaattttgaggctata

SEQ ID NO: 134967 - DNA, 472 bp, Homo sapiens
tcagattttgatgatttctccatctgtttttgtgagtaatattggtctgaagaatttatttcttataatgtctgtacatggtttaggtattagagtaatgtggtcctcataaaattggctaggaagtgttccctctgcttctattttcctggatagattttataaaaytggtattattttttcttcatatatttgataagattcaccagtgaaatcatctggatctggtaattttttttgttggaaggttactaattattgattcaatttttatagtcctattaagattgtaagtttctccttctgtaaatattggcattttgtgtcttttgaaaaatgtgtccattttttaagctatcaaatttgtggacatagagttacttacaatatttcttcatcatccctttgaagtccatgggattagcagtaatgaccctacttttattcctgttacagataattttcttcttct

SEQ ID NO: 134968 - DNA, 472 bp, Homo sapiens
tcagattttgatgatttctccatctgtttttgtgagtaatattggtctgaagaatttatttcttataatgtctgtacatggtttaggtattagagtaatgtggtcctcataaaattggctaggaagtgttccctctgcttctattttcctggatagattttataaaactggtattattttttcttcatatatttgataagattcaccagtgaaatcatctggatctggtaattttttttgttggaaggttactaattattgattcaatttttatagtcctattaagattgtaagtttctccttctgtaaatattggcattttgtgtcttttgaaaaatgtgtccattttttaagctatcaaatttgtggacatagagttacttacaatatttcttcatcatccctttgaagtccatgggattagyagtaatgaccctacttttattcctgttacagataattttcttcttct

SEQ ID NO: 134969 - DNA, 643 bp, Homo sapiens
gtgtcttttgaaattagcaacaatagatcatcttaatataagaaaaacattaccatatttagaagaagcaatttttttttaaaaaaagagactagaagcttctatatgtcgatgtttgtcaaactcaaaggttatttccccttttcaagataaaaagattccgccatggtgtgtgtgtgtrtatatatatcccatggtgtgtgtgtgtgtgtgtgtgtgtgtgtgtgtgtgtgtatgtatatatgaaagtgaaaggaggcaaaagtgaaaatttaaaaggagtggatatcttggagagggccaaggtagaaagaaatagatcatcatcatcatcaagtttggtcttcaggtagaggtagagaatgttgagagaagattgtaccatcatcttccttttgcaaaacacttttttccagtgacatgctttttttgtgtgttagtttgttttgttttgttttgttttgttttgttttgttttgttttacaatattgacagagaccagggaatcttcgtttggtgatttatctgggagcttacatctactacaattgaagcttaagaattttaataattttcttttttttagtgttttcaagggtggaggcaagttgttttgctaaattaattagattaggagtgggc

SEQ ID NO: 134970 - DNA, 331 bp, Homo sapiens
tccaaatcatttttgtgccctattagtgaaaaattgagttagttttttatataaaaattgaaaatgaacgttaacaattataaagaaaaaaatactcagytgatttttaatatatctccgttttgacaagctttatgtaatctcagattattcaaataattgtttatatattattttttcacagtgacataaaaaatgttaacatttcgtccaattcctgtttgtggaaattgtattcattattcccctagatacttggctaagaaataaaatgaggcataatgatactttcttctcaaaaaatattaattcaggtcttttggtcaggaac

SEQ ID NO: 134971 - DNA, 513 bp, Homo sapiens
ataatttccctccactaaatgagcattttacttcccagagggagtaattttattcaccttttgccatcattggattgggcccattacagctgttgttcttcccttatttgaaatttcataacayacataacaacagagcttctcccggtggaatgggcaaccatgcagcaacaagccacacacatgtgcccacatgtaaacaatctgctaacccaaccagcttgggtatttattatgtaagcatcatcctcatatccaaatctgtttcaatgagactattcagtacagaagaaaaattaatgttcttatgagccattgttcacatcagccactcttccaaattccaatatgagttaccagataaatagtaaagcaccattttgactttctgtttataaagtgaatgctttagagactgattggcatggcaagaggtaagggggaggcgaaggaacaaggaaaagttcagacagggaaaataaaggagaaatcctaggaaaccacaaatgcact

SEQ ID NO: 134972 - DNA, 513 bp, Homo sapiens
ataatttccctccactaaatgagcattttacttcccagagggagtaattttattcaccttttgccatcattggattgggcccattacagctgttgttcttcccttatttgaaatttcataacacacataacaacagagcttctcccggtggaatgggcarccatgcagcaacaagccacacacatgtgcccacatgtaaacaatctgctaacccaaccagcttgggtatttattatgtaagcatcatcctcatatccaaatctgtttcaatgagactattcagtacagaagaaaaattaatgttcttatgagccattgttcacatcagccactcttccaaattccaatatgagttaccagataaatagtaaagcaccattttgactttctgtttataaagtgaatgctttagagactgattggcatggcaagaggtaagggggaggcgaaggaacaaggaaaagttcagacagggaaaataaaggagaaatcctaggaaaccacaaatgcact

SEQ ID NO: 134973 - DNA, 427 bp, Homo sapiens
taaatttaaaggcaaaagctattgatctgaataaaacatagaaggatttatatagtaaaataatgctacaatagttgatattgagtagtcagaagacatagggaccaagggctaataaagtgtgcaaatccagagtgcttctgttttggattagtttctcatttgtacttatttgattcatagcatgaggtcagtccttttccatttcaattcaatttatttccatcatttaaagattatcgaataggacagawaattttgaagacttagggaaattatccaccatttatgcggggctgcaagttgcccattgaacataggaaggatggatcttacaaggtaaaccagtattcagccaattaattatgaaaatgtaactataaaacaatcagattgatttgctgatgctaagccagtgtcattattt

SEQ ID NO: 134974 - DNA, 531 bp, Homo sapiens
gttgtcaagttataacctttgaaccttaatgcattcactctccttttctattttagagtctgatctatgaaactctttttcctccctttcctcattgcattcagggtttctttgacataggacacagtgaactgctctttagttcttgtctttccccaaccctttgtgaggtatcaaatccaagtccactaatctataaattttacctctagagccatacaaaagagaatcagttactatcacacttataggtctagagaaraggatgcaaagctaaattgcacaatctcgtttgaaacaattctagttctattagggatcttgtcagcagtaaaaaaatgcacaagcagcaatcccagaaatgctgagaggctatccaaaactcacctttttccaaaatcttaccttcttctaaaaagaattcaaagtattctttgttctcatttttgacaagattttgatttgggatatgagtagaaaacagtgaatatacagtagtaggtactaaatatataatcagcttttgtttta

SEQ ID NO: 134975 - DNA, 561 bp, Homo sapiens
acaaatcctcgtgttcccacttactcttaatgcatgcctgttttttcttgctgggtaaatagataggctagtagttctaggggtcattgttattgcgctggtaaagggtgtctatactttacatcctccgtagtctgggattagaaggctttaacttgttaaatgaacttattcgaaatgcaaatctgatctgtaacttacttttacttattgtaagattgtttctatatatttggcctggtaggctgttctaaaatgtgttgcatagctacgcatgactatttttaataagaaattattattttttaaaccatcagcagcagaaagcagttttctcttcccagtagaaatggagagataaaggaaagttagaaagttttccaaaaggctaaaggaaaagttagaattatccgaaaaaaagtgatgtactggatatatccttttagagacaagcttgagtctaaccacaactttgaggcatatataagyctttggacaaagagaacaagcagaggtttgagggggacatcttagtttcaaggcaagctgatgggaagattt

SEQ ID NO: 134976 - DNA, 619 bp, Homo sapiens
aaggaaaaggcaattcagaaggttatcaatgaagatatgttgaggacgaacttcctttcccttatacacatccccaggaaacacttggaacaatgtagttagttaagcaaaatagagatgtaccgattttccaggttctgtaatttatcaactaatctaatgttcttgcaactgccttccctgtgccatcagggcacagaaatgataatgtacttcattgtctctactttagtctaatttaggtcttctccctgctttccacttctgcaaagatgacttacatgatgatgacagcattgatatgtgaaagactagaagaaacaaaatttttaacaatgacaacctataaagaatcaaagcactttaagaaatctgaaaaaattaacaggaacagcttttatgcgataagggctatgcaaattatagcaaaacttctgacatttagaacttttacaaaattagaaagcctcataaactactatcaatcaaatmatcatacttagaattaaaaaggaaactagaaatcatcttcatcgatcacactattatttcctttccctagatgaaaaggaaagctttcttgatgaagtactgctttatttatattctgaggtgtaga

SEQ ID NO: 134977 - DNA, 541 bp, Homo sapiens
tgtttcttgaacaaagggactatttacagagttgtaagtagatttaaggatatcttaagctaataatggcaaaacacacacagaaaaacaacaagaacccattataatcccttggaaccaaaggaatcaggggaaagtaaggtagtggtgaagcccagagaggtcttagggccatgaaggaggagccacgtgatacaacctataattgtaggacgaaccactgacagaattgtagcaggcaaagagagtggtaaaggaaggtaaatactcagatttctaatttcttctgccctctgatttcctgtttgtgcttcccattggctgaaaccaatccaaagacaagaaaaccaagatgatgcaaactatagttgtcagtctcctggggcataagcagggtagaagacagtaaagaatgyacaacacagataggtatggttagatattctattttgcatattactagtaaatgtttgtatattaaacatacagtctgtgcctgcatgtaataaaactatgaagtagttttgaatggtttgtgtcc

SEQ ID NO: 134978 - DNA, 545 bp, Homo sapiens
tgatcgcaatagaaattcagaggaagatgctggatctgagaaatatcccaagggaaatgacatgacttgatgcttaaaaggatctggatattatatctagatttttcttcctaggtgactagaatgatgatagtaatattgacagaaggaggggaaccaggaaagtgagttgatttttcaggaaatatgattaaaagtaaatgtgaacattgagaaaattataaaggaccctatgctaactgtgagattgataaattctatcaactacacttcttcattaaaatttaatgaaaactttgtagcttgttaatgattcctttcttcagtgaggtatatgattgatcgacaaggaaggtatttctatgaaattggtagctgctwgtaccttccaacccctttttttaatcagacctgctaaagaaaatattagttgaaagaagtcattttaggtaacaattttgttttctttcataattggcagtattaactaacctattaggcaggttattgtgatgtaagttattaagacacattaggagttttat

SEQ ID NO: 134979 - DNA, 519 bp, Homo sapiens
tcttaattaccccctaaagaccctgtttccaaatatagacrcacttcaagttcaagcttcaacacaagaattttggggagacacagttcagtccatatcacctaaggtattcaattaataaaaagaactttgtgtaaaagctgtgccatcagttaaccaaaaaaaaaaaaatactggttaaaattagaacagaaaatctgagacttttgtgaaaaagtctttaaattagagtgaatattgcgatgtaggtcatatgaataagaatatataaattaaattataacttgtttttaatgaaaaggcattcttcttaacagaaaaaaaagtaaaaatagaaacaaatacaaataaaaagttatggtccaaaccaagtaatcatacatagtatgattttgagtaattgattagattataagaaataacagttcttgaaacaacaaagtcaaaatatttagtcatataattcagataaataaatacgactagtactctgaattgaaacttccttgttttatagat

SEQ ID NO: 134980 - DNA, 500 bp, Homo sapiens
ctggggcccacttttatgacattatttaatcttaattaccccctaaagaccctgtttccaaatatagacgcacttcaagttcaagcttcaacacaagaattttggggagacacagttcagtccatatcacctaaggtattcaattaataaaaagaactttgtgtaaaagctgtgccatcagttaaccaaaaaaaaaaaaatactggttaaaattagaacagaaaatctgagacttttgtgaaaaagtctttaaattagagtgaatattgcgatgtaggtcatatgaataagaatatataaattaaattataacttgtttttaatgaaaaggcattcttcttaacagaaaaaaaagtaaraatagaaacaaatacaaataaaaagttatggtccaaaccaagtaatcatacatagtatgattttgagtaattgattagattataagaaataacagttcttgaaacaacaaagtcaaaatatttagtcatataattcagata

SEQ ID NO: 134981 - DNA, 614 bp, Homo sapiens
cacattttgcttattaattcatccatccacttatgaacatttgttgcttcctcattttagctagtgtgaatagtgctgttataaacatgggtgtacaaatatctctttaagatcttgcttttaattcttttgggtatatgcccagaagtggaattgctggatcatatggaagttttatttttaagtttttgaggaatctccataatgtttttcatagtggctgtaccatcttacatttccaccagcagtgaacaagggttctaatttttcctcatctccatcaacagttgttatttgtgtgtgtgtgtgtgtgtgtgtatgtatgtgtgctgataggagccatgtcaatgggtttgaggtggtaatatgcatttttaaatgtatatttctgctaaaacccatgctttcttgctgctgcaggggttttgttctatcaataatttccttgttttcctgtatgtttaccattctaccttctcttcctctttgtcmtcagtatatacatatgttctgctattgttcatactttaaaatttcttccatgaacttctgcttccttaatccaattttttcatttttaaaaaaaaattcactcattttatttatgcaacaaa

SEQ ID NO: 134982 - DNA, 614 bp, Homo sapiens
cacattttgcttattaattcatccatccacttatgaacatttgttgcttcctcattttagctagtgtgaatagtgctgttataaacatgggtgtacaaatatctctttaagatcttgcttttaattcttttgggtatatgcccagaagtggaattgctggatcatatggaagttttatttttaagtttttgaggaatctccataatgtttttcatagtggctgtaccatcttacatttccaccagcagtgaacaagggttctaatttttcctcatctccatcaacagttgttatttgtgtgtgtgtgtgtgtgtgtgtatgtatgtgtgctgataggagccatgtcaatgggtttgaggtggtaatatgcatttttaaatgtatatttctgctaaaacccatgctttcttgctgctgcaggggttttgttctatcaataatttccttgttttcctgtatgtttaccattctaccttctcttcctctttgtcctcagtatatacatatgttctgctattgttcrtactttaaaatttcttccatgaacttctgcttccttaatccaattttttcatttttaaaaaaaaattcactcattttatttatgcaacaaa

SEQ ID NO: 134983 - DNA, 590 bp, Homo sapiens
cttagataaaaaagttatcaaaaaattataattaaatcattaaaatcaagtaagaattatttttctcatgttagcatttttcttaaatcaaaagaaaaaattctcagaaatatgttgccttctacaacatctaaattagtaaaaattacaaaatagtgattagtttaaattatatggttagggccaaattgttcacttcaggcttttatttcagataaaatatatgtactataccatttgatgcattgtattaaatagaaatatttctgatactttatatatattcactacttagtcatatttactcattacctttcattataactgaaggtaaatggaagagagaagtgtagtctctcaccatcgtcacctttgttattataggtatcattaattatcatcatatcacaaagaatcaatatttattgagcattttctaagtgccaaaaattatgcttataaaattactataaattgggaattcttactrtaactgaccaaagtcatagagctttctagtataattggaatttaattcaaatctacctgactccaaagttcatacttttgctaataaataaaacatataa

SEQ ID NO: 134984 - DNA, 590 bp, Homo sapiens
cttagataaaaaagttatcaaaaaattataattaaatcattaaaatcaagtaagaattatttttctcatgttagcatttttcttaaatcaaaagaaaaaattctcagaaatatgttgccttctacaacatctaaattagtaaaaattacaaaatagtgattagtttaaattatatggttagggccaaattgttcacttcaggcttttatttcagataaaatatatgtactataccatttgatgcattgtattaaatagaaatatttctgatactttatatatattcactacttagtcatatttactcattacctttcattataactgaaggtaaatggaagagagaagtgtagtctctcaccatcgtcacctttgttattataggtatcattaattatcatcatatcacaaagaatcaatatttattgagcattttctaagtgccaaaaattatgcttataaaattactataaattgggaattcttactataactgaccaaagtcatagagctttctagtataattggaatttaattcaaatctacctkactccaaagttcatacttttgctaataaataaaacatataa

SEQ ID NO: 134985 - DNA, 545 bp, Homo sapiens
aggttgattccagtctttgctattgtgaaccgaaagaagacatacatgtggccaaaaatcatgtgaaaaaaagctcaccatcactgatcattagagaaatgcaaatcacaatcacaatgaggtaccatctaacactagtcagaatggctattatgaaaaagtcaagataatagatgctgctgaggttgtggagaaaaaggaatggttatacactgttggtgggaatgtaattgagtttgaccattgtggaaracaatgtggtgattcctcaaagacctaaagacagaaataccatttgacctagcaattctactactggggtatataccccaaaggaatataaatcattctattataaaatcagaagaaagtttaagtgcaaaggtgtggaaatgagagacagcacggaatattcagagaagagaaagtagctagaccgagaagtgagtgtgacatgttcaactttattattatacaaacatctattttccgtttagaagttagcatggttgaaaacaattattttcactggagataatgcaact

SEQ ID NO: 134986 - DNA, 582 bp, Homo sapiens
ggactcaaggcttcccatcatgtctattggtgcaaggctgattttagaggaaatggagaaaatcaaaatgactcagaacacctatagctttgccagctttgacaaggactctctggacaaaaagagggaacattcacattctaaagaattttcttcccaggatttcacagtctctcctccaactcttctccactcctttagctctggatctgacaagcaaactcctgccaccagaaaagtggtgaggatatccttgcattcctctctctgccagaaagtggaaaattcccgtgtcttctttttaggtcagagagtgttgcaattaaagagaagacttttcctaggataagaaggwaaggaaacaaaagtaccaaccagagaaaacaaagtggaaggaaaacgaagagtgttttctgagctgccggggttctgacccgaacaacacaatgttgaaagagctgcgatgctggagctgcagggtgcaggcgggggtgtccagggcaaggcaggagagggcgtcggggatcctatattatatggtaggcatggtaggttctgcagaggattccggcactcaagctt

SEQ ID NO: 134987 - DNA, 394 bp, Homo sapiens
gaattcataaaaagagaataaagctttgcaaaaaaagaacctgtctttggatcttcagaagtgactaaaatattttaataggtcccttttagtgcctctttttgcttgcctatgaaatattgacagatcttcccaactgggggaaaaaaaacccaaaattcattaaactcactgtgtcttatttggttaaataaaaagaggtagaaagactattatgagaaaagagaagcaatagaaactgtggaaattggagttccaaacatcaatcttaatttgattgaatagtagaaagtatataaactatggaaattgatgttccaaacatcartccgcattcctgagcaattttcaaattggtcaccagctctccactcctcctgtcatgagtcactta

SEQ ID NO: 134988 - DNA, 579 bp, Homo sapiens
ctttgttccttgtgtaagctaatgactgaggtggatttaaagtaggacctttcccaagggagcttaatgttataarggaggctgtaattaatctcaaagcatactaaataatctaaaaagcaaaaaatgccaccaaactctgttaatagatattgctcagtgtccatgtccttggcttataattcaagatcttttttcttttctttttttttttatttgttttgagtccgagtctcgctctgtcatccaggctggagtgcaatggcatgatctcggttcactgcaacctctgcctcccgggttcaagcaattctcctgccttggcgtcctgagtagctgggattacaggtgcctgccaccacgcctggctaatttttatattttttgtagagatggttttcaccatgttggccaggctggtctctttggccaggctggctttgaactcctgacctcatgatccacctgcctcggcctcccaaagtgctgggattacaggtatgagttaccgtgcccggccaagaacatttttcataattatctttttatctttttattttttccccaaccctgtcagtc

SEQ ID NO: 134989 - DNA, 579 bp, Homo sapiens
ctttgttccttgtgtaagctaatgactgaggtggatttaaagtaggacctttcccaagggagcttaatgttataagggargctgtaattaatctcaaagcatactaaataatctaaaaagcaaaaaatgccaccaaactctgttaatagatattgctcagtgtccatgtccttggcttataattcaagatcttttttcttttctttttttttttatttgttttgagtccgagtctcgctctgtcatccaggctggagtgcaatggcatgatctcggttcactgcaacctctgcctcccgggttcaagcaattctcctgccttggcgtcctgagtagctgggattacaggtgcctgccaccacgcctggctaatttttatattttttgtagagatggttttcaccatgttggccaggctggtctctttggccaggctggctttgaactcctgacctcatgatccacctgcctcggcctcccaaagtgctgggattacaggtatgagttaccgtgcccggccaagaacatttttcataattatctttttatctttttattttttccccaaccctgtcagtc

SEQ ID NO: 134990 - DNA, 572 bp, Homo sapiens
gaactaataataatgcccaacacttttcatcttaaaaacgttggtctttgggtaaaatcctgctcccccacctactatgtgatcatgggcaagtaatatgatcactctgggcttcagtttcccatctaaaaaatgggcataacaacaatagctacctcataaggttataatgwggattcagtgagttaatatttataagtgtttagaacagtgcccggcacagaagaattgctgtcagtgattgttgaataaatcatagttaccagcacctattttgcgcatgatttcctgagtgaggctttgtgtccccacccaaatctcatcttgacttgtaatccccataatcctcataattcccacatgtcaagggagagaccaggtggaggtaattgaattctgggggaccatttcccccaggctgttctcatgatggtgagtgagttctcacgagatctgatggttttataaggggctttccaccccttttctgggcatttctccttcctgctgccttgtgaaaaaggtgccttgcttcctcttcaccttctgccatgactgtaagtttcctgagg

SEQ ID NO: 134991 - DNA, 629 bp, Homo sapiens
ttacctgtctcatcaccaaatccagtggctacacaataatctttaggcttcctaactactctgttcctttaaaaatcctctcatcccaaggcttcagtgaccccaaggcttcagtgaccccaagccaccccaggcttcctgtcttcctggcagttccttccctggatccttctttagctattcttccttcttcctcctaaatgcaggtacatccaaagggtgtgtcctcrtgaccttcttccctctccttctaccatcttcctaactatgtttagtttactggatatggaagctctcccccaacagtgagctattggaaacacagactatccaaagtcagatatgtttagccatgagactttgcagaatctcctaccaggaaacgagagtaggcactggcccaaacaccaaagcagaagaatccagcataacagtgcagccctggggcaccatgctggatgcagcttaggacaggggatgggcaccaaggggtttgaccatagaataaaggagaggtccaaagccgtaggtcagtcagtgtgcttgaagaagcattatttctaatgcttgtacatagtaggtttaacagtgttccccaatctcttcacaggggttaggtatccctcttg

SEQ ID NO: 134992 - DNA, 168 bp, Homo sapiens
aagaacacactactgttgttattgaaaataacatctattgattatcttaatcaatgactattctcyatgggtttatgtgccaataatttaggctgctcagttttctccattgaaacttaagatttaaatcactagatcataaaaaaaccatacaatgcattgcccctt

SEQ ID NO: 134993 - DNA, 540 bp, Homo sapiens
gctattaatatagactatttaaatatatattttcagtaaaaactttactaaattaatacaaaaatccaagctaaaaataaataattgtttagcttggtaagatggaccatccagaggcaagcaaaaaggttaaaattagtaaattttgtgatcttaagtaaaaaattatttttaacattcagttttatgtttcctactgaggagatctaataatacaacgatacttagggatgacacaggatgaagttaggcatgttacaacatacattctaaatatcctttaaagtggttgcaaaagaaaatactgatttctctgggggcaattttataagtatggaactctrattttcactcttaacacttctcaaaatatagagtattatgaaaacagtttgtatttaattgatgaaacaatcatatttttgacacttgtataggaggtcccttcactgtgtcatggtaaagtaaccaaatatttactgtgaacatttttgacaggtgacataagtaaattgtaatcacttctttacttgtacagta

SEQ ID NO: 134994 - DNA, 251 bp, Homo sapiens
cttttgtagcaacttggatgaaactggaggccattattctaagtgaagtaactcaggaatcaaaaaccaaataccacatatactcacttataagtgggagctaagttatgggtgtccaaaggtatggagtgatataatgggcattggagactcagaaagagggaggttgygagggggttgtggggtgaataattacctatcgggtacaatgtacactatttggatgctgggtgcactaaaatcccagactt

SEQ ID NO: 134995 - DNA, 574 bp, Homo sapiens
tgggagctaagttatgggtgtccaaaggtatggagtgatataatgggcattggagactcagaaagagggaggttgcgagggggytgtggggtgaataattacctatcgggtacaatgtacactatttggatgctgggtgcactaaaatcccagacttaaccactatacaagttatccatgtaaccaaaacccacttgtacccctaacgctattaaaatacaatttttttaaattctattttatgatcagcatcctaggaccattcttggtgccagctgtcttagatcaagtttcaggaaatagactctgagacaaatagttgcttgcaggatgtttattggagaaattattgaaacaacacctgttagaaagtaagggaagcaggatcgggcagagggagaagctgaactccaatgtgcttgcaatagagacatcagccaatcccataaaaaatgctggtgctgggacggcacttctgagttatcccaaactgagccaagggggccatgtttttgtacctctgcactagatgtggactggccctggggagggagtgtgacattgggcaagacag

SEQ ID NO: 134996 - DNA, 574 bp, Homo sapiens
tgggagctaagttatgggtgtccaaaggtatggagtgatataatgggcattggagactcagaaagagggaggttgcgagggggttgtggggtgaataattacctatcgggtacaatgtacactatttggatgctggktgcactaaaatcccagacttaaccactatacaagttatccatgtaaccaaaacccacttgtacccctaacgctattaaaatacaatttttttaaattctattttatgatcagcatcctaggaccattcttggtgccagctgtcttagatcaagtttcaggaaatagactctgagacaaatagttgcttgcaggatgtttattggagaaattattgaaacaacacctgttagaaagtaagggaagcaggatcgggcagagggagaagctgaactccaatgtgcttgcaatagagacatcagccaatcccataaaaaatgctggtgctgggacggcacttctgagttatcccaaactgagccaagggggccatgtttttgtacctctgcactagatgtggactggccctggggagggagtgtgacattgggcaagacag

SEQ ID NO: 134997 - DNA, 533 bp, Homo sapiens
ccacagcctctcagtttacctgactgactgaatgagacatgactgaggattaaaaattcactggtgtgaacagggtacccaagccaaccaagacaagttttgggttgggacttatcaggacgtctgatatgtgaaaagcyattgtaaaacccttgttgaatcagagaagcttgaatcctttagcttcagattcagaaatatgacaagtcaaatgagcttggacacaaagtctgaggcccactttattgtatgcccctgggtataacaaaaagcaatccccttttctttctccctccaggtatgggaagtatatttcacaagttacaggaggctgtaaggaagcaggggaagggagggagtggatgggagtctccacttggaggtgaggtccatgtaggggaacagctagagctgtgctactgaaggctttcttactgtcagatccactggctggtatgccctgtctgactctctctgcctcacctcagagcaggactcacctcacctcagggtacaggactcctacattctca

SEQ ID NO: 134998 - DNA, 395 bp, Homo sapiens
cttgcgctgtagaatttacaatctagctagtgatgtggaatagagcacagatgacaatctatggtcatgtaaagttaatgagaacagtacaggcagtctagtccatacctgcaaagtacaatgaagtcaatcaagggaaggtttcttgaaggcatgaattttgggtgctgctttagagggtgattcttatgggagcaggggattccttgggggtcaaaatggacattgccaasgtcaaatgaggggagtgaggaggctcatcctgccatggcacagagcagctgtttctgggatggtggcaaaatgggctctggaaatacacttctagcttggctggccaagttcaagacagaagtgggaaagacatcaagttctaggcaaggtggctatcaccc

SEQ ID NO: 134999 - DNA, 572 bp, Homo sapiens
gatgagggcctccagtgcctgtttttgcttagactagtgattctcagccctggtagggcatccttatctcctggggagcttttcaaagataaatgatgctggacccttgccaaaatctgaatctccaaggatgragcctaaatatatctatgtgtatgtcatctgcatactgctggagttgtgagccactgacttagatggtgaagctgaaatggtctcccacaaaattgcatacacttgagtgcacacacacacacacacacacacacctgggatagccaatcaagcttgcccattttttcttataaacagaagtgtttgttcacagatattctgggaatattgggttctcagaatctttacattcttcaaccattttaagatcagtctctaggattttcttaaacctgagtactattgcaacataggattcccaaacaccatgaccttcttacagagttttcctgagagtagatgaaccctccctcactgtcctgtgggataactggaaggacaacccttcatttgcattctatcctccgccctgcaatattctctggaatccacattcc

SEQ ID NO: 135000 - DNA, 588 bp, Homo sapiens
tttgcagtgatgtagtgaaagataaggccagaaatggtggttggagtaacagtggaataataataacaagagtagataacatttattgagtatttgatacataccaacactattctaagtacttaaatgtaaaaaatacatttacaaatagctaatatataaccatgtaaaaaaaatttaaaagaacagaagcatatggagtgaaaggtaagactccctcccatgcctatatctttccatatctcatttcccctttcctaaggcaactactgctatactttttgtatatccttctagggatacatcatattctgtgcatatgcaaacatatacatgtatatgtttttacacaaatgaccatgtactaatatgccgttatacttcttgcttttttcattttcaatgtattagagatcagctcatactgctattatagagctgcttcatttttaaaaactgcttcttagtattccattctacagatgcgctataatctmtttaaccagttccctcctaacagacacttagaatgttgcagatcttttactgttacaaccaactgtatcgaatatccatatatgttttgct

SEQ ID NO: 135001 - DNA, 486 bp, Homo sapiens
ttttcaattgactttgcccagatccatcagaggaatcattatctatggcagtaatatccctatcttaaataataagacttgaggtcaaaattactgctcaatccatgggctgcagaataaatgttgtgttagcaggcatgaaaacagcattcatcttcttgtacatttccaccagagctcttgaatgacaaagtaccatgtcaaagagcagtaatattttgaaggtaatctttttttttctgmgcaataggtctcaagagtaggcttaaaatattcagtaaaccatactgtaaatagacgtgctatcacccaggctttgttattccatttatagagcgtaggcagagtagatttagcataattcttaagagtgctacaatttccataatgatgaaacattggctttaacttaaagtcaccagctgcattagcccctcataagagtgtcagcctgtcctttgaagcttggaagccaggcactgactt

SEQ ID NO: 135002 - DNA, 516 bp, Homo sapiens
tccagaaggttttcaattgactttgcccagatccatcagaggaatcattatctatggcagtaatatccctatcttaaataataagacttgaggtcaaaattactgctcaatccatgggctgcagaataaatgttgtgttagcaggcatgaaaacagcattcatcttcttgtacatttccaccagagctcttgaatgacaaagtaccatgtcaaagagcagtaatattttgaaggtaatctttttttttctgagcaataggtctcaagagtaggcttaaaatattcagtaaaccatactgtaaatagacgtgctatcacccaggctttgttattccatttatagagcgtaggcagagtagatttagcataattcttaagagtgctasaatttccataatgatgaaacattggctttaacttaaagtcaccagctgcattagcccctcataagagtgtcagcctgtcctttgaagcttggaagccaggcactgacttctctctagtgataaaaattct

SEQ ID NO: 135003 - DNA, 593 bp, Homo sapiens
tttaagttctcagttaggtgaccccagtgctctctggaagaaaccctaccccattcctcaggagggagctacttcctgtggctccttctcatacttgcaaactcaagcagggctttaggtttggcccagatgtgagttgaagttccccactcagtctgtagcatccagaagactattttcattcccttaagaaaatttacagaatttsataaaatctgcctgccccacaagtgtacaactgataagctgtaatacatttgagcactgaatttttcaggaacacgtctcccctcagtgccaatccccttagggccatcaggtttggcaaacaagcacgttgaagatggagtatgaagtttgttttttattaaatagaacattgttggcattttcttccaagaaaaaattgctacataactagatatgtcaactaacaaagatggagataacagaacataaggtgatatggtttgggtctgtgtccccatccaaatctcatattgaattgtaatccctagtgttggatgtggagcctggtgggaggcgaattaaatcatgggagtggtttctaatggtttatcaccatctcccta

SEQ ID NO: 135004 - DNA, 591 bp, Homo sapiens
taagttctcagttaggtgaccccagtgctctctggaagaaaccctaccccattcctcaggagggagctacttcctgtggctccttctcatacttgcaaactcaagcagggctttaggtttggcccagatgtgagttgaagttccccactcagtctgtagcatccagaagactattttcattcccttaagaaaatttacagaatttcataaaatctgcctgccccacaagtgtacaactgataagctgtaatacatttgagcactgaatttttcaggaacacgtctcccctcagtgccaatccccttagggccatcaggtttggcaaacaagcacgttgaagatggagtatgaagtttgttttttattaaatagaacattgttggcattttcttccaagaaaaaattgctacataactagatatgtcaactaacaaagatggagataacagaacataaggtgatatggtttgggtctgtgtccccatccaaatctcatrttgaattgtaatccctagtgttggatgtggagcctggtgggaggcgaattaaatcatgggagtggtttctaatggtttatcaccatctcccta

SEQ ID NO: 135005 - DNA, 407 bp, Homo sapiens
attttatcttttcatctgtaaatgtttaggatgtacctataaaagataaaaactgttttattcaatataaccacatgcaattattacaacaattttcccctgatatcaaatatatagtcagtatcttaattggtcattatgttttttaaatctctttgaatagatatttcctctccctccttactttttttcgtgttatttatwtgttgaagggtttttttgtttcccacagtcagttttgcctgtgaaaatgtttttaaacaactttgttgagatataattcacttatagtaaatccagtatatccacagagttgtgtatccaccatcacaatcaagtttagaaaattttcattaccccaaaaacaaaccctgcatcctttagccatgacaccccaacatcactcc

SEQ ID NO: 135006 - DNA, 602 bp, Homo sapiens
gagtcaaaaaatgtagcaatttacctgatgttctattctactgtggctaagatggcactcaaaccacaatacaaagtacttcctgctcttcccccaacttttcccaagcagaggagcctctctctgtggccaccaacaccaccagtccacgggggattctgccagcccaccaccaatgtttgcgtaaagcctaaggacttccatcagcttatggtgaatgctgccattcctgggactcatctttcagggcagtgaactcctctctggcccagagcaggtccagaaatgctgtctaagagcctaggccagtacttagggactccaacagtgtgattgttgctctaccctcactgtggctgagctagtacctggggtgcaagacaaagtcccctttactttttcctctgcttttctcaaacagaaggagtctttcactatagccaccacagctgggaatgtgctgggtctcccctgaagtcagcatatctcagagcccaaggtccatggcatacttcctgggtatcactggtggttgttcgtggcccaagggctwtttagtcagcaggtgataaatcctgccaggactgggtccttcccttcaa

SEQ ID NO: 135007 - DNA, 602 bp, Homo sapiens
aagaccatcaaggcagtatatctaaaagtctgcaagaaccacagtgttactgctgccccctaaagtggatacagcttagatcacaacccccaagtcttaccaatatctggaaagccttcccaaaaaggttgggtataaagaagctcagattgtgaagactacaataagtacccaactcttcaatgcccagacacagacaaacatctacaagtatcaaaacaatccaggaaaacatggcctcactaaatgagctaaataaggcactagggaccaatcctggagaamcagagatatctgacttttcagacagataattcaaaattgctgttttgaggactctcaaataaatatgagataacacagagaaggaattcagaattatatcagataaacttaacacagatattgaaataattttaaagaatcaagaagaaattctggagctgaaaaatgcagtaggcatactgaagaatgtaccagagtctttccataacagaattgatcaggcagaagaaagaattagtagtgagcttgaagacaggctatttgaaaatgcacagtcagagaaaccaaaataaaaaaagaataaaaacaatgaagca

SEQ ID NO: 135008 - DNA, 608 bp, Homo sapiens
acaagtcatattctgtcattcctctgcacaaaaccctacaatatcttctcagctcaccctgagtaaaatgcaaaatatttaacatggtctgcaagactccacgtgatgtaaccctctgatacctctctggtttcatttactactaatcttccctcacccttcccactctaggcataggcgtgctgatctctttgctcctcctagaacacatcaagtacattctggcctcagggatttgcatttactgtttcctctctgtgggagaagccttccccatatagctggatggcttgctccctcactttgagactcacctcaaatgtcacttagtgagggagactttccataaccatcatatataaaatagcaattctcctcaccctttgtcatgtttgatggagaaaggaagataacgagtacagcygtctgataggtagttggatatgtgggtctagagttcagctagaggtctgagccagagatgtagatttggtattttccatcaccccaggcaaggagaataatgcttgtaatggtctggaggtgatggatgtatcatgctttctgcatgatacatccaaggatcatttgggactttttgaaaatgc

SEQ ID NO: 135009 - DNA, 459 bp, Homo sapiens
agaccaacatacaaaagtcaattgcatttccataaactagcacataacaattgaatattgaaataaaaagcaattacttttaaaataacattcaaaaaacatggattacttaaggttatatttaataaaatacattgaaaacctgcacatttaaaactgtaaactttgctgcagaaattgaagaaaaataaatggaggcatatatcatattcatagctcggaagactcagtastgtcaatcctcccaatattaattcataaatttaacttgaaagatactgacaagctggtactaaaatttatgtagaaatactaaggatctagatatcaaaatgaattttctaaaataacaaattggtaatacactacttgagatcaaaacttactactaaacacagaggaaggtgtcaggataattgcacaggaagaatggtatatatgaaaataaacatatgaggg

SEQ ID NO: 135010 - DNA, 599 bp, Homo sapiens
tttggtacttgcctaaacccctcaaaacgcagcctaaccacccaagctgaggacagagagagagcccgtgctaaggccagtctggctgcccagcgggcatcctgtcagcatggggctagcctctgctattggctcacaagtctgggctgtgcatcgttcagatttcatcacatcaccttgccctgggtagacatggcgcaagctgacacggcakaaccccccacttacattgagtcagagcagtgatttagaaatctctgtatccgtgcctgggtacgtgtgcacatgtctctgtgtggcatatggagattctgtcaaaagtgagaacctgtgagcacgtctagttagccaataggcatttgataagacctagggcaatggtttactgcacactcacttccatgaagctaattataattatcattcttcacctctgcatgctgcaaaccaagttggatgaacagaaaacagaccttgaactcttaagcagaaaatctattttgaaatggaaactattgttgcttttctggtaatattaaaacctcactgtatcatgatgtgttatcacatgaatttggatataccaggtgttaaatcat

SEQ ID NO: 135011 - DNA, 599 bp, Homo sapiens
tttggtacttgcctaaacccctcaaaacgcagcctaaccacccaagctgaggacagagagagagcccgtgctaaggccagtctggctgcccagcgggcatcctgtcagcatggggctagcctctgctattggctcacaagtctgggctgtgcatcgttcagatttcatcacatcaccttgccctgggtagacatggcgcaagctgacacggcagaaccccccacttacattgagtcagagcagtgatttagaaatctctgtatccgtgcctgggtacstgtgcacatgtctctgtgtggcatatggagattctgtcaaaagtgagaacctgtgagcacgtctagttagccaataggcatttgataagacctagggcaatggtttactgcacactcacttccatgaagctaattataattatcattcttcacctctgcatgctgcaaaccaagttggatgaacagaaaacagaccttgaactcttaagcagaaaatctattttgaaatggaaactattgttgcttttctggtaatattaaaacctcactgtatcatgatgtgttatcacatgaatttggatataccaggtgttaaatcat

SEQ ID NO: 135012 - DNA, 239 bp, Homo sapiens
ggacgtgtcttctgaaaggcattacccatggaaagccaagggggagggttgcccactaggaggagcttcttttgtagaagccagaatggaggaaaggggctttctgacttggagcatctgaggaaatagattatttgaggatctagtactcccagaataatctgtaaccmcaagaaacacatttcttgaactccagcgccccagaacaggatatccatatccaatcccatcgtatccat

SEQ ID NO: 135013 - DNA, 537 bp, Homo sapiens
gctggttgatccagtggtttactgatgtcatcagggactcaagttctttccattttgttgtccatacatttcatactgtggctggtttctcttggattataagacagtttacactactgaatggagttactggttttctcatttgcattctggagaagaggatcactgttggaaattctgtcaaaagaatgagtgagaattctcccagaatcccttagccacattttcatttctatttctgaactaaatatgcgacaaagggggatggattacctcagattaatcaaatctgtccaaggtgcaaaaaggattaattttgcccaacatatatatgatcgatgtggaaggagtggaatcrtaaacttagggttctgttagaaaggaggaagggagaaatggatgctgggcattatcaattgagaaatgccacctctccaggaggtggcagttggaaagttattaaaaaaaaaaaagggcaatgtggttgagcggtgaagagcctggaagaagggcaggtgcacttgtgcatgttgcttc

SEQ ID NO: 135014 - DNA, 414 bp, Homo sapiens
gatacctggcatgaaattcttcttactctatactctttcctgaagtgatgacatccattttcacgtttccatttgttccaatatactaacaataccacactttatatctctacattgtatctctctcctgatcttaagacttgaatatctaactgctgttaagacttctttccctggataatctacaatcaccttaagcttatcttgkcccaaattaacctcacagacttatctaaatttgtcctaactttcatatcatctactccagcctatagtaccatctttcacccatgttatttggatacctactaccttcacaactcctcctctctgtcattctgaagttttctatatttactgccgatttccttaacatatcgtcacttctccatcttaatccattgttctgaatta

SEQ ID NO: 135015 - DNA, 622 bp, Homo sapiens
tgggtaaatgaacagcaaagtcatgaaatggataaaaattgctaataaacgtgaagaaaatattcaaatttgctgtttatctaaatacaaaataaatgaacaataaatgttccaggtattggtaacagcataataaattgtttgattacattttcttgtagctattaattataaaacctgaacaacaactgtatatacctgtattccttgaaagcagtggagcgtractgaaagcagacagaaacctaaggtgagtttacctttgaaagatggcagcagcaatagattagaattgtgagtttgtgatttttctttcttgaaggtgcttcccaaacctagaattcctgtggcatatacaacacccttactggctcaaggtggcagagaatctggaccattagggatggaagactcaaaagtaagagaatcccagaagggatgggcctccaaatctgaatatatattctgccgaaaaattccggctgatcactatactacacacaaataggagagaccctggggcccagttaaaaaaaataggcagaaacaataagatagtggtccactaaatgaaagaaatgagctgggtgatgtttgtgaatttgctacgatttagactgaa

SEQ ID NO: 135016 - DNA, 520 bp, Homo sapiens
gcatttctggacctgccttgggccagactggaggagactgccctgaaaggtgagtcccaggccaggaagtactcagtacaagctaactgaagagcttttgggccttaagggaacatcagtagtagtctggcggtactcttgtggggcggtggtggtggccatgaggtgaggctcctctgcctatgaaaaggggaaggtggagtaggaaagactgcatgctgtggtttaagagccagctcagctgcagtacaagagaaaaaccaggtagatttctatttatgactgtagtctctggctcccagatggcatgtctagatctgccaagggcctggaagaattcaccaccccaaatggaaggacacaggcctggctggctttgtcatatactgattgtagaacaccaaggccttgagtgaacataggcagtagccaggaagtasttacaggaagccttgagtgagacccaatactgtgctgggttcaggtctgacccagcacagtcatagtggtggtggccata

SEQ ID NO: 135017 - DNA, 559 bp, Homo sapiens
tggttctttcaatatatcccaagcacatattatcccctttggattcttcttccaactccccaccagccatttctgctacaatttgaacacctttcttccccttatttatctttggcttttgaaaaataatgtgtatttttctactacataactaataaatgttcactgtagaaaatttggaaattgtagaaaagcataaagaaaaaaaaaattggaatcttaccattaagaaataagtcttgttaactttttgagatagagtcttgctctgttgcccaggctggagtgtaggtgtgcaatcttggctcactgcagcctacgcctcccaggttcaagtgattctcctgcctcagcctcctgagtagctgggatcacaggtgcccaccaccatgcccagctaatttttgtatttttagtagagacgaagttttgccatgttggtcaggttggtctcraactcctgacttcaagtgatcctcctacctgggcctcccaaagtgctcggattacaggcatgagccaccgcacctggccattgttaatattttaatgtctattc

SEQ ID NO: 135018 - DNA, 542 bp, Homo sapiens
gttccctttcctttcactcatccttataactctatggaagccaaatttggtcccatttcacatcttaggggaggttagagattgtatgtggtacagggagggcaaggtctggggtgaggttcactatggagatgccggtggccacaggcatgatgtctggggatatgattctcatgagacygttcccatggcacgtctttggctgtttttcacttcccttatctccgtaaagtctgtgctccagttttccaatcaattccagaaaactctttctgcctttaaaaaattacaaaaatacaaaaattagctggacttggtggtgggtgcctgtagtcccagctacttgagaggctgagataggagagttgcttgaacctgggaagtggaggttgcagtgagccgagatcgcatcactgcagcccagcctagacaacagtgagactccatctcaaaacataaataataatgccccaatgagtgagaaatcactttcagcttttcagtttgtatcatatgtcgtgagctccctgttttcagagaaa

SEQ ID NO: 135019 - DNA, 542 bp, Homo sapiens
gttccctttcctttcactcatccttataactctatggaagccaaatttggtcccatttcacatcttaggggaggttagagattgtatgtggtacagggagggcaaggtctggggtgaggttcactatggagatgccggtggccacaggcatgatgtctggggatatgattctcatgagactgttcccatggcacgtctttggctgtttttcacttcccttatctccgtaaagtctgtgctccagttttccaatcaattccagaaaactctttctgcctttaaaaaattacaaaaatacaaaaattagctggacttggtggtgggtgcctgtagtcccagctacttgagaggctgagataggagagttgcttgaacctgggaagtggaggttgcagtragccgagatcgcatcactgcagcccagcctagacaacagtgagactccatctcaaaacataaataataatgccccaatgagtgagaaatcactttcagcttttcagtttgtatcatatgtcgtgagctccctgttttcagagaaa

SEQ ID NO: 135020 - DNA, 392 bp, Homo sapiens
atgtgtcttatcaatctgcattattcttataattttttaagcatccatgtgtattaaatcttttttcaggaatggtctgataagaaaaaagtaagaaataacaatgggctttacaaattcctatttagtcacagtgttctaaaactgagagtgtattgttcactagagtaactgaaaagaaaaacaratattgttataatctagcttgtgtacagggagttttagaaagttttaaactctgactctttatttttcgcgcattttcacatctcaatcaagatcgttgtgccaatcaaataaaattgagattgagaatatctgccctgctatgttatagtgtgattgggtaatcacaatggacatttttttagtgcttactatgtgcaatgtat

SEQ ID NO: 135021 - DNA, 577 bp, Homo sapiens
tttaaactctgactctttatttttcgcgcattttcacatctcaatcaagatcgttgtgccaatcaaataaaattgagattgagaatatctgccctgctatgttatagtgtgattgggtaatcacaatggacatttttttagtgcttactatgtgcaatgtatatatcttaaattcatttgatactcaaaaaatcctttgaggtaagtactattgttatttccatttcacaaagaagaaaattgaagttctaaaaggttaatttgagctatgtaattgayggaggcaagattgaaacccaggtaggctggctccccagccgaggtttctaaccacttcaccataaaatatgatagtatgtattttaaaagttaagttttcatccaatcagaggatcaaacgttagtttaagtccctttctttatacccaaaggggttaaacatctttgtgatcaaatattgcctcattggaacttggtaaccactaaatacgggttccaaaggccctctgaaaagttaaaagtattgcacaaatgttactattactaattttattgacttgaaataccatgtttttaa

SEQ ID NO: 135022 - DNA, 586 bp, Homo sapiens
gtggtggtggcagaggttgtgggggtgcagtaggagagagagaatgtgtgtgtgtgtgcgtgtaccaatttttgctgagaaaattaacccttggcagcgcagtatgggtggactttgcaggcagcctgtttcgaacagctcagaaaaggtgtgtccccttgctttccaagccccctcctttcctctctttcagaggggctcttgcctgtaaatcgccttgcagtggctttgcttccgctttgggaggctgagttccaatgaatgcattttagtttggtgtctgaggaatcgcgtcgttgcagaccgaggttccttactgtgccttccgagaatgcacaattcccctgatcgtgttaaatacagtggttattaaatgggtgcaaaaggaagacaatctgtttccagggctgggaagttctgctgcagagtggggtttccttttgcttttggaatgactggcggggtttgtcactgcagtattacaayacagccatattaaaaaggtcttcagagcttagagccctccaccactgcagccccatcttccacacacttccctgcccaaatccttcttgcaggggacatg

SEQ ID NO: 135023 - DNA, 647 bp, Homo sapiens
cggtggctcgtgcctgtaatcccagcactttggaaggttggttacttagtatgccctgaacctaatgcatgtcctgaacctagtgcatgtcttttaatttttccttgcaagctaaacagttccttcatgagttcatgtatctcttcgtgtatcagtacagctaaaaaatgacagctgatatttctaactttatgccaagaaatttccttattcacatccacacattaaacacataktctagcttccaaattgctacagataacaatcttgctcatcttttcaccattgcataacttgggtctttctccagtgtccacaagaactttcttgtgatcatttcgtcttcactccctttttcttcacacacccttcccacctccatctgccacctgatcccaaacgcagtggcatatgttttaggattttgctatacatcatcctacttccaggtagcaatttctctttcctttagccactgctgtgtaacaaagcactgaagaactctatggcttaaaacaactttgtcttatttgtcagaattctgaagtttgagcatctcctttgctggtttaggctgggataatacatgaagcttgattcagcttgattcagtgattctttgcatttatcctacttggggtttatta

SEQ ID NO: 135024 - DNA, 598 bp, Homo sapiens
tgaaaaagataaaacgtcaggctagctaatgtcgtgcttgaactatacatatataaaattcctttctggaacacccttagcaatgtttgtttttcttctttcaaggaatttcaattgcttagaaatagcaacggagaactagctcttgaggcagctccaaaaagaagtaattcctaaaaagtattgagcaaagcagcatcgttgaagtgaacacttggcttcacaaagaaaggacacsaaagaacaaagccaatggcaatttgtgagtgctgctatatttgctttttaaaaagcctcaggtctctatagtaactccttatgatagtgcaatcaaattttacaaaaagaagacaactctggaggaggcaataagaattgataggtatgagatgatcctgcaggtaatgaattgaaaggtgaagacatttccttattctcaagaatgcttatacactgttgacaggaatgtgaattagtttagccactgtggaaaacagtttggagatttctcaaagaacttaaaacagaactaccatttgacccaggaatcccgtgactgggtgtatacccaaagaaaatccttctaccaaaaagacac

SEQ ID NO: 135025 - DNA, 630 bp, Homo sapiens
gccatcaaaataataaggaaaaattttttccaacctaaactctataactgatcaaactattaactcaggataaagataagctgaatatgttttcagatatgtaagttctcaacatatacacgtttactgaagggtactagaaaagttgctccgtttttaaaacaagaagatcagctaataaagatgtagacactgggcttacgtaatgaggaattcaatatgagagaggtgttatataataaaagaaacccctagaatacaacaaagaatagccccaggawggcagctaacaataggcttgcaaccaacggtcaggaactaactaaatagagaagaaggtttctgcagtaatgtttccaagtagatacaattgctaaaaatacttaatgcattgagacatattgaaagagaatttgaggctgaatcagagataagaccatagaaaacgcagtacatcaacaaaacaaaacacttagtaaatctagggaaaacaaatgcttgttcaagaaaggaaaaaataatagtattctatgtggctcagctgtgaacagtatttatgtactcaatttaagcactgatgatagatctagccaaaatatatatttattttgggagaatggaaacatgaat

SEQ ID NO: 135026 - DNA, 630 bp, Homo sapiens
gccatcaaaataataaggaaaaattttttccaacctaaactctataactgatcaaactattaactcaggataaagataagctgaatatgttttcagatatgtaagttctcaacatatacacgtttactgaagggtactagaaaagttgctccgtttttaaaacaagaagatcagctaataaagatgtagacactgggcttacgtaatgaggaattcaatatgagagaggtgttatataataaaagaaacccctagaatacaacaaagaatagccccaggaaggcagctaacaataggcttgcaaccaacggtcaggaactaactaaatagagaagaaggtttctgcagtaatgtttccaagtagatacaattrctaaaaatacttaatgcattgagacatattgaaagagaatttgaggctgaatcagagataagaccatagaaaacgcagtacatcaacaaaacaaaacacttagtaaatctagggaaaacaaatgcttgttcaagaaaggaaaaaataatagtattctatgtggctcagctgtgaacagtatttatgtactcaatttaagcactgatgatagatctagccaaaatatatatttattttgggagaatggaaacatgaat

SEQ ID NO: 135027 - DNA, 490 bp, Homo sapiens
ctctacaaaaaaatttaaaatgagccaggcatggtggtcccagctactcgggagactagggtgggaggattgcttgggctcaggagacaggctacagtgagccatgataacaccactgcactctaccctgggtgacaaagcaagaatctgcctcaaaaaacaaacaaacaaaaaaaaacaaacaaacaaaaaatcaaataatgaaaaaatactaaaagtaaataataacacaasagagtcagcaggctatgcaacacctgcctccactgcatctgtatttgtttattttcattccagaaagaaagagattctgagttttaatcccaactttagtgatggttcctgacagccccatgtagtagtgtaggagaacatgcaggatcccaaaagttgtcagccttgaagtttcaagttaatattaaaatttttttgtggaaggaaattgaagaatagaataaaaaggatgcaggagttgtggatgggtggcaaa

SEQ ID NO: 135028 - DNA, 490 bp, Homo sapiens
ctctacaaaaaaatttaaaatgagccaggcatggtggtcccagctactcgggagactagggtgggaggattgcttgggctcaggagacaggctacagtgagccatgataacaccactgcactctaccctgggtgacaaagcaagaatctgcctcaaaaaacaaacaaacaaaaaaaaacaaacaaacaaaaaatcaaataatgaaaaaatactaaaagtaaataataacacaacagagtcagcaggctatgcaacacctgcctccactgcatctgtatttgtttattttcattccagaaagaaagagattctgagttttaatcccaactwtagtgatggttcctgacagccccatgtagtagtgtaggagaacatgcaggatcccaaaagttgtcagccttgaagtttcaagttaatattaaaatttttttgtggaaggaaattgaagaatagaataaaaaggatgcaggagttgtggatgggtggcaaa

SEQ ID NO: 135029 - DNA, 424 bp, Homo sapiens
agatcttcaaggcagaagattaacaaagatattcagggcctaaactcagcattggaccaaatggatctgatagacctttacaraagtctctacacaaaaacaacagaatatacattctactcatcaccacatggcacgtactctaaaactgaccacataattggacacaaaacaatcttaaacaaatgtcaaagaaccaatcatagcaaacacactcttggaccactgtgtaataaaaacagaagtcaacacaatgaaaatccctcaaaaccatacaattacatggcaatcaaacaacatgctcctgaatgacttttgggcaaataatgaaatcaaggcagaaatcaagaagttctttgaaaatagtgagatacaaagatacaacataccagaatctctgggacacagctaaagcagtgttaag

SEQ ID NO: 135030 - DNA, 564 bp, Homo sapiens
gatttactatgtgctagaaactgatatcagcttcatgttggttaactgacatttaaattttacaaaaccctgaaatgtagcttttttctattctattttgaagatgaaaaatgacatgttatgcagaaagtcaaacagctmttatgtggcagagctggggtttaacctggatctatgtgacttcaaacctgtgtttattccactttattacaatatagagttgtgaaactaaatctatggccacaaactagcatggtcagggaagcacaacttcataaaggaagtaaaatttcacctgagtcttgaagggaattcaatgtaattagactacaacaagcaagaaatccatcaaaactagtgcttcaagagaactgtatagtcttaagtaattttcatggaaatgaagaaagcttcaaaattaatgacataagtgtccatcttcagaagttatataaacgaacaacagaataagctcaaaggaagtagaaagtgataaagtaggagtagaaatgaaatagacatccacacacacaaaaaaatcagagctagtcaaccaagtcaaaa

SEQ ID NO: 135031 - DNA, 509 bp, Homo sapiens
tggcaagcgccacatgggtagagctgaaaagaatagtggcataagtgtgaatagggagagatcagccaggacttgagtggacagaaagacacagtgcacattagggttgaggggaccttgaaagaaaacatggtttgaagggtgaaggggaggagaaatatgccaagtgaaggtagcagccagaacaaagccacrggaatgagggtaaactggatctgttagatggtatgaagaccattcatgatgcatttttctttgaggatgttgtgataacctggaataaaaagaattggccctataaagttgttgtccaaatctttttaattgtgaaaggaattctaaacctaagatttaataaggaaacagaactattcagtcatctgacaattatttgcttgtcttaggccaagactctagggcacagctgctggcttggcacattgttaagagctcaacctcctgcagaaaacatgggaccaggttccagtctcttaataggtgatatagaa

SEQ ID NO: 135032 - DNA, 450 bp, Homo sapiens
ctgaacatctgtaaaaacaatttctcctcaagctcacaactcaacctcataataaaaactcaacatccaatagaaccttaaaaaaaaaaaaaaaaaaaaaaaagtcctgatggcattttaactcctagaaggacttagtgatgtttatttcccagttattctgggaagatgcttgtctctttgggatagggttatctatgaggcactgggatttttctttttttacactgggaagagtttgttggtgttcaactgtataaactagatcatgctgctgtaacaatctccaratatcaggcattttaatttatttctcactcactcaaagttggctccaggtttaggcaactttccaggcagctagcctcctggtgttagttgacattccagcagcttccatccctttctcttccaaaatagcccagacagtagaagacaagactgtgaaga

SEQ ID NO: 135033 - DNA, 575 bp, Homo sapiens
tgtaatcctagctacttgggaggctgaggcaggagaatctcttgaacgcaggaggcagaggttgcagtgagccaagatcgcaccattgcactccagcctgggcaataagagtgaaactctgcctcaaaaaaaaaaaaaaagagggttgcacgttgtcaacaaatacctattgaacaccctggatgttcaagacatgtgaatgactcgaagaagtggcagctgcagaagtgatggccaatgtggaaaagggggttggtggggattggcagagataggggagtccacatgcgaaaccccagtgagggggcaggactgagagtttgtaggtaccctcttccagggtgtaggaggaaatggagaatgcaggtgtaggggctaaggggaacttcagtgaactctgaagtttcactgaaaaatcaacttataatagacagattaattggagaaaaggcatacaaattgatttaacatgtatgcacaggagccttcagaatgaayacccaaatatacagggaaaattgtttatttttatgcttaggtgcaacaaagtatggatagccatgtagaaatacgat

SEQ ID NO: 135034 - DNA, 587 bp, Homo sapiens
gtgtccttgcttgcgagcacccgggaatcaatttatcttggaaccaatattttgtcctaaaggagtgggacacagagcatctgtcctctccctatagcacaagcacagctggtcagagaacacaagcttccagtgtcaaccaamatgtaaaactatagggtcaagagtcaacagaaagagctgtttccctctgagagaccggtaagcagaaagaatttcttagcacagggatgccaaccatgcttctctaagaactcaggcaggaagcttctgctcacacagaaccttgagcaagtctgtccatcagcaaaggcttgggaaaagcacccaggtatgtcccaggatagataaggaggacaacacagacgcacagcggagaagaggtgagtgtacaaaaaagctgtggtccaggtgagcatgaagaccagcttgttatgtgcacttgctaagagtcttggggaagaggaagtgtgatgtcatgtcaggagccaccacaaggatttattcagggccatggaccaagagtctgctccactgagtggcttcagccattcttagctatacttttctcatctatataatgtttg

SEQ ID NO: 135035 - DNA, 587 bp, Homo sapiens
gtgtccttgcttgcgagcacccgggaatcaatttatcttggaaccaatattttgtcctaaaggagtgggacacagagcatctgtcctctccctatagcacaagcacagctggtcagagaacacaagcttccagtgtcaaccaacatgtaaaactatagggtcaagagtcaacagaaagagctgtttccctctgagagaccggtaagcagaaagaatttcttagcacagggatgccaaccatgcttctctaagaactcaggcaggaagcttctgctcacacagaaccttgagcaagtctgtccatcagcaaaggcttgggaaaagcacccaggtatgwcccaggatagataaggaggacaacacagacgcacagcggagaagaggtgagtgtacaaaaaagctgtggtccaggtgagcatgaagaccagcttgttatgtgcacttgctaagagtcttggggaagaggaagtgtgatgtcatgtcaggagccaccacaaggatttattcagggccatggaccaagagtctgctccactgagtggcttcagccattcttagctatacttttctcatctatataatgtttg

SEQ ID NO: 135036 - DNA, 540 bp, Homo sapiens
cccaacagtcaatgtcagtacaacctcatattcactctggctctgggaactccttctgtgtctgtgtcctggactcccaggctgcctagaaagttggttcaggtcttcagggtgaaatagaactgccaccagaattccaagaatacatgaactttttaccaattcagtggttccctaggaactaaaggtgtgatggaattgggctatttctgtctggttcacgctacatcctcactgtccatcatagtacttaacccataatagatagtcaagtmtttaaaaagacaagcaaattaatgaatattaatgaatgtatttttggctctttttttcgtaatgctctctacttttcccaaattgcactcccagaacctaacacaaatactttctccttcttttctctctgtctctaaaacctcaaatctctattgctctctttctctatttctcctttcacacacaaaaacacattcacacacacccacatacacacacacaaaggccataactttttatttttatttcaactttcagttggag

SEQ ID NO: 135037 - DNA, 581 bp, Homo sapiens
caaaagtgcagcaagactgggacgatgagctgatactgcactggaggcagtggaggaaaggaaaggagttgcagtcagcggccacagcacacaccagtgggtcctggttcagtattgcttggccccaaaactacaggcagagcatttgacagggatgagatcacagggcgaagcaaacaggggcaagtcacgcaggcctcttttgctatgtagaagagctgaatttttwaaaaacattaacatctaaaccttaagtagtgttaagctagaaactgctgttaaaatataccttcaattcaaacagaatatatattttaaccactcatttttataaggcctagtgttaaattatggcttgaataatcagtaattcttcaaagtatggatgaatctgtctcacatttcaagtacagtgcagagacttgtgatcaggaaataatgagataattatattactttttgctccacagtcaggctttatcatttttaaggaatgtctaaaattctattaagtgtaattgttgaagctattaataaaccaagggaagagtttgaaaaacagcacttagagtttcccttta

SEQ ID NO: 135038 - DNA, 616 bp, Homo sapiens
ttgcatttccctgactaatagtaatattgaagaacttgttgaataaagtgtctaactgaaatagtgtgacctcagacatctgcaaggccccaagtcccgcatttactgcccacttctgatttctggagcagctgccacagccactgmcatgcaagctcagactcacctgacctcacatgctctaaaattacgctgtatgttgtaaacctttaaccccttcatcaaacaagctttctgtgcaccaaaagaaggaaaaaagcataaagattcaagaaccttatttggcagcattcaaggaaaaaaaaaatactttcctcataattaaattgtctgtatttaattatttaaagtattttcacattttatgtgaagtatttctcacattttatgtgtgtgggtatttgtgtgttgagcctgtgtgtgtgtgtgtgacccctccaaacagaaaatgtgagacatgttcactggtggaccgtgcatttctgatgccaaattaagtattctctgtttttaggaatgcgtcacaatgggaaaagagatcaattgtaaaatgaatagctgctgggttgagtttaagggaagatggaatgctctgtgagggagaatggagtcgcta

SEQ ID NO: 135039 - DNA, 524 bp, Homo sapiens
gtgcagccatatcctaggaaaaaaggtggaaagttcgatggagattagccagggaagagggaacaacatacacaaaatctcagaggcatgacagagtctctaacattcttggatctcgtgtgattcagtatacctgacatgtaggggcattctgacacacatacaaaaactgttttggcccgagaattttgtatgtatcacacctgaggtttgcagaagatcaatgwgagttctctcttagttgaaagacttgtagcctaaattttctgtttttatttcacataggagtaaaaaagacaatattcacttctactgttcccaagtttcacaaatcttctgaagcccatgtgggagctatcgcagactgtattatgccatgggtagagatagcatagaagcaactcaggacatcaagtagggagaggtaattgaagttttcatttagaggagttaatcaataacctttttctttcaatctatgtcattgaaaatcattttagcgatgtttcagtctactttctcgc

SEQ ID NO: 135040 - DNA, 524 bp, Homo sapiens
gtgcagccatatcctaggaaaaaaggtggaaagttcgatggagattagccagggaagagggaacaacatacacaaaatctcagaggcatgacagagtctctaacattcttggatctcgtgtgattcagtatacctgacatgtaggggcattctgacacacatacaaaaactgttttggcccgagaattttgtatgtatcacacctgaggtttgcagaagatcaatgtgagttctctcttakttgaaagacttgtagcctaaattttctgtttttatttcacataggagtaaaaaagacaatattcacttctactgttcccaagtttcacaaatcttctgaagcccatgtgggagctatcgcagactgtattatgccatgggtagagatagcatagaagcaactcaggacatcaagtagggagaggtaattgaagttttcatttagaggagttaatcaataacctttttctttcaatctatgtcattgaaaatcattttagcgatgtttcagtctactttctcgc

SEQ ID NO: 135041 - DNA, 552 bp, Homo sapiens
caagtgcagccatatcctaggaaaaaaggtggaaagttcgatggagattagccagggaagagggaacaacatacacaaaatctcagaggcatgacagagtctctaacattcttggatctcgtgtgattcagtatacctgacatgtaggggcattctgacacacatacaaaaactgttttggcccgagaattttgtatgtatcacacctgaggtttgcagaagatcaatgtgagttctctcttagttgaaagacttgtagcctaaattttctgtttttatttcacataggagtaaaaaagacaatattcacttctactgttcccaagtttcacaaatcttctgaagcccatgtgggagctatcgcagactgtattatgccatgggtagagatagcatagaagcaactcaggacatcaagtagggagaggtaattgaagttttcatttagaggagttaatcaataacctttttctttcaatctatgtcattgaaaatcattttarcgatgtttcagtctactttctcgccaccttggaagaagtcatttggaca

SEQ ID NO: 135042 - DNA, 510 bp, Homo sapiens
ctcatagtacaggactgcaatgcagacagagtgatagagggcataaagccaatcctattctgtctttaaggatggaaaaatagaggacttaaaggcacatcttgcaaattgtggttgattttcttcagtaagcagctagcccttagcagattttgtttgagaaaagttttgatttttttctttttttttttctcaccattcctgagaagattcaaatgcaggaaagaaggggaagggaatgtgctcagcatctattgtggaatgtgatttttaagtgttttttatgaatacagtggcagttatggcagatagtcactaatatccattctctcttccttctttggtartagaattgcagtgagtgcatggcttaatggcagttttcagctttccatactttcatggttatggccatgtggtcaagttctctccaataagaatgtgagtgggaataatttgtgccacttccaggctagcgtgctccttctccacttgctttccttttccacc

SEQ ID NO: 135043 - DNA, 623 bp, Homo sapiens
tacatgttggtgttatctctcagtgcggagacagaaatataaatatatgacactgttgtcaacagtcacttcattaccccctacactttttttttattactttttttttgagaccgagtctcgctctgttgcccaggctgggagcgcagttgcatgatcttggctcactgcaacctccgcctcccgggttcaagcgattgctcctgcctcagcctcctgagtagctgagattacagacacgtggcccccacgctaatttttgtattttagtagaaacggggtttcactatgttggccaggctgtctcacactcctgacttcatggtgatccacctgtctcgtcctgccaaattgctgggattacaggygtgagccatcgtgcccagccaattatctcttacacttaacacagcagaagtcacgcaaaatccagaatttcagaacaaacacagcagtagcaacagaggagtctggtgtcatatacatgccgtcaattacttaacaaacatttatctttacatgcacaacgccttcaagaacaatttctcttctgaatcatacaaaccagtgggcaacaaaggcatgtttctctttgtttctgggttgatgtacataatatcagt

SEQ ID NO: 135044 - DNA, 589 bp, Homo sapiens
tgaaagtttacaggcccagctatatcatttgctttttatgtccttcttcctaactttccagcttctagtagtcttttgaggcccattgcagcctgtctgcaccatgaaacctttcctgttaaccgcagtaataattgattctgctcccaaactacttacatcattgtgcttacagacagccccatacactctggtactgcagtccagtgggaggtaatgtggtactgtagcttggaaagaagacacatcagaacaaaacttgaactacaagtaaactctgccatatgctagctgttatttaaaatctctgaacctctatttctttactagcaaaaattgcaaggctrttatgaaggagaaggctgatttatgcaaagtgccttactagcagagttcctaccatgattggcactccatgaatcataactctcgggttacagcaaaagtgtattttatcatttactaattgtttcacatgaatatactttttactctttaataataataaagtcctgcaggaaacaaccaatatcatattatggaatggaattcttaggttttgcttctcttcatgcaattttaatcaatg

SEQ ID NO: 135045 - DNA, 589 bp, Homo sapiens
tgaaagtttacaggcccagctatatcatttgctttttatgtccttcttcctaactttccagcttctagtagtcttttgaggcccattgcagcctgtctgcaccatgaaacctttcctgttaaccgcagtaataattgattctgctcccaaactacttacatcattgtgcttacagacagccccatacactctggtactgcagtccagtgggaggtaatgtggtactgtagcttggaaagaagacacatcagaacaaaacttgaactacaagtaaactctgccatatgctagctgttatttaaaatctctgaacctctatttctttactagcaaaaattgcaaggctattatgaaggagaaggctgatttatgcaaagtgccttactagcagrgttcctaccatgattggcactccatgaatcataactctcgggttacagcaaaagtgtattttatcatttactaattgtttcacatgaatatactttttactctttaataataataaagtcctgcaggaaacaaccaatatcatattatggaatggaattcttaggttttgcttctcttcatgcaattttaatcaatg

SEQ ID NO: 135046 - DNA, 539 bp, Homo sapiens
ttaaaaagctaataaagtgttttgtttgaaaaaaaatatgtgttgctacaacttggaagaaaagactgtctgctgcaaatattaatataattcactgtcccttttttccaaattctactcgaaataaaatattcagtttttttaaatgattgtcagtaataagaatgtaatgcttagtgtctgtgacattcttttgacatttttcatgtagttcctgctatagctagttagcccataggttttgtcccttgccttctaaaatatgtttttcccttttgtttttcacagttagaccagttttatttttgtcagacaaaaaaattcatctatgtttaacaaatgagttaattattcacatagtggagattctggtctcaattgctttgayacaataaacaaggcatgtctgccttccacaagtagtagagatgcaagtaaataaaagaagaatctgcacacctttttaaaaaataataataataatttaggctgggtgcagtggctcatgcctgtaatcctagcacttagggaggcttagt

SEQ ID NO: 135047 - DNA, 557 bp, Homo sapiens
ctcaagcagtcctcccacctcagccttctcagtacagtttgtgaatttgaaacaggttagttcttggagtgtgaatatgcattcaatagtttggatgtgtttctgttttccaccgggcaacttgagtagctttagtttgtaagatcccagatagcgttctcttcactgatagttattatccgaataccctttgtaatgcctgagtcagtgcagttttgcatgagttccctggagaataactttcatgagctaacaccactttgayagctttccctccctttctactcttgggaatatctgggacataggctgagctcccttttcatagagttatcttaagaagcgagattaactatatactatgtaatgcatacattaaacaggaggaaactagattatatggagtcatttaaattgctagccaattttatgtgttggctctcatctcatctacagttttagactttctgtctttctacgtgctcataaagaaaaccctggatgtggcctggtgtggtggctcacgcccgtaatctcaacaatttgggaagccgaag

SEQ ID NO: 135048 - DNA, 581 bp, Homo sapiens
catattctccttcctcagataaatactcttgtaattccagcttcagctgccctctttgttgctgttctcatcatctgggatcatttgtcatacatggtagaggccacacagttgtaaatctcacctctgacatgctaaggcccatacagccctatcacagggaacttcagaaggcacagtttacagctctgtcagccctccaagtggggagggacaggatgacagcagtcagacctggggcattggcagtccaatgtgaactttgattcccactttgtaaatcatagcatttttaagagttggaaaaatcttccaagatgccagattcattgcagtcccctcattagatttgagaataaatgaaatttcctacccttctttctcwtagttcctataggaatgactgaaaaatctcttctatgaagagacaaatgtacacacatacatggaataacaacactaaaataaaagacactgtgatcttccatcttaaatcaatgacttctttataacttttctgactggttgaggatctgaaggctccttcaacagtcaacaaacattacccagtaggctccctg

SEQ ID NO: 135049 - DNA, 582 bp, Homo sapiens
caggctttttgcctgctgggactttgagctcactcctgaaagtagaagtaggagaatcttacttcccaaaaaggtgatgaaagttgaacctctgggctcacctgcaaaatgaagtaaaggaaagtcacttgattttcccaggatttctaccaaagacaaatcatgcagcatacagggctgacatggaaaagttggttcagtgggagggtagggtgcctgctgcttgggaggctgtttgctaacacattgaccagctctgctccattccacaacaccayccctcacacactgatcaaacccttgtgaaagtttagggtaagaaaagaggatctaaaagctagttttattgtatttctgtaaaattaaaatgagatttctaccaatggcaaacattatttctgttccttaaagaaatgtgaaaaatgaaaaaagcagacttttaaaatccacctacttggtccattttgcagaaaaatatacttaataaacactgtggaacatttatcccctaattattttttgtagacatctacttaaatatctatatttaatttttgaaagtatcattcatttcttatacaa

SEQ ID NO: 135050 - DNA, 329 bp, Homo sapiens
aaaaaaaagaaacgtagagacaagatctcactatgttgcccataggtttccaactcgtgggcttaactgatcctcctgcctcagcctctcaaagtgctgagattaaaggcatgagccaccgaaccagctgtggtgggttataaataactaataagtagctacaatcatcatataaatataatgaaactaaaaattgtgcttgtttaatctgcacatgtttccttgaccccttcaattggaaaatyctgctagcgttgaaccagcacccttttcactacaaatacagcattttcttctcttactcaagagcaggaggactggtacctgaa

SEQ ID NO: 135051 - DNA, 519 bp, Homo sapiens
gtggcttgtttaaaacaaataattttttaaaaaatagttggatagctgagagtatcaagacaagccaatttaattagaaaaggggaagagagagacaagagaaatggggttgtggaaagcttggtggacccctggctgtcttacagctctgggtagtgttaccagagatgattcttggggcaagggaacaagagagctatctctacccatccaattgtttcaggagagccaggggcttataattgcagagtctttgaatgcctttgtatrttttcatagaaagaaaccttggaggccactgagcctaatggaaagagaacttgggtagcaaccaggagactatagatctaattacaaacagtcaattatgtggttttagctgaatcatctaatctcgtggttctcgattctggctacatgttagatttaacaaagaagcgttaaaaaactatagtcaaagttggttttgatggtgggggtgggatcttactcagaccaattaaaacagaatctgtaagg

SEQ ID NO: 135052 - DNA, 557 bp, Homo sapiens
tcacgtgtgtttttagtagagaggaggtttcaccatattggccaggctgttcttaaactcctgacctcgcaatccscctgcctcagcctcccaaattgctgggattacaggcgtgagccaccgcgcccggccttgttgccatctttatgtctatgaatatctaatgtaaagctgctacttataagtgagaacatgcaatatttggttttttggtcctgttgttaatttgcttaggagcatagcctccatctgcatccatgttgttgcaaagaatatgattttattcatttttatgattgcatagtattccatggtgtatatgtaccacgttttctttatccaatccgccgttgatgggcacctaggttgattccacatttttgctatggtgaataatgctgcactaaacatacaagtgcatgtgtcttttttgtagaatgatttattttcctttaggtatgtacccactaataggattggtgagtcaaatggtagttctgttttaagttctttgagaaatcttcaaactactttccacagtggctgaactaatttac

SEQ ID NO: 135053 - DNA, 557 bp, Homo sapiens
tcacgtgtgtttttagtagagaggaggtttcaccatattggccaggctgttcttaaactcctgacctcgcaatccccctgcctcagcctcccaaattgctgggattacaggcgtgagccaccgcgcccggccttgttgccatctttatgtctatgaatatctaatgtaaagctgctacttataagtgagaacatgcaatatttggttttttggtcctgttgttaatttgcttaggagcatagcctccatctgcatccatgttgttgcaaagaatatgattttattcatttttatgattgcatagtattccatggtgtatatgtaccacgttttctttatccaatccgccgttgatgggcacctaggttgattccacatttttgctatggtgaatartgctgcactaaacatacaagtgcatgtgtcttttttgtagaatgatttattttcctttaggtatgtacccactaataggattggtgagtcaaatggtagttctgttttaagttctttgagaaatcttcaaactactttccacagtggctgaactaatttac

SEQ ID NO: 135054 - DNA, 579 bp, Homo sapiens
agaattgcctgagaaaggagtgccttctcaactatagatttcaggcaaaaatatttttaaatccctctaaattaaaagatattacaaaaagagcagacaacttgtagaaaagtaaayacaattagctaataaacttatttttaaggttcaactttagtaaaaatcaaagatgtacaaaataatacaataaaacactatttttgcctgtcaatgtaattgtaatggcaatacacaatgcaggtgatggtgcagtgaagtgtacacaaccattacactgatgaaagtataaactgatgtaatcctcctagagcaattaataactacctaccaagaccctaaaaatattcagacagattgatctagtaattccactctgggaacctatttcatggaaacaaaaggggatattgttagaaaattttatgtatgttaatattcatcagcaatattttaatcacaattaattggcacaaatcaacattctattatatgcaaataatcgaaatactaagcaatgttaataaaaaataatgtatataaagaattataatgaaagagcaaatatatttttcatatata

SEQ ID NO: 135055 - DNA, 430 bp, Homo sapiens
cacatatgtgggtggggaactcatagtacagayaaaatacaaactaagcgattctgtaagataaagacaggataaagttagtacacaaagatgcaaaccataagacaaactcaaagaaggaaacacaacaggtgctaagatttacagtttcttagaagctctttgacacactgagatctaaaaaatattcctgtcattaaaaggcatactacatgatgtggtctacaatgttctccacagcatctccaagttaaatacaaaaaaatgtttcacagtacatttattagagtagctctcaaagcacactctaggatataatattctgcaaaatatagacccttcagggacctacatatcaaggcaactgccttacctacagtaggttgcaataaatatttgagaagtaaaaacacttccagtagttggctct

SEQ ID NO: 135056 - DNA, 488 bp, Homo sapiens
gcgtctgccctgttcattgttgtaatctcagcattcatgcaataagcatttattaggcacttactgtgtacaaagcaaaatgccacattctttgacaatataaagatgaataaaagattgtccctgaactcaaaagaagattccagtttaacaattagttttgatactaagggaaattaaattcatgctgtaataaagaagtaagaattttgagagaaagtggaagtattaactacttgtaagggaagacttgatagagggactggcctttaatsagcaagattttgatagcagaggcagtgttgtgggagcatgctatgctgaggacacagtgccaggaaacctcaagtcagtatattctacgtctacacagcagatggccatagccaccatatctcccgctaagcaagagcttcttggactcataagccccaattgtgtgtactagcagatgggtaaagtggatcttattagttccctggaattat

SEQ ID NO: 135057 - DNA, 445 bp, Homo sapiens
tgttttgcgtaagtgggatttgcaaacaggagctattgtggagaggagtttcctctaaacttcagggcaggaactgcctgactagtgaaaacatcactatccttggtgacccaggatgttaggaaaatcaggttcagttaggtaaatcctaatgggggctggaagcagcattcaaagaaaaagtacagaagtaagttggctggggagaaggcatttgggcttatgggtggctggaaagagcagtcctcttcacccggacaccaatacttgcctcttgcttctgtatcartgcacctacagcaaagtcattttgttttgttcaggaagatggcgtgcagtgtgtaatgctgtttaggactcaagcttttagacacaagaggggaagccagtgcacgaactgtgtcatatccactgtttgtaatgattacagaggaagggagaggaa

SEQ ID NO: 135058 - DNA, 550 bp, Homo sapiens
tgactgcaaaaacacaacttatactccaaaacttagtggagatacgccaaaaagcttcaagacaagaatggtactgtgtcattgagagagaggcaaggagggtagaaagaagaaaaggaataagggaaagagacaacwaaacagggtgagaaaaagaggaaacagaagggagagagaacagagaggagaaaatagtgaaaatgaggggaaaaaacctgtgccttggagtcaaagaaaactttttcacatataactctaccccttccttgctaaatggcattggccatatgactgagcttagtaagccccagatcccttatctgtgaagcagagattaactgagatagttaaggctggtacttagttaaggttggtactcttcagtagttaactgaaataatatcgtaaggatgaatgaagcaattataaaaactcaatacaaatagttatttcctcttgcctttggtgtctttttacccccttgggctcatctctccatctccctttttggcctcttcctctctctcctgttttcttcctccttctgtct

SEQ ID NO: 135059 - DNA, 602 bp, Homo sapiens
tttgctattcacttttcctctttgtgccttaagtcttcctgtcataaatgaggagtcatatattgttattggggggtagcttctacttgtcagacattctgagctactgttacgacacacatcagggtacatccagggaaccctggatgattaaaaataaaaccaaacttctgccttaggaaaggattttaaccattcatgacaacacrtgtttatttcgcacttattacaataggcaaaatttatgaagctctttctctgtgtcaggaattatgctcaacattttagatagattacatttcatttaatcctcacaataatgctctgacatactacgagccacagagaaactagtaacatatctgagggcatgtggtaggccatgatggagccagcacatgccacccacaatggctcctcctgggcccatctctaacctctcagtactgcctccaaggtactgggctagggtctattaataaagaccacacagggctcacaaggataccaatgctgcccatgaactgcctcaaaggcaatccattcaccagtcttgaaactacatgtatatgacaagaaatcatggaaatagacattccaga

SEQ ID NO: 135060 - DNA, 491 bp, Homo sapiens
gtctgaacaaaaattcaaagaagattttcagttctggtggaaaatttcagaatgaactagtgtatagaaaacaacacaaacaaaaaaagaggcaattattaacttcaggaagtaaaaaagttggaatgtaattatagtacagtttatgactcaactatcaatattaattgcattaccttgataatataaacrccgaaccaatggcataccaaagatggatggtgagagcggtctgcctcaagcgctggcaataagaagtgcattactgagggtaactttaaaactatcacaaaactagaagtcagtgtggttttcattgtcactgtgcactagcaattctaaatagtgtcaattataaaattcttctttccccccactgaaaattttttgtttgtctaatttataatttataaataatttctgaaattactgttgagctttaacattatatccgcaagcttcaaatgaacacattcttattatttatcctt

SEQ ID NO: 135061 - DNA, 508 bp, Homo sapiens
taaaatctcaggggtctcaggcttcagttttccagctgactcccctatgtctgggtagacagacacacacacacacacacacacacacacacacacagctgtggcagaataaatgttactgtaacttaacgtattatattatttaggtgaaatagagcctctcatagacagatgtaatagagaaaaatgagtagggagttctttgtaagttgcaggtgagatgatgtgcttgtgaacatatctcagactcagctgaagatggagaaaaaaattataatggggtagatmagtagttctcaaactttagggcatcagaatcacctggaagactagtaaaaacacagattgttgggccctaacccagatttctgactcagaatttttaatccagagcttcctgattctgacttcttgccttggagaaaaatgtgatgttttctagcttcctgactttgcagaatattacactctttctacggacctagagatgttctgtggccttcatcac

SEQ ID NO: 135062 - DNA, 361 bp, Homo sapiens
tgcacagcataatgagtaactcaggcaggtaaacaaacagttccaaccctgggatccttgtgcctccagagaaaactcttgatawcagatatcaagtgagtgcaggagagggtcacctaacccagactgaagaatggacagaaggccagagaagtcatcttagatgtgacgattgcaaagggggggaaaaaaacacatttgagtggtttattaaatatgcaagatattttgactttttcttttaaatggctggtattgaaaggacattgtcctgatctcagtcatcaggaacaactagaaattaggttaaggctttccagacacagggaatatattggtgcaaagaactacaggtgagaga

SEQ ID NO: 135063 - DNA, 361 bp, Homo sapiens
tgcacagcataatgagtaactcaggcaggtaaacaaacagttccaaccctgggatccttgtgcctccagagaaaactcttgataacagatatcaagtgagtgcaggagagggtcacctaacccagactgaagaatggacagaaggccagagaagtcatcttagatgtgacgattgcaaaggggggraaaaaaacacatttgagtggtttattaaatatgcaagatattttgactttttcttttaaatggctggtattgaaaggacattgtcctgatctcagtcatcaggaacaactagaaattaggttaaggctttccagacacagggaatatattggtgcaaagaactacaggtgagaga

SEQ ID NO: 135064 - DNA, 361 bp, Homo sapiens
tgcacagcataatgagtaactcaggcaggtaaacaaacagttccaaccctgggatccttgtgcctccagagaaaactcttgataacagatatcaagtgagtgcaggagagggtcacctaacccagactgaagaatggacagaaggccagagaagtcatcttagatgtgacgattgcaaagggggggaaaaaaacacatttgagtggtttattaaatatgcaagatattttgactttttcttttaaatggctggtattgaaaggacattgtcctgatctcagtcatcargaacaactagaaattaggttaaggctttccagacacagggaatatattggtgcaaagaactacaggtgagaga

SEQ ID NO: 135065 - DNA, 603 bp, Homo sapiens
tttcttaagtaattagacatcaacttggcttggtatatttcaaatgcccttggttcttgagagtaccattttcttccttttttcatcttcaaggacttctatacatagaagaagaaatctacatttactatagacattaagggaggtgtgtttaatcttatgcatagatcagaaggacaagtagagccagaactcaattgcttcctagattcgtggttcttatctccaatgtaacccaaaagcacatgccattattctgacaggaggtgcaaaagcattcagtcaaattcagaataatgctacctctctgatcccagcaaccgttcatggctgtgcccatctcagtgaaatccttcttttagaatcttaactaatttgataagatagacagataaatagaatactaaataaaaaatcagtatggattaaatttatattttcctcgatactgagtattttttcttargtttagtttgggtttcctcttttatgagttgcatattcatatcctgcgtctatttttttctattggttgtttgtattttttcttccacattcattaaattctttgcctattctggatactaatacttggaggaatta

SEQ ID NO: 135066 - DNA, 596 bp, Homo sapiens
attttataacaatatatacaacatgatttcatttatataaagatcacctatataaactgacaaaactaaatgatagattactggcacaaatttaagtggcaaatccttaaagagaattaatacaaaattaatattgtggtaatccctcggaaagatggaggacattgcaattgcgatggagtatataaaaggcttcttagctactggtgtattttcaatttttaacttggatgrcggatccatggttgttcatgttcttgttttttaaacctatagtacttattttatctatgtaggggacctgaaaagttcctagagttgagtagagcatgggacaataaaaggttctccagtagattgctgtgacagatactctatctcttggagtctatgacatggtagattcaatggaatctgaagtactgttagctaactgagacatagaagcaacccttcagcaggtatgaataaaagaaaagtgtcagtctctagggttttggaacagtgccatacccccttcagcaagtagcatctgctaagaaacaactcctggattgctaccaaatggatagagaactgactaccttgtcatgaga

SEQ ID NO: 135067 - DNA, 538 bp, Homo sapiens
caaattcttaattggctatatgtattccaaaatattttttactttgtttgcatgtcttttgtttttcagaaatatattttgctttatagagcgtactttttgtgtcttatttatgaaatagatatatactatattttggtatcaattatttatatttattttctgacttctaatgtaacttctttgtttatcctttagtaatttagaagtgttatttttattaatttaatttggatttcccaagcaatgggtccaaatggaaaaaagtgcccctaaagaaaagggttggttaaaaaagggggaagttaccctttttgcttctaactaatttctaattaccaccattggatttaaaaatgcagttataggatattgattgtttataacttgggatactttctttgtgacttagtatgtaggtaggtaattttttagaaatactccatgtatccttgaaaagaaaatcctgcacctagagcytaatttaaaatacataagcttcctgttatcttcctgtgctaagtgagcttttctagtc

SEQ ID NO: 135068 - DNA, 538 bp, Homo sapiens
caaattcttaattggctatatgtattccaaaatattttttactttgtttgcatgtcttttgtttttcagaaatatattttgctttatagagcgtactttttgtgtcttatttatgaaatagatatatactatattttggtatcaattatttatatttattttctgacttctaatgtaacttctttgtttatcctttagtaatttagaagtgttatttttattaatttaatttggatttcccaagcaatgggtccaaatggaaaaaagtgcccctaaagaaaagggttggttaaaaaagggggaagttaccctttttgcttctaactaatttctaattaccaccattggatttaaaaatgcagttataggatattgattgtttataacttgggatactttctttgtgacttagtatgtaggtaggtaattttttagaaatactccatgtatccttgaaaagaaaatcctgcacctagagcctaatttaaaatasataagcttcctgttatcttcctgtgctaagtgagcttttctagtc

SEQ ID NO: 135069 - DNA, 484 bp, Homo sapiens
tgcatttcagtaaacttggagtttctcaaaaataacttcatatttcaagcaattgagttagcagctcttatatacatttttaatgtgcaaaaagttgaagkaacagaataaaaaatttgtggctgtatatttttatccttcccttcatataaaattgctttaatattttatcataattgcccttggacagctaacatcatttggttacacataatcaactaatgctttatattttagggctttgttcaataaaaaattaattatccttcatgggtgggcaatgtatttggagattgagctacatgattttatgcataaaacaggctctggtttatatattgaaaccaaaattgctgtaacattcacagtgcaataaaaatcagatacaaagaatcatttcaaacttctgaaatgtgagctctgggacacacctttgtattttttttaaaaactataaaaggaaatgaaactgcatttactataa

SEQ ID NO: 135070 - DNA, 484 bp, Homo sapiens
tgcatttcagtaaacttggagtttctcaaaaataacttcatatttcaagcaattgagttagcagctcttatatacatttttaatgtgcaaaaagttgaagtaacagaataaaaaatttgtggctgtatatttttatccttcccttcatataaaattgctttaatattttatcataattgcccttggacagctaacatcatttggttacacataatcaactaatgctttatattttagggctttgttcaataaaaaattaattatccttcatgggtgggcaatgtatttggagattgagctacatgattttatgcataaaacaggctctggtttatatattgaaaccaaaattgctgtaacattcacagtgcaataaaaatcagatacaaagaatcatttcaaacttctgaaatgtgagctctgggacacacctttgtatttttttwaaaaactataaaaggaaatgaaactgcatttactataa

SEQ ID NO: 135071 - DNA, 446 bp, Homo sapiens
tgtgccttgctttccgccatgatggtaaaaggcctgtggaactgtgagtcaattaaacatatatatgtgtacatatatatacatacacacacaccrccccccaaattacccaggctcaggtagctctttatagcagtatgaaaatggattaatataccactattcaaggcaaggctctagcataacatatacattttgttccaaaagtggaatatttctacaaaagtgaacactcaagcattggattagcaatcaggtagaaaacaaccatggcacaagtaatgcaagctgaaaagctagagataattgtgtatttatggcagatcatttgacaaatatgtcacttgtgattccatggtatatttaccactatattaacaaaacttacagttgaaaaaaacaattaagaaaatttagaatcttgctatgcattgactacatattta

SEQ ID NO: 135072 - DNA, 552 bp, Homo sapiens
aaagtgccagctcatggccttttacatctcatactagtgagttcggacttcactgactgggcaatatgtaatcataagaaatatttatgcaggaaaacaacaaaggagaattacatctcaggggatgttaagcactgaggatacaaaagtaagaaagaagcttaccaccaagyaatccccagaatgatctagttctgtgataaaagtctgttctaatgaaagtgttttccttatagaaagaatttaaaagggcttttctgttattttttcttgttgttaactaaaagaggccatttaaatgataaaaagagtggtgaatgtctgtttgctcaactgtattatatattgcttattagcattagggaagggtaggaatttaagagagctgtccgtacaagggaaactttgctacttatctctaaagtttaaaaaaaatgcttctaatattttttaatttttcttctagatggcattatctcattatctcaacttagatttactgggattatagtaaataaacagtgatgcttagaataatttgatacttctttc

SEQ ID NO: 135073 - DNA, 540 bp, Homo sapiens
ggcatttggaatatagagttctttatctgacagaataataggaaggctgtttcattttcaataattcatgaatgtaaatgtcctagcaatttcttatacagactatcttcacgataaacacaattttgtaattatcgtactcaccctttgcatttcatttatacttaacaccattaaaaagtacccatcttaatattgttggccactaaaatgtctgtgacctaagcaaaattacagttcactccaagaacacaatggctgtgctctaagtcttttggcaaaggccaggattttaatgaccttaaacaagcagggcaggcagtcacattctctgagaactccagagctttcrtacagtttattcttgttgaagtaagctaaggcaaaagctttggcagcaatctgaaaataggggcaaagggtttcaagtggttgtttttctggatgtaactctggctgaattaaaaaggacgatgtttatggaaagctttcctgggatactgttagatctctttccctggatggggtacaaaggaagga

SEQ ID NO: 135074 - DNA, 585 bp, Homo sapiens
ggaggttgaggctgcagtgagccatgatcaagccactgtactacagtctgggcaacaaagcaagaccctgtctcaaaacaaacaaacaaacaaacaaataaaagagtaggatatatcatatagtcatgggagaggaattatcamagttgagtcctgaaggttgaaccagactagtgaggagtggtgagatgagagccagaaaacagagacagcctgggagtcattggctatatcataaaacagagactattataaaaacagtgaggtaggggtccgatcaacacgagctgattatgccaagataagaagtttgtcttcagagaaaagagacatgtataatatttcttccagttcccatgataattatctcacccagggaaatggggaaaggctagcactggcaacctaaatattcagaattacatacagaatattggtgaaggataacattaaagtcataccaaatatatttacatttagatgttgtatgtgttttactttcaaatatgcagcaaattataatttttaagcctgaagtttaaaatgcttttatttccagaattaatataacttttttctccctaa

SEQ ID NO: 135075 - DNA, 585 bp, Homo sapiens
ggaggttgaggctgcagtgagccatgatcaagccactgtactacagtctgggcaacaaagcaagaccctgtctcaaaacaaacaaacaaacaaacaaataaaagagtaggatatatcatatagtcatgggagaggaattatcacagttgagtcctgaaggttgaaccagactagtgaggagtggtgagatgagagccagaaaacagagacagcctgggagtcattggctatatcataaaacagagactattataaaaacagtgaggtaggggtccgatcaacacgagctgattatgccaagataagaagtttgtcttcagagaaaagagmcatgtataatatttcttccagttcccatgataattatctcacccagggaaatggggaaaggctagcactggcaacctaaatattcagaattacatacagaatattggtgaaggataacattaaagtcataccaaatatatttacatttagatgttgtatgtgttttactttcaaatatgcagcaaattataatttttaagcctgaagtttaaaatgcttttatttccagaattaatataacttttttctccctaa

SEQ ID NO: 135076 - DNA, 555 bp, Homo sapiens
gttaccaacaatttgattagttacagttgtttttcttttcctttcacaatctaaatgtatatttaacattccaccttagacaatgttgtcagagacattggaaccagaaccactccatcttaaataggtgctgggtaaaatgagactgagacctactgggctgcactcccagatggttaatgyattctaagtcacaggatgagacaggagttcaacacaagatataggtcataaagaccttgctgataaaacaggtttcagtaaagaagctggccaaaacccaccaaaaccaagatggcgatgagagtgacctccagttgtcctcactgatacattcccatcagcatcatgacagtttacaaatgccatgcaatgtcaggaagatatcctacagggtctaaaatggagaggcatgaatgatgcgcccattgtttaacatatcatcaagaaataaccacaaaaatgggcaacctgcagccctcggggctgctctgcctatggagtggccattcttttattcctttactttcctaataaactcgctttcactttact

SEQ ID NO: 135077 - DNA, 533 bp, Homo sapiens
aatgccaacttttttttcgctatttccagtgttcaatctgcttgccaattatttctaatatactactgtctggtttagctgtgaattacmaacagtaccatattttaacatgtgagacaaaggacaacttccacccccaagatgatcaagcatttagttttctatttgaaagatccagaataaaatgcaatttgagagcatattgtgtgtcggtatcaaccaaatacccaattgctttagtgcttatcctgaaagtggccagaccaaatccaacaattggaaattgcagaaagagtaaaattattttcacaattcaaactgaaatcaaggtgttagtttgtagtttatttccaggaaaccaagtctgtgtgtgtggtttctatactttgggaaatttaggagttcctatacctagattctattccaagctctaccgagtaaccatatgaacttgtgtacataaattgacccctctgcatctgtctcatgtatacagtgtgaactcactatagtgagttagattacttataaac

SEQ ID NO: 135078 - DNA, 533 bp, Homo sapiens
aatgccaacttttttttcgctatttccagtgttcaatctgcttgccaattatttctaatatactactgtctggtttagctgtgaattaccaacagtaccatattttaacatgtgagacaaaggacaacttccacccccaagatgatcaagcatttagttttctatttgaaagatccagaataaaatgcaatttgagagcayattgtgtgtcggtatcaaccaaatacccaattgctttagtgcttatcctgaaagtggccagaccaaatccaacaattggaaattgcagaaagagtaaaattattttcacaattcaaactgaaatcaaggtgttagtttgtagtttatttccaggaaaccaagtctgtgtgtgtggtttctatactttgggaaatttaggagttcctatacctagattctattccaagctctaccgagtaaccatatgaacttgtgtacataaattgacccctctgcatctgtctcatgtatacagtgtgaactcactatagtgagttagattacttataaac

SEQ ID NO: 135079 - DNA, 452 bp, Homo sapiens
aatcttttttccaggaatatttttcaaattcaaaactctaatttgtgtttgaatttccaaaattcccattttttctgagtaattgaaaccatagwggaatattgtgtgctcccttttaaaagagcaaaaagtgggagaacaaagtataatggtagtataaatatgtacagccagccattgtcctgtaactaatttagagaacataaattggaagtgtccagggaatgtgaggacaccagctggctagggatacaagagaatctggggtgtttatggagactaaagtgatgtgatgggattgagacattccacaccttttcccagtaatgacacgattaacactctagttttccaggcaaaatctaaatctcttagacagaaagggtccattttctaactcttttatcagatgcagcttttggtctacacaagacatagcttaaaaaataaag

SEQ ID NO: 135080 - DNA, 573 bp, Homo sapiens
ggattgtcagtatttaaggctgtcttactcaaagtatttgatagtcctgcctgtgggagcacactgccttttgcactgttaggtttgaatgtggccatatgacttactctggccagtgaaatataagtggacgtgacrcataatatttctggttggagccagtgatactctctttttctcacttctgcagtgatgaaaacacatttttaaaagggagcctgtatcagtctaggctctggagtgaagaccatgtggaccaaatccctttgcaaattggcattgaacatgtggcacatatgagaactaatttattacctcaaattattgagattttggggttgtttttagcatagtgtatatcttattctgactcagacagagttacttattccttgaaaaatgatttaatggttaaatatatcatgacctttgatataaatgtgatatctcacaattttaaaaatagggttctctggggtgggtggagacgggaaggtattctgcattaaatgtgcttatcacataacacatatctatttctgaaaagtcaaataggctattcatacttgtgca

SEQ ID NO: 135081 - DNA, 380 bp, Homo sapiens
tgttcagaagcagattcttcccagaatctccagaaaggaagacagcccatctaacatcttgattcacacttgtgagaaacgagctctacccaggctcctaccctccagaayggtgagataataaatggctgttggtttaagcctcaaagtggatggtaatgtattatgtaccaatagaaaactcatacacttgcctcttaactattcttctcagaggagcttctctaaagcataataacacttttgtagatagcacttaccataggacatctacaattctaagtgttttacatacaatttaatcctcacagtcattactactgccattttccagttgtaaagcctgaagtacaaagtggttactaatgtgcccaaggtca

SEQ ID NO: 135082 - DNA, 592 bp, Homo sapiens
  misc_feature (1)...(592): n = A,T,C or G
attaagtatatttcatgctactggcattatttcttctcagaatgcttctacagtatccaaattattcaaataaatgattgggtttggtagaatttttatgagcccatattntcagatattcagcaacactcatcagccattggtcatgtgcttactaagtgtcagttctcaatctaraataaataacaaaaaaaggcaaatgtcttgctctcatgcagcttacagtagggagtgggagagattaaacaaatgatggtacttatgaatgtatgattataaactgtaatgtgtcctgaaggaaaggtatataatgtcttgaaaatataaaacagcagaacctgactcaactgaggatttttctagatggcctatgttctgagctctgaaaggtgaatatgtgttggagactgtgggcagggtgagagccaagaagggtacaggccatgttaaaggacatgacagaagccaccatggctgcccagccagaggagagtagaatattttaaggctggagaattaagcagaaaataaaacataaaaactttaaagccatattaaggatttctgttctttttcctaagaaaaatagtaa

SEQ ID NO: 135083 - DNA, 556 bp, Homo sapiens
tcatatgttttagatatcagtcccttattatatacatagcttgcaaatatttcttcccattccataggtcatctcttcactctgttgattgctttctttgctgtgcaggtgctttttggattgatataatcccgtttgtctctttctgcttttgctgcctgtactcttggggtcatacccaaaaaaaatcattacccagaccagtgtcaaagagcttttaacctatgatttcttttagtaattgtatagttacaggccttacatttgagtctctaatccattctgagttggtttttgtacatggtgtaagataagggtctagtttcattcttctgcatgtgggtatatagtttttccaaaactatttactgaaaagattgtcctttccccacagcgtggtcttggcagccttgttaaaaatctgagctctccattctgttccggtggtgacatggtttggctctgtgtccccacacaaatctcaccttsaattgtaatccccacatgtcaagcatgggaccaggtggacacaattgaatcattgtggctgtttccc

SEQ ID NO: 135084 - DNA, 363 bp, Homo sapiens
ataaaagtttgaaaaatatccaacctgaccatgcaatagaaaatagaaactcattttctggggagaaattccagcctgccacagaaatttgcataagtaatgaggaatggaatgttaatcaccaagacaatggggaaaaggtcagagaccttcatggcagcccttcccatcacaggccaggaggcctaggygggaaaaatggtttcaggggcccagcccaaggccactctgctctgtgcagcctcaggacatggtgccctgtgtcccagctgcttcagctccagccctggctaaaaagggtcagcatacagctcaggccattgcttcagagagtgcaaactccaagccttggcagcttacaca

SEQ ID NO: 135085 - DNA, 485 bp, Homo sapiens
tgatttgaataatgatacaaatggctttatggtcctctttactgtccaggccactgacagatatgttcagcattgtacatatgtagctccagggtatttcatttgagggataaacacataaacacatccactggaaagaataaactacagtgagctgagaaaatcgatgtgattttcagctgtatgctaaacttttgctctctgttggatcccctctgaaaccacagtaaatcagtcatctggcatcctttgaaggtcttgcatgggtcagcaggggctcctgtttctggcacacaacaacgagggctgctctgcagtggcctcagagctgctgttgtagctctgggtgtcaccgtgccagcacgggttccctttatctcttttgcaactttatatgttcccaaatcatactgtgtttcataagctttgacctacagytgggaagaaagaggaggaggtggagataatgacctacagggctttgt

SEQ ID NO: 135086 - DNA, 416 bp, Homo sapiens
agatctctgtgcctgctcctcaacaagactctgtatctacacgaagtgtattttgcatgaaatccagaaggtctcaacacatgccatataatccaccaaagccatgccatataacgcccacatatcctgtccctggtccataactgaagacaagacatgctccrcagttcattctaaaccatcctagtacaaggatgcttttgagaatcaaccctgttctgtataacaacacaagttactccaagttaatctgatttactttgtgtgacaccttcccactccagacatgtttaaattaaaactattagatggaaatcttaaacctgtatgttttttagacctctcttggaaaggagagatttcaagaatctgaggaaagggaactttttgagaactcttaccaatcgcttggtact

SEQ ID NO: 135087 - DNA, 410 bp, Homo sapiens
ctgtgcctgctcctcaacaagactctgtatctacacgaagtgtattttgcatgaaatccagaaggtctcaacacatgccatataatccaccaaagccatgccatataacgcccacatatcctgtccctggtccataactgaagacaagacatgctccgcagttcattctaaaccatcctagtacaaggatgcttttgagaatcaaccctgttctgtataacaacacaagttactccaagttaatctgatttactttgtgtgacaccttcccactccagacatgtttaaattraaactattagatggaaatcttaaacctgtatgttttttagacctctcttggaaaggagagatttcaagaatctgaggaaagggaactttttgagaactcttaccaatcgcttggtact

SEQ ID NO: 135088 - DNA, 607 bp, Homo sapiens
gcttagaaataataagaactctctctcttgtacaagatgtttcagatgaactattaaaagaatgggaagaaggagaggcaagctatggcaaatgatgctgatcatcccagtcatccccgagacttttacatactttctcaaatgagtgttccagtgttgtgtgagaaatctgttttagtactttaccagatcttgggtatgtatactaggacgtrtagcaagatagaactgtgctaagcaccaccctccttttctctcccaactggccacccttccattatgttcccttcagggggcacgctttgtgatttattttttctttcaaggttgaccttattcattttaaccagatgttgactatttttgaaacatggccaagagaatgagaaggcaagccacaaactgggggaaaatatttgcaaaagacacacctaaaaaagaaggttatccaaaatatacaaagaactcttaaaactcaacaataagaaaatgagcaacccaattaaaaatgggaaaagacttgaatagacacctcgctaaagcagatacacaaatggcaaataagcatatgaaaagatgtgtaacatcgtgtcagttgggagctgca

SEQ ID NO: 135089 - DNA, 607 bp, Homo sapiens
gcttagaaataataagaactctctctcttgtacaagatgtttcagatgaactattaaaagaatgggaagaaggagaggcaagctatggcaaatgatgctgatcatcccagtcatccccgagacttttacatactttctcaaatgagtgttccagtgttgtgtgagaaatctgttttagtactttaccagatcttgggtatgtatactaggacgtgtagcaagatagaactgtgctaagcacyaccctccttttctctcccaactggccacccttccattatgttcccttcagggggcacgctttgtgatttattttttctttcaaggttgaccttattcattttaaccagatgttgactatttttgaaacatggccaagagaatgagaaggcaagccacaaactgggggaaaatatttgcaaaagacacacctaaaaaagaaggttatccaaaatatacaaagaactcttaaaactcaacaataagaaaatgagcaacccaattaaaaatgggaaaagacttgaatagacacctcgctaaagcagatacacaaatggcaaataagcatatgaaaagatgtgtaacatcgtgtcagttgggagctgca

SEQ ID NO: 135090 - DNA, 230 bp, Homo sapiens
ggagcggcggtgtccgccccggggggtcccacccagaagtatgctgttgaaagcaggcygctgcagcctcctgggccgtctccacccacagctctcgtggctctttgggttcctccgtctttgcggggtttcacctgtggtcagtgtggtcattgccttcagaatctccagtatattccttttcatctttcttgagacagggtctcgttctggtgcccaggctggagtgc

SEQ ID NO: 135091 - DNA, 571 bp, Homo sapiens
cttccttgtctccagactaaattagattgccttgatatatgctcccakagaaccaagaatgtccccttttcatcccacaggtaactccttgttaaatgttgtacaaggaaggcatagacagaattcacctttcactgttccactggtgcccagcagggtatgcaaaggaggaaatcagctgtgctctgaaagaagcaccattccagtaaaggggaggaaaaggtcatcagactgcaagggctcaacaaaagtacaaggtaaggaggcagagggtgtgggctgattatcaactaagaggtttgcacggaaaaaggagaaaaaaaaaaaaaaacagaaaaacagggccgggtagtggcagaaagagagggtggatctgtgactgttcgcaggaagagaggagcgggagcaggacagacaataactgatagtcaggagctgggtttggagataaagagggaacaagagaaagttaagttctgtgttttcatggcaaacattgcacaaaagtttacaacttcgtgactaacagtaatctggggtgattcacagtaacaaatttacacataaacac

SEQ ID NO: 135092 - DNA, 206 bp, Homo sapiens
ctctgtacttagtcacccactctgtacttagtcacccttagtcacctgttctgtacttagtcacctgctctgtccttagtcattcttagtcacctggtctgtacttagtcacccgctctgwacttagtcacccttagtcacctgttctatccttagtcacccttagtcacctgttctatccttagtcatccttagtcacctgttct

SEQ ID NO: 135093 - DNA, 470 bp, Homo sapiens
tgactttgaactctctatcttgggtagtgttaaagcaaactaaatatggccagagaaggactccagtacttttatattcgagtccttgtggacgaactgcaatctaacttaataggtagacaagattgagaacctaacttaggagtatgcacctgtaacaatagctgagtctcggctaatcccagcagccatacttcaaccatttatacrctgctgagtgttcaaactgtgtttaaataaggcaaatgctgagctgtaaccaacccagttgtttctgtacattacccctgatttctgtacattacctccctttgtttggtctataaatcttcttcggctgtgctggggtctctctaaattcgctgtgattctgggggctgcctgatttgccgttcattacccaatgaaggtcctttaaatttaactcagctgaagtatttcttttgccagacacagcttctctacattta

SEQ ID NO: 135094 - DNA, 470 bp, Homo sapiens
tgactttgaactctctatcttgggtagtgttaaagcaaactaaatatggccagagaaggactccagtacttttatattcgagtccttgtggacgaactgcaatctaacttaataggtagacaagattgagaacctaacttaggagtatgcacctgtaacaatagctgagtctcggctaatcccagcagccatacttcaaccatttatacactgctgagtgttcaaactgtgtttaaataaggcaaatgctgagctgtaaccaacccagttgtttctgtacattacccctgatttctgtacattayctccctttgtttggtctataaatcttcttcggctgtgctggggtctctctaaattcgctgtgattctgggggctgcctgatttgccgttcattacccaatgaaggtcctttaaatttaactcagctgaagtatttcttttgccagacacagcttctctacattta

SEQ ID NO: 135095 - DNA, 470 bp, Homo sapiens
tgactttgaactctctatcttgggtagtgttaaagcaaactaaatatggccagagaaggactccagtacttttatattcgagtccttgtggacgaactgcaatctaacttaataggtagacaagattgagaacctaacttaggagtatgcacctgtaacaatagctgagtctcggctaatcccagcagccatacttcaaccatttatacactgctgagtgttcaaactgtgtttaaataaggcaaatgctgagctgtaaccaacccagttgtttctgtacattacccctgatttctgtacattacytccctttgtttggtctataaatcttcttcggctgtgctggggtctctctaaattcgctgtgattctgggggctgcctgatttgccgttcattacccaatgaaggtcctttaaatttaactcagctgaagtatttcttttgccagacacagcttctctacattta

SEQ ID NO: 135096 - DNA, 470 bp, Homo sapiens
tgactttgaactctctatcttgggtagtgttaaagcaaactaaatatggccagagaaggactccagtacttttatattcgagtccttgtggacgaactgcaatctaacttaataggtagacaagattgagaacctaacttaggagtatgcacctgtaacaatagctgagtctcggctaatcccagcagccatacttcaaccatttatacactgctgagtgttcaaactgtgtttaaataaggcaaatgctgagctgtaaccaacccagttgtttctgtacattacccctgatttctgtacattacctccctttgtttggtctataaatcttcttcggctgtgctggggtctctctaaattygctgtgattctgggggctgcctgatttgccgttcattacccaatgaaggtcctttaaatttaactcagctgaagtatttcttttgccagacacagcttctctacattta

SEQ ID NO: 135097 - DNA, 554 bp, Homo sapiens
gctttctccttccaggtgagcttatcaattcctgagacgtaaaagacacacacacctactgatttgtcctcatgcagtgtccggactacacacacacacacacacacacacacacacacacasacacacacacaccactctacttcacatcttaattcggatgtcactcagacctctcaaacataacatgttcaacataggatttttttttttttggaggcaaactctgcctcccaggttcaagtcattctactgcctcagcctcccaagtagctgggactacaggtgcacgccaccacacccagcacattttttgtatttttagtagagacggggtttcactatgttgcccaggctggtcttgaactcctgagctcaggcaacctgcccaccaccagcttcccaaagtgctaggattataggtgtgagcccccgcacccggcctaacatgggattttaagttttttctcgtcatgccatgtattattatttccaattatttttcctcttccatgaaagaggattaaacatcccacccagttcctagttgctta

SEQ ID NO: 135098 - DNA, 221 bp, Homo sapiens
gggtcgaagtgtgtatacattttacatttttgattgctaagctgcagaaaagctgtattggtatgtaagtactcgtttccttactatgctcgtcatttctagtgtctgctcttcctttccttcttcaaatgggtttggtttaattctagttgctactgttccatcagaggaattgcagagaactggtcttcaaaayagtgcagtatatactttaggtgaag

SEQ ID NO: 135099 - DNA, 550 bp, Homo sapiens
taatcgttatgataaataatgacaaatctttttagcatgttytgtgaagctgataaatgttaataggatgtcttcaaatgtcagaattcttttttctttgcttcttttttaaaaaatttcttttcccccattcctatgcaatacactgaaaactgatcattgaaatttgtaggccaaaaaattaatcaacacgtaatagattggggtttgggtttttttgagtcagggtcttcttctgtcacccaggctctggtgcggtggcaccatcatggctcattgcagccttgaatgcctgggttcaagtgatcctccggagtagctgccgtgccattatttctagctaatttttaaaagtttttgtagaaatggggtctttctgtgttgcccaggctggtcttgaattcctggcctcaggtgatccttctgccttggcctcccaaagtgctgggattacaggtgtgagccaccatgcctagcccctaataaatattctaattaccgatttatcttgcttaaatcagttggtaacacttggaatttacttcagaat

SEQ ID NO: 135100 - DNA, 550 bp, Homo sapiens
taatcgttatgataaataatgacaaatctttttagcatgttttgtgaagctgataaatgttaataggatgtcttcaaatgtcagaattcttttttctttgcttcttttttaaaaaatttcttttcccccattcctatgcaatacactgaaaactgatcattgaaatttgtaggccaaaaaattaatcaacacgtaatagattggggtttgggtttttttgagtcagggtcttcttctgtcacccaggctctggtgcggtggcaccatcatkgctcattgcagccttgaatgcctgggttcaagtgatcctccggagtagctgccgtgccattatttctagctaatttttaaaagtttttgtagaaatggggtctttctgtgttgcccaggctggtcttgaattcctggcctcaggtgatccttctgccttggcctcccaaagtgctgggattacaggtgtgagccaccatgcctagcccctaataaatattctaattaccgatttatcttgcttaaatcagttggtaacacttggaatttacttcagaat

SEQ ID NO: 135101 - DNA, 608 bp, Homo sapiens
gtataattaatgattttctctgaaatttgttgagtccagggtctactrggcaatgatgatgagcctagggcagcagaaacttgaagtgaactcctaaattcacattcatggttgtattagtctgttctcacattgctataaagaactacctgagactgggtaatatatgaagagaagatgtttaattgactcacagttctgcaggctgtacaggaagcatggatgggaggcctcaggaaacttacaatcatggcagaaggcaaagaggaagtgagcatgtcttactatggtagagcaggagagagagaataaagggggaagtgccacacacttttaaatcatcggatttcatgagaactcactcactatcgtgagaatggcaagggggaaatctgtccctgtgatccaatcacctcccatgaggttcccccccagcattgggaattacaatgcaatatgatatttgggtgggaacatggagccaaaccatacaaatggtgatctgctgaaacctcaacgtcctcctcaatgtcctcctgtacaaaataacattcataacattagatatcacttggcctcacattggtattcacgaaaagtaaagacaa

SEQ ID NO: 135102 - DNA, 538 bp, Homo sapiens
atcctcaaagaccaccctatttaaaagggcaaacttctcaactctgttactctaccctgatttataacacttaacactgtttcacattatgatacacattttaaaatttgtgtatatattgttggcatgggctttgttttgtttattactctatccccagcaatgttgcaaaagtgattcaatggaagaagaatggacttttcaacaaatagtgctgaagcaattggacatcgaagggcaaataaatgaacctcaaaataagcctcaaaaatcaactcaaaatagatcatgcaaaatagaaaatacaaatctgtgaaactttcagaaaaatcatagataaaaatatttggatcttagggctaagcaaagagttcatagacttgacaccaaaagaacaaktaatgcaaggaaaaattgagaaattggaccacatcaaagttaaaaacttttgctttgtggaagatcccacaaagaggatgaagagataagatacaaattgggagtaaatatttgagactcatgtgtctgacaagtgcct

SEQ ID NO: 135103 - DNA, 630 bp, Homo sapiens
tttctgtagatcctgtacatggcacatagaagaagctaaaacaaaaaatgtgctgagtgagtgaatgaatgaatgagtgactattgtttgggcactatgaataaaatctcaagtcaagtttcaagagataaatgacctttgtacagaacctgtaaaggttgtgtttcaaaacctgttactgtccattaaaagcaggtagtcccagaaggtttttagctgcataaaagttttcccattattctttaatcggtgtccagtagctaaaactcctgttgttttgtctatttccctgtacaatagatatggattctcttctgggtctccctgaagtgaatagcagcatgtaaacatcytatagcttcaatatattgattgaaaaactggatacttcatatgacttttatttttttactactcatattatcttaaaggttatatttatctgcaggacatatttgtaaaagttttgaacagcattattcttgggtggggatggaagagaaatttcttaaccctctaggaagtaattctaaggaaattatattctagtgtcatagatcgctgagtaatactgttgttagtcagtgtcttgactctgggaaaaaataagttacaagttaaagatatgct

SEQ ID NO: 135104 - DNA, 579 bp, Homo sapiens
ctacaagtttttgtgtggacgtacgttttcgtttcccttgagtggaattgctgggtcatatggtaactccatgtttaacaccatggctcaggaatttgctggctggagaatagaaaagtgaggctcttctggatggcaaggagaatttgwgtctgtgtgtgtgtgtgtgtgtgttgtacacagatgtgtgcaggagcagcgctgctggggtaggagcagcaacttttgactatcatattcaaagtaattcttggccaaattcctggtaactctgaaatttctgcccacctactcctttgtctgaatgttgcccctattgggtggtcgtcctcagacagctcttcagtcaattagaagactttggcaaaaatcgacaaaagcattctggaagaatcaattagttatatgaaatgtacaatagagagtattataaatgttattattagttgtcacttgtgttttacaccttttatatctacaacatttataataaatgaatggacatatacacgtatacacattttttcccccaaagagttgttgtggacatgtgcctgcacacactgggtctgcagtgtc

SEQ ID NO: 135105 - DNA, 565 bp, Homo sapiens
tcacatgctctagtgtacataacgaccttagtcactctaagttaggttcccacagtcttataagctaggcatcatctgtatgaaaacagtgaaacccacagatacttcccggagtttcattatttggcctttccaacctcactgagtatctccagttcctgctagtgcaacggtaaccacctccttataaagggcagtagtaagaagctaatcaacaggaccgcgaaacgtgaaagtgcttcatgaactggaaagccaacgcagaccttagttattatattagatgttagctttagattctttctgtggaaacaaagatcctctctttttctaactgctctcctggacacctggtcatttgttgtggatgaacattagtacattacaggcactactcttcatctttgcacttaacacatcagcagccacaaaaggcattctgatgagagcttaaagattcaacaacaaatctcttgctgasagacccttctaagtttacaacccctgaaactgttcttctataatgacagaaaaaaaggctacagggagttctaaaaatgggatt

SEQ ID NO: 135106 - DNA, 559 bp, Homo sapiens
tggtgttgaaaaggggtcaggctaagaacaacaggtgacagactgactgcaatcaggcacactgaaagacaactagagtttgggcwtgctgagtttgtaactaatttaagagactgggcttacatttaccctcatatcttctagtatacattctgccatgggggtgtagccaaaccaaaagtggaaaaggcctagcacctcagggttgtaagaagtataaaagttgccaggcacggtggctcacacctgtaatcccagtactttggaaggctgaggtgagaggatcacgtgagtccaggagttcgagaccagcctgggcaacacaggaagacctcatctctacaaaaaaataaacaaaattatccaggtgtggttccagctactcaggaggctgaggcaggagaatcgcttgaggactgggaagtcaaggctgcagtgagccaagatcacgccactgtactccagcctgggcaacagagtaagaccctgtcaccaaaaaagtatagaagtttattctacatattctatacatataaagtttattctatctattctatat

SEQ ID NO: 135107 - DNA, 559 bp, Homo sapiens
tggtgttgaaaaggggtcaggctaagaacaacaggtgacagactgactgcaatcaggcacactgaaagacaactagagtttgggcatgctgagtttgtaactaatttaagagactgggcttacatttaccctcatatcttctagtatacattctgccatgggggtgtagccaaaccaaaagtggaaaaggcctagcacctcagggttgtaagaagtataaaagttgccaggcacggtggctcacacctgtaatcccagtactttggaaggctgaggtgagaggatcacgtgagtccaggagttcgagaccagcctgggcaacacaggaagacctcatctctacaaaaaaataaacaaaattatccaggtgtggttccagctactcaggaggctgaggcaggagaatcgcttgaggactgggaagtcaaggctgcagtgagccaagatcacgccactgtactccagcctgggcaacagagtaagaccctgtcaccaaaaaagtatagaagtttattctayatattctatacatataaagtttattctatctattctatat

SEQ ID NO: 135108 - DNA, 565 bp, Homo sapiens
cacagatcaataccttctaaaagttagagcccagcagtatactcttctttgcacttttttctgttcacctgcttccgtccctytcactttctttcacccttctgtcctccctccctctctttctcccttcccttttctttccttgacacctgtaagagtttgtctctttctccatgggtatttacacctgaggagttatatgtccaagccctttgtcttgacaggggtagaggcatgaagaaatggccacatgatcaggggttagagactgagaaggaagaaaatcttgacatccttaaaacattgtggtccacaattcttttcatgctactctacttcctggagatgtaaggcattggatagtatcaatggataaaaagacaatatcagagctgaaatcatcctttctactttgaagatgactttttacttgtaggatatccttcctactggatctttctgggaagttctcatttgcaaggttgatttagttggccctggattcgtctggagagcttgacctgcttggcttttgtgtctcttcctattcccttctcagaattga

SEQ ID NO: 135109 - DNA, 565 bp, Homo sapiens
cacagatcaataccttctaaaagttagagcccagcagtatactcttctttgcacttttttctgttcacctgcttccgtccctttcactttctttcacccttctgtcctccctccctctctttctcccttcccttttctttccttgacacctgtaagagtttgtctctttctccatgggtatttacacctgaggagttatatgtccaagccctttgtcttgacaggggtagaggcatgaagaaatggccacatgatcaggggttagagactgagaaggaagaaaatcttgacatccttaaaacattgtggtccacaattcttttcatgctactctacttcctggagatgtaaggcattggatagtatcaatggataaaaagacaatatcagagctgaaatcatcctttctactttgawgatgactttttacttgtaggatatccttcctactggatctttctgggaagttctcatttgcaaggttgatttagttggccctggattcgtctggagagcttgacctgcttggcttttgtgtctcttcctattcccttctcagaattga

SEQ ID NO: 135110 - DNA, 397 bp, Homo sapiens
atgtaaaaattcagtaagagaaaatattatactgatggttgaatatgatttatcaagaagattctgatatatcacatacacatcatggaatactactcagccataaaaaagaacaaaatttcctttgcagcaacagggatagaastggaggccgttatcctcagtgaaataactcaaaaccaggaagtcaaatgccacatattcacacttaaaagtgggagctaaacaatgggtacccatggatatacagagtagaataatagacattggaaactacaaaaggtgggaggattggagagggaggaaggttgaaaagttatctattgggtataatgttcactattcaggtgacaggtacactcaaagctcagacttcaccgtgatgcaatatgtgcat

SEQ ID NO: 135111 - DNA, 397 bp, Homo sapiens
atgtaaaaattcagtaagagaaaatattatactgatggttgaatatgatttatcaagaagattctgatatatcacatacacatcatggaatactactcagccataaaaaagaacaaaatttcctttgcagcaacagggatagaactggaggccgttatcctcagtgaaataactcaaaaccaggaagtcaaatgccacatattcacacttaaaagtgggagctaarcaatgggtacccatggatatacagagtagaataatagacattggaaactacaaaaggtgggaggattggagagggaggaaggttgaaaagttatctattgggtataatgttcactattcaggtgacaggtacactcaaagctcagacttcaccgtgatgcaatatgtgcat

SEQ ID NO: 135112 - DNA, 397 bp, Homo sapiens
atgtaaaaattcagtaagagaaaatattatactgatggttgaatatgatttatcaagaagattctgatatatcacatacacatcatggaatactactcagccataaaaaagaacaaaatttcctttgcagcaacagggatagaactggaggccgttatcctcagtgaaataactcaaaaccaggaagtcaaatgccacatattcacacttaaaagtgggagctaaacaatgggtacccatrgatatacagagtagaataatagacattggaaactacaaaaggtgggaggattggagagggaggaaggttgaaaagttatctattgggtataatgttcactattcaggtgacaggtacactcaaagctcagacttcaccgtgatgcaatatgtgcat

SEQ ID NO: 135113 - DNA, 397 bp, Homo sapiens
atgtaaaaattcagtaagagaaaatattatactgatggttgaatatgatttatcaagaagattctgatatatcacatacacatcatggaatactactcagccataaaaaagaacaaaatttcctttgcagcaacagggatagaactggaggccgttatcctcagtgaaataactcaaaaccaggaagtcaaatgccacatattcacacttaaaagtgggagctaaacaatgggtacccatggatatacagagtagaataatagacattggaaactacaaaaggtgggaggattggagagggaggaaggttgaaaagttatctattgggtataatgttcactattcaggtgacrggtacactcaaagctcagacttcaccgtgatgcaatatgtgcat

SEQ ID NO: 135114 - DNA, 637 bp, Homo sapiens
tgttgatgggatgtgatgatactggctctttatatctgtgatctccttccacaaaacccaaacatcagtctaatcatgagaaaaatatcaggtaacttccagttgagggagtttctacaaaacacgtcaccagtactcctcagaactctcaaagttataaaacacaaagaaggtacgaaaaactgtcacagcctagaggggcctaaggagatggacacctaagtggaatgctgcaccttggatgggatcctggaacagaaaagaacattagatmagaatctaaggaaatcttgataagaaagtgtggacttcagttagcaataatgttcaatattggttcattaatggtgcatcatacattagtaagatgttcataattggagaaactgggtgtggggcacaggagaactctctgctcccttcacaagtcttctgtaagtctaaaacttttctgatagaaaagtttatttaagatattttaatttttcttttgttttttcactctgttctgctaaaccatgttgtccaacatagttcactaaaataagacaaaactttccaattctacattataaacaatataattatgctacacagtttggtgtaaattctctttcattaccaggttcccaggaag

SEQ ID NO: 135115 - DNA, 410 bp, Homo sapiens
ggaattccagatggagataaaagaaactgagaagctagggcatattcagggaataraaaggagcctcaaagagcaaggggtatattaaggggggctaatgcagaacaggttacagaggcaggcttataccagatcatgagactctttaaagattatactaataatctttctagagaaccactgaaatttttatgaaaaaggcaagaccaagtggtgcttgacagagactacttctctaagcatgcttacaatgggctcaaaagagaaatgttatacatgaaggttttataaatgatatttcaacaagaacttttatttaagatgactggttcttaattttttttatttgaggggaggtggggccttggaaacccattattgaatggctttctaagaaggctgatatataa

SEQ ID NO: 135116 - DNA, 419 bp, Homo sapiens
aggttttgggttcctgtgtgattttatgttgtaattataagtgatgttttggtgggcagctttgttgaagactgggttttctttcctttgaagtcatttgaaggactaatgaagagtgagactaaactgtaaaactycattttgtcagatagctggaacattagggacatgcttgggtaggtggtgatcttagatattgaaaactaatcagggaaagtagattgagagagaagtggatgggatgtgtttctgaggagcacaaaatgttctacatgcagattagctgtgagaaaaaggcatagcataaactcaacttgtatgatgtttaattttttttttttaaatctgggagaagagacataattataccttctaaactgctgtggagcagggattcttaacctgggctctatggatga

SEQ ID NO: 135117 - DNA, 398 bp, Homo sapiens
aagactggcccccatgattcaattttctccccctgggtccctcctacaacacatgggaattctgagaaatgcaattcaagttgagattttggtggggacacagccaaaccatatcaccaagcaaggccaattgactttctccagaaaagagaatccctgagtaaagtgacatgaggaaccactagctaatgaatagtytatgaatgtctccaacgtaggtttctaatttcctgtcccatatgcagccagattctttagctttttatttgattctgtgagatatcctgtagtcttctaatatgtatgtgtgtatggtacaaatatgtgtatgtgtgttttaattttcttttttaaaattagctaaagttggtttcttttgcttggaataaaaaagaatt

SEQ ID NO: 135118 - DNA, 431 bp, Homo sapiens
tggctctcttccgtgtgcctctgacttccttccagcagactagcctgggcatggtctcatgatgagggcagagcttaaggagggcaagcagaaatgaacaagtgtttttcaagcttctgttggaggttaaagcaagttacatgactaaaccaagaatcagtgtgggagggtactaccaaatgggtggcctcaggggagaatgaaaaactggggctgttaatgcaatcaacttacctcaccatgaaagggaatgttaacttcattagtgcgaaacatttgaagtagacccagtccctctcttatgatgrggaaagtttgaagccagtgacaatcatgcttcagatgaatgtctcaagatcaatagcaatgtcacaagacctatcgcaagccctcagttgaatctctctggtagggagccatcttcggccttg

SEQ ID NO: 135119 - DNA, 431 bp, Homo sapiens
tggctctcttccgtgtgcctctgacttccttccagcagactagcctgggcatggtctcatgatgagggcagagcttaaggagggcaagcagaaatgaacaagtgtttttcaagcttctgttggaggttaaagcaagttacatgactaaaccaagaatcagtgtgggagggtactaccaaatgggtggcctcaggggagaatgaaaaactggggctgttaatgcaatcaacttacctcaccatgaaagggaatgttaacttcattagtgcgaaacatttgaagtagacccagtccctctcttatgatggggaaagtttgaagccagtgacaatcatgcttcagatgaatgtctcaagatcaatagcaatgtcacaagacctatygcaagccctcagttgaatctctctggtagggagccatcttcggccttg

SEQ ID NO: 135120 - DNA, 547 bp, Homo sapiens
agcccattctttcaccatagacrttggtgacctagacctagacctagaaccatcagggtgggaacaactgggtctctttctatgaaatctgtgcctcttaaagcaccattagtttccataaagcatggtgcaaggtgtcaattcacagcaccttccctatgatatggttgatacaagccagatacaatcttgggggctggggagtcagacacgatctgtgccctcaaagagcttacctctagagtgaggatatagtatacaggtaaatgattaatacatgaatccggtaatttcagatactcatagtgttacacagaaaataaaagaggataatataatagagaatgacagggctcttttgacaggtggtctgtatgtctaaggctcactcttttatgaactcatggacacattttacttatttatggggctttttgtaggctcagatacctggcaaaaggaaatacactcctcttcccccccagcacacagattaaataagatttggaattcatctttgcctcccacagtccataagaagatgtcc

SEQ ID NO: 135121 - DNA, 547 bp, Homo sapiens
agcccattctttcaccatagacgttggtgacctagacctagacctagaaccatcagggtgggaacaactgggtctctttctatgaaatctgtgcctcttaaagcaccattagtttccataaagcatggtgcaaggtgtcaattcacagcaccttccctatgatatggttgatacaagccagatacaatcttgggggctggggagtcagacacgatctgtgccctcaaagagcttacctctagagtgaggatatagtatacaggtaaatgattaatacatgaatmcggtaatttcagatactcatagtgttacacagaaaataaaagaggataatataatagagaatgacagggctcttttgacaggtggtctgtatgtctaaggctcactcttttatgaactcatggacacattttacttatttatggggctttttgtaggctcagatacctggcaaaaggaaatacactcctcttcccccccagcacacagattaaataagatttggaattcatctttgcctcccacagtccataagaagatgtcc

SEQ ID NO: 135122 - DNA, 617 bp, Homo sapiens
actgcataaacaaagtccaattgtctgctaactgttctgttaaactgaagtttaatctaattctttccaattatctgatcaaaaggtgcttaactttttaacctcattttgcttaataacaaagtgagtaattataggactatggtgagggtccaatacaagaactggaaagcactcagtgcactaattcttgcaaaaaaatggcttaataaagagtaaataagcacaacatcacacrcagtatcaataacaagaaacaggacagaggatatagagaaaggcaagatacttatgattttgtctcccctgaattgttttctgaattactattttattcagaactcaattatgaatctcaatcttttgtaaagttctcattaagtgcactagacagagacaatctttgctctgtaagaactcatctcttctgtatacttcctatgaattttgcagtatattgatttttaagcattttccatattgtcctacaattatttgtacatgtctttgtttttaccaatagatactaaattccaggagaattgaaaacttttaaaaattatgtttgatctctaacactttagcacataatgtaatacatataatggccagaaggg

SEQ ID NO: 135123 - DNA, 617 bp, Homo sapiens
actgcataaacaaagtccaattgtctgctaactgttctgttaaactgaagtttaatctaattctttccaattatctgatcaaaaggtgcttaactttttaacctcattttgcttaataacaaagtgagtaattataggactatggtgagggtccaatacaagaactggaaagcactcagtgcactaattcttgcaaaaaaatggcttaataaagagtaaataagcacaacatcacacacagtatcaataacaagaaacaggacagaggatatagagaaaggcaagatacttatgattytgtctcccctgaattgttttctgaattactattttattcagaactcaattatgaatctcaatcttttgtaaagttctcattaagtgcactagacagagacaatctttgctctgtaagaactcatctcttctgtatacttcctatgaattttgcagtatattgatttttaagcattttccatattgtcctacaattatttgtacatgtctttgtttttaccaatagatactaaattccaggagaattgaaaacttttaaaaattatgtttgatctctaacactttagcacataatgtaatacatataatggccagaaggg

SEQ ID NO: 135124 - DNA, 626 bp, Homo sapiens
ctgccttcaatcttaatttctttgcatgttaaaaaataatgaactaaagatatcttcagygaaactgcagttcttcaattttatttactttttaaaaccgattttatgtgataatcttagatattaccataaaaatttatcataagtgatttttgactgagaagaaattaacaaattaaatctggtgacataactgtaaaataggttcagtcagttatttttttctgttaaaatatagtcttatgttacagatctaatattttataaatttctaaagtacaaatttgagcatctagattatacttaagacatacttatttctgggttgaccatgtggtgtaacataaaagtagaataaaaatgatgatgaaaatgccgtctattcttcctttttatacaattgctcctaataaaacaaattgggtgccacttctcttgaaaagcattgattagaatattatatagagtatataaatcatcattccaatgaaataatcaaagcaattttcactgatctgtctgtctcttcattagtatgctttgtctattctaaaacttgaaagttattgagtgtcattttattctgtacaagatacaaaaccattaatgaagatcaatagttgatg

SEQ ID NO: 135125 - DNA, 561 bp, Homo sapiens
acagctcaatgtctctctttatcgttcttatagcataattccaaaattctgctccttttttatgtctcatccttattttcttctctcttaattcatgttttcctgtaaacagtgcratcaattacactctaaagccaaattctatattacttatattatgaagttcaggagaattattttctgtctatttaaaaggaatgtttcaagggaatcattgcatgtttatatccttgactttgccttttaaatgttcatttatcatgcttttttctttaattgtattttgcctgctagtcatttcatatttagtcaataagacagattgaggaaatgagcatctgccattattgaagctctaaacaaaatttaaatagttttgttctccaactgtccccatcatttatcaaatatcactcactgtgacatgatatgccatttatcctaatgactgtaacagtgttacaagtagaaatgccaaacaatttttttttctcttttagccttgaattaaatgcataactaccaaaaaaagacaatgcctaaatgtaatctttcacattt

SEQ ID NO: 135126 - DNA, 626 bp, Homo sapiens
ctgccttcaatcttaatttctttgcatgttaaaaaataatgaactaaagatatcttcagcgaaactgcagttcttcaattttatttactttttaaaaccgattttatgtgataatcttagatattaccataaaaatttatcataagtgatttttgactgagaagaaattaacaaattaaatctggtgacataactgtaaaataggttcagtcagttatttttttctgttaaaatatagtcttatgttacagatctaatattttataaatttctaaagtacaaatttgagcatctagattatacttaagacatacttatttctgggttgaccatgtggtgtaacataaaagtagaataaaaatgatgatgaaaatgccgtctattcttcctttttatacaattgctcctaataaaacaaattgggtgccacttctcttgaaaagcattgattagaatattatatagagtatataaatcatcattccaatgaaataatcaaagcaattttcacwgatctgtctgtctcttcattagtatgctttgtctattctaaaacttgaaagttattgagtgtcattttattctgtacaagatacaaaaccattaatgaagatcaatagttgatg

SEQ ID NO: 135127 - DNA, 591 bp, Homo sapiens
  misc_feature (1)...(591): n = A,T,C or G
aatatattaacaatggcaaacgcacataatcctataaaaattaagatatttttaagcacaatatcattgtaaagattctgatgggtaggtaccatatgacctctgtttcataggtgacatgttcatttggttaaaatccctcagtaagtgatagatttggtatttggaaccaatgagcaatgctgtcaactgaaatatgacattattttattcatttaatatgtgtttatggtttaacctcttatgatacaaggcactgtaccaggtatagcagtgaataaaatasaccaagttccttcctttgtgtagcttacaatataatacagggaacatatagattacaagtactcaataatatttagctcttctcctatcctggcacttggaagactacactgactaggtactttggagttgggcccattatgtgactggctctggggaaggaaataaaaaataagaagtgttgtacatgccttcttaggcagtgataagctttaaagtttctacaggctcttcctttttgtgtcaagttgatctagggggctttttnnnnnnnnnnnnnnnnnnnnnnnnnnnnnnnnnnnnnnn

SEQ ID NO: 135128 - DNA, 591 bp, Homo sapiens
  misc_feature (1)...(591): n = A,T,C or G
aatatattaacaatggcaaacgcacataatcctataaaaattaagatatttttaagcacaatatcattgtaaagattctgatgggtaggtaccatatgacctctgtttcataggtgacatgttcatttggttaaaatccctcagtaagtgatagatttggtatttggaaccaatgagcaatgctgtcaactgaaatatgacattattttattcatttaatatgtgtttatggtttaacctcttatgatacaaggcactgtaccaggtatagcagtgaataaaatagaccaagttccttcctttgtgtagcttacaatataatacagggaacatatagattacaagtactcaataatatttagctcttctcctatcctggcacttggaagactacactgactaggtactttggagttgggcccattatgtgactggctctggggaaggaaataaaaaataagaagtgttgyacatgccttcttaggcagtgataagctttaaagtttctacaggctcttcctttttgtgtcaagttgatctagggggctttttnnnnnnnnnnnnnnnnnnnnnnnnnnnnnnnnnnnnnnn

SEQ ID NO: 135129 - DNA, 459 bp, Homo sapiens
ggctcttatttaaatctggaaagagaagccagccatcaaggaaatttaactagggggaacaacacaggttcaatgttcttgagtttcaaaagttgaaaagatcttttctctagcctcataacaagaccaattcatcccagtagaataaatgagagttttttcttttgtaaaaacaaacaaacttaaactggtcttgtgcagatattggattctttaataaatattgttagctttctacagttggaagtaagtaaatactataagtcttttccccacaaccttctaccagtttattttgaaaccaaatctatggccaaattctgctacaaattcagtcatttattaaaacaawacaaacaggaataaatgtttaaaaatggaagcataaaacaatgtttcctcttctgtaaacttggtgaagctccacctctctgcccttttatgcattccatcagcacc

SEQ ID NO: 135130 - DNA, 459 bp, Homo sapiens
ggctcttatttaaatctggaaagagaagccagccatcaaggaaatttaactagggggaacaacacaggttcaatgttcttgagtttcaaaagttgaaaagatcttttctctagcctcataacaagaccaattcatcccagtagaataaatgagagttttttcttttgtaaaaacaaacaaacttaaactggtcttgtgcagatattggattctttaataaatattgttagctttctacagttggaagtaagtaaatactataagtcttttccccacaaccttctaccagtttattttgaaaccaaatctatggccaaattctgctacaaattcagtcatttattaaaacaaaacaaacakgaataaatgtttaaaaatggaagcataaaacaatgtttcctcttctgtaaacttggtgaagctccacctctctgcccttttatgcattccatcagcacc

SEQ ID NO: 135131 - DNA, 494 bp, Homo sapiens
attatagagtagatcaagcacaagaaataatctcagaacttgaagacaggggttttgaaacaattcagacagacaaaaatgagggggaaaaataagcaaatcctatgtgacatatagtacagataaggtgaccaaatatttgagttttctgagtcccaaaaggccgagagaaagtaaaatgattcaaaaccatctatttaatgaaataatagaggaattttcgaagtttagcaaaagatttagatgttcagctatacgaagctcagacattttcawgcaaatacaatgcaaaaaggtcttctccatgacactttttaattaagatgtcaaaggtaaaagacaaagagagaaatctaaaaaggacaaaagcaaatggctagtcacttataaagaaatccccatcaaattaacagaatttctcagcagaaaccttataggccaggagacaataggatgtcatattcaaagtgctagaagaaagaaacaaacaacaa

SEQ ID NO: 135132 - DNA, 494 bp, Homo sapiens
attatagagtagatcaagcacaagaaataatctcagaacttgaagacaggggttttgaaacaattcagacagacaaaaatgagggggaaaaataagcaaatcctatgtgacatatagtacagataaggtgaccaaatatttgagttttctgagtcccaaaaggccgagagaaagtaaaatgattcaaaaccatctatttaatgaaataatagaggaattttcgaagtttagcaaaagatttagatgttcagctatacgaagctcagacattttcatgcaaatacaatgcaaaaaggtcttctccatgacactttttaattaagatgtcaaaggtaaaagacaaagagagaaatctaaaaaggacaaaagcaaatggctagtcacttataaagaaatccccatcaaaytaacagaatttctcagcagaaaccttataggccaggagacaataggatgtcatattcaaagtgctagaagaaagaaacaaacaacaa

SEQ ID NO: 135133 - DNA, 410 bp, Homo sapiens
atttatagccagtctgaggcttgcccctggacctactaaacagtcagaccataagccatagtccatggattagtgaaaatgcagcatggctcactgtagggtggcttggatagttattcatatcatatgaaactctgcttattgttttgaacatgctttactgtgctctgtaagtgacacatctgtstcaagtaggattattttgagaagagaatagcactaggtaacattagtcaggttgcttcatagtattccacattccctactaatatggccctaaattatagcaattctctcaggacttgggggcaagattattactgttattactgttttattactactgagtatttgagctccctatatattctggttattaattctagatgaatcagattggtagtttgcaa

SEQ ID NO: 135134 - DNA, 410 bp, Homo sapiens
atttatagccagtctgaggcttgcccctggacctactaaacagtcagaccataagccatagtccatggattagtgaaaatgcagcatggctcactgtagggtggcttggatagttattcatatcatatgaaactctgcttattgttttgaacatgctttactgtgctctgtaagtgacacatctgtctcaagtaggattattttgagaagagaatagcactaggtaacattagtcaggttgcttcatagtattccacattccctactaatatggccctaaattatagcaattctctcaggacttgggggcaagattattactgttattactgttttattactaytgagtatttgagctccctatatattctggttattaattctagatgaatcagattggtagtttgcaa

SEQ ID NO: 135135 - DNA, 530 bp, Homo sapiens
ctattctttcaaaagaggtgtgcttcactgatatttgaatgtaaaaagctatgtttaaattgaagaagtttctggaaatcttgtcagtaacattgtcctcagaaaatacttaaatataacccaaacatacataacattgagtgaaataaatccagactttcaaaaatagtaaaaattatctagtgataggggtcctgacaggtggctatcttctccctttattatagrggaacaaataaaatcaactcaaaaaagtctattttagtagtaaaaaaaataatctgtcagtagaacgttattctagctccagaggaaaaacagttaattttcaaagagccgattatggaatttccacaatatggtggaaatataaggccagcctcacatacaggccagcctggggaatcatgggctgacatcacagaaaataatgtattctcctaaggaaaaacaaaacatatctttgtattctgggatggcctcactttatctttataacatcttcagttgcagatagcaggaaagaggca

SEQ ID NO: 135136 - DNA, 584 bp, Homo sapiens
aattatttgattttgatttcactttctgcaccttaaaaaaaygaaaatagaatatgctgaaaatagaatatgctttacagagttttgttgttgttttggggtagtgagtgagtgtggttcagttagctatctttatggtacagggccataaagggtacacaatatgtaatctgtaagttttgagttattcttatttctcttctgaaattcaggatgttttccctagactctggatcttttttccattctccagtgaatcctctgtatcctattagaattgcatttgtttcctgtactcttggtcattcacagattgctttcaaagagtaccaaaatagtttctattttaattttacattttggcaacccacacgcaatccagtagagacagttggggtaagcagaagattctgttctcaaaatgtttccttagtagaaatgccggagttgaagtgcgtaaagaggcataaaagaattattttaggtagcaagcaggaaagtgaggaaatttccaaatttaactgttctacccgcacaatagatctgacctaactactgttgaatgttgaaaatatacttgtttt

SEQ ID NO: 135137 - DNA, 548 bp, Homo sapiens
aagcacacaatatcaaaatatcacatgtggaaagcctggataaatatttgtatattttaccagctcagagtagacaaatggtgttagtcctacytagagccatagaaaaggcacggtttagttgacaacacctggtctgaatctttgaaagttattagattaagtgtatgatatgaacaaaggcatggaagtatgggatgtttccatattctttaatatttcagtatttttgaaagaattgcttcaatttcctggggagtctctgaaaatctacttatatttccaaatgtaggtcaaatattcctccttctgtgatatctgaactcaaaataagcaaataatagaacattaatcaaatagaatgccttacttggaggtttattgcttattagaataagaaatctagaatatataaaggaaaagccaggccgatataactattaaaattttacatattcatttggcaaaaaataaatatagtaaatagataaataataagcctggaaaaatttatattcttgttgatagaaaaagggttatttgcaatc

SEQ ID NO: 135138 - DNA, 582 bp, Homo sapiens
ttttcacatgtttaatggccatttatttgtcttcttttgtaaaatgtctgttcatgtcctttgcccactttttaatagggttttttattttttgttgttgagttgtttgaaatccttgtagttcttggtattattcctttgttggatgcagtttgcaaatattttctcccattctacatatatgtgttcactctgttgtttatttttttggctgtgaagaagaattttagtttaagtcccatttgtctatttttgttcttgtttcatttgtttttgagatcttattaataaattctttgcttagggcattcagaatcatttttttctaggttttcctctagtatttttacagtttcaggtcctatatttaagtctttaatcaatcttgagttcattttcatgtgtggtaagagataggggtccagttttattctgcatctggctatccaatatttcagcagtatttattgaataagatgtctttcctcagtgtrtgtttttgttgcctttgtcaaagatcagttggctgtagatatatggttttatctttgtgttctctattgtgttcccttataaaactga

SEQ ID NO: 135139 - DNA, 554 bp, Homo sapiens
atctccaagctttgaatgttctaacacacttttcccaaggcatcattacttatttttcacttctttttgtttttcttaccatattctcttttagaggaattaaagtaaaaataactttaagataaactcaagtatacatcttaagggtgaaaaataatttaagtgtctgtatttgcaaattacatgattgcttatgtacaaaatcctaaggcatctacaaaaaaactagtaaataagtaaatttagtaagaacatacaaggaragtgttcaataatctattgaatttgtttttattataagcaaactattaggaaatgaaattttaaaacatgtgtaattataccatcaaaatgaaattcaagggattaaatttaataattagtgcacaggttatctacattaacaacttcaaaatgttgctaatgaaaattaaagaataccaaaataattggattaatgatgcatcctgcttatagattggaagactcaatatttttataccaaaaatttgcctaataagcacataaacacaaacacacatgcacacacacca

SEQ ID NO: 135140 - DNA, 551 bp, Homo sapiens
acacattaagcgtctgccttcctaattttgaccctaatgtcctgtctctcaattcagtggtctttcagtgatttatcacataatgatttcttaaaatcagtatgtgttggatgctatcttaggcactggcactataaaaaatgaatcagacataatctcaaaaaaaaactcacgtttactcaygtgtaagtgcacgttgtagcaacagtgggacaaggacatttttaatctttttctgtagctgctctcattctattttctgaatttgataaagaaaaagcatgttgttattgttttgttccaagatggcagataagaggcttttagcatacctcagccacttggaaatagcaagatggtgcacaaagatcaactctgtggggtttaattcaagaaggaaaataggagtctaccaaaattgtgaaggatattccagattccagggagcaaaacatgagcaaacagtccctgtgacagtatctggttgataaaagtgagtgaagccccagtacataagagcacaaggattctgctcataaaaatttgaacgt

SEQ ID NO: 135141 - DNA, 551 bp, Homo sapiens
acacattaagcgtctgccttcctaattttgaccctaatgtcctgtctctcaattcagtggtctttcagtgatttatcacataatgatttcttaaaatcagtatgtgttggatgctatcttaggcactggcactataaaaaatgaatcagacataatctcaaaaaaaaactcacgtttactcatgtgtaagtkcacgttgtagcaacagtgggacaaggacatttttaatctttttctgtagctgctctcattctattttctgaatttgataaagaaaaagcatgttgttattgttttgttccaagatggcagataagaggcttttagcatacctcagccacttggaaatagcaagatggtgcacaaagatcaactctgtggggtttaattcaagaaggaaaataggagtctaccaaaattgtgaaggatattccagattccagggagcaaaacatgagcaaacagtccctgtgacagtatctggttgataaaagtgagtgaagccccagtacataagagcacaaggattctgctcataaaaatttgaacgt

SEQ ID NO: 135142 - DNA, 547 bp, Homo sapiens
ttgtattcacctgaagtgtgtgattaagtgatgccccctgccccctgttgagaggaagcttgattctattacctccattgctctcagtgagccagattatctaagacttttgtaggctaaaaattagtccacccgttagtcttgacctacagaagagaaacatcactgaattcckagtgatgcttgtgccttctcaccaacatattaaatggttttggtaaataatgtataacctatgactcctcatggaatacaacatctattagttcttccagaacatgcatagtatatttattctaatataagtacctccattagctttctgctccactaatggatattccaaaatttcatcttttctcagtataagtcacttgttccattctagaagtgatcctaataatagattcataccattttctaggtttcttgccagagtctagggaatcttgggacagtgcaaccaaatcaataatcttcctatctaatgttatgttccaactcccttgatcaagcattttgagaatatattatcatgtgtattaca

SEQ ID NO: 135143 - DNA, 547 bp, Homo sapiens
ttgtattcacctgaagtgtgtgattaagtgatgccccctgccccctgttgagaggaagcttgattctattacctccattgctctcagtgagccagattatctaagacttttgtaggctaaaaattagtccacccgttagtcttgacctacagaagagaaacatcactgaattccgagtgatgcttgtgccttctcaccaacatattaaatggttttggtaaataatgtataacctatgactcstcatggaatacaacatctattagttcttccagaacatgcatagtatatttattctaatataagtacctccattagctttctgctccactaatggatattccaaaatttcatcttttctcagtataagtcacttgttccattctagaagtgatcctaataatagattcataccattttctaggtttcttgccagagtctagggaatcttgggacagtgcaaccaaatcaataatcttcctatctaatgttatgttccaactcccttgatcaagcattttgagaatatattatcatgtgtattaca

SEQ ID NO: 135144 - DNA, 547 bp, Homo sapiens
ttgtattcacctgaagtgtgtgattaagtgatgccccctgccccctgttgagaggaagcttgattctattacctccattgctctcagtgagccagattatctaagacttttgtaggctaaaaattagtccacccgttagtcttgacctacagaagagaaacatcactgaattccgagtgatgcttgtgccttctcaccaacatattaaatggttttggtaaataatgtataacctatgactcctcatggaatacaacatctattagttcttccagaacatgcatagtatatttattctaatataagtacctccattagctttctgctycactaatggatattccaaaatttcatcttttctcagtataagtcacttgttccattctagaagtgatcctaataatagattcataccattttctaggtttcttgccagagtctagggaatcttgggacagtgcaaccaaatcaataatcttcctatctaatgttatgttccaactcccttgatcaagcattttgagaatatattatcatgtgtattaca

SEQ ID NO: 135145 - DNA, 472 bp, Homo sapiens
caggcagatatgagcaggacatttctgtatcttcccagctcatagaagtttgtttaagtggaagcattttaaaaacgaaaaatacatatttactttaactaaaatgattaaaaaatttggagatgtgtctagtttaatatcttattaaatagtgctaacttatgttaaaaataaaataacttggtcaaacattgagcagaatgtgttgcagatataattatgaaagaaaaaatctgtctttcttgccatgatctttgagctctggtattgatgggaggaaatatgtactaamaaggaaatcaaataaacgaacagttaacatacattttgataattataaatgctgtatacaaactagaggaatttgaaatgtctttgaaagggtttagtagatcaaatggtcaagaaatgtgttattttagatgagaaagtgttagccatgcaaaattagagcagaagctattccagaagg

SEQ ID NO: 135146 - DNA, 592 bp, Homo sapiens
tggcagtcttttaagagagggtgttgctttgtttgactcaaagtagtttaaacataaaagaagagtagaataatttttaaaaaggtatatgtggtgttttttcatgctgacacatgagagtcgctaatctcaaatgatcacttagcctctgcaaaatttccagccatcaaacaaatatattcattataatgatttacttcgtgaaccttattgagtcagaaacagagccacagatatttctaaaatatttttaaaactagtcacagtggtgcacacctgtagtsccagttacttggaagcctgaggcaggactgcttgtggccaggagtttaaggctatagtgttctgtgaacatgcatgtcaatagccactgtactctagcctgggcaacatagcaagaccccaactccaaaataaatttaaaaatacaaagtaatttttaaatgcttaaaaatattttaagttgatagaaaaataaacatttaaagtgagagatgcacttaatcaaacattttatttaaccaaagttctgttccatctctgctggcccttttctcacctctcacaacacaaaaagatttgcgggattagt

SEQ ID NO: 135147 - DNA, 461 bp, Homo sapiens
gagttgttcaaagccagttggaggctgtattatccatcccagagaatagcataatgcaaaatccccagagggcatgtgtagaattgataagtaagaggagtttccaaataatctaattaaagtgtttttttgtaaatatgagaggaagrggagagagagaaagaggaagagagggagagagagagcgagagagagagagagagcgagagagagagagagagggagagagagagtgagagactaaatgtatgtgaatattggccacacagaacttaccagcattaggtcgtaacactaaagaagttagacagtgccttcttgtcttattttgctgatactctgcccactccctactaactctgaaagagacagaaaaacataaagtccagaaaagagaaagtgaaagaagcaaggtgatggcctgatgaagtaacagtttatcccccataccctgctgccat

SEQ ID NO: 135148 - DNA, 492 bp, Homo sapiens
atctctcctttcccctgtggctgatacatccctgtatacgtcctctgcccgttcttcttttccccaacccacaacttacttttgaacatccttccaaccatgcaggcctcttctgttgttgctgtgcatattcctcttcctctggagcacttttctcctgggaactggaggtggcacatcctacactgaayaatttctatcacttggccagagagaggggaaagagaagtgagaaaagatggcactaccaggaaagaacccctctccccttttgggttagaagtctgcctagagccacagggctttgccagagcccatcaagcgtgaacatcttcctctgtggaaatacactaagccaagagagtgattgaggtttatggtctcaggaattttagcctgaaaaatgggaggggaaagaaggtggaggaataaggaaaagtgaaacattatcaagactgaggtgatcagacaggtcctcctcatacttaccag

SEQ ID NO: 135149 - DNA, 553 bp, Homo sapiens
gaggctgctctgccccagactccacgttgtccaagcagacagtgatgccgctgaatgctggctcccctgctacttctctgaccaccactcaacaatcttttggagagagaccttcactgcctttgtatttgggtggtcgctagtgtctatgattcatccacccctgttctcactcaactcactggttacttctttccatctcataacttaggctatcagtaggttctgggtgtgtaggtggcatctaaagctgatgaccccactggtctgccccaggccttgataccttcctggacgttaagccctctctgtccctctgccaagtggacatgttttcgtgagttttcccctgacccctctgcctcctggtgtatgaaatggagcccattacctttctgtgctctctacagtcactgctaagttgttggtactggaaactgggcagttagtcagtcaaattaatgyaggaatggtgagggctgagaagatgcaagcgacacagggctgctggggatgagcagatgtgaatgaagacgagaatgaagcgagggtt

SEQ ID NO: 135150 - DNA, 630 bp, Homo sapiens
gcagctcattcatttgcttttcaatgttttcaaggaaagccaccacttagctgatttttcacactgagagagttacaaattaggtaaaataaaggcaagagcagacaagtcaaaacagacaaacaattttttgggaacaagatcaactttgttccctctgaaatcaggtaatttccagcctatgaccaggaatataggctgttgtctttaagatttcaactatgccagggagcaagctcaacaaagtttaacttaaaaatgctgcaaacctttcctactgtgttkaagtcatcttattctgattcatcatttttttggttaatgtaaatctttggatattttccagagttctgataaggttgattctgacaaattttgtgtgaatttgtgtgtgtgtttgtggaggttactggaattccctcttttgttttttttcactggtgttacttccagccctcctcaaaaggtatactattttaaaacaactaaatagcttacatgtactaattttgtacttatgatgttgtcggacagatactgttattttttttttctgttgaaaactgatgctagagaggttaaaacccacacaatctctcacaactagacagtggagaatccaaattgaaa

SEQ ID NO: 135151 - DNA, 605 bp, Homo sapiens
acaaaaaacctgaggctatataatttacatgacttgctcagtccttggcctttttgctctattatctcctccagttatctcatcacatagctctaaataccctctacaggctgatgacccacacgtcttcatcttcctctctacatcctcttctgagatccagactgccttttttctaaatctccatatgaatatgcatttcaaacttgttcaaaaagcctgtttctcatctgaaaatggggataataatgctgttatgatctttaaataagacatgtaaactgtagcatagtgcctgacacataataaatgtctaatatctggtygctattttatcatgattactaccattacattttatgactggacccagatgccacacagcctgaccctccaccatcagagtcacccttcgggttaacaattttcatccttcagtattgtgttttctaatacaaaatcctagaatgttgagattcacactaaacatgtattaagtagcttagaatactccccgggggaccctgaatccaaacatttttttttctttttcgtggaggggaagagtgccagaagtttctggtcagcatcttgctgatgtcacc

SEQ ID NO: 135152 - DNA, 580 bp, Homo sapiens
tggtgaaatgttttaaagccctcaccctccttatcacacccatatctctagtaggccaggctagcattcatagcaccatttttaagctagagaagtcaatgacatggaggctaactttttgcttaaagttatccaggttaaaagggctgaaggtggggtcagaatcctttggtgacattttctttttattactctgaaatgaggagttgataagagctccaactgtttaccgcctaaataccccaaccagtagctcttcatctgcctgccccctccactattcattccccacctccatctgaatatttctaactccatcccaagtccctgcttttgcctagtctcacaccatctctatgctctctccagcagtgacatcacttcagtgcataacatgccaccttcgcacacggacagaccgctgtagaagaggctttggtgtctgtactgctcagaagggcgaggcatgcatgctcttaaggatttaccagcgtaagttagagggtcagggmaggtgttgtaagattcttagaattcttaggatagtgcttcagcaatttcacatctcaagagaagaacc

SEQ ID NO: 135153 - DNA, 573 bp, Homo sapiens
attatagaatcctaggggtttcgcctcctgccagacctgttttgtccatttcttagagtaaggaggctaagatccactttactttcttttacccattactcggcaaaatcatcaggctagataagggattcattactggaggtccatggataaatttcatgggaaccctgacctcctgaaatcatatacagtgtttgatttatgtttgtacaggttatctttcacaagatttttttaattggagaaaatgtgtacaaatttattaatgtgtacatggggaggaccgcagcatgattatccctatctttctcaagattaccaagagtccatggtccaaaaaatgttaggaaccactaggcaaraataaggtcctgtagtgaagcccccagccccagagaatattctcaagactgcatcctctaagcacctctttttgtatctggcagcgactgaaataatgtgttatgaatgtaaaaaatatcatcttgggttatgctatggtgtcatgacatcctgctccctgaagcataaacagtcctgtgcagttgagaacttttacatccttacaaggaa

SEQ ID NO: 135154 - DNA, 591 bp, Homo sapiens
gtgtgtgtgtgtgtgtgtgtgtgtttatcttggctggtgtttgttgaaattcctgaatatgtgtatttgtagttttcaacaaattaagacattttttggccattatttcttcaaatacatatatgccagattgtttgatattttcctttaggtcactgaatgcctgttktttttctttttttagtttcattttagattggtttttgctatgtcatcaagttcacaaatctttttttctgcagtgtctagcttaatgataattctattagatggaattctcattttagatattctatttttttatctcagaaatttcatcaggttctttttcatatcctccatctctcttcatatgttcatgtttaactttagatccttaaataccttgaaaatatttatgaccgggcatggtggctcacacttgtaataccagcactttgggaggccaaggtgggcagatcaccagaagtcaggagtttacgaccagcctggccaacatggcaaaaccctgtctctactaaaaatacaaaaattagctgggcatggtggcacacagctgtagttccaggtattcaggaggctgaggcaaga

SEQ ID NO: 135155 - DNA, 541 bp, Homo sapiens
aattaatagtgagaatgacactagcaagtgtcaccagaattgcaacctattattttttccttaaaatctttttaaatcacaagctgaccaagctcatcaggagccatgtccctctacagggcatatttagtctatccctgtcttctccattagtttccattgccagagtcccacaactctgtcaccagctataagcctctctcttcttccaacagcaatgcagccacttcccaaaggagctaattgaaaacacaaatcaggctctttggcaggattctgtgctgttggtagatttttttaatttgtttttttccccatgaatcaaaaatttgctgactttattccytcttcttcctcacagtggtcctaatttagaaagcatagacacagaaacaagtcccaaagccagcctgaattaccaccttaaacatgtatgaggatggattcaaagccaaccagcacctgccctgaaaaagctgtaggcacctggccttccaaggtgtcctggaccccacctgtcccactggacttgccatttgtg

SEQ ID NO: 135156 - DNA, 532 bp, Homo sapiens
ccttcctttgcacattgatgtctgaaggaagcccccaggagctttccttccgtggttctcaaacttcagagtggctgagaatcacctgaaaggttattgaaacacaggtccctggtcccmactcccagaaattctgaattagtacatctagggtagagaggagactgcatttccagcaagtttcaccagcatcaggtgatgctgatgctgatgttgctgggtccacagaccactctttcagaaccactgctctgatgccaggcagttcagggggccacaggtttgaggagcccaaagatagcaagacttaggaccatcttttaactctttcagccaaaacaagaactctttttgtgttttacaaaaacctgcatgagatttcatttgggtacggttcctgcagtaaaaatggtttgacaaccacttctctaggaggcatcaaaacttgggattgtgcaaactaaagacagagaaagagtaacttacctcaagaatatcagaggcaagaacacattcattaactcagcaaaag

SEQ ID NO: 135157 - DNA, 595 bp, Homo sapiens
tcctgaaacaacatttatgtagctggcttaactatcaattaactgggtgatcttggcaatgatattcagttcagtaagctgcagtttcctcataacagagtgcctatttcatcggattactggaaggattaaaagtgctaacccaaataatctcacatagttcttgacactcagcatgtactcagtaatgtaagctattattgtcagtaattaggaacatcagttcctcattagagcctccttctaggaaaaatactaaacagcttgagggcaaggacagtgtcctgaattttctcttggagaatgggtgagtgtattttgcatgtagggtcttcaggggaatgaaaagatgtttttacaaatatgtctcccccaagagaccgtttctaagcgatctcaatagccccaggtgttaagtgtcraaggaaatgtgccaagttttataaggcaaacatgctggtctgggcactggctgctttaaaatgacccttgataaaatgtatgaattcctgagcatctcataatcagaatctccaggagtataacacacaatgttatttttaataagctttctgagttaatgctgttattccac

SEQ ID NO: 135158 - DNA, 402 bp, Homo sapiens
taagcagttatcaagctggatcctgcttttgtatccagttggatacattgtgttctttccttggaatgtaaattagaacaatatggaagtaattttatttaaaaaatttcctttaattattgatgtgacttttgttagtatcatcagtttcttgtttctctcttattccttttgtgacccttttgttttctgtggcttttgggtatttggttcttctaytgaatttttctttctgttcctgatgttatttttagtgctttctcaatagagtcattatgcatctttacattatcaatatataccttcacatgttatattacttcacaaaaatctttcatcagcataattcctccctcatattgtattttgaaatataaaattttctttttatatttctgcatc

SEQ ID NO: 135159 - DNA, 631 bp, Homo sapiens
cttctaacagtgccctctgttgagtgttcacctgggatttccaggactgcagctgctgtctctttataaacccaggcctgggtcacagggtggggagaaaacaatgagtgttttggttgtttggtgatatccggtgccactttgtgccgcttgttgcaaattcagtcccatttcctgtgaactgcctccttgggcttgactccccagcaccatacaggggcttcagggacacttggaaaacaatctgtgctctgasctcggtgtccctggacctatcaattgcctaaggcagggagactgctcatacttcaagtagtggcctggggacaagatggatcaggaagtagaaaatagaaaaggatgggggtgaggagccagggcaggagaggaaggttataaggaggaacaatgagagatggacagctttttattctctacagaatgggctgtttcctagacgtcacgggatcatcatgtggtggagattgcaagaggccagtttgggggtgaggagggattgccgagtacatattttatcactgtgatgtgactcaagggcgtcattccctgtaaacaacttttgagtaggagggttttctctggataagaaattaaccagttagcagtcaag

SEQ ID NO: 135160 - DNA, 560 bp, Homo sapiens
atgaatgcagtctgtaagactaaaggcaaaagtaattttatataagcattgcactctagttgttaaggtgtttgctactgggatatgagttaatcattctcatacagatggaccctgacttatgatsgtttggctaatgatttttggactttatagtgtgtgaaagcagtacacattgagtacaaagcatgctttgaattttggtctcttatgtttatttttactattatagaataggctttgtgttagatgattttgcttaactataggctaatgtaaatgttctgagcatgtttaaggtaggcaaaagtaagctatgatgtttggtaagttaggtgtattaaatgcatttttaacgtgatatttccaatttatgatgggtttatcaggatgtaataccatggtaagttgaggagcatctgtattgttatgcatgtatgctggagtcagatacctaagtaaatgggtgatagatggttggatccaggtttttcattgttggagctggaattacagatcaacaaggggaggaggaggctagagtgattcaagtggtaatg

SEQ ID NO: 135161 - DNA, 360 bp, Homo sapiens
aggttctgtcccactgctctcctgaagtttgacttctgccagcctcaccttctgtgccctctgtcttcacaactgttgaccaccctctttgcagtctcctcattcctaatggttggcatttttttaatgacagtagctaaaaggagattattgtctagcttagatctttttttttcctttgttactttattttttctcttcattcttgattmctccagaaatcaaaaacatcatagggaagatttagggaatctttaaagcctttccaagcaacatagtaacagcatacttctaagaaagttaagttctgtcttcaggtaagccagggaatttgaagagttgagtagagatacttcgttg

SEQ ID NO: 135162 - DNA, 360 bp, Homo sapiens
aggttctgtcccactgctctcctgaagtttgacttctgccagcctcaccttctgtgccctctgtcttcacaactgttgaccaccctctttgcagtctcctcattcctaatggttggcatttttttaatgacagtagctaaaaggagattattgtctagcttagatctttttttttcctttgttactttattttttctcttcattcttgattcmtccagaaatcaaaaacatcatagggaagatttagggaatctttaaagcctttccaagcaacatagtaacagcatacttctaagaaagttaagttctgtcttcaggtaagccagggaatttgaagagttgagtagagatacttcgttg

SEQ ID NO: 135163 - DNA, 492 bp, Homo sapiens
caagcaatagtcctgtcttaagcacagaatttaaaataaagtttacctccattacagacaagaaaacaaaaaattatcggccttataaattttagtatgagtacttaaattaggtacttcacagatttattttcattaattaatgaacgaaagtaactggtatttataagaaatataacattgtgttttaaatagttytttaaaatacacatttactggtaagtatttttacatatatttaaattaaaaataataacattccttcatacacacgagctatttcaaaaaatgtgagtaccctttccatgtgaacatttttaaaataaatatttacaagaggagagaataattttcctatccaaagacaattcctatttctctcttactcaacagatgttcgtctcattttttcagctaattcttttctcacttcaatgtgtttttctaaattttgcacttcatgtggaagattgatgtcccaaacggtcaagc

SEQ ID NO: 135164 - DNA, 464 bp, Homo sapiens
caacttacagtgaccctagcaggcaaagccttaatttttacaagattcaagtctagtaggaaaaataaaaggcatattttattttcatatggttcaagatggacccagcctttgcagtctcaaygggattgatcacaggagcatccttgaacatccagcatgaccaaaggatgacaatgctggccaggtggggtcccctgctgcagccggcagctccaactgagaatcaggtgtgttgagactggggcaggagttggttctctagaggaaaacaggtcagtgtgtgttatcagaagaaagagaatggatatcgggtggcaaacatttatatatctgttgtcaaatagatatcaatatctgtctttcagtgcacaatctccaacaaaataggtattagcataaaaaaaatctatgctgaattaacagcaacaatatctttgaggcacatggcagaaatatgattt

SEQ ID NO: 135165 - DNA, 420 bp, Homo sapiens
agaggggtgagaaataaaaaactacatattgggtagtatgcacactagtcaggtgatgggtgcactaagatctcagacttcacctacacaatttattcatgtaactaaaaatgattcatactccagaagctattgaaataaaaaaaaatcaataaatagttaaataaacaaaaaaaaaactgaacttaaaataaaattaaatttaaaaaaagcctgaccagaaaagatgaacaagaaaaatataatatatgtggccccttaattttcccaagagtctcttacctttcaagctggagcggcatctcagctgacacccctgcagccacctgtcttgcagcctttgatgtctcagcctrccaaatccaaccagctgttctccttattcatctagagataggtttcctttaccacttcagttga

SEQ ID NO: 135166 - DNA, 579 bp, Homo sapiens
gtcatatgcttaaatgtggtcaggcgactgagtctgaccaatggaatgggagtggaagggatgtgcaccattatcaggcctggcccataaaaacctttctcatctgaaattggatggaaacatgaccttggataccttttgttgaagatagtggagccatacacagtgagtctcttaatcactgaagggatgatgcttgacaatcagaagtatcagttttggactacttgtgaagtagaaatacacttctagttaaatcacagaagtgtgtgttttatttattatagtagcccgtgcacaactctacatgccaggtcctattagtaccttatttaacatatgaggacacaatccaggagtcaggtggcagctcagcagcagccttgccatccaaacccaggcagtctggctgcaaagtccaggctcctgagccttacactatcttgcctctttcttccttgcaggcagagatacaagatcattgtttgtttctcttttaagaaggtmatataaccctgtgacagtgggtaatccttcaaaatacacatttatattcttgggagcagacttttcttgcta

SEQ ID NO: 135167 - DNA, 582 bp, Homo sapiens
atgggttcaccacatcctgcaaaatacatgcctcaaatacagcatctggtcctccaacatgcagatgcaggaagtggaaattttatatatagaactattaccatggtgtctttggaacttgtgtgaaccatcacgctcctaattgccagatgccatgcagctttgagttacatttaggaaattatcaacgctgccaaattcacatttaaagacaataacaaggggcacagcaatatcaagtaggctygcaaatcaaatgcaaaatcaaatgaaattcagccacagaccttctgttttcatgtttgttatgctttaccaggtaactgaatgtgaaaataaacccatgaggattctgtattttttaatgtagagctacaggttacaaatcagtcagcttttggcaacacaatagcgtttctgaatattaattgttaacaatctctgagcattgaaatgatctgaaatatcttagattttaaaataaaatcttcaactttctctaggtgattaatgtcggaatagaaattcaccaaacttactctttaaactgaacctttagaaaaactcttgcgaccctagccc

SEQ ID NO: 135168 - DNA, 582 bp, Homo sapiens
atgggttcaccacatcctgcaaaatacatgcctcaaatacagcatctggtcctccaacatgcagatgcaggaagtggaaattttatatatagaactattaccatggtgtctttggaacttgtgtgaaccatcacgctcctaattgccagatgccatgcagctttgagttacatttaggaaattatcaacgctgccaaattcacatttaaagacaataacaaggggcacagcaatatcaagtaggctcgcaaatcaaatgcaaaatcaaatgaaattcagccacagaccttctgttttcatgtttgttatgctttaccaggtaactgaatgtgaaaataaacccatgaggattctgtattttttaatgtagagctacaggttacaaatcagtcagcttttggcaacasaatagcgtttctgaatattaattgttaacaatctctgagcattgaaatgatctgaaatatcttagattttaaaataaaatcttcaactttctctaggtgattaatgtcggaatagaaattcaccaaacttactctttaaactgaacctttagaaaaactcttgcgaccctagccc

SEQ ID NO: 135169 - DNA, 453 bp, Homo sapiens
atggaacagaaaggtaccacaggtacactaagggtaaagaaagtacttcctgagggagtratcaataaagctaagattcctacaattgatcaatgtccaacaggagaccttgggtttttcaataaaagccattaagcagcaacagtgatctcaatcccataaaaggattccataaaccaaacatttagttggtatagataaataactgtaagataccttattaaatgtcccactattaaaattaagctttacaattatctaccaattggacaatgccaccaacacatgacagtattagtgttcttgttttataaacgttgtcgtgtgtgtgtgcgtgcacacgtgtctttgtatatgaatgtgtatgtatacatatataacaaacaggggtgttattgaaaaacatttaatgaagttaatgtaaagtattaatgtccaaagcaaaaaattaag

SEQ ID NO: 135170 - DNA, 451 bp, Homo sapiens
tttaatacaaatgttgtgtgaatggaacagaaaggtaccacaggtacactaagggtaaagaaagtacttcctgagggagtaawcaataaagctaagattcctacaattgatcaatgtccaacaggagaccttgggtttttcaataaaagccattaagcagcaacagtgatctcaatcccataaaaggattccataaaccaaacatttagttggtatagataaataactgtaagataccttattaaatgtcccactattaaaattaagctttacaattatctaccaattggacaatgccaccaacacatgacagtattagtgttcttgttttataaacgttgtcgtgtgtgtgtgcgtgcacacgtgtctttgtatatgaatgtgtatgtatacatatataacaaacaggggtgttattgaaaaacatttaatgaagttaatgtaaagtatt

SEQ ID NO: 135171 - DNA, 448 bp, Homo sapiens
aatacaaatgttgtgtgaatggaacagaaaggtaccacaggtacactaagggtaaagaaagtacttcctgagggagtaatcaataaagctaagattcctacaattgatcaatgtccaacaggagaccttgggtttttcaataaaagccattaagcagcaacagtgatctcaatcccataaaaggattccataaaccaaacatttagttggtatagataaataactgtaagataccttattaaatgtyccactattaaaattaagctttacaattatctaccaattggacaatgccaccaacacatgacagtattagtgttcttgttttataaacgttgtcgtgtgtgtgtgcgtgcacacgtgtctttgtatatgaatgtgtatgtatacatatataacaaacaggggtgttattgaaaaacatttaatgaagttaatgtaaagtatt

SEQ ID NO: 135172 - DNA, 453 bp, Homo sapiens
atggaacagaaaggtaccacaggtacactaagggtaaagaaagtacttcctgagggagtaatcaataaagctaagattcctacaattgatcaatgtccaacaggagaccttgggtttttcaataaaagccattaagcagcaacagtgatctcaatcccataaaaggattccataaaccaaacatttagttggtatagataaataactgtaagataccttattaaatgtcccactattaaaattaagctttacaattatctaccaattggacaatgccaccaacacatgacagtattagtgttcttgttttataaacrttgtcgtgtgtgtgtgcgtgcacacgtgtctttgtatatgaatgtgtatgtatacatatataacaaacaggggtgttattgaaaaacatttaatgaagttaatgtaaagtattaatgtccaaagcaaaaaattaag

SEQ ID NO: 135173 - DNA, 450 bp, Homo sapiens
atggaacagaaaggtaccacaggtacactaagggtaaagaaagtacttcctgagggagtaatcaataaagctaagattcctacaattgatcaatgtccaacaggagaccttgggtttttcaataaaagccattaagcagcaacagtgatctcaatcccataaaaggattccataaaccaaacatttagttggtatagataaataactgtaagataccttattaaatgtcccactattaaaattaagctttacaattatctaccaattggacaatgccaccaacacatgacagtattagtgttcttgttttataaacgttgtcgtgtgtgtgtgcgtgcacacgtgtctttgtatatgaatgtgtatgtatacatatataacaaacagggktgttattgaaaaacatttaatgaagttaatgtaaagtattaatgtccaaagcaaaaaatt

SEQ ID NO: 135174 - DNA, 590 bp, Homo sapiens
atgttatcagcagaggaatgatggaactgagtgtagcaaagacactcaggtttctgaagctccaggaattcacttataaaggtaactattagacctcatacctcttttacatagccattttggaaaatgtctttctggaattccaatttaaatattaatcggatcaagcaaatatgctacattttgccttaaaaacctacttgagtaaagactttcaccactctagatacggaaaaaaggaaactgagctgagacattgagtagtcacagattaagctgttagcatcaaatatactcccaagtgagcctaaatatctcacgattccagattattgatacttggctgtctttaaattcttcttcaataaccctttttataagctcattcagataaaatgtttagaagaatcttattttacaagataagattcttcacataatgttgcctctgcagaaataatattgcctgggaatatgaaaataaaaaaataagatggtagtgggtgatcatgaaaastcaaaactgtatgaacttaaccctcaagttttggggttactttaaaaattgtttgttcatcttcaaaatcaca

SEQ ID NO: 135175 - DNA, 575 bp, Homo sapiens
agacaatgagtaaagctgataaacccctagtaagattgatcaaaaaagaaacaatttaccaatatcaaggaggaaaaaatattacagatcctaaagatacttaaaatgtaataaatgatagtatgaacaattttatgtaaataaattcaagaattttgatgatatgctcaatttcttaaaacataaagcaggcaaaagaataaacaaaaaatctgatttttcatatatctagtaaaaaaattaaattcattatgaaaagcttttccatcaaagacaaacaaaataaaaacaaaataamagtttcaagactaaatggtttcactggtgaagtcagttaaacatttaaggaagaaataatatgactaatacatatatgctttcagtagacagaaaaggaacaaataattccaattatactttttatgaggctagtgaaatcctaacttttaaaatgtacaggcattataagaaaattacaggtcaatattcatcatgaacatagacacaaaaaacccttaagaaaacatcagtaaaccaaatctggcaatatattaaaaatggacctataatgagta

SEQ ID NO: 135176 - DNA, 458 bp, Homo sapiens
tatacattagttttcctctttctaccatgtatgacctcttttatttgtgttttactattgtaaacatatcaaatatctttaataaatagatggtgtacaaatcacttcatcagacagaaaaaaattgaaaaaatagggaagtagagaaataattaaatacattttgaggtttgttctttgggacattcaacaggggaatatgttatttcattgttaaaattcatcttgtgtaaaacaaacaaacataaaagatgaagaactttatcagaggtcctatagaggtattacagaaaataaatgtttccccaaaccactctaaaagcggttaactatttctctaaactttcttcttttttwaattttatttaactgatggagagttgctagaaggggaaaaaaaggtttcagttaggtaacaattgactatgtcttgaggctatacatccagttgttaaatt

SEQ ID NO: 135177 - DNA, 599 bp, Homo sapiens
ttgaattcccattgtctcactagtttgtrgtttcaggcaagtcacctactcccttttaactcagtttccccacccccaaaaatgggcctatggaaaaattccacaatgtacatgacattgttttgtccattgaggggtagtatttaatgtattattacagtatttctgcctggaccttgccctgtttctcatgctaaatgttttctaccctcatgatgcatacttgaccgtcctcatcagaatgcttttcaacattgaactgcaggaagtggcagtatttatttctctgataaaatacctggtttttaaagaaagcttggaataagacaagcctgagttcctttacttattacatgtagattccaagaactgaaaaacactgagagtatttctaagacgttttctcaaactttttctcttcagaagaaagtaggggcagtgatatcttatgggattgtgatatggcttattagggctgtggcaggtaatgaataataacagtaacaacagcaggagcagtcatgtgacaatgaaggctggcattcactaagaaattatcaagtaccagtctggtgctaagtaattttatgcatgtctca

SEQ ID NO: 135178 - DNA, 599 bp, Homo sapiens
ttgaattcccattgtctcactagtttgtagtttcaggcaagtcacctactcccttttaactcagtttccccacccccaaaaatgggcctatggaaaaattccacaatgtacatgacattgttttgtccattgagggktagtatttaatgtattattacagtatttctgcctggaccttgccctgtttctcatgctaaatgttttctaccctcatgatgcatacttgaccgtcctcatcagaatgcttttcaacattgaactgcaggaagtggcagtatttatttctctgataaaatacctggtttttaaagaaagcttggaataagacaagcctgagttcctttacttattacatgtagattccaagaactgaaaaacactgagagtatttctaagacgttttctcaaactttttctcttcagaagaaagtaggggcagtgatatcttatgggattgtgatatggcttattagggctgtggcaggtaatgaataataacagtaacaacagcaggagcagtcatgtgacaatgaaggctggcattcactaagaaattatcaagtaccagtctggtgctaagtaattttatgcatgtctca

SEQ ID NO: 135179 - DNA, 536 bp, Homo sapiens
cttttcaacattgaactgcaggaagtggcagtatttatttctctgataaaatacctggtttttaaagaaagcttggaataagacaagcctgagttcctttacttattacatgtagattccaagaactgaaaaacactgagagtatttctaagacgttttctcaaactttttctcttcagaagaaagtaggggcagtgrtatcttatgggattgtgatatggcttattagggctgtggcaggtaatgaataataacagtaacaacagcaggagcagtcatgtgacaatgaaggctggcattcactaagaaattatcaagtaccagtctggtgctaagtaattttatgcatgtctcatttaatcatcatgacaactttatcagataatatggaattccccagacagtgtctgtcacataatgtcatcaataaatgttaaagtgatttttttccttctggtgttcagggccctctgtggcctgacactactgttcccatcccaggcagccacctgtgactcctcagcaggaaccctgaa

SEQ ID NO: 135180 - DNA, 565 bp, Homo sapiens
cattgtccctttatgtgttttgagttattctcaaattttgaataattttaggattattttagtttcctgtgtatttgacctttactaattactcttcagtaactccttatccccattgatactttgactaaaagcctagtctgtcttttattaatgaagcaacaccagcttctctttttcatccttttactttaaacatttttgtgaacttgtattttaggtgtaggccttgcaagaacaggttaagagttaaattttrtttttatatccaatatgacattctgtgtcttcttgttgttgtggtaagttcatttctatttttgtgactattgacctatttgaatttatctatcattttattgttttctatattttcagcttttcctatattctctttttttctctctttcttcttttagactgacttggtttttaacatttcatcccccaacctctactctttcagaaattattcccggttttgttgtttacttggtggttatccttagaatattaacatgctgtaaaagtcaggatgctggtaggaaattaatcgcttatatga

SEQ ID NO: 135181 - DNA, 303 bp, Homo sapiens
ggaactcattgggaccctcaagtgatgtgtgatgcagttcttagggtttatggatgtataggaatctacactcttgctaggcaagtcacagatagttgtatagtatgcagaaaaaccaataaataaaacttaaagactattcagggaaagaaacccagggttraggccattccaaagtgtccaagttgactacacagaactatccccagtaggccaccttaaatatttactagtcatagtagatcatctcaccctctgggtagaggctatccctttttcaaatgcaacagctaacaatgtggc

SEQ ID NO: 135182 - DNA, 502 bp, Homo sapiens
cctaggtttaaatatcaccccagcatctctactctctggcactacagcttcacttatcatctggtttcaccccactctgacatcatttcctgggtrtttgactgggtttagcagaatgacattgctgagtgcctggcctcaattcttatttaccgcctcagtttaccaccagatactatcttccatgaccaacctggggggagcttgattaatgtgacacttgattttggcatccttgagcttgttctgagccacaattaatacagctgtcatagctcaataaaagagctcaatttcttctaacgtcacccccctagagcctgtgtctaaagtggaagtctctgtacacccatatttttataacttgggacctgtggacatggaaagaaatctgctgacacaggagtccatggacctccataaagaaacactgtaaatttcagtcatcacttgacaccaacaatattgtgatcttgttataggttgaactgtgtttctccaa

SEQ ID NO: 135183 - DNA, 502 bp, Homo sapiens
cctaggtttaaatatcaccccagcatctctactctctggcactacagcttcacttatcatctggtttcaccccactctgacatcatttcctgggtatttgactgggtttagcagaatgacattgctgagtgcctggcctcaattcttatttaccgcctcagtttaccaccagatactatcttccatgaccaacctggggggagcttgattaatgtgacacttgattttggcatccttgagcttgttctgagccacaattaatacagctrtcatagctcaataaaagagctcaatttcttctaacgtcacccccctagagcctgtgtctaaagtggaagtctctgtacacccatatttttataacttgggacctgtggacatggaaagaaatctgctgacacaggagtccatggacctccataaagaaacactgtaaatttcagtcatcacttgacaccaacaatattgtgatcttgttataggttgaactgtgtttctccaa

SEQ ID NO: 135184 - DNA, 502 bp, Homo sapiens
cctaggtttaaatatcaccccagcatctctactctctggcactacagcttcacttatcatctggtttcaccccactctgacatcatttcctgggtatttgactgggtttagcagaatgacattgctgagtgcctggcctcaattcttatttaccgcctcagtttaccaccagatactatcttccatgaccaacctggggggagcttgattaatgtgacacttgattttggcatccttgagcttgttctgagccacaattaatacagctgtcatagctcaataaaagagctcaatttcttctaacgtcacccccctagagcctgtgtctaaagtggaagtctctgtacacccatatttttataacttgggacctgtggacatggaaagaaatctgctsacacaggagtccatggacctccataaagaaacactgtaaatttcagtcatcacttgacaccaacaatattgtgatcttgttataggttgaactgtgtttctccaa

SEQ ID NO: 135185 - DNA, 502 bp, Homo sapiens
cctaggtttaaatatcaccccagcatctctactctctggcactacagcttcacttatcatctggtttcaccccactctgacatcatttcctgggtatttgactgggtttagcagaatgacattgctgagtgcctggcctcaattcttatttaccgcctcagtttaccaccagatactatcttccatgaccaacctggggggagcttgattaatgtgacacttgattttggcatccttgagcttgttctgagccacaattaatacagctgtcatagctcaataaaagagctcaatttcttctaacgtcacccccctagagcctgtgtctaaagtggaagtctctgtacacccatatttttataacttgggacctgtggacatggaaagaaatctgctgacacaggagtccatggacctcmataaagaaacactgtaaatttcagtcatcacttgacaccaacaatattgtgatcttgttataggttgaactgtgtttctccaa

SEQ ID NO: 135186 - DNA, 581 bp, Homo sapiens
aggaggagagaaacaagactagctgcaaagtgagattgggttgatggagcagttttaaatctcaaaataaagagctttgtgcttttttgattatgaaaataatgtgttaattgtaactaattgaggcaatgaaaaaagataataatatgaaagataaaaatataaaaaccacccagaaataatgatagctaccattttgatacaatatttctacactcctttctatgtatatatacagacacagaaatgcttatatttttattaaaagggattgtactatacctaagctgctttttctagttagtgatatatatggacatctctccatggcaacgagtaattgcagttatattaagttcatgatayttcacaataagggcatatctttgccctttttatttaatcaattcttaattggtgaatgtttgtttccagtttgttgttgttattaacaatgttcccataagcattcctgtacaaaaatgttcacacatttgtctgattttttcttcaggataaaacccaggaggtagaattgctgggttgatagaagagaaaggatgattggcaaattaaagctt

SEQ ID NO: 135187 - DNA, 208 bp, Homo sapiens
cagggacactgaaaagttcaccctctgcagtgtaacttccactcaagtaaagtagagcctcaggaaaaaaagtcctttcctcaaatayaccaggaagactttacacaccataataatcttacatagtgcaaaggattcttcaagagtaatgaagaagggaactggcatttgtaggaggaccactatgagccattcatactagtcagag

SEQ ID NO: 135188 - DNA, 469 bp, Homo sapiens
tttcttttcctcaggaataccaattattcttaggtttggtcacttaacataatctcaaatttcttggaggctttgttcattctttcttaytctttatttctaaatttgcttcctgtggccatgttgcatttgcctatgacatagacttattctctcatgtaccactaagttcttccatcaatgcaatttctgtttgtagaactcatttcacagaaaagaagtaaagcaatcagctgacgcttgtgaaaggaactactcctattattttcataccatggataagtagtcagccttatacaatgataacttgacctattgaaaacttatttgcactttccctcaattaaccatactagactgaagatctgccttgtcttattttgtgtggtatatgatctgtgacaataatttatatagaatgctgcctcttccatagctaaatgcataggtctagaaattgaggaggagg

SEQ ID NO: 135189 - DNA, 617 bp, Homo sapiens
agtgaaggtagggtagaggtgcagggcagaaaatgaagggaactggtcaaaggcatttcaccatggagcagaatatcagccacatcctgcactaacagatgattccctcttttccacctacagaacggaagtcaaatctcttaggaagctgtgaggggattctcccagcaaatctagyagcacaacataaaggagaaagaggagagcatgggatccagaaaacatgtgtttcaacctagaaagtgttaaaagttttagaaaaaagacttgtacagtaggcctgaaccatgaaaatagaaaagagagaattcatagattctcagataaatatgagaattctgaagaacaaattgatattctttttgtagtggatccaatggagcagcttgaaaattttacagaacagcttaaaagtatacaccgggggaaacaaataattaaacttattaaaaaacaaaagcaggaagaaaaatctaagcacaaacatataaaggcaatatttatctactcatgatataaacaccaagtttattgtatctcaaattatgactattataaatgaactattactatattacgttaaatgacagcatggtaggttgatttatgtttgtaga

SEQ ID NO: 135190 - DNA, 617 bp, Homo sapiens
agtgaaggtagggtagaggtgcagggcagaaaatgaagggaactggtcaaaggcatttcaccatggagcagaatatcagccacatcctgcactaacagatgattccctcttttccacctacagaacggaagtcaaatctcttaggaagctgtgaggggattctcccagcaaatctagcagcacaacataaaggagaaagaggagagcatgggatccagaaaacatgtgtttcaacctagaaagtgttaaaagttttagaaaaaagacttgtacagtaggcctgaaccatgaaaatagaaaagagagaattcatagattctcagataaatatgagaattctgaagaacaaattgatattctttttgtagtggatccaatggagcagcttgaaaattttacagaacagcttaaaagtatacaccgggggaaacaaataattaaacttattaaaaaacaaaagcaggaagaaaaatctaagcacaaacatataaaggcaatatttatctactcatgatataaacaccaagtttatygtatctcaaattatgactattataaatgaactattactatattacgttaaatgacagcatggtaggttgatttatgtttgtaga

SEQ ID NO: 135191 - DNA, 646 bp, Homo sapiens
tcagattattctcagacatcagggaagggatgttaaactaaaaccagcaaattaagaggactcctgaacttcatttgaaattggcttaacaggcaaagtgtgggggcaaggtactcatcaacrtaatgccttacctttacagagatgccttacctttacagctcatgatgaacctggaatattttcatttgccagaacatagcaaaatgtttaaagaatgatgaagagatgtaaaagcatttatgattcagtttcagggaattcccacttgccaaatcttggataacttgagcatataataaataatattttttaaatataactcaccaaataagaattcataagtccacctagatagaaagaatagatggaagggaggaagagaggaagggaagaagggagggagggaagaagggagagaggggaggtaggtaaaatcttttgttacagtacaatggcaaaaagtaaatgtgaaaaagcatagaattaaaaatcaccatttagcaaacataatcatctattcaggcaaggatcatcagccagattgtttaattagattgaaagtttgaaaagtaacagggatttacataatctcaaagtatcttcccacaaggttcttattagttacaaaaggagtagtaatacc

SEQ ID NO: 135192 - DNA, 646 bp, Homo sapiens
tcagattattctcagacatcagggaagggatgttaaactaaaaccagcaaattaagaggactcctgaacttcatttgaaattggcttaacaggcaaagtgtgggggcaaggtactcatcaacataatgccttacctttacagagatgccttacctttacagctcatgatgaacctggaatattttcatttgccagaacatagcaaaatgtttaaagaatgatgaagagatgtaaaagcatttatgattcagtttcagggaattcccacttgccaaatcttggataacttgagcatataataaataatattttttaaatataactcrccaaataagaattcataagtccacctagatagaaagaatagatggaagggaggaagagaggaagggaagaagggagggagggaagaagggagagaggggaggtaggtaaaatcttttgttacagtacaatggcaaaaagtaaatgtgaaaaagcatagaattaaaaatcaccatttagcaaacataatcatctattcaggcaaggatcatcagccagattgtttaattagattgaaagtttgaaaagtaacagggatttacataatctcaaagtatcttcccacaaggttcttattagttacaaaaggagtagtaatacc

SEQ ID NO: 135193 - DNA, 646 bp, Homo sapiens
tcagattattctcagacatcagggaagggatgttaaactaaaaccagcaaattaagaggactcctgaacttcatttgaaattggcttaacaggcaaagtgtgggggcaaggtactcatcaacataatgccttacctttacagagatgccttacctttacagctcatgatgaacctggaatattttcatttgccagaacatagcaaaatgtttaaagaatgatgaagagatgtaaaagcatttatgattcagtttcagggaattcccacttgccaaatcttggataacttgagcatataataaataatattttttaaatataactcaccaaataagaattcataagtccacctagatagaaagaatagatggaagggaggaagagaggaagggaagaagggagggagggaagaagggagagaggggaggtaggtaaaatcttttgttacagtacaatggcaaaaagtaaatgtgaaaaagcatagaattaaaaatcaccatttagcaaacataatcatctattcaggcaaggatcatcagccagatkgtttaattagattgaaagtttgaaaagtaacagggatttacataatctcaaagtatcttcccacaaggttcttattagttacaaaaggagtagtaatacc

SEQ ID NO: 135194 - DNA, 455 bp, Homo sapiens
tacataatctcaaagtatcttcccacaaggttcttattagtyacaaaaggagtagtaataccattatagtagaaataactggcaaacattatctaaaccaagtgatcaaagtgaacatcaccagtaaatgggataaatcagcatcatttgcctcttgatagcatgcaataatatcagatcacttttgtgggatacctgccaaacgcctgatgctactcatgaggaaacatcagacaaattgaaattgaagtacattctacaaaattactggcctgtgtcttgaaacacattaaatgactgctgaagtgttcaagattaatttagcagtctaaaaaaacatgacaactgaatgtaatgtgggacctcatattttcttttgctgtaaaggatgttattgagacaatcagaaaattcagaataaggttcacagattagataataggattgtatcaata

SEQ ID NO: 135195 - DNA, 595 bp, Homo sapiens
tcaggaacactcagtgaatagcattcaaggcagaacaaatataaaatttgtgatatgagagtaagtttgtcatgtttgaaaaataaactatagaatgaatggctcagtrgtgggagggacagccataaaagacacatcagagaggtggccaaggcaagatcacacagggctttaaaggccattgaaatcatgttggcttttattgtgaatgaaatgggaagttattggaaggtttttagtgggagaattataggacctaccttaaattttatgcagatcactgtcatagctgtgttgagaataggcaacaggaagacagagatggtggctaggtgactggatagatgcccactgctgtacccaggctggtgaagacgctagctcagacaagagaggtcacaagaagcacttgaattttaagtattttgaaagaagagcatgcaggatttcctgacgattggctatggaatttgaaaaaaaaaatgtcaaaaatggctccaatgtttcagcaccagattgcaaatcctaacattgctttagtacttggttatatgctcttttatagatttcaaattgttttatgtgaatagatatt

SEQ ID NO: 135196 - DNA, 575 bp, Homo sapiens
gtatcaatagtataaacttatgtgtgtgtaaactaaaagtgtggacttttagtatatgatatatcaattttgagctaattatttaaataactgtaackcattttatggaaacatcttgataaccatatatagaaataaaggcttctatagatacaaaaaattaagaaaagggaatcaaagcatataactgaaacatagcaaatcacaaaggaagacaataaaaagtattacaaaagcagaaaacagaatgaaaataatgaatccttacctataataattacaatataactgaattaaatcaaaagagaaagtggctgaatggatttttcaaaaaagattcaacaatatgatataaaagagactagctttagccttgaagacacgtgtaggctgaaagtgaagggatgggaaaagctattccatgtaaaatggtaagtaaaagagagcagggatggctgtacctatatcagacaagatggactttcagtcaaaatctgtcataggaagcaaataaggtgactaataataaaggaatcaactcatcaataagatataagagttgtaaatatatatgc

SEQ ID NO: 135197 - DNA, 335 bp, Homo sapiens
agctttgtaactgaaacagccctgtaattcagatcctgtcctcttcaaccatactcctgagccaatcttgcctggccagagttccaaacagtgaatgagcaggagccttccaagagacccagatggtataacatttatccacaggaaacaggcccatcatctattgacccaactgcatatcctgaagtggacctttatcccagaaccacccctactaaccaaagtcctggaggcagtttcatctgacmaggagtcaatcaggatccatgccttcctctgtaatagtactgccaaacactgaccccataatgaaccacactgtggatccacatgta

SEQ ID NO: 135198 - DNA, 563 bp, Homo sapiens
taattatttttacaaatgcatcatttaactggcataaacaaggtatggtgatgtcaatttytgctttgaacaaaaggaagggaaagtgtttttctttcacttaaggccacagacaggtgagatggagatagacggggagtgaatgttacattctcatgttacatgaattaagtataaatattttttttaaaacttctctggagtgcctgaaaacaaagcttatacttatttcggtccactttatccagctctccatttcaatacctagggaactcagaggaagtcaggagtacaccaaaacacagtccctattatttttaatagtcgccaaaagaatttcacagttttttctcattaattcttcaaaaatctagtggaaaaaggtaattcttaaaaacaaattgcagaatgtttaatgattccaaaaggcaattagagagaagaggcatttttctttgtttttataagtcattgccattttagcttaatttacataatgttttatgggaacttcaagagcattctctcttcaatatccagcactaaaagaacccattgtatac

SEQ ID NO: 135199 - DNA, 437 bp, Homo sapiens
atgcatttactaagttaaagaagtaaatcttaaaaggctaaatatgtatgacattctaaaaacggcaaaaatagagggaaagaagatcagtggttgcaaggcttaggcctgaggggagagtttgactatctactgagcaggaaaagagacattttggggaaggtgtggaattgttctataacctatttgtgatgaagcttacaagaatctgtgcatgtgttacactcatagaaccatacagaaaaatggaactttactttaaaaattgaattagaagagtaatatagagattaaagtacataaatatatttttatgtataagtaaatgtataaatgtctgcatagtsgattttattaattaccacctttaacaaaattaaccaacttttatttttccagacacaagagaaaactagaagataggtaaccaagatcaa

SEQ ID NO: 135200 - DNA, 587 bp, Homo sapiens
gctacggctgcttccaagaatgcaggcagggatgagacgctcaatgtgagtgtccacatttgggaagcagtaagtacattctctgtctagaggcaaacaaagaggaaaaggaggatggaaggaaaaaggcctgaaaaaaaaaggactactgtgttatcagaggcagaatgcagggtaaaaaattggtcaccaaaacccgacagagggtggggtgtggagaggaaaaaattcacggaaactattagtcttggtaataggacagtttcagcctttcattatttactgataataaaaaaggcctgcccaatagattggtcaacaccactttcctgcttcattggtttccaaagggatttgatgcttccctactgagagattatttctaggagcccgtttcaggtcactcaccataatgtcctcactcagtgatcagctgtgtttgtctccctgtatgtctgtctgtctctctccgtttgtgtgtctgtttctttctttctctttctctgtytctctgtctttctctgtctctctctctctctctctctctcacacacacacacacacacacacactcaaacacacacaca

SEQ ID NO: 135201 - DNA, 593 bp, Homo sapiens
ttccagcatttcagctccagcaggaggagaaagatttactttctatttacttatcactgttaacaagcaaacacatacaagtcatatgggtgtgtgtgtgtgtgtgtaatcttttaacttttttaaaagtctgatttattgaaatatatttacatayagtaaaattcatccttcttatgtgtacagttctgagttttgacaaaaaatacaatcatgtaatccttaccacaattaagatagagaacacgagacatagaatacttccatgacctcttcacccccaaattccctcacacttctgtcatcaacccattcccctactcttagcccctggcaatattgacctgttttttgttcctattttctacaatgtcatatgaattgaatcatgttgcctttattgtttttagttctaaaaacaacattattgaggtataactgatatacaataaaatgcacatacaaaagtatacaacacgtaagtcttggttatgtatacatttgtgatatcatccccacaatcaggacagtgaacatatacccatcaccctaaaagtgtcctcaacttctactgtcactgcttttcagcaaac

SEQ ID NO: 135202 - DNA, 594 bp, Homo sapiens
tgctggtggaggttttgccttgacattgatggctgctgacttgatcagggtggtggttgctgtaggctgaggtggctgtggtaatttcttaaaataaggacaacattgaggtttgccatattcatggactctttcacaaaagatttctctgttgcacgtgatgctgtttggtagcattttacccacagtagacttctttcaaaattagaatcaatcgtctcaaactttgctattgttttattaactaagctcacataatattctgaatcctttgctggaatttcaaaaatatgcacaacatcttcaccaggaatagattccatctcaaggaacaactttctttgcacatccatgagaagcaactcctcatctgttcaagttttgtcataaagttgcaataattcartcacatcttcagaatctacttctaattctcttgccattttcaccacatctgcagttacctccttcactgcagtcttgaactctaaagttaatgatctcaaagtcatccatgagggttgcaatcaacttctttcaaactcccgttaatattaatattttgacctcctttcatggatcaagaatgttcct

SEQ ID NO: 135203 - DNA, 639 bp, Homo sapiens
aatattttgaaaggaatctttttttttctgagcagtaggtctcatcagtggccttaatcattcagtaaaccatgctataaacaggtgtgctgtcatctagactttgttatttcatttatagagcacaggcagagtagattgagcataatttttaagtgccctaggatttttggagtggtaaatgagcattaaagtcaccagcctcattagcctctcaaaagagaatcagcctgtcctttgaagcattgaagccaggcattgacttctctctagctatgaaagtcctagatggcatcttcttctaactgaaggctatttagtctacactgaaaatctgttgtttagtgtattcaccttcatcaaacattttagctacatcttctagatatcttgctgcagcttctccatcagcacttgctgcttcaccttgcacttttatgttacggagatggcttcattccctaaacgccatgaaccaatctctgctagtttcaaacttttcctgtgcagcttcctcacctcacttagtcttcatagaattggagarttagagccttgctctggattaggctttcgcctaagaaactgttgtgattggtttatctttccagaccactagaacgttctccatatcacaaa

SEQ ID NO: 135204 - DNA, 627 bp, Homo sapiens
ggaaccagtcactcaagttctttcctctctctttgtctctctttttagtcctcttccctttcttcttctctttcttcttcctttctcacctcttacatacagacacacttagacacactgaggcacatttcaaagctcccgagagaagcagaccatgyatcagagttagacctctggtggggaagaaagacaacctctcctgttctgagcactgctttcccaactctaaaaagaaaacgagaagggggtggaggtgaaggggaggagaatcttccctaccttcccatcagccttctttattatatctgttcaaagtgaaaaaaaatggttttaaactctcagtgttagtttatgacccctattaatcacatgtaataaccctcccaattattaaattatggagacatgtgtttcctcagccaaacagactaattatttactgaaatgaattaacatatagaaaagcctcagttctatggaggctgaaactttgcataatgagtttatcagccttaaaagcagcccagatgagctttttttttttttctttctttttttttttttttttggtgaaataaacacactgattatagtgaagcttatccatgctggcatcttgccatttgc

SEQ ID NO: 135205 - DNA, 548 bp, Homo sapiens
gggattcgggtttgagtctgggctctgccatgtactcactgagattttgggcaggtcatttcaccatggtgaacctcaatttctccacttataaaacaaagatgattatacctactgcacaggttgttacaaggagaaaactggggggtcttgatatggaaatccagccttctaggcctgtattctcctttgatcaactttggtaactgcgtgggaacaggaaattgtagggaagctttccttagtagagggtgtcttgtctttcccaggtagsaggaagatgccctgttcaaaggagttatagtagaagagatttgagcattttttggtacatcccttttaaccctttgatatttcctgagaaccctttgatgggatgaggatttgagcagcatacatttcaggaacgatgggtagaagagccccagagaggagcacacttttctatattattaccacaagataatcacctgtctgtccgcaggcaactctgtagctgctggaaaaggcgttcagagacgcagggtctaccttacattgtgcccagg

SEQ ID NO: 135206 - DNA, 548 bp, Homo sapiens
gggattcgggtttgagtctgggctctgccatgtactcactgagattttgggcaggtcatttcaccatggtgaacctcaatttctccacttataaaacaaagatgattatacctactgcacaggttgttacaaggagaaaactggggggtcttgatatggaaatccagccttctaggcctgtattctcctttgatcaactttggtaactgcgtgggaacaggaaattgtagggaagctttccttagtagagggtgtcttgtctttcccaggtaggaggaagatgccctgttcaaaggagttatagtagaagagatttgagcattttttggtacatcccttttaaccctttgatatttcctgagaaccctttgatgggatgaggatttgagcagcatacatttcaggaacgatgggtagaagagccccagagaggagcacacttttctatattattaccacaagataatcacctgtcygtccgcaggcaactctgtagctgctggaaaaggcgttcagagacgcagggtctaccttacattgtgcccagg

SEQ ID NO: 135207 - DNA, 461 bp, Homo sapiens
ctcctggtccttgcagctctgaccctcgctgcctccataatcccttggtcttgtggagaaatagtagaggcttagctccttcttgacactatcaaaggaaggratgcactagggccaaggcaatgcgtcctccacccctgagcctaggcctattctgttgctcagtggagtttcatcacttaatgatggtgtctcaagaatctccaaaggagtatgttggaatgaagtgagaggagcaatggaaagggagttaagagagaagactttataagtcataactgtactttgctgtattagtctgttctcatgctgctaataaagacatactcaagactgggtaatttataaagaaaaagaggtttaatggactcacagttccacatggctggggaggcctcgcaatcatggcagaagtcaaaggaggagcaaagtcacaccttacatagcagcaagcaagagag

SEQ ID NO: 135208 - DNA, 633 bp, Homo sapiens
caaaacaaatgatctatcagatggtggtaattcctatggagacaaaacagggaaggcagagaggggagagaaagcctcactgagcagagaggaaagacgtagggagggagcccatcaaatgtctagagagtgttctaggtgggcagacagaaagtgcaaaggccctgaggtgggaccatatcctgcctggtgtgttcagggaacagcagggaggccagtgtaccacaaacagatcagagaggtgaagaggggcagagataagtcagaacaggagaaggggctttgtcctcctggctatccctagaaccgtgggttcagcagacacttgagaagggcttggtttcttggtgggagctttctcygtggaggccagggccttgagtctgtgaggggcaggggagcctgtgcctggttttgtgatgcttcccatccccaaatccaagcttggggcctttaactctccttgctgcaatgctaagcctgaactgaacagtagttcttaccagttgagcccacactgtagtctcagatggatctttttcagcggaaataagatcagttcaaaagctgcttgtgaaatcaaatccagatttctgtcacccatgcttttcaatgtgcacaagcttgttagtt

SEQ ID NO: 135209 - DNA, 558 bp, Homo sapiens
agatctcttcttatataaagggtaattgtcacagcatccattaaggggcagtgacaccgctgcacacaccaccttgaagattctgattctctttggacctgtgtcactttgtagaatgcattccccgaggacccgagttttaaactcgacatgcaagcatcttctccttttactccaaaccatctttcgggggggcttgacgacttaactccttcgtctttgtgaacacaaaagatcaactaatctttctgaggtctttttcttctcctgatgtgaggccttccaactctaaaggagcagaactctgatgttttagcaataaggagtttttttggttgttagctgcgtctgcctttttctgtttttgtttttccccatatcaggagttctcacttcataaaataccktgtaccatttctaatacctttattttttggtaatagggtcatagtacgacaaagatgtttttatgacaatgtacaaagtttaccctttgttggttaagctccatcatgctccaagggaagtaaagacttagttttcctaactggaaaataa

SEQ ID NO: 135210 - DNA, 558 bp, Homo sapiens
ttttgtttaaacttttattttaggttcaggggtacatgtacaggtttattatataggtattcatgtcatggggtttgttgtgcagattatttcatcactcagatactaagtctagtacccaatagctattttttctgattctctccctcctccaaccctccacccaccagtatcccccagtgtctgttgctcccctctttgtgtccatatgttctcatcatttatcatccacttataagtgagaacatgcattatttgattttctgttcctgcattagtttgctaaagataatggcctccagctccattcatgttcctgcaaatgacatgatcttgttcctttttaaggctgcatagtattccatggtgtgtacgtaccacgttttcttcatctggtctgccattgatggttgtttaggtggattccatgtgtttgctattatgaatagtgctccagtgaacacrtgcctgcatgtgtcattatatcagaataacttttattcctctgggtatatacccagtaatgggattgctgggttgaatggtagttctgttttc

SEQ ID NO: 135211 - DNA, 479 bp, Homo sapiens
caacaaatgaatccatattaaaatgttaatagttactaagttttaatgtgttatatctccaaggtaagtatatgtaaggaagaagagactattttctaatggagggatttccccacccatctgctgcatttctgtgagatcttcctagacctttaaatcacaccctatacattcccagtgagaaaggcctgcatgcttcttgggtcagagcctcagcagggtctccagctcccaaagtgattgactggttcattggaatcaccttcggcttaggactggttgcctccatctgagcagcaataataaaacctgtgacattttayggactgctaagcattttcacttacattgtcttacttggttctcaaatcttgtttcagaaaaacagaggagaatcaggtccattttaagcagatacaaactgagtacttaagcccggggcctcagactcccagtccatggctgtttttgctgttcca

SEQ ID NO: 135212 - DNA, 575 bp, Homo sapiens
tcaacaaatgaatccatattaaaatgttaatagttactaagttttaatgtgttatatctccaaggtaagtatatgtaaggaagaagagactattttctaatggagggatttccccacccatctgctgcatttctgtgagatcttcctagacctttaaatcacaccctatacattcccagtgagaaaggcctgcatgcttcttgggtcagagcctcagcagggtctccagctcccaaagtgattgactggttcattggaatcaccttcggcttaggactggttgcctccatctgagcagcaataataaaacctgtgacattttacggactgctaagcattttcacttacattgtcttacttggttctcaaatcttgtttcagaaaaacagaggagaatcaggtccattttaagcagatacaaactgagtacttaagcccgggscctcagactcccagtccatggctgtttttgctgttccatgttgttctccccactgacatttttcctcactttcttctgtctggaaaatcaatggttttctatttgcaaaatgtccaggagaagtttttagcat

SEQ ID NO: 135213 - DNA, 575 bp, Homo sapiens
tcaacaaatgaatccatattaaaatgttaatagttactaagttttaatgtgttatatctccaaggtaagtatatgtaaggaagaagagactattttctaatggagggatttccccacccatctgctgcatttctgtgagatcttcctagacctttaaatcacaccctatacattcccagtgagaaaggcctgcatgcttcttgggtcagagcctcagcagggtctccagctcccaaagtgattgactggttcattggaatcaccttcggcttaggactggttgcctccatctgagcagcaataataaaacctgtgacattttacggactgctaagcattttcacttacattgtcttacttggttctcaaatcttgtttcagaaaaacagaggagaatcaggtccattttaagcagatacaaactgagtacttaagcccggggcctcagactcccagtccatggctgtttttgctgttccatgttgttctccccactgacatktttcctcactttcttctgtctggaaaatcaatggttttctatttgcaaaatgtccaggagaagtttttagcat

SEQ ID NO: 135214 - DNA, 559 bp, Homo sapiens
atctagaaaaggaatttaatgaagtattgtgctttctaagcccacacgtattattacacagagaaaatctgatcattcttgtatcttmagaaagggtggcatcgtgtcaaattaaaattttggatttcttaatcagccagtgatttataagacaatttggggacaatttactttatgagtgcctcaatttaccttttcaacagcaatgaaaacttcgtgagactcttttgtatttagtgaaatacactggaacaaagagatgaaaacagcgagtgaactataaacttctcttctattcttattatagaaaaaattactccaagccagcaatgggcaaaatatgtaaatataatgcccttaggtatacatgtagtgcctgttgatttcaagggaagccatgcaaatgtatatgaatagaatttgattctgagtctcttcagttggctcaacaatttaggttttcagttatatttatgttttactatatcccccaaacagctcacagaataaatgtattttatgtcttgaatcatcagccggtcttaaaactgctctttct

SEQ ID NO: 135215 - DNA, 507 bp, Homo sapiens
aggatgactgcaacattcctgtcttcattcttggaactgtacaaattatgcttttccatgtattcttggacaagatctggtaccaagtagcaaatgctctggccccttctgagggctctccagatttttgtggatgagatgtcattagtaatccattccttcacaacatgaatgttgctctggtgtttccacagcacatcagattcatagatgaatttctgcgcatcatttccagcctaactaatacatatgcgcccwtagcctgccacgatttaggcgatatcttcactcttccacgaaggactccaataaatctgccccacatagcagcttgacctttggcacacctttcgttttgggctctagggatttcttttgactagactcttgtctttgttcagtccacttcttcttccgtccaggccttgctagtgtagatgagttctgctagtgatcacagttactggcctccactttctcttgatggtgtcttaacaatctctgtcc

SEQ ID NO: 135216 - DNA, 507 bp, Homo sapiens
aggatgactgcaacattcctgtcttcattcttggaactgtacaaattatgcttttccatgtattcttggacaagatctggtaccaagtagcaaatgctctggccccttctgagggctctccagatttttgtggatgagatgtcattagtaatccattccttcacaacatgaatgttgctctggtgtttccacagcacatcagattcatagatgaatttctgcgcatcatttccagcctaactaatacatatgcgcccatagcctgccacgatttaggcgatatcttcactcttccacgaaggactccaataaatctgccccacatagcagcttgacstttggcacacctttcgttttgggctctagggatttcttttgactagactcttgtctttgttcagtccacttcttcttccgtccaggccttgctagtgtagatgagttctgctagtgatcacagttactggcctccactttctcttgatggtgtcttaacaatctctgtcc

SEQ ID NO: 135217 - DNA, 553 bp, Homo sapiens
tgcccatttattagtaacatcccatttccactatccccaacctctggcaactactattttactctttgagtctatgcatttgactattttaggcacctcatataagtggaatcatgcagtatttgtctttctgtgactggttcatttcacttagcataatgatctcaaagtatgtagatgtcatcacatattgcagaattttctttttttaaggatgtatattatttcattgtgtgcatgtaccacattttctttatccattcatctgttgataaacatttaggttgtttccacatcttgtccgttgtgaattgtgctgcaatgaacctaggagtgctaatatctccttggaatactgattttaattcttttagatagatacctagcagtgggatcactggatcacatgatagttctatttttaattttttgaggtacctcygtattgcttttcatagcaactggaccattttgcattcctacccacggtatgcaagtgttccaatatctccacattcttgccaatacattgtgacagatataagatggtatc

SEQ ID NO: 135218 - DNA, 462 bp, Homo sapiens
agtcacttttctcttgccactttcacaattctctctttgtccttgacttttgacaatttgactataacatcaatttctttaggttcatcttatttggtgtcctttgggtctcctggaactgaatgcttgcttccttccccaaattgggaaaatttataccattattcctttgaataacttttctggtcctttctttttctcatctccttcagagactcctataatgtgtatattggcccagttgatggtgttccataagtccmtaagctttcttcactctttttcattcttttctctttttctttatctgactgaattatttccaatgatctgtgttcaaatttactgatccttcttcttcatctaatctaaaccactagtaaatttttatttcagttatgttcctgagctctatgattttcgttgggtactttttaatattttttatctctttgctgaaat

SEQ ID NO: 135219 - DNA, 548 bp, Homo sapiens
gcacccaacatgaaaggacatgtgacagagaagtctcaattgaaattgagtcagttgccttaactgatttaagttgcattattttagttctgtaaatttgcaaaaacatatggctatgtgaacacactgctaaggccccycccaggtccttgagagagattcatacaagtgggagaacctgaagcttagacttcattaactttatggtaaatctgactcaaggaataagaaaacaaaagttttaaagtaatggctcagggcctgacttcatctgctccctcccccaacaactatctacatctttcagtaaaaactctcctatgaactttatatattcacataagaacaagaccataatatgcatatgattgtgtacctcgtttttatccaagttatgttgtgtacatttcttcccttttaaaaattctgttaacagctgcatagaatttttctatatgaacatataacttaacctaactcttatctgatggacatttaattggtttgtaataccttgttctcactaacaatactgtaatgaatatttt

SEQ ID NO: 135220 - DNA, 548 bp, Homo sapiens
gcacccaacatgaaaggacatgtgacagagaagtctcaattgaaattgagtcagttgccttaactgatttaagttgcattattttagttctgtaaatttgcaaaaacatatggctatgtgaacacactgctaaggcccctcccaggtccttgagagagattcatacaagtgggagaacctgaagcttagacttcattaactttatggtaaatctgactcaaggaataagaaaacaaaagttttaaagtaatggctcagggcctgacttcatctgctccctcccccaacaactatctacatctttcagtaaaaactctcctatgaactttatatattcacataagaacaagaccataatatgcatatgattgtgtacctcgtttttatccaagttatgttgtgtacatttcttcccttttaaaaattctgttaacagctgcatagaatttttctatatgaacatataacttaaccwaactcttatctgatggacatttaattggtttgtaataccttgttctcactaacaatactgtaatgaatatttt

SEQ ID NO: 135221 - DNA, 432 bp, Homo sapiens
cagcacaccttctggtgagggcctcaggctacttccactcatgatggaaggcaaaggggagctggcatgtgcagagatctcatggtaagaaagaaggcaagagaaggcagggaggaggtatcaggatcttttcaacaacyagctctttcatggaactaacagaacctatactcactcaactgcaggactgcaccaagccattcatgagggatgtgccaaacacttcccactaggccccacctccaacactgggaataaaactcttttctttcctttcctttccttttccttttccttttcctttccttttcctttcatttcctttctttcttttttcttttttttttcaaggtcttactctttaacccacgatagagtgcagtggtgcaatcatggcttacggcagccttgaactctggggtcaagcaatcc

SEQ ID NO: 135222 - DNA, 432 bp, Homo sapiens
cagcacaccttctggtgagggcctcaggctacttccactcatgatggaaggcaaaggggagctggcatgtgcagagatctcatggtaagaaagaaggcaagagaaggcagggaggaggtatcaggatcttttcaacaactagctctttcatggaactaacagaacmtatactcactcaactgcaggactgcaccaagccattcatgagggatgtgccaaacacttcccactaggccccacctccaacactgggaataaaactcttttctttcctttcctttccttttccttttccttttcctttccttttcctttcatttcctttctttcttttttcttttttttttcaaggtcttactctttaacccacgatagagtgcagtggtgcaatcatggcttacggcagccttgaactctggggtcaagcaatcc

SEQ ID NO: 135223 - DNA, 621 bp, Homo sapiens
tccctcatgaacagcttggtgccctccccttggtaatgagtgagctctcactctttagtgagttttcactctattagttctcactctattagtatgagagagctagttgtttcaaaaagtctgccacctcctccctgtctcttgcttcctcttgccatgtgatacactggctcccctgttgccttctgccatgagtgaaggcttgctgtggcctcacctggggcagatgctggcaactacacttcttgttcagcctacagaaccatgagccaaacaagcctcttttctytataaattacccagtctcgggtattcctttatagcaacacaaacagactaacacagtcagtcatgagctaactctgcagctcatgctttgaaccactttgttcctctttggcgctgctccccctccctcatttcttccccagattattctgttgccatcatttcttcatatgaaatacctgtagtcatttgggtctagactgggcatgggtagttatagcactcacctggagaacatgatggattttgcctttgggacttctaagcccatggttaaacattacactctcagaagaaaaggcctggatttataagtgaccagcagggcatact

SEQ ID NO: 135224 - DNA, 446 bp, Homo sapiens
tggggaaagcataacaaaaccaagcctgtctcctcacaacctacgtactccaaaaaaaataacagtgcatatccctgttacccaaatgccatccagtttctctaggctaagcacaaagaaaaagtaaagcctaagagatacagtcctataaaactataaatatgtgaacctggatcagctgagaacaaaaaggaggaggaaggcacagtttgcctttttcagggtatgctatatacctctgatgaccatttgctgcagatcttcgccacctccccggaatattccctgtccacaatctgaatatggacatgcccatctcacccaaacccaattcagctaattgaataaagcagggttagcacatgcgaatggcctcaggagttgacaggaaaagggaagccagcaaggtggggrccatggcaaactcgagaagagaagcagaattc

SEQ ID NO: 135225 - DNA, 584 bp, Homo sapiens
aaaggtcggggttaagggggmcttcaaaataaaaaactatggacacactcctggagagcagcacggaggagggatctatgatggtgtaataattgtgagtttgggctagatatgactgaacaagtaaaggttgccccaggcatctcacagcgggatgcagaaaagcatcctgatgctacccagttgaggaatccaagacatctcctcccctcctatcagggagggcacgaaggggcttcactctacagggagggtggaagcacagcagccttacattgcagctagggtgcagcaagccacagccaaggccagaattctgcagagtgtcccaggaagagaaaagtctaggtagaaatcagccaataacagagcagaagctaaagagcagacaatgcaacttccaagacaaagacttagcagaaaggactctgaagctagaagcagctgtaacaggggggatgagatggtaatggttaggaataaagaagtagaacatgaagaggggcctttcgccatgctgatagtgataaccatttctttactgaggaggaaccagacacgatgtggtaatctgctttatatac

SEQ ID NO: 135226 - DNA, 584 bp, Homo sapiens
aaaggtcggggttaagggggacttcaaaataaaaaactatggacacactcctggagagcagcacggaggagggatctatgatggtgtaataattgtgagtttgggctagatatgactgaacaagtaaaggttgccccaggcatctcacagcgggatgcagaaaagcatcctgatgctacccagttgaggaatccaagacatctcctcccctcctatcagggagggcacgaaggggcttcactctacagggagggtggaagcacagcagccttacattgcagctagggtgcagcaagccacagccaaggccagaattctgcagagtgtcccaggaagagaaaagtctaggtagaaatcagccaataacagagcagaagctaaagagcagacaatgcaacttccaagacaaagacttagcagaaaggactctgaagctagaagcagctgtaacaggggggatgagatggtaatggttaggaataaagaagtagaacatgaagaggggcctttcrccatgctgatagtgataaccatttctttactgaggaggaaccagacacgatgtggtaatctgctttatatac

SEQ ID NO: 135227 - DNA, 534 bp, Homo sapiens
tagcagaaaggactctgaagctagaagcagctgtaacaggggggatgagatggtaatggttaggaataaagaagtagaacatgaagaggggcctttcgccatgctgatagtgataaccatttctttactgaggaggaaccagacacgatgtggtaatctgctttatatactttaaatgtaatgggccatagccaggtacagtaggagaaccacacacttgtccttttataaaatccagaatgcaaaaccttctccactaggtactgttcatagaattatctgaacagaaaagacctttcttaatmatttaagtcaagattctattgctctacctgggcaaatcagtaagctacactgcccttatcccttacaaaatcctgccttctgtctgggcatgataacatggttagacagggtcacatgttatatatatatatgcagagtttttcattgcagcaaaatatagaaatcaacataaatatgcaccaataaagtgctaataaaaagattatgttcatccaggcaatggaattc

SEQ ID NO: 135228 - DNA, 569 bp, Homo sapiens
gtcaaacatttttgtctcacgactctctttaaagtgattggggaccctaagagctttgattttcgtgggtagtgtctatcaatacttactgtatttgaaattaaaaattaaaattaatgtattcagtttaaaataatagtaaaaccatcacatattttatggaaaayaactatattttccaaaacaaaacagaacaaaagtactgggaaggatggtattgttttacatttctgaaaatctctttaatgcctggcttaatagaagacagttggattcttctactgacttctgcattcaatctgttgttgcattatcatacattacgtagactctggaaaattccactacagacttgtgagagaatgagagtgataaggtgaataatatcttagttttctatgaaaatagttttgagctgtggatctctgccaggtcttagagattccctaagggtccctgaactacattttgagaatcgctgttcaaagtgaactctgcttttctgctgaggccctaaaaatcctctcaaatgatggtattttctctcccacactcatggcatgactgga

SEQ ID NO: 135229 - DNA, 477 bp, Homo sapiens
ggatgttcaggtctgttacataggtaaacgtgtgccatggtggtttgctgtgcctatcaacccatcaccaaggtattaagcctagcatgcattagctacttttcctgatgctctgaatcatctgctcccaatctaccttctgtttttgatctcttatcacctttctcctctcctccaggtaccagggctatatccacattgaaatgttggatgctccgaagaaatgccacatgtgtctgggcctctgatacttagcacacgctctgtacacttggaacatcttacaccattttctacctattggaattgtatttaccctttaaaactcagtaaatgctgtctcctacatgaagccctccagaatgccctaggtgcagctaatcactcattgcattttatatcgtcttatgaacatacgcygtaacaatgggactaatgtttctgtatttcttaccaatctgtgagccccttgagtct

SEQ ID NO: 135230 - DNA, 578 bp, Homo sapiens
caagaggatggatcagattttaacctctaatgttgaacacttgggtggattccgttcttcagctgttataaacaacaatgcaattaatattcctgtccctaaactcacttccacagctctgacatttaatttaggttaagttcttagaaaagagttccaaaatttttgrtgtacattgccaaaataccttcctagaatatttgcactaatttatactcttaccagtagtatagagtgtcacgttcctcactctttcactttcatctaccaatattatctacctccttatctgcaggttctgcaacaactatttacatagcatttgccttgtattagatcgtataagtaagctagagatgatttaaagtataggggagtttacatgtgtgcataggttatatgttaataccacgccattttatatcagggacttgagcatccatggattttggtatccataggagtcctggaaccaataccccagggatactgagagatgactgtaattcaaatgagatatgggtgacatatatgagatagatgtgtgacacatatgtgtcgtatgtgtgacagaatgt

SEQ ID NO: 135231 - DNA, 578 bp, Homo sapiens
caagaggatggatcagattttaacctctaatgttgaacacttgggtggattccgttcttcagctgttataaacaacaatgcaattaatattcctgtccctaaactcacttccacagctctgacatttaatttaggttaagttcttagaaaagagttccaaaatttttggtgtacattgccaaartaccttcctagaatatttgcactaatttatactcttaccagtagtatagagtgtcacgttcctcactctttcactttcatctaccaatattatctacctccttatctgcaggttctgcaacaactatttacatagcatttgccttgtattagatcgtataagtaagctagagatgatttaaagtataggggagtttacatgtgtgcataggttatatgttaataccacgccattttatatcagggacttgagcatccatggattttggtatccataggagtcctggaaccaataccccagggatactgagagatgactgtaattcaaatgagatatgggtgacatatatgagatagatgtgtgacacatatgtgtcgtatgtgtgacagaatgt

SEQ ID NO: 135232 - DNA, 199 bp, Homo sapiens
cctccctactgcttgggaaaggagaagctggttttaactagcgtgtttcctttgagccccaggaaccgtccctagtccctaggagtttcctatttcctrctggaagcccaaggaaaccagaatcagacactcgggatgccaccgagtcctagttcctgctctgatggagacctgcaaaaatgaagccacagactgagcc

SEQ ID NO: 135233 - DNA, 199 bp, Homo sapiens
cctccctactgcttgggaaaggagaagctggttttaactagcgtgtttcctttgagccccaggaaccgtccctagtccctaggagtttcctatttcctactggaagcccaaggaaaccagaatcagmcactcgggatgccaccgagtcctagttcctgctctgatggagacctgcaaaaatgaagccacagactgagcc

SEQ ID NO: 135234 - DNA, 584 bp, Homo sapiens
ctgtaatacaggttttggtgaacacttgtttaattgaagttatttagaagtaacgtatccagatgtgggcaaaggtgaacttcatctcaatcccagagcttgttctccacttcctataccagaaacaggaaaaagtgaatacatcattctatatgttgacatttgacgagtgaayacaggaatgaaaacatccatttaataaacatctactatatgtcaggcattgtgctaagtgtctgcaaagcaatcccatggcaaaggcatcattcaccccattttgcagatgaggagactgaaactcaggtttagtaactttcctacaaaagaggagcagtgggcaaggggcaagactacagggaacatgggagataagaaagagaatcggttgaggagcagaactaggacacagtacctggaaggagcaccaggactgcaatgagcaaggtgcccctacaccagcggtccctgctccacagaggtacccctgttgcatcattttgccctatttggaattagtccgtcacaatccagttttagcaaagtacttcaattagcattctaaatcctttctgggtaagaatttc

SEQ ID NO: 135235 - DNA, 576 bp, Homo sapiens
catttactgtgaggacatatgtgacatatctattagggctgatgggttgcaatcaatgggagctgatccaggctaacttaggcaaaaccataatttaataggatggcaggtggtagcccatggaatttaagggaaggccaaagaaagagtctgtagagagtgggaatcactccagacatctcgatctaagggacagtctctttacagtgctgctaatggtacagattttctctaattctttatgcctctaagtggctcccttcatgactatctcttaagagagaggctgattggcctggctggggtcaggggcccaccccttagctcgcagagcacagttcctccaaaactcagagtggtagtggaagaaatgcagtagagaggcagtttgagagggcaagctgagttcaggttagggcacatggcattcctgatcatggcagaatatctaagcaaaaagtttataatctggctactgagtcaggactaatttagaaccattttctccacagaatgtgtaagagctagaatttattatyataaaaaaaaaaaaaaaaaaaaaaaacaggaaaggaa

SEQ ID NO: 135236 - DNA, 501 bp, Homo sapiens
tataaacacaaggcagaaagtagtacttgtcataagagaaatgtacacaaatcactgcaaaagtttataggaagaagaaataagaaagaacttcagggaraaggatgcaaccaacctaggtcttggagagacaaagattttgggggtaaggagcattcttgctttttctgaggcagaagcagcataagctaaggctcaaagaaggaaaatgtgggatgcatgtggctgagtttctgtttgtggcacagggtgagtgaatgggagtggtgagagactgttgtgaggctgcatgatggggtccacagatgccaatttgtaaggaaaaaagtgacatattattcaaaattttagatgtatgctttagaaagtagaatgcactaagtttggctacagataagggaaactggggcaccatctaggagctactgcagtagtccagatgaaaggtaccaaaggcctagcttagctgagctaggacaggttcttcatcacacatggtgt

SEQ ID NO: 135237 - DNA, 565 bp, Homo sapiens
atttgactctgacaactttgaagtttcacataaggatactgagcttaaaaaattaattcctccttgttaccctcctttcatccaagatcttaacatcaagggccagtcttgattcttgagtctgctttttattccctcttccaccctagactccctcaagagcctaaagagctctcaactttyccttcctgttggatgaaaacttccctaaatcacacatttcctcttcccatcttattccattcaccctcacagttgttgtagtttgctacaacaactgataatgagggtagaaagggaaaaaacactatttctgtacactcacacacttctgacagcaaacgtggtggttttccctacaccaaccaatcctccaagtctctggacaccaactgggtgtcctacaatttatttcaattctgacactaactacctggagttatcacagaccccacaggttaagggtttagttgcacaagactatccaccccccgaccaattctgccaccaatcacaagtagtggatccccaggttacccacacttctgtctgacttggctacaaa

SEQ ID NO: 135238 - DNA, 565 bp, Homo sapiens
atttgactctgacaactttgaagtttcacataaggatactgagcttaaaaaattaattcctccttgttaccctcctttcatccaagatcttaacatcaagggccagtcttgattcttgagtctgctttttattccctcttccaccctagactccctcaagagcctaaagagctctcaactttcccttcctgttggatgaaaacttccctaaatcacacatttcctcttcccatcttattccattcaccctcacagttgttgtagtttgctacaacaactgataatgagggtagaaagggaaaaaacactatttctgtacactcacacacttctgacagcaaacgtggtggttttccctacaccaaccaatcctccaagtctctggacaccaactgggtgtcctacaatttatttcaattctgacactaactacctggagttatcacagaccccacaggttaagggtttagttgcacaagactatccaccccccgaccaattctgccaccaatcacaagtagtggwtccccaggttacccacacttctgtctgacttggctacaaa

SEQ ID NO: 135239 - DNA, 545 bp, Homo sapiens
caggttctgcatcagtgggtttaaccaacctctgattcaaaatgtagttaggactattttgtatataaaatatataagggacttgattttggtatacaaagggagtccaggaaccaatccaccatgaataccaagggacaagtgcacattgattttattttataatcctgttttactaaatattcataaagcctgtatgttgtgtttgtggtttacatttttgaatttttttggggtttagagcaggagacaggtagagaaggcactgctattaatgtgctttttatagtgtctgtcacagagacataggtgggtcagggcttagtgatgactttttcaaaatgatactgatgatgattatctctaagtaatgttcaggagaactaggactattccaaaagaaatgagaaaaatgagcagtgattaagcagcgaacataaatttaagaacatgcacagaatatggtgaacagtttttrcctttctcaagttcagaataaataaggagaataaataagctttcagttgaagcacagtcaacaaatg

SEQ ID NO: 135240 - DNA, 538 bp, Homo sapiens
gctgttttgaatacgttaaaaaatcagatcagactttggcttaagggaatgttgtgactggtttgatcttctatgcagaccattacaactttttccatttcagcaataaggctattccacttatcattcctgtgttcactggaatagcatttttaatttcctttaagaacttttcctttgcatttacaacctggctaactggcataagaggtctagcttttgacctattttggctttcaacatgccttcctcactaagcttaatcatttctagcttttcatttaaaatgagagatatgtgatttttcctttcaccttaacactttgaggccattgtagggttattagttggctggatttcaatattgttgtgtctcagaatagtgaggactgaggagagggagagagacagagcaaaggctggtggatggagcagttggaatatacataycatttattaagttcactgtcttctatgggcatggtttgtggcactccagaacaattacaatagtaacatcagagatcactgatcacag

SEQ ID NO: 135241 - DNA, 584 bp, Homo sapiens
gtggcatcctggtcaaccaagacatagaaaggttaggatttgcccagggtcatagacatgtcacattcacctaagtgttaattaaggaggcaaaagtgggatcttccccccggctggtgctgggggctctggtgctcagggacctgctggggagagcctcacggtcttaggatacaggtgcctgaacatgaccagccacagaaaatggaccagagaccccaaattcataatcagatctgctctgtgtcccagacccaggccccagcccagccacagaccggcctgctctccagggcccaccattccttccaggccatggcagatgctgagcagtgtcagcttagccaggagctcaaacgctgacagccccagagctggtctgtgccccagtggtactgggctgcagggcacacagcaccgtctacaccatcacactgtgtgcrggggctggggaggcgagaagctggcaattcccacctggcctaggacccagcttgctgtgtgaatctgggcacctcattcagccactttgggtttgagttgttttatccacaaaatggaactgctgagagctaccctttcct

SEQ ID NO: 135242 - DNA, 584 bp, Homo sapiens
gtggcatcctggtcaaccaagacatagaaaggttaggatttgcccagggtcatagacatgtcacattcacctaagtgttaattaaggaggcaaaagtgggatcttccccccggctggtgctgggggctctggtgctcagggacctgctggggagagcctcacggtcttaggatacaggtgcctgaacatgaccagccacagaaaatggaccagagaccccaaattcataatcagatctgctctgtgtcccagacccaggccccagcccagccacagaccggcctgctctccagggcccaccattccttccaggccatggcagatgctgagcagtgtcagcttagccaggagctcaaacgctgacagccccagagctggtctgtgccccagtggtactgggctgcagggcacacagcaccgtctacaccatcacactgtgtgcgggggctggggaggcragaagctggcaattcccacctggcctaggacccagcttgctgtgtgaatctgggcacctcattcagccactttgggtttgagttgttttatccacaaaatggaactgctgagagctaccctttcct

SEQ ID NO: 135243 - DNA, 365 bp, Homo sapiens
tatgaggctagtattatactgataccaaagccagacccctccactcaaaaagtacaacactccccccttcaaaaaaaactacagaccaatatcccttatgaatatagacacaaaattctcaacaaattctcagggaagatgatgatcactcatttacttattttttgataagcgtcagtcaggcttccctctggttcttagtattaggcttttccctgaggaaaccccaacctcttttttcatctaccacttgggtcagattttctgttcctgttacggacatcccttactgtstttggagcaaatcactgaaaagcattttctgttgtaatttatccagtgttggaatttttcctgctttttag

SEQ ID NO: 135244 - DNA, 604 bp, Homo sapiens
gcatccttgtcttattactgatcttggagggaatgctttcagtctttcaccgttgagtatattttagccatgggtttttcataaatatactttattatgttgaggatgttccattttcttcctggtttatcatgtgtttttaccatgaaagcatgttgtatattttcaaatgttgtttcagcttcacttgagatgattttgtgttcccyccttcattctattaatgtggtgtattatattcgttgtatatgttgaaccacccttgcattcttgggataaatcccaactgatcatgatgtataattcttttaacatgctacttcatttggtttgctagtcttttgttgcagatttttgcatttatatttagtagggatatctatctatagttttcttttcttatgtgctgcctttggctttggtgtcagggtaattctggcctcatagcttgatttaagaggtgttattttcttttctaattttctggaagagtttaagaaagattggtgttacttcttttttaaatgcttcatagtatttagggtgaaaccatctttagtactttactttttaaaaatggtaactatggacagttaaacctaaa

SEQ ID NO: 135245 - DNA, 604 bp, Homo sapiens
gcatccttgtcttattactgatcttggagggaatgctttcagtctttcaccgttgagtatattttagccatgggtttttcataaatatactttattatgttgaggatgttccattttcttcctggtttatcatgtgtttttaccatgaaagcatgttgtatattttcaaatgttgtttcagcttcacttgagatgattttgtgttccctccttcattctattaatgtggtgtattatattcgttgtatatgttgaaccaccsttgcattcttgggataaatcccaactgatcatgatgtataattcttttaacatgctacttcatttggtttgctagtcttttgttgcagatttttgcatttatatttagtagggatatctatctatagttttcttttcttatgtgctgcctttggctttggtgtcagggtaattctggcctcatagcttgatttaagaggtgttattttcttttctaattttctggaagagtttaagaaagattggtgttacttcttttttaaatgcttcatagtatttagggtgaaaccatctttagtactttactttttaaaaatggtaactatggacagttaaacctaaa

SEQ ID NO: 135246 - DNA, 576 bp, Homo sapiens
gtttatgttatatcaaaacatcaaaaataaaagtaaccgaataatcaaaggacctaacacccaaattaccaactgcctttgatctatatatactatatataatatatgatctatatatattatatataatatatattatttttttcttagaagcaattggcagaatcatggaatattacaaacattaaaacttatagagggctttaagaatcactttatttatcctcctatttttgtaattaaaaaataaggccagagtgttgtattgacttggccagtttccatagttaatactgagggataacacttccttaaagtataatagtgatrtttgcacacaacaatctttctacttctctactttaaaacttcctatttaacttcagttcactctgaaaaaaatgaattttggcttgctctcaattttacctctttatttaccaaaatagagggtatctgtatcactatgtcaggtaaaaatctaaatttttggaattcatctaccattagtgtatatattctaaccttcattacttgcaggtaaaaatgtgatcatgctaacagcgacacccaaat

SEQ ID NO: 135247 - DNA, 475 bp, Homo sapiens
ataagttaccaggatctctctgtttcaatttcaaaattactaaatagtggttaataatggtaactatctcatgagtcatttgtaagaattacatttgtttataagtataaagcattttgaatcatgctagaaatatgagtgccacaatagtatctgcttaaacggagaggaaacaagcataagcatgttcttctgattggtaaagcaataccttttgcaaaagtcytgatttgcagcattatttttacctcactttggccaaaattgagtcacatggttttaatggggtacaattccacattcaggagtatcaaagccttaacagcaaggaaaaagaaaaaaatggacactggatgggcagccatggttatgtcctgaaaaacgtattgaaagcccatgtgaccatatactaggaattctgaacctagcctgaggacctacaatacataatgtaagctagaaatatttagcaaga

SEQ ID NO: 135248 - DNA, 625 bp, Homo sapiens
aaaaaaaaaaaaaaaacaaataaagcatttctgaacaaaataacaaagctgacatcatcatactatctgacttcaaaatatactaccaagctatagtaaccaagtcagcaaggtattcccttaaaaatagacacatagacawatggaacagaaaaaaagaatccagaaataaatctctgcatttacagtcaactcattttcaacaaagttcccaagaacatacactggagaaaggacagtctttccaataaagtatgctggggaaactggatatccatatgcaacataataaaactagactcctatctctcaatagatacaaaaaccaaatcaaaacagattaaagacctaaatgtaagacctgaagctataaaacttctggaagatagcattggggaaatgctttaggacattggcctgggaaaaaaattagggattatgacctcaaaagcacaggcaacaaaatcaaaactagacagatgagattacattaagctaaaaaacaacttctgcacagaaaaggaaagaatgtgcagagtgaaaggataacctataaaatggggcaaaatattttcaaattgtccatctgacacagattaataaccagaatataaaaggaactcaa

SEQ ID NO: 135249 - DNA, 540 bp, Homo sapiens
atgagtacagcaagggagaaatctgcccccatgatctaataatctactaccaagtccctccccatcaatggggatcacaattcaacatgaaatttaggtggggatacagagccaaaccttatcagtaatcaccactctaggtttgttttgtttttgttggtcttatttrcaagaagttggtttattctcctaccttcagctgccttggccaagtctttgaaataactccttttatcattgataagttaagcagtgaattcagtaaaacaacaatttagcagaaaacaaacgcacatattattttacagtttggaacaagaaaaaaaaatacatgagaaaaagaaaaacatcattaaagtcaatatcttttgctctatgctagggagtctttatttcctcttatttcacagacattcactatattcaccattcactgagctatctcaccctggatttcttaagtctcttataaatccacaaaacgatgcactgttttcttgatcacttttgcatttcaactaagcaggatgtttctgtaat

SEQ ID NO: 135250 - DNA, 589 bp, Homo sapiens
ttttcttattgcagtgactataattttcaatactatgttttataaatggtataaaagcagaggcattttggttttttgtgaatattagggggaagatattcagtcatttactgttaggtatgatgttgactatcagatcctttagatgctctttattcaagcctaggctattctatatcctctattccttgttttctgagggattttttatgaaaatgaattagggtagaatggaaataggttmataaaaagcattttctgcaacaattgatataatcatgatgcttttcttcattagtctgttaataaggtggactatgttgactgatttttaaaatattaaaccaggcttgaataacaagaatatatcctatgtagtcatgttgtataattatttgtatatatttttgtattcagtgtgttattattttgttacttttttaggtctaaattaatgaggaatatttatctgtaattttcaatttttatatcatctttgtctagttttggaatcaaagtatcactgacttcataaaatgagttggaaggcatttccacctcttgtatcttcttgaagacaatttgtaaa

SEQ ID NO: 135251 - DNA, 610 bp, Homo sapiens
aattgatataatcatgatgcttttcttcattagtctgttaataaggtggactatgttgactgatttttaaaatattaaaccaggcttgaataacaagaatatatcctatgtagtcatgttgtataattatttgtatayatttttgtattcagtgtgttattattttgttacttttttaggtctaaattaatgaggaatatttatctgtaattttcaatttttatatcatctttgtctagttttggaatcaaagtatcactgacttcataaaatgagttggaaggcatttccacctcttgtatcttcttgaagacaatttgtaaaattggtgttcattactcttttaaatatatagtagaattcctcagtgaaattaactgagccaaggtatttctttttggggaattttaaattacaaatcaaattaaataatggttatgaggctactatatctattttaccaaggttttttatgcagttttcagattttgaggagttgacccattctatttaaatagttaaatttatgacagtatagatgtttttagtattcctggattattcttttaatgatagaagggtctgtagttgcattgcttgttttatacct

SEQ ID NO: 135252 - DNA, 455 bp, Homo sapiens
tgaggagttgacccattctatttaaatagttaaatttatgacagtatagatgtttttagtattcctggattatkcttttaatgatagaagggtctgtagttgcattgcttgttttatacctgattttgacaattcatgcctttttaatttttttgtcaatattgttggaatttcatcaatttgatttcttacttctaagaatcagctttttgccttatttattctattatttttctattatcattgctgtggacttctgcatttatctttattattcccttccttatagttgttttaagtttatttttctctttttatttcttgacaaaggaacttacatttttgactctagatttttctttggtgtaaatgtaagcattaagtgccataaattttcctcccacttctgtttaacagaaccccacatgtttttataaactgcattttcatttagt

SEQ ID NO: 135253 - DNA, 562 bp, Homo sapiens
tgggcagctccgctcctgtggctttacagggtatatccccatacctggctgttttcatgggctggcattgagtgtatgaggcttttccaagcacacggtacaaactgtccatgattctgccattctggactctgcaggatcatagccctcttctcacagctccactagacagtgtcccagtggggactctgtgttggggtttcaaccccacatttctcttccacgctgccctagcagggacccacccctgcagcaaacttctgcctggayacacaggcatttccatacatcctctgacatctatggaggttcacaaacctcaattcttgacttctgtttacccgcaggctcaacatcatgtggaagctgccagggtttggggcttgcatcctctggagccacagcctgagctgtaccttcgtcccttttagctatgactgaagcatctgggacctgggcactaagtccccaggctacacacagcagggagcgctgggctcggcccacaaaaccaatttttcctcttaggcctctggcttgtgatatgaggggctgctgtgaa

SEQ ID NO: 135254 - DNA, 562 bp, Homo sapiens
tgggcagctccgctcctgtggctttacagggtatatccccatacctggctgttttcatgggctggcattgagtgtatgaggcttttccaagcacacggtacaaactgtccatgattctgccattctggactctgcaggatcatagccctcttctcacagctccactagacagtgtcccagtggggactctgtgttggggtttcaaccccacatttctcttccacgctgccctagcagggacccacccctgcagcaaacttctgcctggacacacaggcatttccatacatcctctgacatctatggaggttcacaaacctcaattcttgacttctgtttacccgcaggctcaacatcatgtggaagctgccagggtttggggcttgcatcctctggagccacagcctgagctgtaccttygtcccttttagctatgactgaagcatctgggacctgggcactaagtccccaggctacacacagcagggagcgctgggctcggcccacaaaaccaatttttcctcttaggcctctggcttgtgatatgaggggctgctgtgaa

SEQ ID NO: 135255 - DNA, 548 bp, Homo sapiens
agcttaataattgaccttctgtattctttttctggcaattcagagatgtcaccttggtgtggatccattgctggtgatctggtatgrtctttagggggtggtaaagaatattcttttgtcatattaccagaattgtttttctgattccttctcattaggtagaaccttgttttgtcatattaccaaaattatttttctggttcctctcatttgggtaaacgatgtcagagggaagatctgggattcaagggctgctgttcacattcttttatcccatggggtgctctcttgatgtggtgttctctcccttcctctaggaatggggcctcctgagagcagaactgtagtgatcgtttttgctcttccaggtctagccacacagggaagctaccaggatcttggctggtactggggattgtttgcaaagagtcctgtgatgtgatccatcttcaggtctgacagccatggataccagcacctgctcttgtggacttagcagcggagtaaagtggactctgtgagggtccttggttgtgtttttgtttagt

SEQ ID NO: 135256 - DNA, 548 bp, Homo sapiens
agcttaataattgaccttctgtattctttttctggcaattcagagatgtcaccttggtgtggatccattgctggtgatctggtatggtctttagggggtggtaaagaatattcttttgtcatattaccagaattgtttttctgattccttctcattaggtagaaccttgttttgtcatattaccaaaattatttttctggttcctctcatttgggtaaacgatgtcagagggaagatctgggattcaagggctgctgttcacattcttttatcccatggggtgctctcttgatgtggtgttctctcccttcctctaggaatggggcctcctgagagcagaactgtagtgatcgtttttgctcttccaggtctagccacacagggaagctaccaggatcttggctggtactggggattgtttgcaaagagtcctgtgatgtgatccatcttcaggtctgacagccayggataccagcacctgctcttgtggacttagcagcggagtaaagtggactctgtgagggtccttggttgtgtttttgtttagt

SEQ ID NO: 135257 - DNA, 449 bp, Homo sapiens
gctcctgtattccaacactttaggatcccagtgcaaagatgagaaatttatctagggcatcttttacatcatggaaatgtatggagtctaatttttgtttccctggtctcatgagactctcaaaaacagttcccagggtcacaaactctcagttacttcttcctggattggcacatacccagarggctaaaatggccctaaatgccaggctcagatgccttgaattgtacatcctccaatagttggagaattggtaacttgccaattacttcaagcagatgcttctttagtctttgtccagcttttcttgtagttttcagtaggattgttgattcagatttactagtgcaccaattctggaagctaaagtctcattactattttttaagtacaaacgttacagatataattaaaattctgaatcctcctttcttgattgatgtggtttg

SEQ ID NO: 135258 - DNA, 536 bp, Homo sapiens
ccttgaattgtacatcctccaatagttggagaattggtaacttgccaattacttcaagcagatgcttctttagtctttgtccagcttttcttgtagttttcagtaggattgttgattcagatttactagtgcaccaattctggaagctaaagtctcattactattttttaagtacaaacgttacagatataattaaaattctgaatcctcctttcttgattgatrtggtttggatctgtgtttccacccaaatctcatgttcaattgtaatccccaatgttggaggtagagtctggtggaaggtgattgtatcatgggggtggtttctcctgattggtttagcatcatatcccttgcttgtgataatgagtgattctcccaggatctggtcatttaaaagtgtgtagtacctccctgctcgctctctctggctcctgctctggccatgtaatacacgcctgcttccccttccccttctaccataactgtaagtttcctgagcttcctgtacagcctgcagaactgtgagccaattt

SEQ ID NO: 135259 - DNA, 536 bp, Homo sapiens
ccttgaattgtacatcctccaatagttggagaattggtaacttgccaattacttcaagcagatgcttctttagtctttgtccagcttttcttgtagttttcagtaggattgttgattcagatttactagtgcaccaattctggaagctaaagtctcattactattttttaagtacaaacgttacagatataattaaaattctgaatcctcctttcttgattgatgtggtttggatctgtgtttccacccaaatctcatgttcaattgtaatccccartgttggaggtagagtctggtggaaggtgattgtatcatgggggtggtttctcctgattggtttagcatcatatcccttgcttgtgataatgagtgattctcccaggatctggtcatttaaaagtgtgtagtacctccctgctcgctctctctggctcctgctctggccatgtaatacacgcctgcttccccttccccttctaccataactgtaagtttcctgagcttcctgtacagcctgcagaactgtgagccaattt

SEQ ID NO: 135260 - DNA, 536 bp, Homo sapiens
ccttgaattgtacatcctccaatagttggagaattggtaacttgccaattacttcaagcagatgcttctttagtctttgtccagcttttcttgtagttttcagtaggattgttgattcagatttactagtgcaccaattctggaagctaaagtctcattactattttttaagtacaaacgttacagatataattaaaattctgaatcctcctttcttgattgatgtggtttggatctgtgtttccacccaaatctcatgttcaattgtaatccccaatgttggaggtagagtctggtggaaggtgattgtatcatgggggtggtttctcctgattggtttagcatcatatcccttgcttgtgataatgagtgattctcccaggatctggtcatttaaaagtgtgtagtacctccctgctcgctctctctggctcctgctctggccatgyaatacacgcctgcttccccttccccttctaccataactgtaagtttcctgagcttcctgtacagcctgcagaactgtgagccaattt

SEQ ID NO: 135261 - DNA, 656 bp, Homo sapiens
cttttcagcttgccttggaagtacctaatttatcatgctaaatagatttagattatttgttgtggccatatataaagttaatattctttcttctttaagcccctatctttacctaaggagtagctatgcaatagtgacctttttatatattgaaattctgcagtgaaataatttaacttctctcccctggcagattggaaacaaaatcccgaggaaagggaataaaatagaatgttaaaatctaatcaatatccatatattgccaaaaatctgtgatgctcagacgtatcatccaaagtttcataaatgtggctgtcttattatgtattatcctccacactcagagtgyttccaacaactaaaagatttggccacagatcagaaagtaactttggcaattaaaaaaaaaatcaaagaatataactagacaatatgtagaaaagtggacaatgaggcaagatggtaaagaagtattgataatcagtgaattatagtgatcataatagtttgctttctctgctctagcctatttacccctctgttcaaactcaaatgtatttagatcactactttgtgggatatgggaagtgggacagaatttccatcccactcatgcctgataaaatgacctctgttccaccaccgctctgactaaa

SEQ ID NO: 135262 - DNA, 564 bp, Homo sapiens
tcgtttttttgcagctgataccatggggaagtatacraagacatgaaggagagagcaaagagtcaaatttgtgtttattagtttaccagactaggctgctaaatgaaaactccccacagcccttctgcctccacaggcaggaccacttccaggtctgtggtggagtctgagtggaataaaataagcacttttacactttgctttccaactgaatcttattaaaacattgatagttcttctctaagggttaagagaaacaggaatgcagattatgatgaaaaaattgccaacacaggacttttttgtagccatacacttgttttgttttacatgaatatgcatgagagtttatttttatattttcacatgaaaatatttatattgtgataatagtttgcctctgcacttgaaatatgagactagttatatattgataaaatattgtctttttaactctcgtggatacatatattatttcttgaactgatgaaaaatttactgttgctaagcttaaacataaaaattcttatataattatatttgaacaggtatatggtgcataat

SEQ ID NO: 135263 - DNA, 564 bp, Homo sapiens
tcgtttttttgcagctgataccatggggaagtatacgaagacatgaaggagagagcaaagagtcaaatttgtgtttattagtttaccagactaggctgctaaatgaaaactccccacagcccttctgcctccacaggcaggaccacttccaggtctgtggtggagtctgagtggaataaaataagcacttttacactttgctttccaactgaatcttattaaaacattgatagttcttytctaagggttaagagaaacaggaatgcagattatgatgaaaaaattgccaacacaggacttttttgtagccatacacttgttttgttttacatgaatatgcatgagagtttatttttatattttcacatgaaaatatttatattgtgataatagtttgcctctgcacttgaaatatgagactagttatatattgataaaatattgtctttttaactctcgtggatacatatattatttcttgaactgatgaaaaatttactgttgctaagcttaaacataaaaattcttatataattatatttgaacaggtatatggtgcataat

SEQ ID NO: 135264 - DNA, 620 bp, Homo sapiens
ttcgggagaagccaaaattggtgaatatttgaaagcaagcagacatttccaaatagaattctgggacaagggagagtaacattttattgttcttaaaaaaataattatagaaaayctatgtttatagactgaatttggaaaagtaaacaaaatgcaaaggcattgcaatttacatggggagaaatattttacagcaagacattcaaaatgtcacctcatatctaagtacaggcaagtcatattgctgaggtatgtaagaaaaagcaactccatcaagcattctattaaaaaaaaaactgaaaaaaaacataaaaaaagaacaagcaattctttgcttttggtgataaagtagatgattctgaaagctgttcaaaacaataccagctaaggttaataggcttgctggaaggttggaagttaggaagccagccaattttatagaacgatactgtgaatgatatactggcaaattttctagggctatttatattttttattgtcaacagaatgtgcacattggatgccaatttccttcatctcactgagaattttcctgaaataatgttttcttatagattaattcctgattttgattacccaaacaattatgccacattcta

SEQ ID NO: 135265 - DNA, 570 bp, Homo sapiens
ggttaataggcttgctggaaggttggaagttaggaagccagccaattttatagaacgatacygtgaatgatatactggcaaattttctagggctatttatattttttattgtcaacagaatgtgcacattggatgccaatttccttcatctcactgagaattttcctgaaataatgttttcttatagattaattcctgattttgattacccaaacaattatgccacattctattatattgcagtaaatcgtagtatccatcagttgcattttggcttttcatgaaatattttgaaaagttaaccttttgctaaaggtacaggcattggaaaaattcaagtttaaattataatttcaccacttaatatcttgcaagtttatttccttagatgtaaaatgagcttaataatacttccattgcagaactgttcttagaatcgaaaagacttgtaaatctacttgaatagcacctgttacatggttaagggtagaaaaaaaagtaaagggcttgaaaggcaaattgatattacaaacacacacacacagtattatatttttaaaaaggtaaagt

SEQ ID NO: 135266 - DNA, 554 bp, Homo sapiens
aacccagtggcgctagaggaattaaagacacacacagagaagtgtggagtgggaaatcaggggactcctcacagctttcagagctgagagccctgaacagagatttacccccatatttattgacagtaagccagtgataaacattgtttctatagattatagattaactaaaagtattccttatgggaaacaaagggatgagccgaaacaaagggatgggctctggctagttatctgcagcaggaacatgtccttaaggcacagatcattcatgctattgtttgtggttcaggaatgccttaagtggctttctgccctgggtgggccaggtgttccttgccmtcattccggtaaacccacaaccttcagcgtgggcatcatggccatcacaaatatgtcacagtgctgcagagattttgtttatggccagttttggggccagtttatggccagatttggggcctatacccagcactaaaagactaagccaaatgaacaaggtaaaaggccagttttcctaatagaacttttatgctttggctctgtcaagaaag

SEQ ID NO: 135267 - DNA, 530 bp, Homo sapiens
aaaatactaagatgataatcatgttgaaatgcaatacattattattgctatcttcaaatgaattgataaacaagtgttaaaagatatcagtttcaattcccaacacagtaaatatagatagccacacagacaaaagttatttaggcagtgctcaagagtataaaaaatccagarattaagaaacctgagaattgctgagaagttaggaaaaaacctacactttttcacttgataaaagcacacatagaattgtatttctctgacactgctgttgctagtatagtttcaaatccttatattaataatatcttttaacccaagtaactaaattctattttacagaaaaagcagctggctggataaatgagaactgtctgtctcacacagcattaccattatgagaacatgtaatgaaactttctaaggccacataggtctcacccacacattcatgacgcaaagctatagtctctctttataacataaaatttatgttaaaaggcatacaaacataaaatgatgcttcatac

SEQ ID NO: 135268 - DNA, 594 bp, Homo sapiens
aatttcaatgtatttattgaaaacagttkcatgacacaaatgattcaccaaatttattactagatgaataaaagttaaattatgtgctatgggctaggatagccaatccactaaaattcagtgtttaacatctccccagtaaaagaggaagtaataaataatattcagtatcaatcagtaaacagcacctatgtacattttgatgggaaaggaagctaaaatcactgtcaaagggcatggttggctatgaggttattttaaattaagtgtagaatgttctccaaataaatcgtattatgtctaagcaattttcagtcctttatgccatagcatattcttacataaagattgataaataaagcataattcaatctttatatatggaacaacttgagaaaaatagataacttatcggtgcatatgagcaatctaaattgtctaattagataatttaggcctaattgcctcatgtttaaacaaatagcaatttaggtgctttgttccttcctctcaattttgtcctaagaagtgctgatagagtctgctatcccttgaagtttgatttctcctccttagttttagccatacacatag

SEQ ID NO: 135269 - DNA, 547 bp, Homo sapiens
gcagaatgaaaattatgtaggaggcatgaaaacagcattaatctttttatacatctccatcagagctcttgggtgttcaagtacattgtcaatgtgcagtaatatttttaaaacagtaataattttttaaatatctttttttctgagcttaaatctcaacagtaggcttaaagtattcagtacatcatactgtaaacagatgtcttttaatccaggtttaatttttcaatttactgagcaataaagagagtagatttagcataattcttaaagactcttaagatttttcagaatggtaaatgascactggcttcaagttaaagtcaatagctgcattagctcgccaaaaagagaaccagtctgtcctttgaagctttgaagctaagcattgacttctcttctctagctataaaagttcttgatggcatcttcttcctataaagactgtttcatctgcacttaaaaatccattgtttggggtagtcattttcatcagtgatcttagctagatcttctggatagctttctatagctcctcagtcagcac

SEQ ID NO: 135270 - DNA, 575 bp, Homo sapiens
cagaaagacaaataccacatgatctcacttatatgtggaatctttaaaagttgtactcatagaagcagagagtagaatggggattgccaggggataggggagggtggtcagtggggaaaaggtacatgttgatcaaagggtacaaagtttcaattagatagaagaaagacgttttagtgatctatcctacagaatggtgattataataaataatagtgtattatctattttaaaattgttagaagaatagatttttaaaaattggcatcataaaaaataattatgtgaggtgaaggacttagtcttatttaatcattacacattgtaaggaaacatcaaaacatcacataatgccccaygaacatacacaattattatttgtcaataaaaagtaaaattaaagaaattaaagaaaatattctaatcagacaagcatataatttatattttggtttatgtaatacacatcagcacaaatatgactttttctgttttacccaatgaaatacacattatttcctgaaaaatctgaaaaactatgttggttttgacccattataattaaatgaaataac

SEQ ID NO: 135271 - DNA, 587 bp, Homo sapiens
tggtcttcaccagttgtcatataaaattcacttttcatcacatgtcacaatctgatcaagaaatggttcgtttttgtgatgtagagtaagagaagatgacacttcaacaatgtttttgatttttgctcacctcatggtgcacccactaaccaagctttttcacttttctaatttgtttcaaatactgaataaccacacaatggtcaaagttgagttcttcggcaacttcctgtgtagttttaagaggatcagctttgatgactgctctcaattggtcattgtcaatttccaatggccagcatcggaaattgacaatggaaaaacactccatcttcaaagctctcatctcctttgcraaacttcttgaataccactgccctgtacttccttagcagttcctgggctaaatgaattattgatgttgcatgttgtctccactgttttacaacccatttttgaacttgaataagaaaattgctcaaatttacttttttctaacatctgtagtctaatccgtttaatacttttgcagtctaaaataaacacaaatagcaagtaatgtcattagcaaaaaaaattaagtgaga

SEQ ID NO: 135272 - DNA, 575 bp, Homo sapiens
cagaaagacaaataccacatgatctcacttatatgtggaatctttaaaagttgtactcatagaagcagagagtagaatggggattgccaggggataggggagggtggtcagtggggaaaaggtacatgttgatcaaagggtacaaagtttcaattagatagaagaaagacgttttagtgatctatcctacagaatggtgattataataaataatagtgtattatctattttaaaattgttagaagaatagatttttaaaaattggcatcataaaaaataattatgtgaggtgaaggacttagtcttatttaatcattacacattgtaaggaaacatcaaaacatcacataatgccccacgaacatacacaattattatttgtcaataaaaagtaaaattaaagaaattaaagaaaatattctaatcagacaagcatataatttatattttggtttatgtaatacacatcagcacaaatatgactttttctgttttacccaatgaaatacamattatttcctgaaaaatctgaaaaactatgttggttttgacccattataattaaatgaaataac

SEQ ID NO: 135273 - DNA, 548 bp, Homo sapiens
gtctccgggacagtttttttttccaatcattacaagatgcatggagtacaaaatatatatagataggtatgattaaatttaaaaaataatgtatatttccccaccttgaaggacagatgttgggaagctataagtactaaaaagcaccctttaaatcacattattgttttaatatctgtcctgatattactgcagtcttttattttcaaggtataattgccacttttcacagcagtcttgcaattcctagccataaatgaagaccattcacatagcatcaaactatacaatctgcaataatgtgaattttcatttatttttctttctctttacgactttatatgttggttagattttcaatagcatgatcctatggtattctggcaaagaagtactgaccctcagtctgactcatacagcatgattgyttccagaagtctacagacgtgatttcatttccctgtccttttttttttttttaataatgaattcatggtgaagtgagtttgggatgcattcattgttcctttaatgaaattgttttaaaa

SEQ ID NO: 135274 - DNA, 649 bp, Homo sapiens
ataattgaacaccggttctcatttgcccctcagaggacttggccaatcttctatctatccatatatatcatccttctacattacaccacagcaaaaaacaaaaacaaaaacaaaaaaacttcctctctacctgagcatgctttttttttatatttaaacttttaatcatgttattcatttttttagaacatattttctttcttgtcatttatgtcttgagattccacctatcacttaaggataaactcaartatcgcaccacttagaggctgcttctgatactcataagtcatgggggtgtagcttgctttgatagatcctccagcactttgcttgtgtctcaataatggcactaattacatgcaaggcatattatatttatttggtaaagttaaaaataaaaatgtattttctaatctgtctttattaaattgtgacttttgagaacaaagacttggtcttgttcgtcttttaaaatacaccccgcacaaataaacacacgcataatgccaagagtactctatatgctgctaaattccttaacaaatatagatatgtaaatagacaactcatttaatttgatgtttttcctttaaccaatcagatttctccaaactgggaggaaatatgtaggtaaagttaaactact

SEQ ID NO: 135275 - DNA, 649 bp, Homo sapiens
ataattgaacaccggttctcatttgcccctcagaggacttggccaatcttctatctatccatatatatcatccttctacattacaccacagcaaaaaacaaaaacaaaaacaaaaaaacttcctctctacctgagcatgctttttttttatatttaaacttttaatcatgttattcatttttttagaacatattttctttcttgtcatttatgtcttgagattccacctatcacttaaggataaactcaaatatcgcaccacttagaggctgcttctgatactcataagtcatgsgggtgtagcttgctttgatagatcctccagcactttgcttgtgtctcaataatggcactaattacatgcaaggcatattatatttatttggtaaagttaaaaataaaaatgtattttctaatctgtctttattaaattgtgacttttgagaacaaagacttggtcttgttcgtcttttaaaatacaccccgcacaaataaacacacgcataatgccaagagtactctatatgctgctaaattccttaacaaatatagatatgtaaatagacaactcatttaatttgatgtttttcctttaaccaatcagatttctccaaactgggaggaaatatgtaggtaaagttaaactact

SEQ ID NO: 135276 - DNA, 380 bp, Homo sapiens
aaggttactaatcagtaagcttagaattaatcaaaagggggattttcagaggaggcctaatatagttacatgagttctttaaaagtggagagctttctctggctggtggcagatgagaaagtyagatagattcaaagcacaagaaggatttgatgcaccactcatggctttaaagacacatgcaagaactggtgagtggcctccagttgcttagagcatgtctggccaacagccagcaaagaaatgaagacctcagttctacaaatgcaaagaactaaactctcccaacaatctgaatgagcttggaagtcaattctcccagaccctccagataggagcccagcatggctgacaccttgattttggggctgtgagaccct

SEQ ID NO: 135277 - DNA, 585 bp, Homo sapiens
tggttttataatgagtgatagtataaaaccatcagatcatgagatctgatggtatgataaggggcttctccccctcttgctcagcacctcttctgtctcctcccatcatgtgaagaaagatgtgtttgcttccccttctgccatgattgtaagtttccagagacctccgcagccatgtggaactgtgagtcaattgaacctctttccaggagattcccaggcaagatggtcaaataggaacagctctgatctgcagctcccagtgacaccaatgcagaaggctggtgatttctgcatttccaactcagatacctggttcatctcactgggactggtgagacagtggatgcagcasaaggagggtgggcagaagcagggtagggtgtcacctcacccaggaagcacaaggggtcagaatacatcctcccatagctaagggaagctgtgaggggtggtgctgtctggcccacatactaggcttgtcccacggtcttcacaacccgcagaccaggagattcccttgggtgcctacaccaccagggccctggatttcaagcacaaaactgggcagctgttggggcagac

SEQ ID NO: 135278 - DNA, 585 bp, Homo sapiens
tggttttataatgagtgatagtataaaaccatcagatcatgagatctgatggtatgataaggggcttctccccctcttgctcagcacctcttctgtctcctcccatcatgtgaagaaagatgtgtttgcttccccttctgccatgattgtaagtttccagagacctccgcagccatgtggaactgtgagtcaattgaacctctttccaggagattcccaggcaagatggtcaaataggaacagctctgatctgcagctcccagtgacaccaatgcagaaggctggtgatttctgcatttccaactcagatacctggttcatctcactgggactggtgagacagtggatgcagcacaaggagggtgggcagaagcagggtagggtgtcacctcacccaggaagcacaaggggtcagaatacatcctcccatagctaagggaagctgtgaggggtggtgctgtctggcccacatactaggcttgtcccacggtcttcacaacccrcagaccaggagattcccttgggtgcctacaccaccagggccctggatttcaagcacaaaactgggcagctgttggggcagac

SEQ ID NO: 135279 - DNA, 405 bp, Homo sapiens
gaacatagaagccagtatgaagggctcctcttagccaaagatggaacaatcagagcatcaaaaattttttgaatgcagyggactgaaacatatcaactgtgtagaaacgcatataaaagagagaaagcatttcctctcactccctagatcaaaaacctattggttaccattgaaagtaactagaaaaccaactcctccttctaaagattcgtttttaaaataaaatattaagcatcaattttgccagtatctgattttcctatatttccgggtagctaaatagacctaaatgataagataattccaactaataaatgtacaaggaatggtggcattagaaaaatcaacattttggaattccaaatgaaacatttgagccagaaaaacagtgtcagtagatgacac

SEQ ID NO: 135280 - DNA, 405 bp, Homo sapiens
gaacatagaagccagtatgaagggctcctcttagccaaagatggaacaatcagagcatcaaaaattttttgaatgcagtggactgaaacatatcaactgtgtagaaacgcatataaaagagagaaagcatttcctctcactccctagatcaaaaacctaktggttaccattgaaagtaactagaaaaccaactcctccttctaaagattcgtttttaaaataaaatattaagcatcaattttgccagtatctgattttcctatatttccgggtagctaaatagacctaaatgataagataattccaactaataaatgtacaaggaatggtggcattagaaaaatcaacattttggaattccaaatgaaacatttgagccagaaaaacagtgtcagtagatgacac

SEQ ID NO: 135281 - DNA, 310 bp, Homo sapiens
tattgcatatattgggttaagmaagctgcttctaaatttaaaagtagctctctaaatatcactaatagttatttgttaaatgttgataaagccctttgcatatgattcctggaaacagaaaataaatgattctaatgactgaataacaaatccttttggaagtcaagtgacttttttgttctttgcttttaactaaaattgaatgaactcctaattaagatgtaagctgataaattattaaaaataattttccttgatagattttggatgcgtattatttattgctgagtgacaaatttcccccaaagct

SEQ ID NO: 135282 - DNA, 506 bp, Homo sapiens
tttagtatctcatcagttacaagcctttttcttccatttttaagcccagcctatgtttgctaatcggctaattatatgtaatttttatttttatttttgtcatccagaytatagtgcagtttctcattcatagctcacttcagcctcaaactcctgtgttcaggtaatcctcctacctccgcctgtctagtagccaggactacaactgtgcaccaaaacacctggctaatttttctaatgttttatagagacggggtctcaccattttgctcaggctggtcttgaactcttgggctcaaacaatcctcccatctttgcctcccaaaatgctgggattacaggcatgagccactgcttccagcctgtttcttgtttttaacaaaaattgtccagggacccagtggcccatgctgtcagtgaatttagcacatgggcatagcatatactcagccatcaatcaaatgactgatgagctattaaatgtatctgcctatcaatcacattga

SEQ ID NO: 135283 - DNA, 467 bp, Homo sapiens
tacattaacacataacaaagatgtcagttctcctttaactgatctataggttcaatgcaatttctatgaaaaatttaccttaatgtttctatgaaaagacaaataagaataggctaagaatattgaaaatgaagaataaagtgggagaaatcacactgcctgatttcaaggcctactatatacctacattaattaaaacaattagctaggacaattaagaggtggaaaacgataagaggtcataagagtgttagccagcatgcctcaagcagaagccataaagggctttcatgatttggctttgcccctactgccctcgctattaaaaaaaattattttttttctagggagacaayagtcccagaatgagggatgtagaatggagacgaagccacactacagcaggcagcagagcttccttggctgacctgcaaacctgtgaatgaaaaaacaaatgtgtgatgttg

SEQ ID NO: 135284 - DNA, 523 bp, Homo sapiens
tagaatcttttaatagcagaattgattaagcagacggaataatttatgaacttgaagaaaggctatttgaaaaataaacagtcagatgagacaaaagaaaaaaaaacaaataatgaagcacaactacaagatttagaaattggcctcaaaagggcaaatatatgacttattggacttaaagacaaggtaggtaaagagatagggatagaaagttcatttaaagggataataacaaagaacttcccaaacctagggaaaaatatcaatatctaagtacaagaaggttatataacaccaagcagatttaacccaaagaagactacttcaaggcatttgttgatcaaactcccaaagatcatggctaaagaaaggatcctaaaagcaacaagagaaaagaagtaagtaacatacaatggaaattcaatatgtctggtagcagagttttcagtggaaattttacagkccaggtgaaagtggcatgtaagaaagtggcatatttaaagcattgaaggaaaaccctttt

SEQ ID NO: 135285 - DNA, 514 bp, Homo sapiens
acattttcattttgctcctctggtttcccatcttattttcacaaccttcttgtggcatattttgaaggtaytcaagtcagtttccacataagatatttacatatcatcagagcattgcaatgatgtttttgttttttaataaaaaacacatttatagatcattggcttataatttgaatgcctttttattaaaaatcaagattacacaagcaatcactgaggctttgctcttgagcgactagggtttctaagaaataagatgaattatctaatgcatagtgagtctttttcttatcctgtcaattgcactcaatttttctagctaagaaagatttgaagccaggtgtatgcctatagccccagctacttgagaggctggggtgggaggatcactttagcctagaaatttgaggccatcctgggcaacataggaagaccacatctcaaaaaaattttgtctcgaatttacacacacattcacatctgtcatttagatatacttgtttgcttaaaa

SEQ ID NO: 135286 - DNA, 342 bp, Homo sapiens
gataagaactaaaaatctctgggcactggaaactagttctagctgtgcccctatctgatctgagacagtgtatctatatctcaggttttcatttttctcatctgtagaactgattccttggcagaattgtctgtacctagctgaggaagacagaaattcacgcattaatgcagatacatgaagatgtccttcatcttggtgtgtgtgccgggcagctcaccttttgtggtttctctgtgttttcataacaggaacagcacagaataagtgatagattactattcttttattttgctttaactaaaggaayatttaggcctatttagattaaggataaagctt

SEQ ID NO: 135287 - DNA, 572 bp, Homo sapiens
tgggtcccctttgccccttcttccctgcaacatcgatgcattatctggagctgctacaacagtcctgactccctggggcacagcaaatacacaggctaagagtcgaaggcaggaagagaatgctggggaccttgacrgcatcgccaccaagctctggacagcctgtcctggaagataaatacatgtttttattgaattttctgttgcttgcagtgaaagcatccttactgatacacatagtaatattctttatttcttctctccctgctccctcccctttctttcatacacacagcttcttactcaattgctatcacctgtttccctctcccttccttcctcccttctcttggcattctccttgcaagtgctttttgagcactcactctggacccgctctgtactgcctcacagagagaaagcaggagccaaccacgcactggaccatagagagcaccctcccgtccatcttccttgtgcaccttactcaggcagtgcccagccttgtcagcctccagccacagtcagctttgccttcttcagggtttcctgcacacctccagcacaattag

SEQ ID NO: 135288 - DNA, 550 bp, Homo sapiens
aatctagcatttttattaatcaaatcaaatagcatttaatagatacggttgttttagcttctgaaattagccacgtataaaatagcactgcattcaagtatgcaatatattgccccaaaagaacaatatgtgctcatcacaatttccatcaacacagcacctgtatttacccaaataagataaaaccaacattttccataattccatcatcatttgcatgatactttcatgatttctgctatagctatgtgccacctgtactattatttactttaaatatttctttaaayagactcactttgttcatttaaataattttattttaaaaataaaattttatataatgagctggctatgctagctattctttaagacaatattaaaatgaagacataacaattaatataaaaatggtttatctctgcaccaatctgaagtcattctgtataccaacaatggcattatggtacatttggggaaaacaagtgaaattaaaccattacagtgagaactacaagggcatcttgtctagcaccttcctgagcctatg

SEQ ID NO: 135289 - DNA, 550 bp, Homo sapiens
aatctagcatttttattaatcaaatcaaatagcatttaatagatacggttgttttagcttctgaaattagccacgtataaaatagcactgcattcaagtatgcaatatattgccccaaaagaacaatatgtgctcatcacaatttccatcaacacagcacctgtatttacccaaataagataaaaccaacattttccataattccatcatcatttgcatgatactttcatgatttctgctatagctatgtgccacctgtactattatttactttaaatatttctttaaatagactcactttgttcatttaaataattttattttaaaaakaaaattttatataatgagctggctatgctagctattctttaagacaatattaaaatgaagacataacaattaatataaaaatggtttatctctgcaccaatctgaagtcattctgtataccaacaatggcattatggtacatttggggaaaacaagtgaaattaaaccattacagtgagaactacaagggcatcttgtctagcaccttcctgagcctatg

SEQ ID NO: 135290 - DNA, 517 bp, Homo sapiens
tgggtccaggagaaggcagactactggggagtgagggcagacagagcaaagggccctgcaacacccagaaggatggagagtggsggagactggtaacaggccacgtggaagtaagaggcacaagccgtgtggagggcagcactctctgcaacagaaaagataaacaatctggagtagggagtgaaaggcctcagaaatgcagggtggggaaacaaccacagctggaaagcatgggaggaaggtgagtggaagaggaagtatagagctgtgatggctacagaaaaggggtaccctgcccctgcagtaataaggtggggtcctaggtggctgcaaagtgtcctcaaggctttgcaccaggcctgaggctaaatgggaagataaggaggctctgatagggtttgcaacatcagaggagaaaccccagcagaatcctagacccagcttgaccattttttgcctgtgagacttgggctggctgtcactgctgtaaggactgactgaataacacaagtccaag

SEQ ID NO: 135291 - DNA, 504 bp, Homo sapiens
gaacagagactctggtgtcacagcatctaagagaaggcagtgtttttgggagaagaggtggtcaacaatgttaaaggctgctgagagatccagtcatataagaatgaagaagaayccttggagcaggcagtgagaacaggaccctgtcaatgtctcatggccaccaaaaccaaataggaacagggtgaagggagaataagagcagagagagtgactagatgtacctctttctggtagtgctctcatctcctgaagcagcatctttgataacattctttgtttatgagggatactgaccacctgcagcctccatgactatggatcatcctggagaatagtttctggagtaacaacctaggcttttggctaaaattggaatgtacctgttccctcagttaccacgcagtgggtgtctccactgctgtctcaaacacaaggtccctcttactctccttctcaagtcccatgatgagtatttttgaacatgccattattgcaaataac

SEQ ID NO: 135292 - DNA, 547 bp, Homo sapiens
cctctgactgcagggagtacacaatcaagcccaggtcctgcagcctcctcttcccatgccagggcctgaagaactcattcagttcttcctagtgccccccactttgcccaaggtgctatcttggcagacttcctcagccctacctcccaccccagttcttgaggctgtgcctgctactccccmtccttagggctctaggaagctacagctcttatatcaaggcccagggtggaggttaccactcccagctttgtctctaaccagccaggaggcattttagaatgcactttctcactcagagtctcagcctcctgtctgcacacacagctcctcctccatagagatatcctgggactatgtgagctgaagcatgagagtgaggcactcagagtgagatagcaccctcaccccacctgccccttagagccctgtaatcttggccacaccactaccatcccacctgactctcctcctccgctctcctctctaagatgaatatcctagacctctgtacagggccagggggctgccagtctgccaacaaccc

SEQ ID NO: 135293 - DNA, 468 bp, Homo sapiens
tctggctccttcagctcagccatattgacctcctttctgtttcttaaacactctgagaacattccagtctcagggccttggcactagtatttctccccattttcacatggtttctgcactatttcactcaggtctctgctccaatattatctcttaagaaaggcmtttctgaccgccttacctctaatgcactatcttctgccccagtcattttttaatgccttactctgctttgtttctaccacttatccctacctgacagcacgttattcatatttttatttgctggtttatttttgtctcccacggtagaatgaaggcaaaacattgctctaaccagtgtgctctacacaatgcccagcccatggcaagccctccttcagtgtatgtggatgaatgtttggatgtctgagcccaaacccatttctgtcccctatgacatcacccgtggctcccaaacagaagtgg

SEQ ID NO: 135294 - DNA, 578 bp, Homo sapiens
tctagctatgaccctatttctttgtttcttgacatagacaaacattttttaaactaagagctttattgtgatacagtttttgtatgataagcctcacccttcaagtgtacagttcagtggtttttagtatattcagagttatgcagccattaccactccctaatttcagaacattttcatctccccaaaaagaaccccgtacccactagcagtcactccctgtagctctctcccccaccattgatcctggcaacctctgatctaacttctatctctgtagatttgcctatcctgggcatttcatataaatagaatcatacaacagtggcattttgtgactgatttttctttacagtgattataaatcaaatgcctgaagacrctaagcttaggatagtgtttgctgtacaactttgataactgaacttttgtaaagctgaaaatgtgactgtgtctgtatatgtggcatattatccttagatgatccttacttcgattattaagaattttttcccctagtaatcttcaactgtctcaatattcagcaggaaccccttggagacaaagatcagtacgaa

SEQ ID NO: 135295 - DNA, 540 bp, Homo sapiens
gcctcaactgagaggaaagggtgggtgttaattcccgaggttcttgtatctttgattccggtactgttctcttcatgggtgtttgctgatgctttattaatttgaaatgcaagaccttagggaaaatcatacttatttcatttaaaaaatggtgtgtactgaactatctggtgaactgttttgaattacacacactgtattgtgaactacatttggttggatagtagggagcttatataataacttgaaattgagccasgtgctcctttgtgatgccatcttaattttattatttctccacaccttttagttctttagttcgttacttttaatggcaaaatctgtgaatttcttttacatcaacctatttcctgctgtgagcaattggctgtgataatttaaggagccactagaggtcattcaagcactagaaaaaaagttgtgcaagttttaagaatttgtttcaacttccggaagcaggatctgtagaggctgagcaggtacatggtaccatgtttcatctttttcctggttttttag

SEQ ID NO: 135296 - DNA, 500 bp, Homo sapiens
aattctgatttaagagaaaggctgccttctgccatgaggacacattgatataagagtttgagaggtactggtgcacttcttcacactaacagacgtgtgaggatgtatgactctaaaccacatggcatacagttcctgcctacttaatgtttacttttctacctctgcctctggttttggtccctggcagctgctgattcttggcaaaacctcagagcttggagtcagaagactgagtttcaaagttccagtattgcctttttctttttttttttctagccatgatatcaatccttctcagtcactaaatgagtgtgacaacaccttgtacagttgttggtgtcattaaatcagatggtgtgtaagtgtattttgtaaaaactgtaaaggaggatgtggctgtaggggctgayggttctcatgagtattactgctcttctttccaacagttaaaagaatattggcagaaaaacagccctagagttccagcaggagcgaac

SEQ ID NO: 135297 - DNA, 508 bp, Homo sapiens
aatatttaaaatacaaaacaaccatagccatgagtgatgtgcagcacacaagacccagacctttcttctggcaattcttaaatgcattygtagttacaacaccctctccttctggtcttctaactttatgcaattctagccctaaatctttctattcccagatgaagcctgccatctgttcatcaaacttgtagttggagggagcagctgcagtttctatctgaatctgaatgtgtatgtgttagtcattaagaaaaaaatttgtgctgctttatgttttgagtcataactatgccatcagttggtcccaacaaaactgtcaatgccaatcccacaggagctagtctgggatctgctcccagcaataggctcctggtggatcttgggcagcttatataaaatcttttctatttgtcttcatctaaaaatggaaacaattttttaaaaaactcacctttttttcctttttgagaatgaagcagcagctctttgatctccttccttattg

SEQ ID NO: 135298 - DNA, 504 bp, Homo sapiens
atagatcacctgcaagctagaacttgttgattagatgatggatataaacttgaggtcaggtttaataggtttagttacttggtcagatttcataagtttagttactcggctcccagtgacatagcatggaggattgactgggaagagtcaagatatggaatgaggattgagcatgaaacaggccctatccattaattatttggtcatttctcgaggagcatttcgtgggcacaaaagcaactaaaaaccctattatttactcccccaaaattcaatagcactctccaatagctgactatgttttgacttctgtcagaaagcactgaatcatamatgacctttaaaagcactgatcatgttgggaaaaacctataagaggcatgatgccttcctttaaaggacctagtctttggcagatgtagactacatttgctgcaccaaaacaccattaatcagtttgagtcaacaaatatactgagtttttatcctaagcaagatacacaa

SEQ ID NO: 135299 - DNA, 471 bp, Homo sapiens
tctctccctgatcttaccctgaaattccatcactgggccaacttgtctttcctcagggtagtaataatattgacagcttattctcacatagcacttactgtgaactagatactgttgtaagaactttacatgggttaacatccctatgagatagatattattaacatctctattgtacagaagagaaaactaagggccaaagaggtagagaaaatyacccaaggtcacacagcggtggggcagaattgaaatagggaccatgggtctccagggtccatgctctggaccactcccaagccaaattttcactccatgccagagattcttgacatgtatgtgctgctgcccatcaaacatgcccagccaggtgagacaacctgaagccaaagttgggcatccaatgcagaagcagctttctccctgaagaaggtttctagagtggcccaaagggcctattttaagggcacccac

SEQ ID NO: 135300 - DNA, 471 bp, Homo sapiens
tctctccctgatcttaccctgaaattccatcactgggccaacttgtctttcctcagggtagtaataatattgacagcttattctcacatagcacttactgtgaactagatactgttgtaagaactttacatgggttaacatccctatgagatagatattattaacatctctattgtacagaagagaaaactaagggccaaagaggtagagaaaattrcccaaggtcacacagcggtggggcagaattgaaatagggaccatgggtctccagggtccatgctctggaccactcccaagccaaattttcactccatgccagagattcttgacatgtatgtgctgctgcccatcaaacatgcccagccaggtgagacaacctgaagccaaagttgggcatccaatgcagaagcagctttctccctgaagaaggtttctagagtggcccaaagggcctattttaagggcacccac

SEQ ID NO: 135301 - DNA, 467 bp, Homo sapiens
ataaataaataaaaataaagcttgttgtgctttgtgtacttttatgatctctgacctctgctttattcccaactccaaggagacttactctgaatgttcagaaaaaaaaaattctgtggagcatagctttatgactgcccctgggctaaaggaagaaggatrtgttgtggggccttcagttattccatcttggaaagtataagggtcaggaccgcctccacccaacccctaccccaacccattaccggctaggaggtttaagccatcttcttgggcatgggctgcagaaccaggggggtgaattaaaggccacaaacaaagctgctgcatctggtcactcacagacagtaccctgcacagctgccagatactcttcccagtgtccacagtgcaaacagcactctctgaggttgtgcagtgtggtggccctggcccaaaagtccccaccagtctaccccagtgcccaa

SEQ ID NO: 135302 - DNA, 611 bp, Homo sapiens
gcctgggtgcaaaggggtgagagggtccccaggggatcaatggagacgctaaaaatagacctcaccaccttagcgatttacctgtttgctatcacagacattccattttggttgctatcttctcctctatctattcttgttaggtttcagtttgttaaaataagaactaagcttctcagttcactcaaccagaactgttaaaagattaattcagccctcagatctcgagtttcctctattgggaataaacatacactgcccactttctytgcttaatgaactcttagaaggctgaccactgagggcatcccctctagttttcttctcatgatttttgttctcacctccccaagaactggccacattctcctccagagaccaaagtcatcttactattgtactctccccttttccgaaacccgctagattttaaattctttgagagcaatgtcagcgtctccttcctctttccttcccacatacttaacaaggcagaagattaatgcttttaacctacactaaaatattgaagtaatcagtgtcacagttgtgctattagcctcaagtaaggaagcaaattttattaagaaaaatgtaaggaacaaaccgta

SEQ ID NO: 135303 - DNA, 588 bp, Homo sapiens
cttagcaatattctcaaacctcaaatgttcctctagggactcttctcattgagggattttctttttatttcactttaaacatgaaataaacattttatttgagctctttggaaaaaatattaatattcaccaattgtatccaaaakgtaaatattaggacatgatgggatgaacccaaacaacctctgaagaaataactttgctgggctctttaaagaagttgttgttactctgagagagctgggggtggaggaggtgatggtggaaagtttccagaggtgaaaaagaggtgagtgtctcactgctatccatagatgactcctgagctacattctccttgaaaattcaccagtcagcttatttagaaggtgcgtgtaaatacttgaccaagttcctgagtatgtgtgcatgcctctgatctattttgagaagagtctttaacaaacctcttgactgtttttcaatattcttgcgcttttctttccacttcctggtccagagattaggtaagaattggagaagaggagcaggtggccacttcagggtgtgccgcagctccttcagtcaaggtcaccaagaggaaaggaa

SEQ ID NO: 135304 - DNA, 519 bp, Homo sapiens
tacattttgatttgatacttgtatatggcaagaggtaggggtctagtcttcttcttctgcatgtggatattccgttttcccagcaccatttattgaagagactgtcytttatccagtgtatgttcttggcaaccttgtcaaaaatgagttcactgtaggtatatggatttgtttctggattttctctattctgttccattggtctgtgtgtctgtttttatgccagtactcagatgttttggttactatagcaccatagtataatttgaagccaggtaatgtgatttctcaagttttgttctttttgcttagggtagctttggctattctgagtctgttgtggttccatataaattttaggattgttttttctatttctgtgaaaatgcgattggtattttgcaaggggttgccttgaatctgtagattgctttgggtagtatggacattttaacaatattgatttttctaatccatgaactggaatatctttccatttttttgtgtcctcttcaattt

SEQ ID NO: 135305 - DNA, 481 bp, Homo sapiens
attgtatcctagactgcccttcaagtttacctaggaccccagagcactttggccagtagtggcaagacttgctgacaaactggagttctgacccacaggatgggtgattttcctctggctatagctggtccagatgcttcctccatgcatgggtactcaaagtctccgccccgcatgactttgctctccactctgacagggcagcactgagttcaatgcacagtcgcccagtcactgtgctgtccctcccctaagtgcacagactcttcaggctgcacagccactgcaggagtgagtcaggaaggggtggtgtcagctttttaagtctctccaaccttcttcaatgcctctttcaatgatatgaagttaaaaccaggtactgtgtttgctyacctgatttttggttcttgtgatgatgtttttgtgtgcaggtagttgttaaaatttggtgttcctgcagagggaatgaatagtgtaggct

SEQ ID NO: 135306 - DNA, 643 bp, Homo sapiens
aataaaaaggttaagctgagaaaatgccccagggaactgtattcagaaaacaaggcttacatcaacagcaatatggaagagctgaatctgagacctctgtgctaatctagaaaccaaaaaggctaaaagtcatttagactggtagtgccccaacggtcctagcagattcaaacacaaatctttttcaagaaaaaatttctagttaagcccactaaattcccaggttaagattaagacaatgtgagttcaccatcaaaaatcaccagacataaaggaagcaagtcaccataagtgcaaaattagaagaaataacaaatatttagacttccaataaattcagatattaaaattttatcagctgtgaaatagagaaaatctatttagaaagaaatagaaataagggacagaatcacaacaatgagcaagcaaaaagagaccatcaggaatgaccaggcaaatatgataaataatcaaatgaagcttgcagatattaaacacatatttgttgaaatgaaaatactcaatggacaggtcgaatggcagattataaacagataattagtaarccataacatatctgaaaaaattattcagaatgaacagagaatggttaaacagtactgaagttagactgaaaagatct

SEQ ID NO: 135307 - DNA, 244 bp, Homo sapiens
cagctaatccaactggagatggaaaccctttcaggagttccaatgccagtccttcagtggckcaaccctgaaacctcaacagagttttcaaaatgacatgcacaggcttccacatttgggctcagtcccaactctccttccgattgcagagagaggttgctctggaaagtcatagggaagggccctacagatgacctcagacgaacaccctctcaacacccaagtctagaacccttcagaattt

SEQ ID NO: 135308 - DNA, 244 bp, Homo sapiens
cagctaatccaactggagatggaaaccctttcaggagttccaatgccagtccttcagtggcgcaaccctgaaacctcaacagagttttcaaaatgacakgcacaggcttccacatttgggctcagtcccaactctccttccgattgcagagagaggttgctctggaaagtcatagggaagggccctacagatgacctcagacgaacaccctctcaacacccaagtctagaacccttcagaattt

SEQ ID NO: 135309 - DNA, 244 bp, Homo sapiens
cagctaatccaactggagatggaaaccctttcaggagttccaatgccagtccttcagtggcgcaaccctgaaacctcaacagagttttcaaaatgacatgcacaggcttccacatttgggctcagtcccaactctccttccgattgcagagagaggttgctctggaaagtcatakggaagggccctacagatgacctcagacgaacaccctctcaacacccaagtctagaacccttcagaattt

SEQ ID NO: 135310 - DNA, 244 bp, Homo sapiens
cagctaatccaactggagatggaaaccctttcaggagttccaatgccagtccttcagtggcgcaaccctgaaacctcaacagagttttcaaaatgacatgcacaggcttccacatttgggctcagtcccaactctccttccgattgcagagagaggttgctctggaaagtcatagggaagggccctacagatgacctcagacgaacaccctctcaacacccamgtctagaacccttcagaattt

SEQ ID NO: 135311 - DNA, 444 bp, Homo sapiens
gccaaatcccatcaagaacttgtgatcggggtggggacggtgggtaggtaacagagtctcagcattgtgaaataattctcctctgaacaggaggaagaaaaaggctgtcactgtgcaattagaaaatgtcatcacttttcatgacacttcagtttttcttatatgtaaaatggaaaaaataataatacagtctcactgctatggtttgaatgtcccctccaaaattcatgttgaaatgtaattgctgatattaagtggtgggtcttttaagaggtggttaggtcattcgggacctgycctcacgaataggttaatgccattatggcagaagtgggttaattgtcatgggagtgggcagtccccatcctctctctggttcacatgctcacttgcccttctgcctctcaccatggaatgacgcagcacaatggccctcaccagatg

SEQ ID NO: 135312 - DNA, 450 bp, Homo sapiens
ccaaatcccatcaagaacttgtgatcggggtggggacggtgggtaggtaacagagtctcagcattgtgaaataattctcctctgaacaggaggaagaaaaaggctgtcactgtgcaattagaaaatgtcatcacttttcatgacacttcagtttttcttatatgtaaaatggaaaaaataataatacagtctcactgctatggtttgaatgtcccctccaaaattcatgttgaaatgtaattgctgatattaagtggtgggtcttttaagaggtggttaggtcattcgggacctgccctcacgaataggttaatgccattatggcagaartgggttaattgtcatgggagtgggcagtccccatcctctctctggttcacatgctcacttgcccttctgcctctcaccatggaatgacgcagcacaatggccctcaccagatgtcagcac

SEQ ID NO: 135313 - DNA, 452 bp, Homo sapiens
ccaaatcccatcaagaacttgtgatcggggtggggacggtgggtaggtaacagagtctcagcattgtgaaataattctcctctgaacaggaggaagaaaaaggctgtcactgtgcaattagaaaatgtcatcacttttcatgacacttcagtttttcttatatgtaaaatggaaaaaataataatacagtctcactgctatggtttgaatgtcccctccaaaattcatgttgaaatgtaattgctgatattaagtggtgggtcttttaagaggtggttaggtcattcgggacctgccctcacgaataggttaatgccattatggcagaagtgggttaattgtcatgggagtgggcagtccccatcctctctctggttcacaygctcacttgcccttctgcctctcaccatggaatgacgcagcacaatggccctcaccagatgtcagcacca

SEQ ID NO: 135314 - DNA, 455 bp, Homo sapiens
gatctcagagtgccaaatcccatcaagaacttgtgatcggggtggggacggtgggtaggtaacagagtctcagcattgtgaaataattctcctctgaacaggaggaagaaaaaggctgtcactgtgcaattagaaaatgtcatcacttttcatgacacttcagtttttcttatatgtaaaatggaaaaaataataatacagtctcactgctatggtttgaatgtcccctccaaaattcatgttgaaatgtaattgctgatattaagtggtgggtcttttaagaggtggttaggtcattcgggacctgccctcacgaataggttaatgccattatggcagaagtgggttaattgtcatgggagtgggcagtccccatcctctctctggttcacatgcycacttgcccttctgcctctcaccatggaatgacgcagcacaatggccctcaccagatg

SEQ ID NO: 135315 - DNA, 477 bp, Homo sapiens
agcctcctgagtagctagggctacaggtgctcaccaccatgctccactaattttttaaaaatttgttgtagagatggggtctcactatgttgtccaggcttgtcttaaactctaggccccatgtgatcctcccagcttagcttcccaaagtgttgagattacaggcatgagtacctgaccctcctcattttcttttaagctcttattgcatccttatcacagccatcaggcttctcttgaagtgaagtctcttgaagtccctttaacttatcatgcaccctcgcctcccagtttctgcccaaatccagtgccaaagccactcccacatttcttacagcagcaccacatttccaggcacctaaatctgcactatttctactgctgtatagtaaacaccccaaaacktagtgacttaaaacaatagtaatcatttattctctcttacgtttctgtgggtcaggaatccaggagtggctt

SEQ ID NO: 135316 - DNA, 594 bp, Homo sapiens
ggagtggctggattccctgcacctgctgctttactgttggcctgtgtttcagtatttacatttctctggatcatataagaccaaggtcaggttaagtccattactcctaaccctagttggcccaaagtcaaacagaagaggttgcctgtgcacctgcatctctgcccttcctgccttctctaggtgctcttagctctgcatttctgctccttcctgcgggggcaggaggttgggcctgactctgaagccctagtagggcctgtcttccagaaagacaagcacgtagacactgcaggcagccaccttggggtggggaagggaacacccgcctggcatctggctgttcgctgggtggggatgcctctttctgctgcctttgttacccttttccctcaccactgccagcactcaggctccatagttaaaaggcggcaccaggttcttcccagcaagaacctcaggagctctggaggcaccttctgggtggggtttggttggataagcaaagcrtctccttcaatccttcagcctccattctgctcagtccctggaaggtcgggtggtagcatgggaggaggccacctcctaagcttc

SEQ ID NO: 135317 - DNA, 480 bp, Homo sapiens
attaggcagcatttggacctctgtgatgtagatgacgtgattaaacggcagtgtgtaaagacaggaagaaggcctatgcaagacctcggtactggcataggaggggctaggagggcagggtatgacggaggctgagaggagcactgtggagaaggagcaggtaacatgcttgagtgctgcacagactgagtcagacaggacttggtctgaccactggcaggaagcccgttggtgcccttggcttgagttcaatggcagaatggcagaagagggtgtaggctgtgaractgacgcaggagaggcaggctgccgcagccactcccgacggcacagctttgagctccgtgctgggtgttcagtgctcgggataacacatgtgcagtaaacatttctagaatgacccactttgggggttgaagagacttttttgtttttaaaataggtgggacttgagcatctcacctctcccaccccccagcc

SEQ ID NO: 135318 - DNA, 435 bp, Homo sapiens
ggcaagagaccagcgtccaagctccacaacttactgcgtggggtgaccttagcaggtgacttaactcccttgagccccagtgtcctcattggaaagatgagaaaaatcactctctatggtgttgtgaggattaaatgagatagcagagttgtatacaaagcagtgctcaggaaagcttcatctccttccttctctaagatattgaaggcacrttttgaaatggaagaacatcatcagctgcaaaggaggagaagggggatagatacatgccctcactagcacggctgaagagggcagagtcccagtgaaatggcccaccagggtccagagatcctagaaggaggttctacagaggggcctcagggaaccagggtcatgagataaacaccggggtatgcaggctgccaaggaggagaggtgcacccagcacaggct

SEQ ID NO: 135319 - DNA, 358 bp, Homo sapiens
caggctgtgtttgtatctttgtgatgctctcttgcttccggggtggaaacagctcaccaggccaagaaccaggaaatgcaggttcagctcatgaacctcttccctgatgctggctttcaggtatcttgtgtcctcgtccaagccactcctggcacggacacagggacaaacgtggaaggggagttagaagtcacccaccttacargtgagacactgaggccagaagggatagaagtgactaagccaagcataggcagcagggtgtagctacagttttgagggtcctcctgccttttcctgtgtgtcagaaagcagaagaaagagaacatggatcctcatgaaatagggaggcagatgc

SEQ ID NO: 135320 - DNA, 545 bp, Homo sapiens
gcactggttcagacctaatctatcccagcactggatctcacctaaggtctgctataaccattccctggctaccacctatgtttacgcaaggctctggggctgtagatgtcaaagccagccaggtttgtgttcttcccttcaggggccaagttcctctaagcctggggcaggtccagaggtactgttcaggagccagggactaaagtcaaaagccttagaagtctacctgaygttctattgcactgcacctgggctggaactaaaaccacgagacatagctcttcccatttttccctcctattttcaaaggcagaagagccttatcccatggccaccgccaccacagacccatggagagtactgctgggctaccaccaatgtttccttatggcctgagggcttttcagtcagcttgtggtgaatgctgcctggcctgggactcaccttttagggcagtgggttccctcctgggccaaggaaggtccagaagtgccatccaagagccaaggcctggaattgcagactcccaagagctcactttgtgc

SEQ ID NO: 135321 - DNA, 545 bp, Homo sapiens
gcactggttcagacctaatctatcccagcactggatctcacctaaggtctgctataaccattccctggctaccacctatgtttacgcaaggctctggggctgtagatgtcaaagccagccaggtttgtgttcttcccttcaggggccaagttcctctaagcctggggcaggtccagaggtactgttcaggagccagggactaaagtcaaaagccttagaagtctacctgacgttctattgcactgcacctgggctggaactaaaaccacgagacatagctcttcccatttttccctcctattttcaaaggcagaagagccttatcccatggccaccgccaccacagacccatggagagtactgctgggctaccaccaatgtttccttatggcctgagggcttttcagtcagcttgyggtgaatgctgcctggcctgggactcaccttttagggcagtgggttccctcctgggccaaggaaggtccagaagtgccatccaagagccaaggcctggaattgcagactcccaagagctcactttgtgc

SEQ ID NO: 135322 - DNA, 425 bp, Homo sapiens
tggcattctcaggatgagagagattgaggcattagaaaggtagatgaaaatggacatgtattttctgatcccctaagtactagggagaaaagctaccarcagaccaattccaggtaagcgtcagtattggaaggaagtctagtggtgtttggataggaacattagcaaggaagtctggacatatctttggaaatccactcaaactattcactgaggcctaacacacagtaggtgctcagtaaatgcttgttgaataaaaaagacagaaataggcagggctgagctcctcttttccttcctgagacggagaggcccacagtaactagaagctccagaatgaagctacacccaggccattacatgttcctccaggtggcccagggtgggggtcatcacaggcccttggggctggggaagatctgtga

SEQ ID NO: 135323 - DNA, 576 bp, Homo sapiens
gaattgtggctgtcctggccaactctgtgtctagcatagttctaacatagttcctggcatacagaagatgctcaataatatttgttgaatgtaattggcacctccaattttctaaagtgctcacatcaatttactttcagggatacatgaatatctgttctatagaaaaggcacatgaagaaatcattttgagctcatcagagaaggtgctgctttctaaaaaccagacagtatgtttgtagaaatacaggactgatggcctgtaataaagccaggctatttgttaattaaggtatggatcaggaaaatcctcttctcatgctctgtcaggtagatcctctaatagggtagctctgtgatgttttaaaaggttccagcattsccagtggcagtaggggtggcaacagctctcatctcctaaactggaccagatgaactaaaattctgcaacaggccttctaagaagccctaccagctgcagtaaatgggttccatacaacacctgcccatccagtactcagtgtacggagccagggaccaaagcttcatgaattcttatccccagaaactgtcctt

SEQ ID NO: 135324 - DNA, 599 bp, Homo sapiens
tatgttaatccacattgatcagtatacttggtaagaagcctgcaggatttgtccttgcaactctgctgctcagcaggtcctttccctggagtgaaattgacctgggaagctaggccatcatcagaatggtgttggtgtgtgccggcaacagacccggcaggctgggctctccactcacctgaggctgctgcagcctgtgcctaagcagtcagatactggggccagctaagctcagtgttgtggccccttctccatgccttccctctgaaggacacagtactgttgattaggagtagggtttcctccagaggtggagtacttaaaagacaagcactcttttgggggacgtggaagttttctaaaatcagataggggtcatggttgtaaaactgtttagttgtatacttaaaygaatggatgttatagtatgtaaatcatattcagtaaatctgttggtctttttatagactataaataaggacagctctgaggttatgtaatcttgaggaagggttgcaatcacactaatttccaccttccttatctataaaattgcaataacaacatctactgcacacggatgttgtatcaatgaattc

SEQ ID NO: 135325 - DNA, 465 bp, Homo sapiens
tctgtaccacagtaccctgcaaagccccatgcttataataatataggtggcartcatgttaattattatagctatcaaatatagtataaaattattatgaagacttactgagttaagacatgcaaagtggtaagaacaatgcctagcctatagtaagcatgcaacacagttagcctttcccatctgcaattctatagccgaggattcaaccaactgggggttgaaaatatttgaaaaaaaggtaaataacaatacaataaaaaaatgcaaataaaaaacacaatgtaacaaatattcacatagcctttacattgtatttggcattgtaagtaatctagagatgatttgaagtatacagaggatgcatgtaggttgtatgcaaatactacaccattttatattaggggcttgagcatccaagcatgtgcatgtggatcctgaaaccagtcccttgaggataccaag

SEQ ID NO: 135326 - DNA, 561 bp, Homo sapiens
aatcatacgggattatcacctaccctaatgacttcatttcagtttaattaccttttcaaaggtcttattttcaaatacagtcacattctgaagtgctgggggttaggacttcaacatatgaatttttgagaatggggacacaattggctaggtgcaaggaattagaatttcagggtaagaattattcaatcaataarttattttaactgcctttacatttgtttgaggaaaattccgggacacgttttggttttgttttgttttaacaaagttaatctaacccatgcttaaaaattaggtggttcacagtattcaatccattctgagaactgctagtggccaatgtcgctgtccatcatttccctttgccccactgaaatactctcaggctctttggtggtaacagagcaacaaatagagtgcttttccagatctcaatgttgtcagagttgcctttgacaacaaggaaggaaacattgcctttcttgcactacttgtgcctaactctcaactctgaggcactgcaagcaggagcaagagagaaacatcaaggctgagcat

SEQ ID NO: 135327 - DNA, 459 bp, Homo sapiens
tgcctctcttaaagagttgacatcctcttatttgcatggacattgaacttctcttttagctttggccactactaagatcaaagacaaaatttcacctcaactgtggcacatttgtggaaatctattgcttgtatgtagatctctagtctaataytgttttccatttcatctatattttcccttattctgattgtctattagtatatacattattgtaagctgcttcaaatatttgtggaataaagcaaacatcataaatgaattaataattctgcttttttaatgtctgctcaatcaccaaaaaaggctgtttccctaatgtggggaacatattgattccctgccaaaccaaacttgatgatttgcaagcaacatgttcttagaaaacatttactgagtactattcaatattactattgaatagtatgactattgaattacaggaaatatgatacttaa

SEQ ID NO: 135328 - DNA, 447 bp, Homo sapiens
ttgcctctcttaaagagttgacatcctcttatttgcatggacattgaacttctcttttagctttggccactactaagatcaaagacaaaatttcacctcaactgtggcacatttgtggaaatctattgcttgtatgtagatctctagtctaatattgttttccatttcatctatattttcccttattctgattgtctattagtatatacrttattgtaagctgcttcaaatatttgtggaataaagcaaacatcataaatgaattaataattctgcttttttaatgtctgctcaatcaccaaaaaaggctgtttccctaatgtggggaacatattgattccctgccaaaccaaacttgatgatttgcaagcaacatgttcttagaaaacatttactgagtactattcaatattactattgaatagtatgactattgaattacaggaa

SEQ ID NO: 135329 - DNA, 460 bp, Homo sapiens
ttgcctctcttaaagagttgacatcctcttatttgcatggacattgaacttctcttttagctttggccactactaagatcaaagacaaaatttcacctcaactgtggcacatttgtggaaatctattgcttgtatgtagatctctagtctaatattgttttccatttcatctatattttcccttattctgattgtctattagtatatacattattgtaagctgcttcaaatatttgtggaataaagcaaacatcataaatgaattaataattctgcttttttaatgtctgctcaatcaccaaaaaaggctgtttccctaatgtggggaacatattgattccctgcmaaaccaaacttgatgatttgcaagcaacatgttcttagaaaacatttactgagtactattcaatattactattgaatagtatgactattgaattacaggaaatatgatacttaa

SEQ ID NO: 135330 - DNA, 457 bp, Homo sapiens
ggcctggagttgcttctcctctcatttctgctgtctaccgtgggtgtcaccatcctcccaggagcgcagctcaaacttctgtgtgactcacccactgtttcccacatcttgtcagttggcaaattcagttgatagaatctcttcaaactctcaaatccatcttttgtttttgttaccactggtcagatcaagctcttgtgacttaaactgaacagttgtaaatccttttaaataatttctagaaccatgggatttctctactctcatccctcttacagagggaaaaggccagggttttgytcattgctgaaatctaagcatttggcccagagcataaaacatgtaaggcagtaagtgtgtgttcactggagcctggttctattgtttctgtcttcaaaagcctgtgatggtttcatgttgcccacagagtgaaacctccttagctgggcctcactgt

SEQ ID NO: 135331 - DNA, 546 bp, Homo sapiens
aactctgacttattctcaacccagacagcaaagtccctatcaaactgctgacaaattagactctatatcatatgtaattactgacataattggttacataagtgaggcatatatttgaagccatgtcagaacttaccttttggtagacctgaaattctttttgctatatacatttgctcagttgaatctgctcacattgcaggacccaggactaatatctctccaaaacttcagagattcytaagaagtgatcttttgaggcctggtcagatctggcagtagtctcatggtggattaaacacattttgtagggcatgacgaaggataagataaggcaaatactcttaagttcccggattccaaatcccaatgcaatctcttgatgaacgaggataggccacatgagggatttcttgaacccaggatagaggcaggaccaagaatagaccccagataggctgtatagcatcctttgcacattttgaatatgagcgctgcaggaggtggatacgttgagggccctgagagcccccaattccaaaggag

SEQ ID NO: 135332 - DNA, 494 bp, Homo sapiens
aggtaggagtcttggtggtaaggtgggacctctttggcctcagacagaaggtatcaggagtagctccagcacatgagggagatgaaacctgtgtgtcttctcggttgagctcgtgtggcctttcttttctgtttttctgagccgctcctctgagtgaacttggatagtaaccagagctgcattttttaatatctcagcctgagatgctgacaaccactgcaggcaccatgaatttttaatgtggtggtgattagaaggctggctagggcctcatttcgtttcattggactgctgtgacacttgtttccttcatggtatttagacttcctgggttatttcccartccagactcatgttctgtttcatgagtgcccattgcacccatgcacttattgaggtgtgtttgaaagcagaatttaaaaatttgatctcagttattgaacatcctacgctatttcagaaagggatgcttcttaaattcctgaaaaggaatt

SEQ ID NO: 135333 - DNA, 618 bp, Homo sapiens
actaatagtcatgtagttatgaccaaatgttgttttaggtcttggcctaagttatatacctaatttataactcctgccctttcgcttttatttcaatgaactcccacactgtggtaggcccttatgtttgatactagctctttggggaggtgagtgaaataaataactaggagatgccacaaagtgggcttctaaggggctgatattgttgtttcttgatgttagtggtggttacatggtaaagttcactttttgataattcatcagatgctgaacttaggatttatgtacttttctgtaggtatgtatattatataccaataaaaatatatttaaagtattatatacaaggaggttcactgaagccttgattgygatttggaagagcagaaaataaaagggatttattaaataaaccatagtatacatataatagactactacacacccctttgaaaaaagagagaaactcaagtagtctaggtctgagtttgaatcctagctttgttatacttgttcaagtcaagtatattatttaacttccaggagtcttacatttccttaccataaatttaaaaaataatatctaatgtgcaggggattgtatggacaaaagga

SEQ ID NO: 135334 - DNA, 522 bp, Homo sapiens
acctaaacgtgtcaggcagagtcgaattttctgattctagtctttaagcattttccactgtgtcccccaccccggaggcctcttgcagagccataatgaaaaccatgccatccaaactaagagagaacagcccttttatttgtaaagcaaaatattctagtccttatatttgatcactctccagccttaagcttcttcacttattctcttactctcctttcaaataagtccgtggctctgttttctgttgtgttaatcataccatgaacacattcwtgtaagcgagtgaattatactctggcaaaatgacctggaatcaacatatgccatcattgtaaacatcctggattggctttccagtggctttgacccctcccctactcatcacctcattctcattttatgtctccctgtacccacaaaataagacaggctcatacctgattgtttgacagtgactttgatgggctgaggaggcacttgaatctgatgtcaactattttagcagttgaatctgatctc

SEQ ID NO: 135335 - DNA, 589 bp, Homo sapiens
tcttgaaaaaaaatgtgtattgcaaaatactaacagcagtgaattccaggtagtagggatatggaaaattattatttatatcttttataataataagtatattatataaattatatatgttatgccaaaatacatatgtatatatttccacttcccaaaagaaagtagacaaaagagtaaatgaacagcartcatgaacagattgtttactattgaaaaatacaatgactaatacatattttaaaaccaataaaaattatttcaagaattttaaccatattggtgaatcaaatatgtacaaatgaaaacagcaatagggtactttgttctgcctatgtggctgggaatattttttgaaaattttgaagattgttttttttctccctggaattgtgtctctgataccaccaggagatgaatctattgcttccagagcatgaatactagaacagaggacagttggtaaaactgagataccatgccaggtaatagtcggagtttcagctggaaaatagaagatatgtttccattgggtcaagcaagaagagcttgagacatctcatcgattacctacaaaaactgcccagat

SEQ ID NO: 135336 - DNA, 546 bp, Homo sapiens
attaaaacccagccaggtaaactacagaggttgtgtgattagccactgggtcaatgtttcccaaactttggtcagtttcataccactgtaaatgtctttatttatttccttaaaattccattttcattaaattatttgaaataaataatatgtttaaaaagatgtagctaccataaagttacctgaagtttttatatagtagttaaacatttttaatgtttaatagtaacagatttattrgattttactatgctagagaagaaaactttgcaatcattacagatgaacatatatatattaataatttcagtttgtatgttcagtgtctttaaaaagacattaatctattgaatccagttatatatctttcctacagcattaaagttaatatatggaaatgtaagttgtttaccacataccttctaagatcatcttgaacaccactcaaattcatttgacaaacatttattaggtctttgctaatgtgccaggcatggcatatagcaagaaaataagaaaggcaaaaacctttggagaaagacatta

SEQ ID NO: 135337 - DNA, 367 bp, Homo sapiens
ttctgtaaaatagaataagtgctccaatgagctgagcagaggagcytagctttatagacagaaaggggctgaaaaaagcagaaacagagcgaaaagtggaatcgtcatttcaacgttactttccttgtaaatgttaaagtcgaggggacttctttatcatgcagctaaaactggcctatttggaaaattggctgttatctctttctgcctccggatttctcagataaacatgttggtttcatcttggtggcatggaacttcagcatgagtgactacattttggtttggtctgttgggcctagtacaaaagctcaacccaaaccaatggccttctataaattttatcctttaatagaatatgtttgct

SEQ ID NO: 135338 - DNA, 551 bp, Homo sapiens
cttaatcagtatgcatttttttctctgttgtaaaatgaaggtgataatagctggacctatctaataagctgttatggagatgaaaagagataatggatgtacagctgctggaaatcagtaaaatctcargaaatgtttcctattatttttactgagtactatctactctagcagataataggttcctgaagaacatggaacatgactcagagaagttacagtgaataaactcattacagacatctcagattggcttgccttacatgtagtcatgttcttttttctcatacactagcttaaactcctctagaacaggacctacaacttattcattgtaatattcctcacacagcataacactgggttttaggttacatagatgggttataatctcattttattaatgagttgaagccactgaggaagtcttgccctttctcgtttagcgatgctcaaagcaaaccaaagataacttctataaactccccctatgaattctcttacttctagggtgaccaaccattctagttcatgaagggctgtcctggttt

SEQ ID NO: 135339 - DNA, 500 bp, Homo sapiens
gtcccccaaatatcttgaggttcctgggtctgctgggaactgatagcttttactcactcactgtgagactgggaacacttttagccaggcattctatgcacactgtcaaatatgacccttggtaatataaccaatgtttccaattgtgtcttgttataaagagaacagattctttttgaacttatgcaaatagttatattgccataaaaaaaatcttcacaagtagctttccaagttcccgaggatcaggtagagaggaaaagtaaatacttcaatctttattcacaaaagtatacttttccaaattgctgcaagcagtagatagcttaaarggtaaaatgtttcttaaaactttaaagaaccagcaaaacttccacatataaagtcataaaaacattattttcatcagttattcagtcttatgtaattcttgttctgcatgatctcgggatagcagtttcacaaactcaccagtttctttattagcgttctgagaattc

SEQ ID NO: 135340 - DNA, 561 bp, Homo sapiens
tccagctgaatttcccagttataggtggaaccagttatgcctggtggcttttgtagcaagagtcctgggccactactaacagttcacttcctctacccttcattccrttccaacattgttgaaatttggccacatttagtcttccaagataccttaggaccagataccctacaataatacctatgagctcacacactttaagatactcagtggccgctcacagccacacacccctttacaggtgctccacgtggcagccatctatactgaatagcgtaaaactattaatagatgtgggtggaaaaggttttggtttggagacagattttctatgaagacgcaattcagcatcctagttaagaacgcagctgtcaagtcagaagaactagggatgcaaacccaactctcctactgattagatgtatgaaatggtgaaatctcaactcactgaacctgaagttcctcatcaatgagaataggataataaaaatctatttttctttctttctttttttttttttggagacagggtctcactcttatcgcctaggatagagtgct

SEQ ID NO: 135341 - DNA, 556 bp, Homo sapiens
actcccttatcactcttaacaagtatggctcaaagacaaaatttcaatcttttccaattttttttaaagtaggcaggcagcaaaataaaacatcagcaaaagctaaatgtgcttggataaagcacaattaaatacatgtttgtayttttccaaaatggaccacaggttgctattaaaaagagtaataaaatcaatctatagaaactaaatagataagtgtttgcctgcgggcacgggatgtggagtggctgtaaatagacacagggtgatgaaaatattctaaaattagattgtggtgatcactgcacaactctgtaagtttactagaaatcactgaattgtacatttaaaacaagtgaattttaaggtaaactatatggtgattatttatggcaaattatatatcaataaagcttttttcttaaaaaatggaaactatatgttagattttttttttaatatccaagatacgtgtcagttaaaacaagcaaagtacagaataatgtgtatgacatgttcccatttgaacttttaaagtgattgtatacattacctg

SEQ ID NO: 135342 - DNA, 556 bp, Homo sapiens
actcccttatcactcttaacaagtatggctcaaagacaaaatttcaatcttttccaattttttttaaagtaggcaggcagcaaaataaaacatcagcaaaagctaaatgtgcttggataaagcacaattaaatacatgtttgtatttttccaaaatggaccacaggttgctattaaaaagagtaataaaatcaatctatagaaactaaatagataagtgtttgcctgsgggcacgggatgtggagtggctgtaaatagacacagggtgatgaaaatattctaaaattagattgtggtgatcactgcacaactctgtaagtttactagaaatcactgaattgtacatttaaaacaagtgaattttaaggtaaactatatggtgattatttatggcaaattatatatcaataaagcttttttcttaaaaaatggaaactatatgttagattttttttttaatatccaagatacgtgtcagttaaaacaagcaaagtacagaataatgtgtatgacatgttcccatttgaacttttaaagtgattgtatacattacctg

SEQ ID NO: 135343 - DNA, 556 bp, Homo sapiens
actcccttatcactcttaacaagtatggctcaaagacaaaatttcaatcttttccaattttttttaaagtaggcaggcagcaaaataaaacatcagcaaaagctaaatgtgcttggataaagcacaattaaatacatgtttgtatttttccaaaatggaccacaggttgctattaaaaagagtaataaaatcaatctatagaaactaaatagataagtgtttgcctgcgrgcacgggatgtggagtggctgtaaatagacacagggtgatgaaaatattctaaaattagattgtggtgatcactgcacaactctgtaagtttactagaaatcactgaattgtacatttaaaacaagtgaattttaaggtaaactatatggtgattatttatggcaaattatatatcaataaagcttttttcttaaaaaatggaaactatatgttagattttttttttaatatccaagatacgtgtcagttaaaacaagcaaagtacagaataatgtgtatgacatgttcccatttgaacttttaaagtgattgtatacattacctg

SEQ ID NO: 135344 - DNA, 359 bp, Homo sapiens
caccttttaaacttgggcacatatcctgattatcaagccctcacctggcctggcatttgagttwataatctttcaagtagtacatgcattaaacttaagtcacaaatatagttgtgtagctttaaaagtaaatgtgctttactattgaacttttagtagttctccccgaataacaaatgtaaaactcattccaaatacagcatttaggtcgtcagatcaaattgttaatgtccttccatgatttgctctcacagatagaaacttagcacttcctttagtttgtaccaaattgcacacaccactccatacacaaaaatgagtagaaggcacaaatctgtgttcacggatttggaaaaaat

SEQ ID NO: 135345 - DNA, 464 bp, Homo sapiens
caccaccatcaagttttattgactaatctagtatttgtcaaccaagatgatttcccccctgccacccccactccaggggacatttggcaaygtctggagatgtgtttgattgtcatgactgaaaaatcaacaactcttcttagatgcatctgagaggtgggggtcacagggaaaactgctgttctcaaatgtggagagacaagtgaatgcagagaactactgaaaagaagcctccaagaagaaacctctgtgggaaccagtgccgaggtagggaaacccgagctgtaactggtgaattggtggatgctcagtgggacaagtctgaaagttaaaaactccagagagactcagttattggggactctcacacttttgtgagttttaactccaggagctcaacctggtccttacagtgaatataggagaaaaatccccttgtacttcagacggcaagttctgtgggg

SEQ ID NO: 135346 - DNA, 371 bp, Homo sapiens
ttctctaggcatgggcacagaccactccccaatctcttcttatcaaatgtgtcaggttgatttttgtttttgtttttgtttactttatattgaagtattggtacttgtgacccctcctagtctctgatcttccatactgccaaggtaacgactatcctaacttctaacaccatagatttgctttgcctgtttttgtatgtgttctttagtttctggtttctttcactcaacattagatttgtggtagtagattactcatccagctgatgtatagaagtccatcgtgtgaatataccacaatatatttacctattctacccttgatggacatttggatagwttccagtttgacgctattatgaatggagtca

SEQ ID NO: 135347 - DNA, 316 bp, Homo sapiens
gaattcgaggggtcctataaggagtattttctgtcctcctcttgcctttgtgaccaattgagaagtagaagaaaaatcagatattcagataacagaatagcactttaactatggataaaacttaattggaaaacatgacttgaatctgcaaccaaatgggcttgttgaaaccaccctttcctccactgcctcacacatgtgcagacatgtactcacacatgcatagacaytgcaggtcttgcctcgcagggcagagcctaccctgatgagctgacattaaaaataagctgagaaatgcttgctatcagagaccagc

SEQ ID NO: 135348 - DNA, 382 bp, Homo sapiens
cacctggggatgcagacgctgcctccccttatccccaacccttccagatctgtctcttggtggggttggccccagctggcaaagaatctgctataaaccctcccagggacctggctccctcgccttccccctgagttggaggcatcttgtgtcttgcctgctctaggcctttcccacattgccctcccactcccagccccaggcagcytcagcaaagtgccagggggctgggaggcttttcattaccaaatgcactgaacctatttgtgagtgttttgcaaagtgtttaatccaaggtgttccctcaattaaattagtgcaaacatctgtgtcccacatccacctccatttgcattctgtgccatttattacagcgggaaat

SEQ ID NO: 135349 - DNA, 520 bp, Homo sapiens
tgcaaggcagggggctccagcccttaaagagatgagaggaatgtaaagcgagtgtgaaaacatctgaacccacttctgcctgtcacagctgtgtggcctggatggaggccattcacagccaggggccccagccacccccttttgcctccagttaattaaaccagcatggggatcctaatgactgatcaaagcccatccagcttccccaggatatctgcctcccctggccccacstggagtggggatggtgctaggacagggagggaaagaaggtgcccagagagacaggtctggcttcctcagtgtggctggcccagccttagccttcctcttgcagggtaagtgagacaatgttgtcttgaccccagatctctgagtgccatgtcctggagtcccagacaccattctccccactctgagggatgctggaggatcggggtgaggggaatgggagggacacagcttttgcaaaggggccccaagcaaacacttgacttccttccgaagtgagcctcacaaa

SEQ ID NO: 135350 - DNA, 604 bp, Homo sapiens
aagcttttcttaggagttctctgagactgttttttcgctccaggccacatgcccrggaacagaagccgggagtcctggacctttctgtccaaatgagaagatgaggaaattaggaggggccttagatcttgcaccgtgtgagggttctcaacccaggctgcacatgagaatcagtggggagcttttgaaaactacctgggcctgagccttacccgagatcactacataaaaatcacttgggaaggggtccaggcattttcttttaaaagcctcccagatgttctgatgtgctgcccaggttgagaaccactgaactcttctccatcacaaacacttcctgattgaggccgtggtgagcccgaggtcacacagtcagaactgaagaccctgtctccagctcccagcgacagcttgttctcccacacgttctttcaagtcctcatggcccatcggccctgcaaagtgccaagtaaagatcgtagtcacccttttatgtctgcctttccaattttcctggccaatttgaggccttcccctccttggaactggcagaggcacgtctcccgtaggaagcactgctgaccaccgcagcgactctggcttc

SEQ ID NO: 135351 - DNA, 604 bp, Homo sapiens
aagcttttcttaggagttctctgagactgttttttcgctccaggccacatgcccaggaacagaagccgggagtcctggacctttctgtccaaatgagaagatgaggaaattaggaggggccttagatcttgcaccgtgtgagggttctcaacccaggctgcacatkagaatcagtggggagcttttgaaaactacctgggcctgagccttacccgagatcactacataaaaatcacttgggaaggggtccaggcattttcttttaaaagcctcccagatgttctgatgtgctgcccaggttgagaaccactgaactcttctccatcacaaacacttcctgattgaggccgtggtgagcccgaggtcacacagtcagaactgaagaccctgtctccagctcccagcgacagcttgttctcccacacgttctttcaagtcctcatggcccatcggccctgcaaagtgccaagtaaagatcgtagtcacccttttatgtctgcctttccaattttcctggccaatttgaggccttcccctccttggaactggcagaggcacgtctcccgtaggaagcactgctgaccaccgcagcgactctggcttc

SEQ ID NO: 135352 - DNA, 578 bp, Homo sapiens
ttcattttcttgatctaggtagcaactacacaggtgtaaaaatacttaaaaattcatcaagctctatacttcagatatgtatgcgttttacttacatatgttatagctcaataaaaaattaattgaaaatattgcatgagatctcctaaagtaagaattaacttcttcctttcttttagcataagcatatctgagattctttgaattgagtgtttgcaaacaacattcttagtaataacaatagctaaattaaatgcttatatgtaccaggccctatgcagggagacatgaattaacgcctacataaggtagataccatccaaatctccatttcatagatgagaaaattaagggacagggaagtaaagtaacttgtccaaagtaaaacagcaaatcaaatggcagaactgacaaatcaaattcaaacccaaagcagtctgactccagagactttgttcttaattgatcttaatgttttgtcatatgctgaaggatcaggggattttttwaaagtttgatagtatttgattggttttatcctttccccagtgcctgagaagcatgttcagcattaagaa

SEQ ID NO: 135353 - DNA, 606 bp, Homo sapiens
caatcaatattcttgagtgatccagtgccttctataatgttccatgtttcttcttaagcatcaggtttttaatttcagtttttagatgttatccatctcttaaagataaaaataggcccttcagctcacatagmactccacttcgttgcctgttctctgacacttctgtccctgaatcatcacgctgagtggtctttttcaaactgagatccatagaggtatggtttttatacccagtggattttgccaaggtagtacttctacaagtctgctagagccacagggttattgggcttggggtgcccattaaagcaagtatggctgcagtgaccaaagacttagatcacaatacccaagtcccatcaaatacttagaaagccttcccaataaggatgggtacaaacaagcccaaactgagaagacgacaataaatatccaactcttcaatgcccagatactgacaaacatccacaagcatcaagcccatccaggaaaacaggaccttaccaaacaaagtatataaggcaccagtgaccaattctggagtgacagagatatgtgacctttcaaacagagaattcaaaatagctgttttgagaagctcaa

SEQ ID NO: 135354 - DNA, 644 bp, Homo sapiens
ctggaagttaataatctgtagcatctgactgcaggccttgttcgatctgccttgggatgtcctgaggcagtttccataaatattgctcgcaggaatgccagccaccaagacaggcttcttggcaagcgttcaccggagagagctgaatttgggccttaggttttgaaggcacagtgagatgacttctttacacccaggttggattgatttatttgtcagaataattaacattttaaaaatgttagatgttgttttaaaaatccagcagtttggaagaggtacaaagaaaactacaaagcaccctacatcctactttctagaaataactagtgttcatatgtggtaaatagcattctaagcattttcatacacatacacaaacagggttttggataaggtaaatacatagacatagkgctatagaaatgccattacatgatgcatgccattttaaattaaaaatatttaattttatgtgaatttaatagatgataaggaaatgaaataaaactgaaggatttgctaaattgagatgaatgtttgatcacagcagaataaattatttccttaaagatacctctaagtgtatcacaaaaggtgaggagattggcgttactatgttttaaaatttcatatttaaattt

SEQ ID NO: 135355 - DNA, 259 bp, Homo sapiens
gttagaacaactgttgcttgcacaccaccatgcctggctaatttttaacttttttgtagggatgggatctcacaatgttgcccagcctggtctcaaagtcctggcctcccaaggagccttaacatcccagatattttattcctagacccctgcccttggcttacctctgaagcagagaggaatctttatgtcaaaggcccagtaattcagcatcttaaaacactagacccacttcaytgtacttgtcctcaatcagtcc

SEQ ID NO: 135356 - DNA, 544 bp, Homo sapiens
ggccactaaagaaataatgacggaccgagcctttcgttgggagttcagaagcctgaaaccaggcaggcaccttcaggttccaacccacagtgctacttcttgcacacccgccgggcccrcctgcacgtctacgccacagcgccccctgcccgaaggctgtgggcccaaaccccgcaggggagcggcgcgtctggggtctggacctggagatgggggcgctaggattcaaactccgcacgtcaatcaattggcaaaatggagctgactctccggctccagtaactactcaggaagcaactcgaaaactagtgaatgtcggtcccaaaccctgggggctgggagatgaagagaagcagcgacccccgcccaaacggtgcgccccggccctcaggctgggctcccacccacgcggccgggcaggcgtctcgccaccctgctccgggaacacgcgtgggccgccctgagagggcgtagggtgcggtggggttgggcccaggctggggtgggtggcgtgacccggggttgtcacctgtcggagggcttg

SEQ ID NO: 135357 - DNA, 544 bp, Homo sapiens
ggccactaaagaaataatgacggaccgagcctttcgttgggagttcagaagcctgaaaccaggcaggcaccttcaggttccaacccacagtgctacttcttgcacacccgccgggcccacctgcacgtctacgccacagcgccccctgcccgaaggctgtgggcccaaaccccgcaggggagcggcgcgtctggggtctggacctggagatgggggcgctaggattcaaactccgcacgtcaatcaattggcaaaatggagctgackctccggctccagtaactactcaggaagcaactcgaaaactagtgaatgtcggtcccaaaccctgggggctgggagatgaagagaagcagcgacccccgcccaaacggtgcgccccggccctcaggctgggctcccacccacgcggccgggcaggcgtctcgccaccctgctccgggaacacgcgtgggccgccctgagagggcgtagggtgcggtggggttgggcccaggctggggtgggtggcgtgacccggggttgtcacctgtcggagggcttg

SEQ ID NO: 135358 - DNA, 407 bp, Homo sapiens
gcacattaacctgactttattatgatgaaaagatgcagacatctggatttgaacacagcgcccgatctgttattctgtcatgactscaaatatataaacacagggtagaaaactagaggtggtgagtaatggttcgtagtcagtttaggacatttctggtgtaatgtcaaaagcttccatttccagtcatttcttattcagtatacttatttaaaaatatagactatgtgttaatcaaattcataaacaacatggtgttcaacaatgaacatgtgaaaagaaaatatggaccaaaatggatatcaacaggctagaacaatgtgttctcaccactgagacaaagactagagaacacccattaccaccgcaaagcattcgtacgtgacactccttggtaggaccaagat

SEQ ID NO: 135359 - DNA, 559 bp, Homo sapiens
attatttctgtgagttcatcagagttttgtgtagcttctgcatcccattatatgttgtgattttaaataattatgcaaagttaagaacctttttacctactagaatgccaaaattatttttgtacttaaaataagtataattgaaattctaaattatttttgtgttccattgtactggtgctcttgaaccctaaactagctacattcttacaatttaaaatttaaatctggccaggcgcagtggctcacgcctgtaatcctagcactttgggagtccaaggcgagcggattgcctgagctcaggagttcaaaaccagcttgggcaacaaggtgaaactccatctctgctgaaaatacraaaaaaaattaggcagtcatggcagtgtgcgcctttagtcccagctactcgggaggctgaggcaggagaatcgcttgaacccgggaggtggagattgcagtgaaccgagatcacgctgcactctagcctgggcgaccaagcaagactttgtctcccgctaccaaaaaaaaaaaaaaaaaaaaaatttatacctttttgaaa

SEQ ID NO: 135360 - DNA, 573 bp, Homo sapiens
ccttctataccagttttctgcatcagcacatgctcattctaagtcttcagtcaatattgatattaaattatgcaacttgttatctgaccctctcagcatgcttcactggtagcmgttcttttgaataaaattgcccacatttaagcatcaccagggaattatttggtttcttattgagtcaccacttctaataacccagaggccattactctttgattaacaacagtatttgtctctctttgcctcatgtgacctattgtgattacacttgggaaaaggttcttagatgatgcacaaactcttaggtgccttgaggatgttaggtttccatcttggactgggtttgttgctagtttccctggtgtggtaactctaatggtaacttgcatggtaataatttcacagtccttaagagacttattgagaaaaccataaaataagaaagtagtcctgtaagctgatcatgtctttttctcccccataaaacattcgtgctcaataaaactaaggcgttctacctctgtggaacacaaatctacaggcttggtttgaaatagggggttttagcaagct

SEQ ID NO: 135361 - DNA, 573 bp, Homo sapiens
ccttctataccagttttctgcatcagcacatgctcattctaagtcttcagtcaatattgatattaaattatgcaacttgttatctgaccctctcagcatgcttcactggtagcagttcttttgaataaaattgcccacatttaagcatcaccagggaattatttggtttcttattgagtcaccacttctaataacccagaggccattactctttgattaacaacagtatttgtctctctttgcctcatgtgacctattgtgattacacttgggaaaaggttcttagatgatgcacaaactyttaggtgccttgaggatgttaggtttccatcttggactgggtttgttgctagtttccctggtgtggtaactctaatggtaacttgcatggtaataatttcacagtccttaagagacttattgagaaaaccataaaataagaaagtagtcctgtaagctgatcatgtctttttctcccccataaaacattcgtgctcaataaaactaaggcgttctacctctgtggaacacaaatctacaggcttggtttgaaatagggggttttagcaagct

SEQ ID NO: 135362 - DNA, 554 bp, Homo sapiens
tttcccaaaataaacaggtatatgagaaagaaaaaaagggctgttgtgtcaagaaagtttgatagaagatcgactgaacagtaagaaatttaaagggtaagctttgtaattagtctttaacttgagccttggttttggtactttctattggtatcattatgcataatttgctaacctacaagagtctaccaccacaccccatttcctccttcataaaatacagatgagaataatgtttataatttgttgctttttgggttgactaatatattaatgggtatcaagaatgtaccctggtgtctggcaggtagtaatgactacaacagccatagcatatatattatatgtctgtggctgttgtaacaaattatcagatactttgtgacctaaaacaacaaaaaatgcattatcttgcaattrtgtatgttaaaagtccaatagtagtcctacagggcgaagaccaaggtgtgggcagggctgctttcttttgtggggactgtaggagagaatgcactttcttgtcttttccagcttttaaagactgcccaccttcc

SEQ ID NO: 135363 - DNA, 634 bp, Homo sapiens
caagcctattaatgtattccctgaactttattaatgtaatttgaaaaccgcctacatgtcaatcaacttctaataagtaattatgttcataaatactgtaaaattattagcttttmattttatccaatcttatactttcaaaacagtaacatggatttttctttttctagaggaataaaatattaaactgaaggaacattcaataagtacattcgtaactgctcaaaagttcaccatcgtctaatgaccagcaaaaaagagtactatagtaagacatgtagcagttttaaaaacgtgaacaatattaaacaacctatgtaatataaagttattttaaaaatcctatgagaattaaacatgtacctaggctggtcttaaataccgatagtctgggtatttaaaatatagacctaatatggaacaagagaagaatggaaaaaggaaaatggaatatatttattcttcagaaatatatcatttaaacctacaagtttaaaatgtacaagccaaatgtctgtgtcttaagtaactcgaacatattattgttcaagtatactttcttttttcacataatgaaaatcttttagagtctttgagctagaaactcaagtcaaagggcagagaactgaacaag

SEQ ID NO: 135364 - DNA, 624 bp, Homo sapiens
ttgtctctacataaaggaatccagataaaaactatgaaatataagagaaaaggaaaggacgaagaggagactttctcatactccagggaatcatactactcccaagactgactctgattataatactgatttattatttttaatattttgatgagtaaggtacttactctgcctcaaaaaaattcatggtcaccaactcctggaatatcttcttcctgcagtttttactctacagctgacaagaactaattcttgttttaagaccaaacttttcaggctgggcacggtggctcacacctgtaatcccagcactgggaggcttaggtggatggatgatgaggtcaggagtttgagaccggcctggccaacatagtgaaaccccatctctattaaaaatacaaaaaaaatgagctgggcgtggtggcaggtgcctgtaatcccagctacttgggargctgaggcaggagaatcgcttgaacctgggagggggaggttgcagtaagccgagattgtgccactgcactccagcctgggcaaggctccatctcatctcaaaaaaaaaaaaaaaaagacaccaaacttctcaatcttaatgttgtcgtctatgtggtatcttccataatc

SEQ ID NO: 135365 - DNA, 604 bp, Homo sapiens
taaatatacagagagagtgtgaaagagatattgtactgcaaacaaactttattaaaatgtctatgattgggtctggaggctcagacatatttttcttaaaatctcccaaagataatcccattgattaagcatatttagtaatcattttctcatttttttgacagtgtagatttgttgtataaacattaattgtggaaacctatcactagaatttgtgatgcaagaaatacgagtccaaatctgtaaaactatacattgtaaatctcgggtgattaacacagctgtactcaggaatcatttttctacattacatcagactctattctacatatagtttcacagaaaatcaaaatgatgaggggtggtgttctttctgtcctcaaaatataccttgaattgaaagttaaagttctacaaaagtgacagctaaaaaatttaaaataacctcaatcatactatcwttatcaattctatcccagttctctttgacctcattttactacttgtggcagactgtattttacaaaatgaccacatcgcccatgccacagatgcttctgcgttatggccttgacacccccatcgaaaggcagagtttaaaaac

SEQ ID NO: 135366 - DNA, 656 bp, Homo sapiens
ttacatcagactctattctacatatagtttcacagaaaatcaaaatgatgaggggtggtgttctttctgtcctcaaaatataccttgaattgaaagttaaagttctacaaaagtgacagctaaaaaatttaaaataacctcaatcatactatcattatcaattctatcccagttctctttgacctcattttactacttgtggcagactgtattttacaaaatgaccacatcgcccatgccacagatgcttctgcgttatggccttgacacccccatcgaaaggcagagtttaaaaacccttctccaatctgggctggccttagtgattatcttgtaaccattagaatgtggttgaaatgacgaggcaggaattcttagggtaggctcaagaaggccctaggaattccactttggtratgttcactctccccattactcctctcaggatgtttgtttttggaatccagtcagtcgccaaggagaggccatgcgtagatgacctaatccacagtcctagctgaggctttgattcctacctgtagaggtgccacacacatgaatgaagaggcctccaggtaatttcaaccctcagccattcgagtcacatcccttgccctttgattcttctcagcttaggccccagacatttttaagca

SEQ ID NO: 135367 - DNA, 640 bp, Homo sapiens
agcaaattaaccttataattatacatataacaaataaaaaatatctccacataatcaacaactgtggcttggtgaattcccaagaaacacgtayacacaaataaaaataagtgaatgcatccaggggataatactgccaattatttatctttcatttacatgttttatttcaaatgtaaataatccggaagcactacctttcttcatagagtaaatatagcaaatgtctgatgctacattatattgttttctgaaagccacatgactggaggggaagtggttgcacagacttatgagcagtgccaatatgcagtattctctatatgacatcaactttctcttttactcaaagattctggtgctgaggtgggaaaacattttatagtaatgtgtgatgattagacacataaagcacttgataaaatatccagaccacatcttgctacaactacggaagaccagcttcaagaagccatatgaatgtctcataatgttgtatctttaaaaatatgctatcaagaatatcactgactgtattatttactctctctaaagtctctgggactttatcaatttttcccttcagaaatgtaaatctgtacgattataaaaaaatgtgcaaattgcactggaaagagga

SEQ ID NO: 135368 - DNA, 640 bp, Homo sapiens
agcaaattaaccttataattatacatataacaaataaaaaatatctccacataatcaacaactgtggcttggtgaattcccaagaaacacgtacacacaaataaaaataagtgaatgcatccaggggataatactgccaattatttatctttcatttacatgttttatttcaaatgtaaataatccggaagcactacctttcttcatagagtaaatatagcaaatgtctgatgctacattatattgttttctgaaagccacatgactggaggggaagtggttgcacagacttatgascagtgccaatatgcagtattctctatatgacatcaactttctcttttactcaaagattctggtgctgaggtgggaaaacattttatagtaatgtgtgatgattagacacataaagcacttgataaaatatccagaccacatcttgctacaactacggaagaccagcttcaagaagccatatgaatgtctcataatgttgtatctttaaaaatatgctatcaagaatatcactgactgtattatttactctctctaaagtctctgggactttatcaatttttcccttcagaaatgtaaatctgtacgattataaaaaaatgtgcaaattgcactggaaagagga

SEQ ID NO: 135369 - DNA, 640 bp, Homo sapiens
agcaaattaaccttataattatacatataacaaataaaaaatatctccacataatcaacaactgtggcttggtgaattcccaagaaacacgtacacacaaataaaaataagtgaatgcatccaggggataatactgccaattatttatctttcatttacatgttttatttcaaatgtaaataatccggaagcactacctttcttcatagagtaaatatagcaaatgtctgatgctacattatattgttttctgaaagccacatgactggaggggaagtggttgcacagacttatgagcagtgccaatatgcagtattctctatatgacatcaactttctcttttactcaaagattctggtgctgaggtgggaaaacattttatagtaatgtgtgatgattagacacataaarcacttgataaaatatccagaccacatcttgctacaactacggaagaccagcttcaagaagccatatgaatgtctcataatgttgtatctttaaaaatatgctatcaagaatatcactgactgtattatttactctctctaaagtctctgggactttatcaatttttcccttcagaaatgtaaatctgtacgattataaaaaaatgtgcaaattgcactggaaagagga

SEQ ID NO: 135370 - DNA, 640 bp, Homo sapiens
agcaaattaaccttataattatacatataacaaataaaaaatatctccacataatcaacaactgtggcttggtgaattcccaagaaacacgtacacacaaataaaaataagtgaatgcatccaggggataatactgccaattatttatctttcatttacatgttttatttcaaatgtaaataatccggaagcactacctttcttcatagagtaaatatagcaaatgtctgatgctacattatattgttttctgaaagccacatgactggaggggaagtggttgcacagacttatgagcagtgccaatatgcagtattctctatatgacatcaactttctcttttactcaaagattctggtgctgaggtgggaaaacattttatagtaatgtgtgatgattagacacataaagcacttgataaaatatccagaccacaycttgctacaactacggaagaccagcttcaagaagccatatgaatgtctcataatgttgtatctttaaaaatatgctatcaagaatatcactgactgtattatttactctctctaaagtctctgggactttatcaatttttcccttcagaaatgtaaatctgtacgattataaaaaaatgtgcaaattgcactggaaagagga

SEQ ID NO: 135371 - DNA, 377 bp, Homo sapiens
cccttttgccattctcagagcagaacccttcatgccaatgcagtggcaggaccacaagtctgaacgagggtccgtggatgcttaatggccttggtgttgagacaggcattgacttctttattgttgtctctgtccttctgtttctctgtgctccccccacctccagcccccgccacatgcctttgctcaggctgtgcctatggtgcctcctacaccccattccctgacttccatgyttccaaacaccctccttcccagcttgcggccatccgtctctccttgtgagagcccctggcccggcatctcttgtaagcatagatcattctcaatcagtcattagtcacctgaagaaagcctcatacaccctatcagaccga

SEQ ID NO: 135372 - DNA, 377 bp, Homo sapiens
cccttttgccattctcagagcagaacccttcatgccaatgcagtggcaggaccacaagtctgaacgagggtccgtggatgcttaatggccttggtgttgagacaggcattgacttctttattgttgtctctgtccttctgtttctctgtgctccccccacctccagcccccgccacatgcctttgctcaggctgtgcctatggtgcctcctacaccccattccctgacttccatgcttccaaacaccctccttcccagcttgcggccatccgtctctccttgtgagagcccctggccyggcatctcttgtaagcatagatcattctcaatcagtcattagtcacctgaagaaagcctcatacaccctatcagaccga

SEQ ID NO: 135373 - DNA, 440 bp, Homo sapiens
agagcacttctacacatgtcacttcagctgtcctgtgagaagggcagtgtagtatattatggacatttgacagataaggascgtaaggttcagattagggtgaccagttgtcctggcttgtctggggctaagggagggctcctggaattttcaatgctgaccaggaaagtcctgagatgagtggccaccttagttctggtaaagctgtgttgacttattataatggctgctgatagattcctttctcatagcaataagctactccaggtaactgcctgtgcacccattttacctcttgtctttaagactaatataatagcaacagctatgatttagtgagtgctgatgggacaccatggcgtgtcacatagttggtaataatagccaacacgtttttagcactttctgtgtgccaaccactcttctaagcactttacaaa

SEQ ID NO: 135374 - DNA, 589 bp, Homo sapiens
agcactttctgtgtgccaaccactcttctaagcactttacaaacattaacttgtttaatccttttttttttttttttgagatggagtctcactctgtttcccaggctggagtgcagtggtgtgatcttggcttactgaaacctacacctcctgggttcaagtkattctcctgcctcagccttccaagtagctgggattacaggcactcaccaccatacccagctattttttttttttttttttttttttagtagggacagggtttcacctttttggccaggctggttttgaactcctgacctcatgtgatctacccaccttggcctcccaaaatgctaggattacaggtatgagccaccgcgcctagccccatttaatccttttacagaggagagaacagaagcagagagaggttgagtattttgtccaagctcatgcagccagtgagggatgaaaacaggtctcaaatgtggccatctgacttccgagtatccccttgtaactacttgcctctgtaatcttggacaaacgcttagacaacaggagatatttccactgtgatctttatggaaaataaaactgagggaga

SEQ ID NO: 135375 - DNA, 446 bp, Homo sapiens
aggggatccaggggagcacagaggagacaattgctcccacttaggggagagcttcggagattgctgaaggatgactgagcaccctctggaaagacaaggagagctgtgcagacctggagggactgcagaggaagcaaatgttggtagtcccacatggcctgggaccccagcccctgggagatgtgtggagtggctggacgacaagggtgagagktcttctcaatcacctggtcctcgtcctccactagctccctgaagacgctgtcccatcatggtcccccttgtccctcttttcttccccgctcacaatccactccctgggggtctctcattcaccgctgtctagatgcatgaaattaaacccattctcctcctgtgctctctgttatggttaatggtgtcatatctctcagcgaccacagacacttaggagtcatctggactcc

SEQ ID NO: 135376 - DNA, 571 bp, Homo sapiens
atttattgagcatttactttagtccagscgctgggggcagcagcagtgggctaggtattgggttagtgggccaactctcttaatccaaatcgtactttgcaaatatgccaagtgggaagttactggaattgacacagcgctagtaaatatagacttttggggacaagaagagaggaatttgcccacacttcttcatatttggatttacagatacagctgattctgctctgaggatggtgcttgcaattccagtggctgatatatgacccacttgcactcaaaagctcttcctttaaaattcaaatactatacattttggagaaggacggaaactcacaatttctgagcgctcaacagttctgtgctttacctatattatatcgtcttctcaaaaatataagttgggaatttgaatctcccattttatagatcaaaaaacaggctcagtataaagaggtgatattttcaacattatgttgatagtaagtggaaatttatgtatgattcatactttagtctgaattgctttaattgtcacagtggtgattaggacaagctcctggctgatact

SEQ ID NO: 135377 - DNA, 568 bp, Homo sapiens
gtatctgtgtgtggatttactcaatgtaggccttggtatcttttatcaaattagaaaaattatcagtcattatatacctcagagtagcatctcttctcttctttttctcctttttctattccagtratagagatcctggactctctcattctaccatccatgactctcaacatcttttgcaggtctttttcagatctatctttcacttcactaatcttgtcttcaactgtccactagattttaacttcatttgtaatcatttcttatttttagaagttctatttggctacttttcaatcctgcctgatcaatttgtataatctcttgaggggttttaatcccttcttttactccttcaacatctttgcattgaattctctttctgctagttccaacgtctgcagtcatggttctgattgtacagttggttgtttctgctgactctcactaatggtggtttgtgtcctcatgtacttatcagtttctcattgtgagcttatgttcctaggatctttatctgtgggagttttccaagcctgtggttagagttttcctccaaagagtgttt

SEQ ID NO: 135378 - DNA, 568 bp, Homo sapiens
gtatctgtgtgtggatttactcaatgtaggccttggtatcttttatcaaattagaaaaattatcagtcattatatacctcagagtagcatctcttctcttctttttctcctttttctattccagtgatagagatcctggactctctcattctaccatccatgactctcaacatcttttgcaggtctttttcagatctatctttcacttcactaatcttgtcttcaactgtccactagattttaacttcatttgtaatcatttcttatttttagaagttctatttggctacttttcaatcctgcctgatcaatttgtataatctcttgaggggttttaatcccttcttttactccttcaacatctttgcattgaattctctttctgctagttccaacrtctgcagtcatggttctgattgtacagttggttgtttctgctgactctcactaatggtggtttgtgtcctcatgtacttatcagtttctcattgtgagcttatgttcctaggatctttatctgtgggagttttccaagcctgtggttagagttttcctccaaagagtgttt

SEQ ID NO: 135379 - DNA, 542 bp, Homo sapiens
gaattctttttcaggtaaatcagggatttcttctttgtttggattcactgctggtgagctagtgtgattttggggggctgttttgtcatattactagagttggttttctggttccttcttatttgggtaggctctgtcaaagggaaggtctagggctgaagactgttcagattcttttgtcacatggggtgttcacttgacatagtactttcccccttttcctatggatttggcttcctgtaagccaaactgcagtgacttttacctctcttctgggtctagccacccagcaagtctacccagctccargctggtactgggggttgtctgcacagaatcctgttatgtgaactgtctatgggtctctcagctgtggataccagcacgtgttcagctggaggtggtgggggagtgaaatgcactctgtgagggttcttagctttggtggtttaatcttctatttttgtgctagttggccttctgctgggaagtagtgctttccagagagcatcagccaggggattaggtagaggagccagcag

SEQ ID NO: 135380 - DNA, 541 bp, Homo sapiens
agggatttcttctttgtttggattcactgctggtgagctagtgtgattttggggggctgttttgtcatattactagagttggttttctggttccttcttatttgggtaggctctgtcaaagggaaggtctagggctgaagactgttcagattcttttgtcacatggggtgttcacttgacatagtactttcccccttttcctatggatttggcttcctgtaagccaaactgcagtgacttttacctctcttctgggtctagccacccagcaagtctacccagctccaagctggtactgggggttgtctgcacagaatcctgttatgtgaactgtctatgggtctctcagctgtggataccagcacgtgttcagctggaggtggtgggggagtgaaatgcactctgtgagggttcttagcttyggtggtttaatcttctatttttgtgctagttggccttctgctgggaagtagtgctttccagagagcatcagccaggggattaggtagaggagccagcagtggtaggggccctagaattc

SEQ ID NO: 135381 - DNA, 594 bp, Homo sapiens
ccaacaccagcagtcctttcaggcctcaacaaagacaacttctggactccaacattctagaacttctcatgaggacaagttgtgtcttcccgactggaaaaacccattcaacattgtaaattcagtgtatttgggatgtactgatcatggaccgaaagaaggcagaaatgtatttcaacaatgctcttggggtcttctctctcagaaattctccttgacctaccaaaaatgtaatttcccaaaacagaagagctacatttttatgtgggagacatattctaaagtcaaaagtgaaaaaggaaattgaatatggacaatattacccttgcaaattccttacattttctacaaaatatattatgcagtgtttggaaaatgcagttgtgtacagcattatataagcacaaatggaatataaatacartctatcttacatatagtgttacatataaaatattacacatatataaaatggcaaagatggtgaagaggtgagaatgtggagcaatgaagattctcattctttgccaataagagtataagttaggccagcaactttaacagttggcattacctagtaacttgaacaggctc

SEQ ID NO: 135382 - DNA, 594 bp, Homo sapiens
ccaacaccagcagtcctttcaggcctcaacaaagacaacttctggactccaacattctagaacttctcatgaggacaagttgtgtcttcccgactggaaaaacccattcaacattgtaaattcagtgtatttgggatgtactgatcatggaccgaaagaaggcagaaatgtatttcaacaatgctcttggggtcttctctctcagaaattctccttgacctaccaaaaatgtaatttcccaaaacagaagagctacatttttatgtgggagacatattctaaagtcaaaagtgaaaaaggaaattgaatatggacaatattacccttgcaaattccttacattttctacaaaatatattatgcagtgtttggaaaatgcagttgtgtacagcattatataagcacaaatggaatataaatacagtctatcttacatatagtgttacatataaaatattacacatatataaaatggcaaagatggtgaagaggtgagaatgtggagcratgaagattctcattctttgccaataagagtataagttaggccagcaactttaacagttggcattacctagtaacttgaacaggctc

SEQ ID NO: 135383 - DNA, 594 bp, Homo sapiens
ccaacaccagcagtcctttcaggcctcaacaaagacaacttctggactccaacattctagaacttctcatgaggacaagttgtgtcttcccgactggaaaaacccattcaacattgtaaattcagtgtatttgggatgtactgatcatggaccgaaagaaggcagaaatgtatttcaacaatgctcttggggtcttctctctcagaaattctccttgacctaccaaaaatgtaatttcccaaaacagaagagctacatttttatgtgggagacatattctaaagtcaaaagtgaaaaaggaaattgaatatggacaatattacccttgcaaattccttacattttctacaaaatatattatgcagtgtttggaaaatgcagttgtgtacagcattatataagcacaaatggaatataaatacagtctatcttacatatagtgttacatataaaatattacacatatataaaatggcaaagatggtgaagaggtgagaatgtggagcaatgaagattctcattctttgccaataagagtataagttaggycagcaactttaacagttggcattacctagtaacttgaacaggctc

SEQ ID NO: 135384 - DNA, 565 bp, Homo sapiens
actatctgaacattgatgtcactttctataacactggaataccaaaagaaacattgggaagccctagaacaagaaattctcagaatgcaagtttagtggatgccaattaaaaagacatagagacatctaaggaaaacccaaagtgtctgtacatggagctctttgatgaacaytgatttcaaaatgatggggaaagggagcagaaggaagggatgagaagaaggatgacttcagctgaaaagcatagaaggcacccactcaaattaacttaaaaggaaggaaaggtatgacaccctggaagttcatcaggcaggtgggctcctggcatgggtggagagagcacaagatccatttctctgtgactcctttgctcttgccctttcctgcgtgttggcttcatcctcaggctgcacaaagttggacaacagggtctcccgtcagtttgagctgctatgataacttaccatagtttgggtggcttacacaacaatttatttctgatagttctagcagttgggaagtccaaggtcgaggtgccagcagatccagtgtccagtgagggcct

SEQ ID NO: 135385 - DNA, 545 bp, Homo sapiens
ggatttgtgaaagtcaatagaggagcaagtcctggtagccacatgtaataccagtaagactcagagaaagtgggacagagaagtgagcagcacattttagaattcagatgtcagacaccttgacagcaacaatttcagcactgggagccagaaccaactttaggtgggtrggtgtgaagtgaatagaggaggaaaaacaggaatagtatattgcagggtagaaaaagtaatatattttcctcacccaccacaacattcatgactgacatccctacaacaaaagacagattaacgagagaaaagcataataaatgtatttaaccaaaattttacatgacacatgagtcttcagaaatgaagactcaaagtcccagggaaaattctatgtttctgctaagtctgatgaatgaagtagatagttgtggaggaaaaagaaggggatataacctaatggtaatagcctggggggaacttagcaaggcctgttagttagattcttcttggcctctgagtatagggtatgaccccattagaatgagagtctc

SEQ ID NO: 135386 - DNA, 494 bp, Homo sapiens
tcctacatgaatacaaaactctcactargcaaaatacaaagcaggtagaccttggaaatatagaaagtttataaaaattgtgatgcttaaaaaaacctacagaaatgtgaacatgtatactttttataaaaaacagtgaaaatcagagaagtttcatgtgggatagacagctctactattttaggcttgggtactttagagtacaaatcagtaaaactagctagcacagtattgtctcataagttgaaacttttctccatcaggtcaagtaagacatacaggtctggctactagtaatagaagaatacatgttatcaaactaagcccccaacagatatcaactgtaaactccagaattaatataaagacagctatctaaaaccacggagaacaaccaaaagcaagccaacactggaggagagcgcactcttggaggaaaggaatttccctgtaagtttccaatttcaaggaattttgccgaaaggcatcctcag

SEQ ID NO: 135387 - DNA, 494 bp, Homo sapiens
tcctacatgaatacaaaactctcactaggcaaaatacaaagcaggtagaccttggaaatatagaaagtttataaaaattgtgatgcttaaaaaaacctacagaaatgtgaacatgtatactttttataaaaaacagtgaaaatcagagaagtttcatgtgggatagacagctctactattttargcttgggtactttagagtacaaatcagtaaaactagctagcacagtattgtctcataagttgaaacttttctccatcaggtcaagtaagacatacaggtctggctactagtaatagaagaatacatgttatcaaactaagcccccaacagatatcaactgtaaactccagaattaatataaagacagctatctaaaaccacggagaacaaccaaaagcaagccaacactggaggagagcgcactcttggaggaaaggaatttccctgtaagtttccaatttcaaggaattttgccgaaaggcatcctcag

SEQ ID NO: 135388 - DNA, 559 bp, Homo sapiens
agaaagaagccctcaagtagggacaaaactataacgtattaacagtagaattgaattacgactacagcacactggttgcctacaccagtgacttcatgggatgatcgtgtgtaaattgtagtcatacaaactcatagtcaagataatttctcatttgcaagacccttacctaaggacacataaacacttctttgtgtttataaagataaagactggtttctatttcaaagacgctttgtgtttaaaaaaaaacaaaaaaaaagaaacaaagtctagtttctatggttattttcctggtaaatttgccttattaaacatacaagtttcagayataagaacctggtttcagacataagaattttacattattagttctggagatgctgaaggctaccccaagtaagattagccttgctacctgctagggacctctgtgggtactactaaagcagagtggctagattctactaaaagaaagattttcacatccaaggcaaggaccttagagtttagtaattaagaatctaggctttggagtcagatgaccttgtttcgaatt

SEQ ID NO: 135389 - DNA, 392 bp, Homo sapiens
aagtatctttttctttacttcataaagcagagatataatagctactttaaacttataaaactcttttagtgacagttccagcatttggatcatttgttgattgtcttttaagawttggccacatttttctggttagttgcatgtcaagtaattttagattatatactagacattgtgaatttgtatgagtgttttaaatctgtttggttctccaagcctttgccacattgctttgaatccaacctgtgtatgcatcccttcgggtttagtcattgtgagacttgaatgtgtggtttaaatttcagttaagtttttaaaatctttgatatgctggtttgagggttgccctgtacatgcatagttcagggcttagactgaggcttgtacaaatt

SEQ ID NO: 135390 - DNA, 570 bp, Homo sapiens
tctctgtatgtctttgttaaaagcaaagagctttaactctgttaaaatagaattatgtaatacataaaaaagctctgtaataaattccacaactgtttgaaaatgttggattttaggtaagagtaagatcaaccaagaaaataaaaattgcttggtctgtaacttcatatgtaaatgttaaataataatgtaataataagcctttagtagtaaactttatataataacctaaaaaagcattagtcaaatttatatccatcatgcctctcaaacagcctcttaaatcaataaatggatttttaagtaagtagctggtttttttttttttcaagtgtagtataggtatactccttagctctttatttagagcatcagatttttgaaacacttcttcagagttatatggacctggataagctgtcataaaraaaacctccaaagtgcagactgaccaccacattcttcatgtgtttagcagctaaacttacataatctgctcattagaaatgggctattctagaaatttctgccttgatatttaaaaaacatgtagctctagagattgatttg

SEQ ID NO: 135391 - DNA, 570 bp, Homo sapiens
tctctgtatgtctttgttaaaagcaaagagctttaactctgttaaaatagaattatgtaatacataaaaaagctctgtaataaattccacaactgtttgaaaatgttggattttaggtaagagtaagatcaaccaagaaaataaaaattgcttggtctgtaacttcatatgtaaatgttaaataataatgtaataataagcctttagtagtaaactttatataataacctaaaaaagcattagtcaaatttatatccatcatgcctctcaaacagcctcttaaatcaataaatggatttttaagtaagtagctggtttttttttttttcaagtgtagtataggtatactccttagctctttatttagagcatcagatttttgaaacacttcttcagagttatatggacctggataagctgtcataaaaaaaacctccaaagtgcagactgaccaccacattcttcatgtgtttagcagctaaacttacataatctgctcattagaaatkggctattctagaaatttctgccttgatatttaaaaaacatgtagctctagagattgatttg

SEQ ID NO: 135392 - DNA, 603 bp, Homo sapiens
tttccacatccttgccaacacttatctttcatctttttgatactagtcattctgacaggtattagatgttatctcattgtagtttcaatttgtgtttccctaatgattagtgatgttgaacttcttttcatatgtcttgttggccatttgcatgtcttcttttgagaaatgtctctttaggttccttctccattttttaaattgagcttttttttgttttcttgctgttgagttgtttgacttccttaaatattttggatattaaccccttaatggatggattgcttgcacatatgtcttccagtctgttggttgtctttgtatagtattcattgtttttggtgcagaagctttttagtttgatgtagtctcatttgtcctatttttgcatttgttgcatcaaatcaaattttaaaaatcattacccagcataatgtcatgtagttttccccctatgttttcttttagtaatttaacagttsctagttacatttaagttttaatcaattttgagttgatttctgtatatggtgtgagataagggtccaatttcattcttctgaatatggatatttagttttcccaacagcatttatggaagag

SEQ ID NO: 135393 - DNA, 571 bp, Homo sapiens
aacgtcattcatatagtgtgatgagcgtttgattttacattaagttaatgttatgagaacagtgaaaaaaaggaaaaacggacacaaagtgcattgagaagcaggaatataaatattagaggaaaatttgtcagagtttaagaagaagtttccagaactgggaacagtatctgttcccacagagcagcattcatagggcatgagatggagtacacagaaggtcttgcctcagtaatagtaatgattaaatctagactaggcaatgctccagtattgcttaaccaatattagcaagacccaaaaggataaaatgtttccaagtaacgtaactgtgtcaaagaacaaagcgcaagaatatttctaggaaggcaaaaatatccagtactcagcaagttaaaattcacaatgtctggcatccaaacagagattaccagacaagtaaggaagcatgaaaatataacccagaatacrgaagtacatcggtgaatcaaaaaaaaaaaaactcaaaacttttttaaatgtcagaattagcaaagacattttaaaagttattataagtctattctcgata

SEQ ID NO: 135394 - DNA, 560 bp, Homo sapiens
ttcaacatcacttgtccttagggacatacaaatcaggagcactgcaaatctactcgagtggctaattttaaagagattgaccataccaagtgttgacagaaataaggagaacctgaaacactcacccactgctgatgagaacataaaatgatactatcacagtggaaaacttgtgggttatttcagaaaacattaaatgaacacttaccatatgatccagccaatacaccyctgagtatttacccaagagaaatgaaagcatatgtctacacaaagacttgtacatgaatgttcatagcagcctttttaatttaatagtcaaacctggagacagcctgtcttaatccatttaggcagttacaacgaaatagctgtaacaaaataccataaataccatctctcaaatagatgtgaggaatacatttctgttgtttacagccttttggaggctggaaagtccaaaatcaagtctccagcaaatttggtgtctggttaagggccctcttcctggttcataaatggcctttttgctttaatctcacatggtggaagaagcaaga

SEQ ID NO: 135395 - DNA, 385 bp, Homo sapiens
ttggctgcacagaacatgataccactgtccttgactagcatatgggaaaagaagccagcatcctctcatcaccatttcagcaattttcccctcacaggccattcatgagatgtgctacagtgcactttttcagtttatctgatgaagtgcccttcaaatttgatgcagggcctccatcttgaggtacttttccagaggcagtgatgactaagccctgggctatccccagtatctcatttcgttgcctttgagttgccaggtgctccatctgcaaggtggatgattagagctgtgggtccagctctagtcaggaagtcaggaaacaatgtacaccrgcctgttcatgggctgaactctagatcttgaccacaccagcatggaagta

SEQ ID NO: 135396 - DNA, 529 bp, Homo sapiens
caccagcatggaagtaactaaacacagacackacttatattaggatttgtttgtttgtttgtttgtttgttggagacagggcctggctctgtcacccaggctggagtgcagtggcatgatcatagctcactgcagcctcaaactcctggcctcaaaccatccttctgcctcagcctcccaactacctaggactacaagcacatactaacaggccaggctaatttttaaaatttgtttttggagatggggtctcgctgtgttgcccaagctagtcttgaattcctggccgcaagagatcctcccatcccattctcccaaagtgctgacattacaggaatgagccaccatgctcagcccctatcaatatttttaataaccgtttgtagcaaaacttttttttgagacagggttttgctctgctgcacagtgtaacaaaacttttaagaaaccccaaaacatggactgactgagctacctaaaagtattagtcacccaatcttcagcaaacagttaacagcaaaaataaata

SEQ ID NO: 135397 - DNA, 529 bp, Homo sapiens
caccagcatggaagtaactaaacacagacacgacttatattaggatttgtttgtttgtttgtttgtttgttggagacagggcctggctctgtcacccaggctggagtgcagtggcatgatcatagctcactgcagcctcaaactcctggcctcaaaccatccttctgcctcagcctcccaactacctaggactacaagcacatactaacaggccaggctaatttttaaaatttgtttttggagatggggtctcgctgtgttgcccargctagtcttgaattcctggccgcaagagatcctcccatcccattctcccaaagtgctgacattacaggaatgagccaccatgctcagcccctatcaatatttttaataaccgtttgtagcaaaacttttttttgagacagggttttgctctgctgcacagtgtaacaaaacttttaagaaaccccaaaacatggactgactgagctacctaaaagtattagtcacccaatcttcagcaaacagttaacagcaaaaataaata

SEQ ID NO: 135398 - DNA, 618 bp, Homo sapiens
cctccttccaacttccacccattaattctattcctgctctcttaagaaacagaaaagactaatttattttctctttccaaagataacacttaaaaatccattaaaaggatgtcatgtttctccaaactctttcaagagtccatgtcttctattttctggccacagcattttcagtttcttcycactagcctggtcaaactaccaacggcaatggatagctcagttctatttaagataagcttggctgttctcttaagtgtcttgcagcagaaatactggcccattcaaaatagttgggctaacttttaaaacaacaactaagcgtcttccaagacagttataaaagactaaataaaacacagaggaaaagaaaaaagagggagctcaaaatgggagcttggctctgacaggtgaattttcacacagaactgcggcactgagaacaaaactagcctagaaccacttgtgctatgtcatgtggaggtcattcaaatgcacaggatacagaaactcttcaacggtctagtcatttcacactacgtcgaagcaaaccacaaaagcaggcccaggaaattagatttctccagggatggacccagacgactcagcctgaataaa

SEQ ID NO: 135399 - DNA, 590 bp, Homo sapiens
tattcctgctctcttaagaaacagaaaagactaatttattttctctttccaaagataacacttaaaaatccattaaaaggatgtcatgtttctccaaactctttcaagagtccatgtcttctattttctggccacagcattttcagtttcttcccactagcctggtcaaactaccaayggcaatggatagctcagttctatttaagataagcttggctgttctcttaagtgtcttgcagcagaaatactggcccattcaaaatagttgggctaacttttaaaacaacaactaagcgtcttccaagacagttataaaagactaaataaaacacagaggaaaagaaaaaagagggagctcaaaatgggagcttggctctgacaggtgaattttcacacagaactgcggcactgagaacaaaactagcctagaaccacttgtgctatgtcatgtggaggtcattcaaatgcacaggatacagaaactcttcaacggtctagtcatttcacactacgtcgaagcaaaccacaaaagcaggcccaggaaattagatttctccagggatggacccagacgactcagcctgaataaa

SEQ ID NO: 135400 - DNA, 561 bp, Homo sapiens
caggaaaaggctgggtgttacccattttttgggtctcccaaattagcaccaatagtagacatgcaaatagctgtttaattagtaagtaatagcccgtgcacatgcacaggttcatactgggaggaggagagcataggtacaagttaaagagtttcttatgacagctgggctgagaaatcaagtataaagtgatgtgtatgatatcaaacaagccagaaaactacatcctatgaaagcagccctgatggagccttgacaatgatggtaagagaagggcttttctaaaggcaaatggattgttactactatggactagctgataagatgtgggttaagccactgaattgcctagctcaaatccttctaagcctcagtgtcctcattcatgaaaggaagttggtgaaactgctgatgtcaggggatttttgtgagaatcaaataaccgaattcatgtaaagataytagttcatgcttttcacataggaagtgccagatacctgctggagctagagtagcaagagcaagagtagcaatagcagtagcttcattccagcattcaca

SEQ ID NO: 135401 - DNA, 411 bp, Homo sapiens
ttacccagacttctgaatgctattctacatttgtctcactctaactaaactggttatctttctggtttttttttatttgtatkaatttaaggggcacaactgcaattttgttacatgaatatattgcatagtggtgaagtcttggcttttactgtatcccatcacctgaataatgtacactgtagctattaagcaatttatcataaactttcaactcttaaacctgccctactctcccccaactctgaactgtccactgtggtgctagtggtctgtacttccttccaccacatcttcacctggctcagacaagtccttcaaagttgaagcataaacttgacttcctcaggcacctcttccattcaaggttacattcttctctaattagatgtcccaatttaagtttataac

SEQ ID NO: 135402 - DNA, 458 bp, Homo sapiens
ttacccagacttctgaatgctattctacatttgtctcactctaactaaactggttatctttctggtttttttttatttgtatgaatttaaggggcacaactgcaattttgttacatgaatatattgcatagtggtgaagtcttggcttttactgtatcccatcacctgaataatgtacactgtagctattaagcaatttatcataaactttcaactcttaaacctgccctactctcccccaactctgaactgtccactstggtgctagtggtctgtacttccttccaccacatcttcacctggctcagacaagtccttcaaagttgaagcataaacttgacttcctcaggcacctcttccattcaaggttacattcttctctaattagatgtcccaatttaagtttataacttcgatttcacagcactcttcacgcttaaaattattttctaaaatta

SEQ ID NO: 135403 - DNA, 411 bp, Homo sapiens
ttacccagacttctgaatgctattctacatttgtctcactctaactaaactggttatctttctggtttttttttatttgtatgaatttaaggggcacaactgcaattttgttacatgaatatattgcatagtggtgaagtcttggcttttactgtatcccatcacctgaataatgtacactgtagctattaagcaatttatcataaactttcaactcttaaacctgccctactctcccccaactctgaactgtccactgtggtgctagtggtytgtacttccttccaccacatcttcacctggctcagacaagtccttcaaagttgaagcataaacttgacttcctcaggcacctcttccattcaaggttacattcttctctaattagatgtcccaatttaagtttataac

SEQ ID NO: 135404 - DNA, 440 bp, Homo sapiens
acttacccagacttctgaatgctattctacatttgtctcactctaactaaactggttatctttctggtttttttttatttgtatgaatttaaggggcacaactgcaattttgttacatgaatatattgcatagtggtgaagtcttggcttttactgtatcccatcacctgaataatgtacactgtagctattaagcaatttatcataaactttcaactcttaaacctgccctactctcccccaactctgaactgtccactgtggtgctagtggtctgyacttccttccaccacatcttcacctggctcagacaagtccttcaaagttgaagcataaacttgacttcctcaggcacctcttccattcaaggttacattcttctctaattagatgtcccaatttaagtttataacttcgatttcacagcactcttcacgctt

SEQ ID NO: 135405 - DNA, 253 bp, Homo sapiens
ccaagttaataggtcaaggtaaaagcctatagtgggaaataggatgaccatgacacaggtggtttgtctyctaaatccattacggagctgagaatgggagacagcgggaaggtgccatgtgtacatgaaccatggataggcatttttttctttctaataaataagaagggtccttaaccatctctggaaagatccacatcagtagaagcatttactgtcaataaaaatgaaccttagggtaacccgaaaagca

SEQ ID NO: 135406 - DNA, 253 bp, Homo sapiens
ccaagttaataggtcaaggtaaaagcctatagtgggaaataggatgaccatgacacaggtggtttgtcttctaaatccattayggagctgagaatgggagacagcgggaaggtgccatgtgtacatgaaccatggataggcatttttttctttctaataaataagaagggtccttaaccatctctggaaagatccacatcagtagaagcatttactgtcaataaaaatgaaccttagggtaacccgaaaagca

SEQ ID NO: 135407 - DNA, 253 bp, Homo sapiens
ccaagttaataggtcaaggtaaaagcctatagtgggaaataggatgaccatgacacaggtggtttgtcttctaaatccattacggagctgagaatgggagacagcgggaaggtgccatgtgtacatgaaccatggatrggcatttttttctttctaataaataagaagggtccttaaccatctctggaaagatccacatcagtagaagcatttactgtcaataaaaatgaaccttagggtaacccgaaaagca

SEQ ID NO: 135408 - DNA, 679 bp, Homo sapiens
cctagacactgcccatggccactggcaccacaggcctggctgcccctagaatatgaatgctgcttatttaccctcagatgaactctctatgctccatgcttctttgatttaccaaccttcaattcaaaccaagttaccagtatattatttgctaagtctacctgcccatattccaactgctgatagaaaggataaaatcaagtatcaagaatatttatcttggatagagaaaaggagcctacgggaatgtatragatcacttagtgagcaagtgagaaaggaaaaggataggatggaaagaaatgagaatgaaatggaagaaatgaaggttagggagtttgcagggaaaagccttggtccaagctttgagaaactctagcatagagtttcacctgagtaagagttgtcaaggcctattctgtgataatacacttcagctcaagtctacctagcattttaacttgaaaataagtcagaaataaagatggtatccctcctttgggagtacacttgatttttaacaagtgagtcttgaagtgaatttaagaatcacattataaatctgaccccttaagatggcattttccatgtgaccttacccactctgaagccaactctaattggatatgctcctagggttgttaaactatccaaagttacaacagcacacaaaaaaaga

SEQ ID NO: 135409 - DNA, 614 bp, Homo sapiens
attaaaaacaatataatttactagcacaatatgggagaggagcrtgagtagcaaaaagtcatcaaaaatcacagctttacatatggagagaactgaggattttggatgatgtcaagcaaattaagagtcaataatgagacatggctaggaaacaaaaaataaatgcaatcttagactgcactgatacaatgatagtatcaaaattagaataatagtcaacttgtaatgtcagaccatgtgttcattactgacaacaaaattttatgaaagatgtgctaaagatgtatgctataataagatttctagtcactataccttgtgagaaaggtgagaaaactaaagatccaatcttaaaaagaggaggtttaggactcatgatttcatgcttaaaaaagaaaataaaagcctctatgtaaaactgaattagactaagtctaagcataggtatatttacaattctaaaaagctttaagggtggaaatcagagttcacagctttgctgtgtgatcataagaaaaatacttaatttctctctacctgattctttattcattcactcaacaaatatatgaactgagtgccaaaaacacacactgaataattcacgcatggca

SEQ ID NO: 135410 - DNA, 534 bp, Homo sapiens
ccctactaaccagaccaacaagaatcttaggccagcctgatttgtgaatggatttccctgccaaagccaatttgtaaagacaggaagaggtaactgcttcttcaaatgagcagatactaacgcagtcctatgaaagtcatgaagaatcagggaaacagccgagtgtggtggctcacacctgtaatcccagcactttgggaggccgaggtgggtggatggcttgagtccaggagttggagaccagcctggccaacatggtaaaacctcatctctacaaaatatacaaaaattagccaggtgtggctgcatgcacctgtggtctcagctacttgggggaccaaggtggaagtttgcttgagcctgggaggcagacgctgcagtgagccaagttcatgccacttcayttcagcctgcatgacctagcaagccagtgtctccaaaaaaaaaaaaaagaaaagagaaaaaaaaagaatcagggaaacatgaaatcaccaatgtattaaaatgaaactccagtaatggatcctaaagaaa

SEQ ID NO: 135411 - DNA, 439 bp, Homo sapiens
gagaaattctagcatatatgtaaaaggcttccaagaggggaactgtgataaaataatgtgactgaggcaatatgtaaggagataacagactcagattttcccagwatgatgaaatacatcaagttaattattcaggaagtgtgataatctacaaacagaataataagataaacactccaagtttgagagtaaaactactaaaatctaaggacaaaataatctgatatgcagtcagaacagtaagtacacattaattttaaaagagcagttgagcacaatggcacacacctagaggtccagatacttaagagattgaggcaagagaattgcatgagaccaggagttcaaggctgtagtgcacgatgattgtacctgtgaataggtactgcactttagcctgggcaagatagtgagaccctatttctcagaaagagagcaa

SEQ ID NO: 135412 - DNA, 400 bp, Homo sapiens
gccagaattcttactaaggagaagttggttgtaggtgataacatttgagtaaatgagaatcataggagactttttgaaaggttaacccctctagggaaaatgagatttaaaaaaaaaaaaaacaattattcctgtaggctaactagatatgtgccaggggccattgatcagggtcatggacatctcatttgcctctatattagcaatagaatgcattccaagcctagagaataaagcataggccaacataattcagctctccccaggtcaacaaatcctggcccaagagcatttatgtacagcataattgccagaccttkgttcttgttccactgagctgagttcgcaaagaaaactggcaacagggtctttgattcagtttagagtcaatccttcatac

SEQ ID NO: 135413 - DNA, 487 bp, Homo sapiens
ccaaattgccatgacttgattgctacaaacgaacttgtcctccctccttcttgttctgccttctggttttgtccctcagcactctccttttggtctactttgtcacaaaccatcctggcactcttctataattacttgcttattttcccatatccactgctagctccctggaggaagaataacatttttgatcactgttgcagtcccagcaactagaacagtgcatggcatgcagcaggcattcagggtatctgaattcaggcacagtagtytcaagggcttctgagaagggtgggttagaaccccactgtgatcccaaccatcccaaataatcacaagatctaagtataaacagtgtcctcactatgtgaacacagcttcaagacaagtcccctatctctcattcccaccagggagttgccctcagttcaatacatattgaatgacaccgtagtgtcacttgtgtagctgtttagatgtacaaaga

SEQ ID NO: 135414 - DNA, 263 bp, Homo sapiens
gcttcctctacccctgtattttgcttggctctctaagttgactcagctccgggtaaggttggaaacttctcctgcaaactagaccttcagtttccccaatgggggagtgtgttcaggggcagataatcttgctttcccacttccacagattgggcactcacaatatttggggtgtctcccaggtcctgcaggagcagtttatactggtttattcctgcagtctttctgaakctaaaattcatgatgtgagcctccacacactg

SEQ ID NO: 135415 - DNA, 480 bp, Homo sapiens
actttgtttaaaaaaaagaaagaaagaaattgggagatattccatgttcatgggtagaaagactcaatattgtcaagatgtgagctcttcccaaattgatatataagctcaatgtgagcttagccaaaattctagcaagttattctatagattctaagaaactgattctaaagtttacataaaggggcaaagactcagaatagccaacacaatattaaatgagaataataaagttggaggactgatactacactactataaaatgaaaggaatccaaacagtgatcgtgacaaawaatagacaagcagatgaatggaacagaatacagaactcagaagtagacccatataaatatagtcaaccagtctttgacaaagaacaagggcaatacaatgaagaaaaaataatcttttcaacgaaaggtgctgaaacaactggacatttacatacaaaaaaaatgaatctagaaacaagccttac

SEQ ID NO: 135416 - DNA, 533 bp, Homo sapiens
  misc_feature (1)...(533): n = A,T,C or G
actctccttcatttctggtgggaatgaaaaatggtacaaccccttgggaaaaacattttggcagtttcttacaaaactaaaactattcttaccatacartacagcaattgcactctttagtccttacccaaaggaattgaacacatatccacaaaaaaacttgcacatggggatgtttacatcagctntattcataattgccaaaacttggaagcaattaagatgtccttcagtaggtgaatggaaaaactatggtacatccagacaataaaatattattcagcactaaaaagaaatgagctatcaagccatgaaaagacatggagaaaccttaaatgcacataactaaatgaaaaaaagtcaaactagaaaggctacatgctgtcagtttccaagtatatgaaattctggaaaagttaaaactatagaacagtgaaaagatccatggtttccagaagtaaggggtgagggaggaatgaataggcagtgcacagggaagatttagggcagtgaaaatactgggtatggtactg

SEQ ID NO: 135417 - DNA, 452 bp, Homo sapiens
gaaaaattttttgaagtactagattctaacacttctgatttgctggacttccaccctacatatgtaccaagggtcctcatgtgttttactccctaggctgagactatttgaggagaacatggagatcttcattccatttggcagtccactgcctaactgttcctcaaacatgactcatgagcagcagaacttttttttgctcctggcaaaatgaccctctaggtacttcagtgaacagatctctaattagattctctcttaacagtccttgtaaagttggagwgggctcaccaagtaattggaaaagtagtttagactcacaaaggaaaatagattagacatgtttttacagtgtgcctctcaagtccagctgactaatttgcagtaattttctattattgttttagtctaggttttcctattggttaaatttaactgaatgggacaaacga

SEQ ID NO: 135418 - DNA, 501 bp, Homo sapiens
gaattcttctccatcgctatttacacatgcatgtgaatctgtaagagcagctcctgtcacttttatcataaagatagaagagttaaatgataatcatttctttgcaaccttcaggatctgctggtaagttcytgcccttgggtaactgatcttttacagaaatttttttttctgagaagcctataccagaatagtaatgtgttgactgaagtgaataccctatgatgattttgtgattgctaggaaatctaaagtaacccaaatctttagcaacaaaattaaagttggtaagaagaaggtgcaaaggtagaggaacaacccgaactgcatcttcacacctgaagcattaccgaagcagcaacgtaaacattcaactacattctataggatttcagaaggaacatgtaaaacaatccccttcataaccactgtatttcaacaacgtgtgttctttccaaatagatcatcccacagcaggaaatggtagataggaaaagcgga

SEQ ID NO: 135419 - DNA, 501 bp, Homo sapiens
gaattcttctccatcgctatttacacatgcatgtgaatctgtaagagcagctcctgtcacttttatcataaagatagaagagttaaatgataatcatttctttgcaaccttcaggatctgctggtaagttcctgcccttgggtaactgatcttttacagaaatttttttttctgagaagcctataccagaatagtaatgtgttgactgaagtgaataccctatgatgattttgtgattgctaggaaatctaaagtaacccaaatctttagcaacaaaattaaagttggtaagaagaaggtgcaaaggtagaggaacaacccgractgcatcttcacacctgaagcattaccgaagcagcaacgtaaacattcaactacattctataggatttcagaaggaacatgtaaaacaatccccttcataaccactgtatttcaacaacgtgtgttctttccaaatagatcatcccacagcaggaaatggtagataggaaaagcgga

SEQ ID NO: 135420 - DNA, 614 bp, Homo sapiens
tggaagagtcttaagggtcttttaaaaagtgattacaagtggtttctccaccaatgagaacaatttaactcccaagcattggctcacatttcaacccatccacaattacagttatatcagtatctagacaaggaaatagagccataatacttgaaatcacaacggtctctgtgattttaaaactctttgccttgaaagaayttgcgcaaataaattcatgaggaagggcctgacacgggcccctagatacaacagtagggcttaatgtgaaattagttactgaagatataaatttggcgaaaggggtcataagaagtcagtttcaagttgatccttaagccacatacttgtcccagctggacaaaccaaggtcaattactctgaactttgtgaatctcagccagctctacaattgtatcaggatactacttcctcatattgtacagctcattatttttaaaagttcagtctatataatgctcttggggaaagatttctttccttcagaattgttcaaggaactctccaaattacagcctcaaattcttccccatatatttaaacgacctagtagtgaccagaatgtaagctatttattgtttaaagaaccaccc

SEQ ID NO: 135421 - DNA, 614 bp, Homo sapiens
tggaagagtcttaagggtcttttaaaaagtgattacaagtggtttctccaccaatgagaacaatttaactcccaagcattggctcacatttcaacccatccacaattacagttatatcagtatctagacaaggaaatagagccataatacttgaaatcacaacggtctctgtgattttaaaactctttgccttgaaagaatttgcgcaaataaattcatgaggaagggcctgacacrggcccctagatacaacagtagggcttaatgtgaaattagttactgaagatataaatttggcgaaaggggtcataagaagtcagtttcaagttgatccttaagccacatacttgtcccagctggacaaaccaaggtcaattactctgaactttgtgaatctcagccagctctacaattgtatcaggatactacttcctcatattgtacagctcattatttttaaaagttcagtctatataatgctcttggggaaagatttctttccttcagaattgttcaaggaactctccaaattacagcctcaaattcttccccatatatttaaacgacctagtagtgaccagaatgtaagctatttattgtttaaagaaccaccc

SEQ ID NO: 135422 - DNA, 329 bp, Homo sapiens
catggctggagttgccaagacctctgattggtaatgcacagctactgcaatgtgatgcttttttctctgattggggtagaccccattaaacgtttacagctgtggctagctaaggggmccctgtcaggaactcctgtgctagactttcctcttcaaggaaggggtctgtgtgtacgtgtgtatctgtgtatgaatgtatatgtgtgttgttgcacaaaaataggagttaagtggagaaattgaacaagatctgaaaagtggattggaggcaggattccccagtaagggctgatgtggataaggaattcaagggtgcagaatcatgcaag

SEQ ID NO: 135423 - DNA, 656 bp, Homo sapiens
cttcctgtactggctctaaagaaataatccaataatctattgattattttcctcatagacattcctttaacaatgtaaagcttctgtatttgggttttgtttctggtagggggagcaaaattgtgaaagggacacaagaaaatgtcaatagtttatatgaaagaaatgcaaattttatgatttaaaataacagaagacatgctatcacggggaagggggcatctgtcactatagctctaaaattatatgtctctgatgttcagttaaatggaatatttgtgcttcaggaaactttaatttgggttaaacctgtggccatattatcaayatatatgagccttccttattggcttctggtggtgattaaatgagaaaggtaagggataaagttctctccagattcatttaaacgactgtctcaaaaactgctctccagagcactactccaggaagagatcagggcgttttccacagaaaaaaaactgatttggtgatcagaaaagtatagaaaagcccacttaacatatctccttcctaaagattcacaatgaacattattatttaagagctttttgaagtgcaaatccatgagctttttaaccctgagcaattgctaccaagctaactctgaaatttactgcttttagtcaaaatac

SEQ ID NO: 135424 - DNA, 559 bp, Homo sapiens
acaagaaagccttgtctcctcagaaaactgtactttatttatgaggggggaaaatcaaaagcattgtagaaattgctctaatttcccataacacaaatgttataaaaccaagaatagctgaatgaaatggcagctggtacagcagacaagtctagattgatgaagtctagtcatggtcaacagttaattaaattcaacatacagtttttatcatcctcacactttgactttctgacatttacattccccattctcttgttagggagtttcttcttggctgaaatttctgaataataataatcttccatttagctgaaaggggcaataaatgggtactttgatcatctttagctaagacaggaaaggaaagcatcaggaagccctcttgtctttccagtgtgactgtattcacattcttcctagtcagttatgarcagttataatgacctgtggctgatcattagagaaattgacattttcacaggtgtgtgggtaaggagagagctggggaggaatggtgaggtgaaaaaagtgagaaagtaaggtgggaagtggcagc

SEQ ID NO: 135425 - DNA, 586 bp, Homo sapiens
tgaaatgctgtttaaaatattatttaactcagcaaaagcattcaaactaaaggtggaagggaaggtgagaagtctaagaaacaatttgaaagtcaggattttactataatagaaaaaattgtgtggctgtggaaatctttactcccaaactgaagcatgaatatggaaacacttaaaatacattaatattctttaatgctaacacatccatatagaagaccataactcaaatatggtatagtgtatgaaacctggtgttttttcttcttacacatttcttcargttgttggggtccttaaacattctaatgaaaaggtgtgaaagtaaatattgggaaccaatagaggtcatgatttcttcattatggtcacttaacttccacaaaggaaagagctaaataatgtgcacattgagttctcctagacaatgaattttttacaacattctgcatagccatagaatccctttgaacttgcaccaggctatggaaactgagtggtcttaagagcacagaatgtttacctcattatgtgatgctgatgaattctttcagagaactagaatttcgtgtaaaacccagtagta

SEQ ID NO: 135426 - DNA, 600 bp, Homo sapiens
agaaaccacccaatttggaataagttagataacaagactacgtagaggtgggccaagaggcccttgtcttcctcttgcagtctctgttccaatgataatggaatttgtgaggtggtttrcatttatatgcgatggagtaggtatattcagacctatatatacactttagcacttcctagacagaacacaaaatttagatttggagcatatggctaaaataaaataggtcttatttttggtcttacatttaatccacatcctcaaattttgttacacttaagggaattgtccttctctgggcttaatttaaagtcattctaataaagcccataaattgacaatttacctacttgtcccagaagggagaagaggttatttttatttcaaaccttagaagacctaaatagaagacatccagtcttcctcaaaatttccctttcaaaaaagtaaggtggcgcaaatcttcctatgtggagattatttcagagccctgtaagtagttgctaatcaagagtggcaagagctaaagggaacaggaaccctaagagggctatgaaattacaagtgtcctttcttggtggaaggtccagcaattaacta

SEQ ID NO: 135427 - DNA, 535 bp, Homo sapiens
tgcagcacactaatagcaattttagtcgcaccatctgcagcttgatggatggtagtgtgtaaacagctctgtcagtcccatagcctcactccagcctgcagctccagggctggcttgttcctgccactgcttctcattgcatggggtggctcccgccactgtcatagggcagagggccacagtgttacggccttctttgtacccacattcggtgggttctgagttcttgtcccacgtcycagaagaatgaggttatgctgataattgaaaggtgaggagagtggaggaggattttattgagagactgaacagctcttggcagagaggggatgcaagggtggtcccccaaccaaagttgggtgttctctctcacccggaggtggtcagttcccaagtatggctgagtctggggcttttatgggctcagaatggcagagtgagtgctgattggcttgtgagtatgcaaaaaaggctaaaacaaaggcaacactcaaaggtgggcatgacaacgtaaaagaccaattagggaagggta

SEQ ID NO: 135428 - DNA, 498 bp, Homo sapiens
aaattaattccgccacattcacatgaaagagaatcagaagctttagacaaggccacagccccggccaactccctgatgacagagtcataagatcctgaaccaaggacccacatccactgggcccagactcttgatccatggaaactgaaatataatgaatgtgtactgtgttaagactataagtttgtttaactgattatacagcaatacaaaagtaatacagataccttcaaatgaaggccaatactgacctcactggggctacaacaaagcactttacatccaaaggcagagagggmcacagcaatgcagaattccagcacacttaagaggagcaccatgccatccgtaccctaggagaaaactcataacaagggaatgtgagaaatggagatgacaagtgaaaacatttcccagcaaccacagtgtcataagagaaaaagcactggctgggagtcaggaaacctgcctcccaatggcagccatacccttgaccaa

SEQ ID NO: 135429 - DNA, 498 bp, Homo sapiens
aaattaattccgccacattcacatgaaagagaatcagaagctttagacaaggccacagccccggccaactccctgatgacagagtcataagatcctgaaccaaggacccacatccactgggcccagactcttgatccatggaaactgaaatataatgaatgtgtactgtgttaagactataagtttgtttaactgattatacagcaatacaaaagtaatacagataccttcaaatgaaggccaatactgacctcactggggctacaacaaagcactttacatccaaaggcagagagggccacagcaatgcagaattccagcacacttaagaggagcaccatgccatccgtaccctaggagaaaactcataacaagggaatgtgagaaatggagatgacaagtgaaaacatttcccagcaaccacartgtcataagagaaaaagcactggctgggagtcaggaaacctgcctcccaatggcagccatacccttgaccaa

SEQ ID NO: 135430 - DNA, 598 bp, Homo sapiens
gctgcacttcttggtaatttcaggcagaaagaagtagcactgctgagctggaagctccagcagatgtggctcacctgtctaccagtggtaggagtgggtagggctgtcctctctggcatctggatgcttcccagggaaacaggaggctgcacctgctggctcagttcacagagaagtaggaccactaggccagaactctagcaggcattgcccaccaggctaccagtggcagggttgggttgcatcacctgccctgctgtcagggtgttttctgattacaggaggctgtgccctctggcacacctaaagactgcaatttctggctgagttcacatataagaaggactactggtctggaasctctagcaagcattgcctgcccggctaccagtgtcggggggtgggtgcattgcttgtccttcttgtctgggtgctttctgggacaagagtaggctatggctactggccaagtccaggcagaagtggaaatgctgggtaggaaggtggcacaaggaatattatgtggagattatttcagaaccctacaacagtccctaatcaagagaggcaagagctaaaggaatcaggaaccctagga

SEQ ID NO: 135431 - DNA, 575 bp, Homo sapiens
gtgcccagagagtggagcacagtttcaacttgagtttggaggggcagggtgcaccagcgactaagatgggggcatggagcagttccatgggagcctggcctcagggagtagagagtagatagcrgcagtttggctcaggaatggcttccacgtgtgcatagtgtagtggtggttaagtctcagagatggaggggtgcaatggctactcactcctgaagcagaatgcactctagccagtgattcagttccaagaaggggcagcacagtagcaactcaggccatgggggccagggcacagtgtcagctcctcctctgggatagaacagacatgtggacttcaggtagctctgtcagctgagctcagagcctgtaaagactctatgtgtctccagtagtaagactgcaggtgtctatggtggtgatgggagctgctgggatcctgtcactaaccttttccctgtaggaagaaggccctcctgactcagagctggttctaactgggggaaggggtgatggaagaaaggtgttttctctccttcttcctgcagccattctgggtttctgtgctctacaag

SEQ ID NO: 135432 - DNA, 575 bp, Homo sapiens
gtgcccagagagtggagcacagtttcaacttgagtttggaggggcagggtgcaccagcgactaagatgggggcatggagcagttccatgggagcctggcctcagggagtagagagtagatagcggcagtttggctcaggwatggcttccacgtgtgcatagtgtagtggtggttaagtctcagagatggaggggtgcaatggctactcactcctgaagcagaatgcactctagccagtgattcagttccaagaaggggcagcacagtagcaactcaggccatgggggccagggcacagtgtcagctcctcctctgggatagaacagacatgtggacttcaggtagctctgtcagctgagctcagagcctgtaaagactctatgtgtctccagtagtaagactgcaggtgtctatggtggtgatgggagctgctgggatcctgtcactaaccttttccctgtaggaagaaggccctcctgactcagagctggttctaactgggggaaggggtgatggaagaaaggtgttttctctccttcttcctgcagccattctgggtttctgtgctctacaag

SEQ ID NO: 135433 - DNA, 575 bp, Homo sapiens
gtgcccagagagtggagcacagtttcaacttgagtttggaggggcagggtgcaccagcgactaagatgggggcatggagcagttccatgggagcctggcctcagggagtagagagtagatagcggcagtttggctcaggaatggcttccrcgtgtgcatagtgtagtggtggttaagtctcagagatggaggggtgcaatggctactcactcctgaagcagaatgcactctagccagtgattcagttccaagaaggggcagcacagtagcaactcaggccatgggggccagggcacagtgtcagctcctcctctgggatagaacagacatgtggacttcaggtagctctgtcagctgagctcagagcctgtaaagactctatgtgtctccagtagtaagactgcaggtgtctatggtggtgatgggagctgctgggatcctgtcactaaccttttccctgtaggaagaaggccctcctgactcagagctggttctaactgggggaaggggtgatggaagaaaggtgttttctctccttcttcctgcagccattctgggtttctgtgctctacaag

SEQ ID NO: 135434 - DNA, 575 bp, Homo sapiens
gtgcccagagagtggagcacagtttcaacttgagtttggaggggcagggtgcaccagcgactaagatgggggcatggagcagttccatgggagcctggcctcagggagtagagagtagatagcggcagtttggctcaggaatggcttccacgtgtgcatagtgtagtggtggttaagtctcagagatggaggggtgcaatggctactcactcctgaagcagaatgcactctagccagtgattcagttccaagaaggggcagcacagtagcaactcaggccatgggggccagggcacagtgtcagctcctcctctgggatagaacagacatgtggacttcaggtagctctgtcagctgagctcagagcctgtraagactctatgtgtctccagtagtaagactgcaggtgtctatggtggtgatgggagctgctgggatcctgtcactaaccttttccctgtaggaagaaggccctcctgactcagagctggttctaactgggggaaggggtgatggaagaaaggtgttttctctccttcttcctgcagccattctgggtttctgtgctctacaag

SEQ ID NO: 135435 - DNA, 392 bp, Homo sapiens
gatgtgacctttatgggatctctactgaatgttcaggtgttcaatgcctctctactttggatggctagaacttgaatctctctcaaggtctttgtgagctctgccaattgttcatttttacggctctccrgtagtagattttgtgtggcctcgtggacttgcaccctatatatgtgtggcttaatattcagcatcagactcaaaaaagccctgatacagatttctggatatatctctctgtgtctctgtctccgtctgtcactacctctctttctccagcttatgtccaatagtctctcacaactcttagccaccttagaccatctaaacatcagtctgtttcctcaactcatcaacttgctatgttctgcttggattcctccatcctgcac

SEQ ID NO: 135436 - DNA, 294 bp, Homo sapiens
gaaccatatgaaattgccaatgatcaactatacttaacctagaaagacagcagtttcgtatagctcaagctaagatatatatgtaattttaataagagagtctataaattacatagctggtcctgcattcatttcagtcacctttcccagagtccatgatgaattcctgttaattgtgtaaacatttttatgcctgtttttatagcaggggacctccataagggcttcctgggatttgaagcaaygggtctattcttgcctgggcacctgcacaatcagtccacaggtctatat

SEQ ID NO: 135437 - DNA, 586 bp, Homo sapiens
tgatcacagctaactgatgtgcattcagcctttcccaagtgaatgtcaaaccaaaagccccatgcacttaatacttcattaaaatattaagggagctctgtcttaatagggaactctgcctaaatagtaatgtgtgtttcttggcctracagttcagccacttccagttctgttttccaggaatactgccttttctctcttcaaccacatccagcatgagaactgagaaaatgcgaagccaacttaaatatggtacaactttgagggcctacatggtgattgtctgtgattgtttaatccatagggcaattcttgggtcttccatcaaataataagaaggaaattaaacaaaattttggcagtctaatagaaaaaaagaaattggaaaaataagaacaattaaataatggtgaatagaaaggaaaatataagatgttatacatttaaaatctgatatattagtaatctaaataaaaatgaatacactatacttactatttaaaataaatattaataccctgaaaattagaagtaatttaaaatatacatatgcaaattgaataaataattaaataaataaaacacc

SEQ ID NO: 135438 - DNA, 620 bp, Homo sapiens
gatctcgccctgcctccacttgccttgtgatattctattaccttgtacagtacttgatgtctgtgacccacacctattcgcatactccctccctttttgaaactccytaataaaaacttactggtttttgcagcttgtggggtgtcacggaacctatcgacatgtgatgtcttccctggatgcccagctttaaaatttctctcttttgtgtactctgtccctttatttctcaagccagccaacgcttagggaaaacagaaaagaacctacgtgactatcggggcaggttccccgatagtgatggccttctcctcaggtgttgccaagcaagacaatgttgattctccttaggacccactcccaaggcccctgtttgcttctagacctataactaaagtcccagcaggcccctagaggtgaggttcagaatgcgatacacaagaaagtgtgctacacttgaaaagaactgcttgagttttctaatttatataagcagaaatctggaaaacaggcatgggaatgaatattaagggtgtgggataatggtggaagaacatagagttggatcaggctgaatttattgatttgggccctctaagcagggattctgcatttaatgt

SEQ ID NO: 135439 - DNA, 620 bp, Homo sapiens
gatctcgccctgcctccacttgccttgtgatattctattaccttgtacagtacttgatgtctgtgacccacacctattcgcatactccctccctttttgaaactccttaataaaaacttactggtttttgcagcttgtggggtgtcacggaacctatcgacatgtgatgtcttccctggatgcccagctttaaaatttctctcttttgtgtactctgtccctttatttctcaagccagccaacgcttagggaaaacagaaaagaacctacgtgactatcggggcaggttccccgatagtgatggccttctcctcaggtgttgccaagcaagacaatgttgattctccttaggacccactcccaaggcccctgtttgcttctagacctataactaaagtcccagcaggcccctagaggtgaggttcagaatgcgatacacaagaaagtgtgctacacttgaaaagaactgcttgagttttctaatttatataagcagaaatctggaaaacaggcatgggaatgaatattaagggtgtgggwtaatggtggaagaacatagagttggatcaggctgaatttattgatttgggccctctaagcagggattctgcatttaatgt

SEQ ID NO: 135440 - DNA, 668 bp, Homo sapiens
tgatcagttgcagaaatgaagaccgtaattgtcatgagtatttcctccttcttttgtaaagaacatgtttgtgcatgtacacatttgtagtaagaaaatatcttcattttattttctttcttttttcttcaccatgtgacataagacytattaacttcatattagcatttaagtgttgttaactttaggtaatagcatttgtataggggattggtgcattttgggttgtacaaaaaatagctgcattatgttaggcataattttggccttttgtctttattttctttatttgaaaatcatgtatgacttcaggagatgtgtgtgggttcaggttgacaaggggtggactcttgatggttaatattgaatgttaacttgattggattgaaggatgcaaaatatcattcctggatgtgactatgaaggggttgccaagggagattaacatttgagtcagtggactgggaaaggcagacccaccctcaatctgggagagcacaatctactcagctgccagtgtggccagaataaaagtaggcagaagaacatagaaacactagactggtttagtctctggcctacatctttctctcgtgctgcatgtttcctaccctcaaacatcagatttcaagttcttcagctttgggactcaaactggcttcattgcc

SEQ ID NO: 135441 - DNA, 581 bp, Homo sapiens
caagttttagatgtccggactccaagtgccagttccttcatggtgttcagccactgcattgatcctccacaggggcctgctgtgcactgctctgatgaggcattccactggggcaattgcctacctgggagtgctctcaggatctgcttcactcaagctggctggagtccccctcaggtatgctccacagggcaggcctaagccacctaaggagctgtctcgaccatccattaatcaccttgtttcctggtcagggaaccaagaaatgtagcaggacaagccacagacaaaacccctcagacaccgagttaaagaaggaagggctttattcsgccaggagctttggcaagactcacatctctaaaaaccaagctccccaagtgagcaattcctgtcccttttaagggcctacaactctaagggggtccccatgagagggtcttgatcaattgagcaagcagggggtatgtgactgggggctgcatgcaccagtaatcagaacagaacagaacaggaaagggattttcacagtgcttttccatacaatgtctggaatctatagataacataaccggttaggt

SEQ ID NO: 135442 - DNA, 606 bp, Homo sapiens
cattttgaaaatacttttactgcattgactgattcccaggtaaggctgagcagatatctatgcccagtgattgacaggaaattcctctgaaatagctgcaagtctggagtttcaaaaggacttagtagtcctttcctcagagaactgctttctctaagatgggggctttctcataggtaagtttccctttcatagatgttttttccttcaacttcctgcaattcagtagctatttgtttttcttacatttgtgtatttgatgcaccaagaagtccacctttttgtgtatcttgtccatttttcttgtcttattaactaaagttacacttggatttggatttcattggttttccccaaatgacctttttctgttccaagatccatgccaagctactacwttacactacattacattttgtcatgatgtctcctcagggtcctctaggctgtctaagattttccttttccttgagaactttgatagttttgggtagcgctggctgagatttttatagaatgttcctaaatttgggtttgtctgatttttttttttgatgtttagagtatggtgatgaatttttgggtggtgatgatgaggtaaagcac

SEQ ID NO: 135443 - DNA, 453 bp, Homo sapiens
tataattgttgtgttgctgacaataatgtaacacttttcaggttttatcactaataatgttattcactgtaggtttaaaataattttcttgttagcttargaagttttcctttatccttatttttaagagtttgctttaaaactatgaatacttgctttttcattccaaagatttgttgtcatgcatctattgagattattatactattaaactttaaacaatctgcttctgtggtaaatgtggtatttaaaaattagaatgttaaaatatatttgaatatctggaatgagttcatcttgatcttgatacattgtcatattttttcttttcatatattataaaattttatttgaaaaattacttctggccccttacacttcattcatagtgagatatgcatattatttccctgcctgtattgaacttttattgttcttttttgaaggatccaa

SEQ ID NO: 135444 - DNA, 600 bp, Homo sapiens
cactgtggctgcgtgtgcagtgtatggcctgacgcccatcatttgtcccagcrgcagtgtggctgcgtgtgcagtgtatggcctgacgcccctcatttgtcccagcggcagtgtggctgcgtgtgcagtgtatggcctgacgcccctcatttgtcccagcggcagtgtggctgcgtgtgtggcgtgtggcctgacgcccctcatttgtcccagcggcagtgtggctgcgtgtgtggcgtgtggcctgacgcccctcatttgtcccagcggcactgtggctgcgtgtgcagtgtatggcctgacgcccctcatttgtcccagcgtcactgtggctgtatctgtgcctcagttctcaccaggacagcctgtacccaccagggacaaagaattgtggctgaaatctctctgctctggtcccagggaacccatggctttggcagtcccagctggccctcagcttgcctgagcagaaaaatgattttcaaatgaccacagattttctctacataaattcctgttcaatagggctcctctgaaatacttaggcattttctgagaaactgctttggcccacaggtaaaattgttctgaaacgcccaa

SEQ ID NO: 135445 - DNA, 600 bp, Homo sapiens
cactgtggctgcgtgtgcagtgtatggcctgacgcccatcatttgtcccagcagcagtgtggctgcgtgtgcagtgtatggcctgacgcccctcatttgtcccagcggcagtgtggctgcgtgtgcagtgtatggcctgacgcccmtcatttgtcccagcggcagtgtggctgcgtgtgtggcgtgtggcctgacgcccctcatttgtcccagcggcagtgtggctgcgtgtgtggcgtgtggcctgacgcccctcatttgtcccagcggcactgtggctgcgtgtgcagtgtatggcctgacgcccctcatttgtcccagcgtcactgtggctgtatctgtgcctcagttctcaccaggacagcctgtacccaccagggacaaagaattgtggctgaaatctctctgctctggtcccagggaacccatggctttggcagtcccagctggccctcagcttgcctgagcagaaaaatgattttcaaatgaccacagattttctctacataaattcctgttcaatagggctcctctgaaatacttaggcattttctgagaaactgctttggcccacaggtaaaattgttctgaaacgcccaa

SEQ ID NO: 135446 - DNA, 600 bp, Homo sapiens
cactgtggctgcgtgtgcagtgtatggcctgacgcccatcatttgtcccagcagcagtgtggctgcgtgtgcagtgtatggcctgacgcccctcatttgtcccagcggcagtgtggctgcgtgtgcagtgtatggcctgacgcccctcatttgtcccagcggcagtgtggctgcgtgtgtggcgtgtggcctgacgcccctcatttgtcccagyggcagtgtggctgcgtgtgtggcgtgtggcctgacgcccctcatttgtcccagcggcactgtggctgcgtgtgcagtgtatggcctgacgcccctcatttgtcccagcgtcactgtggctgtatctgtgcctcagttctcaccaggacagcctgtacccaccagggacaaagaattgtggctgaaatctctctgctctggtcccagggaacccatggctttggcagtcccagctggccctcagcttgcctgagcagaaaaatgattttcaaatgaccacagattttctctacataaattcctgttcaatagggctcctctgaaatacttaggcattttctgagaaactgctttggcccacaggtaaaattgttctgaaacgcccaa

SEQ ID NO: 135447 - DNA, 600 bp, Homo sapiens
cactgtggctgcgtgtgcagtgtatggcctgacgcccatcatttgtcccagcagcagtgtggctgcgtgtgcagtgtatggcctgacgcccctcatttgtcccagcggcagtgtggctgcgtgtgcagtgtatggcctgacgcccctcatttgtcccagcggcagtgtggctgcgtgtgtggcgtgtggcctgacgcccctcatttgtcccagcggcagtgtggctgcgtgtgtggygtgtggcctgacgcccctcatttgtcccagcggcactgtggctgcgtgtgcagtgtatggcctgacgcccctcatttgtcccagcgtcactgtggctgtatctgtgcctcagttctcaccaggacagcctgtacccaccagggacaaagaattgtggctgaaatctctctgctctggtcccagggaacccatggctttggcagtcccagctggccctcagcttgcctgagcagaaaaatgattttcaaatgaccacagattttctctacataaattcctgttcaatagggctcctctgaaatacttaggcattttctgagaaactgctttggcccacaggtaaaattgttctgaaacgcccaa

SEQ ID NO: 135448 - DNA, 390 bp, Homo sapiens
atgcttggatgatctacggaatctgaccttggcaggcggtggggagtttggtttggtggccctgtctgtgaggaccaaatattgtctctatttcacagatgaggaaactgaagccaattgaataagacacctgccccagaccatcaagctggcatgggaattttgtctcccctcagacgcttcctcctatagccttaaacgctgcctcaaatgctggcgggagctagggacgctgtccagggccctttgaacctgggaggcttctgtcccgccacactccccaccccaggtctccgggaaagggatcygttggagaaaggctggagttctcagcaggcccctggggaggggtgtggcctgaccagcgctcggctccccgcaaccccatct

SEQ ID NO: 135449 - DNA, 417 bp, Homo sapiens
ttattattcagggtttcaagctgtgaacagttgttgtcactcacaattcaggtgtcacttttcaytgtgcttctgaaaagaaaaacaaatgaatcagagcttggctttatgggcatgaggaactcatccttaaattagcccacagtgggatttcagctgaatgttggaagtgttccagtctcgcctttaagtctgctgaaaatccacaggagatactggaaaatccatttgcatttagcacctgtgtttgcctcataactgtatattattatgctctctagatgttgaaagtgcctggagaactttccttcctctgggcaaataaaaggcaaataaaagttgtgtataccgtattagcttcctgtagctactgtaacaaattaacataagcttagtgactgaaaacaggaggaattc

SEQ ID NO: 135450 - DNA, 534 bp, Homo sapiens
cgggctggcaccgtcaaccaggagcacctcaatggcattttcaggcctattctgcctgtgacccacagtaggtcctgcatggattgactttggggacccattgcaggtgctactcagccctctctgccctcagggagtcaacacatgagatggagttgtgcagtgccaggtacctccatgccatagacatgtctctgggaagttgcatgtacatcraaccatttgcctacctgctgttggattttccagtttctgaatctgctgttgcatccacatttccaggttccaaaaccctacccattctctgaggcacaactgcagcctcacccgttgctaacactttcctggcagcctcaggcagcacaccccatcagctttgaactggtcccagcaggcccaaggggctgatgaaatttcattgcactccaagccaggaattttaaagccttccccagcctctttgtatctggtcattgattaacattttactggcaatgccttgtgtgtgcctacatatttatttctaacatttat

SEQ ID NO: 135451 - DNA, 564 bp, Homo sapiens
gctatgctcatagttgaaaagaaaattccattatttgaatctactgctcattctcaaaatgttttaaaattcaaggcactatttactcacatgttgtctggatagaatttgacttgacttctgatattgctttttctttgttttgcacctttttggatgtaattaattcctattttatttcatttttttgagcggaagaaaagcaggtaacaaggataagtaggctgtgtacctaaatataagtagagacaaatgatatgtcttcaaaatctctttctctctctacaaaaatggggtaagtctgtggttgctgttgcagcatatgtcgcagtgtaattgaygaaggacgttggatccctgcagcctttttctgagactctacagatacggataggaaaaaaactgagatgtgtcaggcaaagaaagcaggtttgtaaaatttgtgatagtaatttgctaaaatctctttcgagtctttgatactttgttttgctttggtttgattttttatttttcttcttgaggataattgagaaaatatatttacccctaaatcacgaacaa

SEQ ID NO: 135452 - DNA, 564 bp, Homo sapiens
gctatgctcatagttgaaaagaaaattccattatttgaatctactgctcattctcaaaatgttttaaaattcaaggcactatttactcacatgttgtctggatagaatttgacttgacttctgatattgctttttctttgttttgcacctttttggatgtaattaattcctattttatttcatttttttgagcggaagaaaagcaggtaacaaggataagtaggctgtgtacctaaatataagtagagacaaatgatatgtcttcaaaatctctttctctctctacaaaaatggggtaagtctgtggttgctgttgcagcatatgtcgcagtgtaattgacgaaggacgttggatccctgcagcctttttctgagactctacagatacggataggaaaaaaactgagatgtgtcaggcaaagaaagcaggtttgtaaaatttgtgatagtaatttgctaaaatctctttygagtctttgatactttgttttgctttggtttgattttttatttttcttcttgaggataattgagaaaatatatttacccctaaatcacgaacaa

SEQ ID NO: 135453 - DNA, 533 bp, Homo sapiens
tggaggccatcctacactacacagttgaaaatcttcctattcaaccacttgtttccctttggttgttctaaacccttcaagaaaatcttattcaacttcacgtggcatagagaatgaagggctggggctgagaaggcagggcgctcaggccactgtcatcctctgctctgctggggtacccaagtgaggacatggattctggagaggcggaggaggaaggggtagccacaggggtgtgggggcagcccctggagggtgactggatttcaygtttggagtggaacccacttaagatgtcttcagtcgactcataagggatcccaacaagtcaattagcagctgtaaataatttacaatgctgagcaagctgctgaaatgggcagaggagtcatcagtttgaaatcttggagagggagacgtgctgatacatggttggcagaaaagtcactgaagtgcatcttaacaaatggacctcacttctggcgatgtgataatgagcttagtggataacaggagtgaagtgaactagggta

SEQ ID NO: 135454 - DNA, 465 bp, Homo sapiens
gaattccaattctgcccccataacccccatggtgaacggagctgrtagggagatcaaccgctcacagagtggccctgctccaaacacataaatatgctccataaagtaacaaaatgtttggaaattcagatcctcgcttgaaattctctagcaccagaatgaaggcaactccaagccacagctgagaaccaagatgggaactcagtggactgtgaagcgctcagagctctgcctccacctgcctggaggaaggagttgagcccacagctgtcctctgtcccctgcctcatgccccacactccacacagagctgggatttgtcattcatgagggagccaggaggatcgccccaactgtgatctgggagttagaaaaatccacccatctgacgggggacacagctcagaggcatcccctccacgccaggagtggaaaaagcattggcagaatcctgggccagttgaa

SEQ ID NO: 135455 - DNA, 465 bp, Homo sapiens
gaattccaattctgcccccataacccccatggtgaacggagctgatagggagatcaaccgctcacagagtggccctgctccaaacacataaatatgctccataaagtaacaaaatgtttggaaattcagatcctcgcttgaaattctctagcaccagaatgaaggcaactccaagccacagctgagaaccaagatgggaactcrgtggactgtgaagcgctcagagctctgcctccacctgcctggaggaaggagttgagcccacagctgtcctctgtcccctgcctcatgccccacactccacacagagctgggatttgtcattcatgagggagccaggaggatcgccccaactgtgatctgggagttagaaaaatccacccatctgacgggggacacagctcagaggcatcccctccacgccaggagtggaaaaagcattggcagaatcctgggccagttgaa

SEQ ID NO: 135456 - DNA, 465 bp, Homo sapiens
gaattccaattctgcccccataacccccatggtgaacggagctgatagggagatcaaccgctcacagagtggccctgctccaaacacataaatatgctccataaagtaacaaaatgtttggaaattcagatcctcgcttgaaattctctagcaccagaatgaaggcaactccaagccacagctgagaaccaagatgggaactcagtggactgtgaagcgctcagagctctgcctccacctgcctggaggaaggagttgagcccacagctgtcctctgtcccctgcctcatgccccacactccacacagagctgggatttgtcattcatgagggagccaggaggatcgccccaactgtgatctgggagttagaaaaatccacccatctgacgggggacacagctcagaggcatcccctccacgccaggmgtggaaaaagcattggcagaatcctgggccagttgaa

SEQ ID NO: 135457 - DNA, 567 bp, Homo sapiens
acatgtatatatatacacacacacaaagacacatacatacttgctaaacttgagttccttaaaagggtagggaccatattttacacatttataaactaccattaaggcctagcacaaaaccaatatagaaaaactaccaatgaatgtctgttttactcgtggtttttaaatttagctgttcatttggaataacttcagatgattttttttttctaaataccaaaaccaaacccatctcacatggctgagaaatgccaattttggttttgcttttgcttttaattgaggcttggtcttctactaaattgggataaaagwgactggtttgctttcagtatgactaaagtgaatataagtgtgaaataaaagggatcaagtaaaggtttaaaacttttaatgcattatgcacattggtagtataaatgttaattataatttttaaaatggcttaatactatccttggaaggtctctataaatctaaagtcattttataataaaaggttgaaaaattggttaatataggatgcagtattttcttaagcaaagattcacatttttcatagta

SEQ ID NO: 135458 - DNA, 546 bp, Homo sapiens
ggctcaacagcaacacgtgctcactttgtatatttcatttcaatagttccagcttacagattcataaggaaatatgtatgttcaaattatgcaacataaactatagttttgtctttataattaatatacccactgaaaggcagtgtttaactttactggtaatttttccatagtgtgaagaaccttagcagttacattccaatgtgatattttgtgtggagggcaaaccagttactcaccatgaaaaattgtgatatgtaggatgagttattaaccacctccaaccttctgtctagagatcatccttattatcactawactctagtttggctataaagtatataaagaagtagatgtcaaaatggacaaaacaatgactacaaattatctgagacacggctttttctcttaaaacacaacaatcctacatatttgctgtggttatatctagtcatcttgagttaaaaaacatagctagacttgtgttttcttgtttatttgctttttaaatcagaaaagaaaagaaaggaactatggggtttcata

SEQ ID NO: 135459 - DNA, 561 bp, Homo sapiens
gaaaaaaattagaatggatcatcctttaatttctgaatggaacaggcacatcgaaagtgtattttaccataatyatgaacttattctacttaatggctattacaattaattttttttgaccttctgaatgtttttctttttatgggaaagcaacattcaagggacagtgtcactcagatgactgatgccagctttcatcgatggtaaaatcattacaaaaacaaagacaaaacctgacaccctcaatctggtgtttagaacttaaaatcaagcacaagccaaaattcaaagtccagttgtgctcacgcagtgctcaaacatatggccaaggagaaaccattaatcttcttggtgagtcttagtttcatcatccctgaaaggagcacatcacgcacatctcagaactgagatatctatatctcactcaagtgagaatatatgtgaaagtgcttcacaatcagtactgtccaaatatcagtgatgatgaatttgtgtgctcagaaagattcctcaaacaaaacgtagctgcagaataaacctattaaaatgcaatggtttatg

SEQ ID NO: 135460 - DNA, 561 bp, Homo sapiens
gaaaaaaattagaatggatcatcctttaatttctgaatggaacaggcacatcgaaagtgtattttaccataattatgaacttattctacttaatggctattacaattaattttttttgaccttctgaatgtttttctttttatgggaaagcaacattcaagggacagtgtcactcagatgactgatgccagctttcatcgatggtaaaatcattacaaaaacaaagacaaaacctgacaccctcaatctggtgtttagaacttaaaatcaagcacaagccaaaattcaaagtccagttgtgctcacgcrgtgctcaaacatatggccaaggagaaaccattaatcttcttggtgagtcttagtttcatcatccctgaaaggagcacatcacgcacatctcagaactgagatatctatatctcactcaagtgagaatatatgtgaaagtgcttcacaatcagtactgtccaaatatcagtgatgatgaatttgtgtgctcagaaagattcctcaaacaaaacgtagctgcagaataaacctattaaaatgcaatggtttatg

SEQ ID NO: 135461 - DNA, 572 bp, Homo sapiens
gcatgtaccctaacatattcacatgttccagagattaagacgtggacaactttgagggctattattctgctcaccacaacataccataagaagggaagtctgcacatagtgctagactcagagtaggaacatcagtgcaaggacaagtatagacaagagcaaaagttcttgtattcatsgtacctattttccagagttcctcatgattttctaagaatttctttataatttcagcatatttttaaaaaatttaaacatattatttaagatacttctattttttaatgcattgttctattctttttgtaactataatcttgctaccacatttaaacaaaaaacccctatttaatattagattgaggaatttcaggaagcaagtctgagttaagattgcagctaaacaagttttatattgtccccataggattgcttttcttaggtccattttatggataaggaaactatccctcaaaaagattaggagcctgaccagaattatacacaccagagctaaagcctagagaaaattgttctatctatttgaaccttataaacagaatgaaaaatgt

SEQ ID NO: 135462 - DNA, 572 bp, Homo sapiens
gcatgtaccctaacatattcacatgttccagagattaagacgtggacaactttgagggctattattctgctcaccacaacataccataagaagggaagtctgcacatagtgctagactcagagtaggaacatcagtgcaaggacaagtatagacaagagcaaaagttcttgtattcatcgtacctattttccagagttcctcatgattttctaagaatttctttataatttcagcatatttttaaaaaatttaaacatattatttaagatacttctattttttaatgcattgttctattctttttgtaactataatcttgctaccacatttaaacaaaaaacccctatttaatattagattgaggaatttcaggaagcaagtctgagttaagattgcagctaaacaagttttatattgtccccataggattgcttttcttaggtccattttatggataaggaaactatccctcaaaaagattaggagcctgaccagaattatamacaccagagctaaagcctagagaaaattgttctatctatttgaaccttataaacagaatgaaaaatgt

SEQ ID NO: 135463 - DNA, 531 bp, Homo sapiens
tttctgcaggtgctttcagaataaaacattaccacgatctaaggttactctgtgatgtcaagtcatatttcatatgtcatacgtattcatatttatattcataattcaaaatgcacatattcaatcaaactaacaggactaaaaaggaaattttctaaaatttatacactaagtaccttatatttttctaatgatcactttgatagagcaaacttagaatctatggtwtcaacaaatgaagaggcttatgcaagagaaaaccaccacctaacacaagattttcaatgtgaccatcattgctacttttcactagcaattatccagttaatatattgtgaactgctttgtgactatggtgatttatttaaacctactaatcctttgattatctcaaaaatatgaacaatactaattttataaacttgttctaaaaattaaatgagaggaaaataatcctccttctctatatattgaaaacctacaaaattagtaacattgtgtccagatttttacacacttaccttattgaag

SEQ ID NO: 135464 - DNA, 531 bp, Homo sapiens
tttctgcaggtgctttcagaataaaacattaccacgatctaaggttactctgtgatgtcaagtcatatttcatatgtcatacgtattcatatttatattcataattcaaaatgcacatattcaatcaaactaacaggactaaaaaggaaattttctaaaatttatacactaagtaccttatatttttctaatgatcactttgatagagcaaacttagaatctatggtatcaacaaatgaagaggcttatgcaagagaaaaccaccacctaacacaagattttcaatgtgaccatcattgctacttttcactagcaattatccagttaatatattgtgaactgctttgtgactatggtgatttatttaaacctactratcctttgattatctcaaaaatatgaacaatactaattttataaacttgttctaaaaattaaatgagaggaaaataatcctccttctctatatattgaaaacctacaaaattagtaacattgtgtccagatttttacacacttaccttattgaag

SEQ ID NO: 135465 - DNA, 654 bp, Homo sapiens
ctaaacttagtttggttaagaaaaaagaaaaataggaggtggcaaactcttgttggaaagaggaaggatttgggcagagcaaggtagtggagtcgacctatccaataatcatatgcctacggacacatctatatgaacaactatccacatatgaaattacctttacaagagctaatgaaccctgaatacatgagtgagtctatgaagyccctttggactgcaaagaggaataaaaccatgcttggacagtaagggaaacagtaccctgtgactatgatactcctcccccaggacataatggtattatatgcagaaagtcctcttgaactcacagttcttacactgaataaagtgagcagaagttgaatattttttccaccatactgagtgccttcacagtagactcactcctgcatcagcccacaagaagcaccatgagtgtcaacagagcttaaccatcagaggcatgctagggacatagagaagggatagggttaacaatacttactatatgaaacttagcagtggctagccattcctaccagaggaaacattataccagataggttgtttatgggcaccacgctgtgggatacaggatacacagactgtccagatttgatggcctgacttgttctcccccaacagacagca

SEQ ID NO: 135466 - DNA, 591 bp, Homo sapiens
taccctatcaaaattgaagaaagaagaaatagaaaatgtgaacacaccaatgacaactaatgagattgaaggagcgatttaggctctcagtcaaggaaaatccaaaagacttcacacagtagctcacacctgtaatctcacagtttaggagcccaaggcaggagaatcaccagaggccaggagttcaagattagcctgggcaacacaatgagactccatctctaaaaataaaaataaaaattatccargtatagtggtgtgtatttgtactcaggaggctgaggcaggaggatcacttaagaccaggagtttgaggctgcagtcagctatgactgcaccactgtatgccagcttcagtgatagagtgagaccctgtctctaaaaaaatagaggaagaaagaaaagttcatgacttggtggttttcgctgacaaattctacaaaacatttaaagaacttatacaaattttttacaaactatttcaaaaaaatgaaaaggagggaactcttccaaactcattctatgaagacagcatttcctaattccaaaatgagacaagaacagcaaataaaagaaaactccaggccaata

SEQ ID NO: 135467 - DNA, 571 bp, Homo sapiens
gcaagtgaaataatctaaactcggtaagacaaatatcacatgatctcattcatatgtgaaatgtaaaaacactgatctaatagagagtagaagagtggttgccagactgggaaagatagggaggagaggttttaacaatgtgtmatgtatcaaaataccacattgtaccccatcaacatgtgaaattaccatgtatccacttaataaaagaaaagaaaaaagaaaatggaagagtcaagatactggggcactggaagagatagaagagaaggtaaatcggcagtaaggaagagagagtctgaaagagcaggtcacagagtggaacattaaagtttataacaatagaaatcaatttttaagttattgaaaagttaagtttatagccatgaaagtgagtagctcaactgaagtgaaagtaaaagtcaatgaaatattaaattagaaaatacattgcttggcatttaatagttacttcagaaatattaataaatcttaagaaaattaagaacaccaaagcattcatagtgggccattatcataatatgaatttatgtggtaatatcttattctt

SEQ ID NO: 135468 - DNA, 571 bp, Homo sapiens
gcaagtgaaataatctaaactcggtaagacaaatatcacatgatctcattcatatgtgaaatgtaaaaacactgatctaatagagagtagaagagtggttgccagactgggaaagatagggaggagaggttttaacaatgtgtcatgtatcaaaataccacattgtaccccatcaacatgtgaaattaycatgtatccacttaataaaagaaaagaaaaaagaaaatggaagagtcaagatactggggcactggaagagatagaagagaaggtaaatcggcagtaaggaagagagagtctgaaagagcaggtcacagagtggaacattaaagtttataacaatagaaatcaatttttaagttattgaaaagttaagtttatagccatgaaagtgagtagctcaactgaagtgaaagtaaaagtcaatgaaatattaaattagaaaatacattgcttggcatttaatagttacttcagaaatattaataaatcttaagaaaattaagaacaccaaagcattcatagtgggccattatcataatatgaatttatgtggtaatatcttattctt

SEQ ID NO: 135469 - DNA, 571 bp, Homo sapiens
gcaagtgaaataatctaaactcggtaagacaaatatcacatgatctcattcatatgtgaaatgtaaaaacactgatctaatagagagtagaagagtggttgccagactgggaaagatagggaggagaggttttaacaatgtgtcatgtatcaaaataccacattgtaccccatcaacatgtgaaattaccatgtatccacttaataaaagaaaagaaaaaagaaaatggaagagtcaagatactggggcactggaagagatagaagagaaggtaaatcggcagtaaggaagagagagtctgaaagagcaggtcacagagtggaacattaaagtttataacaatagaaatcaatttttaagttattgaaaagttaagtttatagccatgaaagtgagtagctcaactgaagtgaaagtaaaagtcaatgaaatattaaattagaaaatacattgcttggcatttaatagttacttcagaaatattaataaatcttaagaaaattaagaacaccaaagcattcatagtgggcmattatcataatatgaatttatgtggtaatatcttattctt

SEQ ID NO: 135470 - DNA, 596 bp, Homo sapiens
atggcacatcccccctggctcacttgctctcctgtcaccatggtagaatgtgccttgcttcccccttcaccttctgccatgattgtaagtttcctgaagcctcccagccatgcttcctgtacagcctgtggaactgtgagtcagttaaacctcttttctttataaattacccagtcttgggtagttctatatagcagtgtgagaacagattaatacatgagcatagtacccaatagttagtttgtcaaaccttgccttcctccttctcccctctagtagtcccggtgtttattctttccatctttatgtccatgartacccagtgtttagctcccacttataagtgagataatgtggtatttcgttttgtattcctgcattaatttacttaggataatggccttcagctgcatccatgttgcttcaaaggacataagtttgttatttttatggctgcatagtattccatggtgtgtgaaatggtttggaaggtggcccctataaatctcatggtgaaatgtaatcctcagtgttggaggtggcgcctggtaggaggtgtttgggtcacgggggtggatctctaatgccctgatgct

SEQ ID NO: 135471 - DNA, 596 bp, Homo sapiens
atggcacatcccccctggctcacttgctctcctgtcaccatggtagaatgtgccttgcttcccccttcaccttctgccatgattgtaagtttcctgaagcctcccagccatgcttcctgtacagcctgtggaactgtgagtcagttaaacctcttttctttataaattacccagtcttgggtagttctatatagcagtgtgagaacagattaatacatgagcatagtacccaatagttagtttgtcaaaccttgccttcctccttctcccctctagtagtcccggtgtttattctttccatctttatgtccatgaatacccagtgtttagctcccacttataagtgagataatgtggtatttcgttttgtattcctgcattaatttacttaggataatggccttcagctgcatccatgttgcttcaaaggacataagtttgttatttttatggctgcatagtattccatggtgtgtgaaatggtttggaaggtggcccctataaatctcatggtgaaatgtaatcctcagtgttggaggtggsgcctggtaggaggtgtttgggtcacgggggtggatctctaatgccctgatgct

SEQ ID NO: 135472 - DNA, 549 bp, Homo sapiens
tttttaagtgggaaactgactcacagagagattcagtaccttttccaaaaatcacagagctaagaagtgacagaatcgggatataaaatctggcagtgtggctctacaatctgctttgaactttaacataatatgtacaaagcctgaagcaacttctcagtactgtatttaagagggcatagcaatgtaagtcttcctaaatcaataatttataaatgtaacagcttaaaagacttccaagtttcaatcttacaatatttatttatcacacaagtcaatatayctaaactcatctgtataaattatgtcctgtagtaagaagaaaaagagcaaagagaagaagagaaaaagagaagaagatgaagaaacccagtttgatatgttggtgagtcagttttcagtgctttattctgaaaaaagttaacatttgttgagatctcattgaaaatattttcctagttagaaatttatgatgtactcatattagtcttaaagtgcttaaatattacctacagttgtaaattccatttattctttagcacagtagat

SEQ ID NO: 135473 - DNA, 535 bp, Homo sapiens
caatctctagaagaatttatcctagcatttctcctagcatttttatagtttcaggtcttacattttagtcttttaatccatatttagttgcttttgctatgggggggacataggggtcccattccttactttggatacggaaatatattttttccagcacaatttattgactaggatgtcatttctccagtgtatgtttctgctgactttgtaaaatataagttgtttgtaggtatgtggctttatttctgggttctctattctgcaccattgatctatgtgtcgatttatatcagtaccatgctrttttggttactaaagccttctagtataattttaagtcagataatgtaatatctccagctttgttctctttgcttagatttgctttggctattcaggctctttttgtggttccatgtgaattttagatttttttttctaattttataagaaataacattggcattttggtaggaattgcatttaacatgtagattgctttgggcagtagagtcattttaataatcataat

SEQ ID NO: 135474 - DNA, 535 bp, Homo sapiens
caatctctagaagaatttatcctagcatttctcctagcatttttatagtttcaggtcttacattttagtcttttaatccatatttagttgcttttgctatgggggggacataggggtcccattccttactttggatacggaaatatattttttccagcacaatttattgactaggatgtcatttctccagtgtatgtttctgctgactttgtaaaatataagttgtttgtaggtatgtggctttatttctgggttctctattctgcaccattgatctatgtgtcgatttatatcagtaccatgctattttggttactaaagccttctagtataattttaagtcagataatgtaatatctccagctttgytctctttgcttagatttgctttggctattcaggctctttttgtggttccatgtgaattttagatttttttttctaattttataagaaataacattggcattttggtaggaattgcatttaacatgtagattgctttgggcagtagagtcattttaataatcataat

SEQ ID NO: 135475 - DNA, 535 bp, Homo sapiens
caatctctagaagaatttatcctagcatttctcctagcatttttatagtttcaggtcttacattttagtcttttaatccatatttagttgcttttgctatgggggggacataggggtcccattccttactttggatacggaaatatattttttccagcacaatttattgactaggatgtcatttctccagtgtatgtttctgctgactttgtaaaatataagttgtttgtaggtatgtggctttatttctgggttctctattctgcaccattgatctatgtgtcgatttatatcagtaccatgctattttggttactaaagccttctagtataattttaagtcagataatgtaatatctccagctttgttctctttgcttagatttgctttggctattcaggctctttttgtggttccatgtgaattttagatttttttttctaattttataagaaataacattggcattttggtaggaattgcatttaacatgtagattgctttgggyagtagagtcattttaataatcataat

SEQ ID NO: 135476 - DNA, 491 bp, Homo sapiens
tctgtcagcatttaaatataaatttttcatttaaaaaatcttctatcttggaggaaccttaactttgatgctgtgtgtctttctagctatccaagccatctcctcctttcttagaaaatttttctcaaggattttccacatttactatctccttttgctcattttcttttcactctttattcagatcagtttggctttcactttcaccaagcctatgaaacttcttgtgctaaggtcaccatataagagtgctaggggcttccatcacaagctgccacagattgagtggtttatcttctcacagctctgaagactggaaatccaggatggaatgtcagcaggtttgtcttcttctgagaactgctgccttgcagatgcctcccttcctgctgtgtcctcaggctgtgttgactgtgtctcaatctatttttasatggacacctgccatattggtgtagggtccacccatgtggcttcatttgacctcactt

SEQ ID NO: 135477 - DNA, 646 bp, Homo sapiens
cgcttaaggtgggagggagcaaacttttcaagttggttttaggtaacagaaacagacgtctttattgkatttgtctggaaaaaaagtaaggaaaatcccaacattatctgttctggtcaagaagtataaggctcagtcccgttttatttctctccttctcctttggatcctttttccttattcttgactctatacatggagaaaaagttcaagtgcatctaaagcagtaatgctgggaacttgtcaacttattcccatgatgctactgttgcttataaagcattttgaggattcttgtattcagagctagtgataagccgcaagaggaagtcagtcttgctggtgtacagctgcattttgggctcatgtatagaagagttaacatggatttcagagtctcccaggtgtttgaaatccaggctctgctctcaggacctgtgaggtcttagataagttgctcaatctctttgagcctcagttttctgagtacaatggcacataactcacaggactgcggtgtggatgaattgcgatgatgtgtatgaactcagctcagggtcttctttccttccttctttcttccctgcctctgaatttacaccaagctttacttctgaggtctgactcctgagaagctagacacaca

SEQ ID NO: 135478 - DNA, 420 bp, Homo sapiens
acactcagaacccggcaacagtgttctggaatcctatgtgacgggcatacatgtagaccccagaagcagtgttctggaatcctatgtgaagaacaaacattcagacaattgtagcagtgttctttaattccatttgagggacaaacattcagaccctcatagtattgttctggaatcctacgtgagcgacaaacattcagacaatcgtagcagtgttctgggatactatgtgtgggacaaacattcagacaccagcagcagtgttctggaatcctatgtgagggacaaagattcagaccctcaaagaagtgttctggaatcctatgtgagtgacaaacmttcagacaatcgtagcagtgtcccggaatactatgtgtgggacaaacaaccagacaccagcggtagtgttcttgaatccta

SEQ ID NO: 135479 - DNA, 514 bp, Homo sapiens
tgacagtttttgatttcaagtttactttttctgatctaagtatagatacccttgttcttttttggttaccattggcatagagtatcttttcccatcccttcactttgagcctctatgtatctttatatctaaagtgactcccttataaatatgtactgatgagtatcttttatgcattgtgccactctatgtcttttaattagrtagtttaatcctttcacatttaaagtcttgttgataggtaaggagtaacttgaattttgttaattgtttttcatatgttttgcagttcttttttttcccctctcttgctgtcttcttagtttggttatttcttgtagtggtttggtttcatttatttttcttcacattttttgtatctcctataagtttttgatttgtggttgcaaatgtacatcttctaaaaaaagctgtcttaatgttatcagcttttttggaatcattttctttctcttccctcttcagacatatttgcaaatactctgtttttcaa

SEQ ID NO: 135480 - DNA, 540 bp, Homo sapiens
gaattcatttgaggcaagtaatcctattgtctcaaaatggtttttaaaaattgaataagaaaattgaagttttaacttgactgcgtatgagaaattcatatttcaaacagtttctgaagtaggccatatttctatcatctactacacaaagctcaaagaaaatgtgttactaataatctcatgagtattctctcygattgtttgaatatagtatattcatgtaagtttgtgaaataggcgccttcttcacacacatttatatgacattctttgtatgctgttaaaagcagtgtaagtgaaaacttttgatgtctctttgtactttattgatttaaaagagaaaccccagagctcagggcacaggcagacgtagcctttgtatgtcacagaacatttcaatacattctctccaaacagtgggctgctgtggctagatagatggggaaggagcttctgtttccattgttgttcgtccacttgaaggtagatgtcatcatcaacccccagagaatgacacatcacaaaatgtccaaatgttta

SEQ ID NO: 135481 - DNA, 540 bp, Homo sapiens
gaattcatttgaggcaagtaatcctattgtctcaaaatggtttttaaaaattgaataagaaaattgaagttttaacttgactgcgtatgagaaattcatatttcaaacagtttctgaagtaggccatatttctatcatctactacacaaagctcaaagaaaatgtgttactaataatctcatgagtattctctctgattgtttgaatatagtatattcatgtaagtttgtgaaataggcgccttcttcacacacattwatatgacattctttgtatgctgttaaaagcagtgtaagtgaaaacttttgatgtctctttgtactttattgatttaaaagagaaaccccagagctcagggcacaggcagacgtagcctttgtatgtcacagaacatttcaatacattctctccaaacagtgggctgctgtggctagatagatggggaaggagcttctgtttccattgttgttcgtccacttgaaggtagatgtcatcatcaacccccagagaatgacacatcacaaaatgtccaaatgttta

SEQ ID NO: 135482 - DNA, 540 bp, Homo sapiens
gaattcatttgaggcaagtaatcctattgtctcaaaatggtttttaaaaattgaataagaaaattgaagttttaacttgactgcgtatgagaaattcatatttcaaacagtttctgaagtaggccatatttctatcatctactacacaaagctcaaagaaaatgtgttactaataatctcatgagtattctctctgattgtttgaatatagtatattcatgtaagtttgtgaaataggcgccttcttcacacacatttatatgacattctttgtatgctgttaaaagcagtgtaagtgaaaacttttgatgtctctttgtacttyattgatttaaaagagaaaccccagagctcagggcacaggcagacgtagcctttgtatgtcacagaacatttcaatacattctctccaaacagtgggctgctgtggctagatagatggggaaggagcttctgtttccattgttgttcgtccacttgaaggtagatgtcatcatcaacccccagagaatgacacatcacaaaatgtccaaatgttta

SEQ ID NO: 135483 - DNA, 540 bp, Homo sapiens
gaattcatttgaggcaagtaatcctattgtctcaaaatggtttttaaaaattgaataagaaaattgaagttttaacttgactgcgtatgagaaattcatatttcaaacagtttctgaagtaggccatatttctatcatctactacacaaagctcaaagaaaatgtgttactaataatctcatgagtattctctctgattgtttgaatatagtatattcatgtaagtttgtgaaataggcgccttcttcacacacatttatatgacattctttgtatgctgttaaaagcagtgtaagtgaaaacttttgatgtctctttgtactttattgatttaaaagagaaaccccagagctcagggcacaggcagacgtagcctttgtatrtcacagaacatttcaatacattctctccaaacagtgggctgctgtggctagatagatggggaaggagcttctgtttccattgttgttcgtccacttgaaggtagatgtcatcatcaacccccagagaatgacacatcacaaaatgtccaaatgttta

SEQ ID NO: 135484 - DNA, 600 bp, Homo sapiens
atcctctacttcatattttttttcaatgccactttcttattgaggtgtttcctgactacctaatgtaaaattgcattctctacctattcctatcaaaaaaataccattttctcttgatttatttttctccatagcatttaaaatccactgasctattacaaattttatttttttaatggtgtttcttctctctgcatgccccaaatatactcactgagggcgatattgcattcctagtgcctggaaaaatattccacacataatacgcattcagtaaatattcaacataatttgcattctataaatatttgtggaatgaatgaatgaatgaatgaatgacatatcacaatgttgccttccctgcatttacgctaccactaatctgagttagctataatgattcttaagaattccctgggaaaaatgccattttaatttcaatttattttttccgcaatatttcctgagtttccaagattgttcctattccatgagcaggaccgttcccaagggctttgggtagaagatcattttgttttcagaatattccactttatgtctctctccttcctcccttcctcccactccagaatacatgtg

SEQ ID NO: 135485 - DNA, 600 bp, Homo sapiens
atcctctacttcatattttttttcaatgccactttcttattgaggtgtttcctgactacctaatgtaaaattgcattctctacctattcctatcaaaaaaataccattttctcttgatttatttttctccatagcatttaaaatccactgagctattacaaattttatttttttaatggtgtttcttctctctgcatgccccaaatatactcactgagggcgatattgcattcctagtgcctggaaaaatattccacacataatacgcattcagtaaatattcaacataatttgcattctataaatatttgtkgaatgaatgaatgaatgaatgaatgacatatcacaatgttgccttccctgcatttacgctaccactaatctgagttagctataatgattcttaagaattccctgggaaaaatgccattttaatttcaatttattttttccgcaatatttcctgagtttccaagattgttcctattccatgagcaggaccgttcccaagggctttgggtagaagatcattttgttttcagaatattccactttatgtctctctccttcctcccttcctcccactccagaatacatgtg

SEQ ID NO: 135486 - DNA, 600 bp, Homo sapiens
atcctctacttcatattttttttcaatgccactttcttattgaggtgtttcctgactacctaatgtaaaattgcattctctacctattcctatcaaaaaaataccattttctcttgatttatttttctccatagcatttaaaatccactgagctattacaaattttatttttttaatggtgtttcttctctctgcatgccccaaatatactcactgagggcgatattgcattcctagtgcctggaaaaatattccacacataatacgcattcagtaaatattcaacataatttgcattctataaatatttgtggaatgaatgaatgaatgaatgaatgacatatcacaatgttgccttccctgcakttacgctaccactaatctgagttagctataatgattcttaagaattccctgggaaaaatgccattttaatttcaatttattttttccgcaatatttcctgagtttccaagattgttcctattccatgagcaggaccgttcccaagggctttgggtagaagatcattttgttttcagaatattccactttatgtctctctccttcctcccttcctcccactccagaatacatgtg

SEQ ID NO: 135487 - DNA, 383 bp, Homo sapiens
ctggcgcttagagttcaataattgttagttcacttgctccccaggctgtgcattaattacaatatgtgtgtgtgttatgggggaaacagaaaaaaagtttaaatcattaggtcatttaaataatatctacatccttttaaaatcaaatggaaataaacattcmcagtgtatatcctatctgcacacttgttgtttgttatgatggaattatcaagactcaacaatcaacagtaggtcttcagaaattaaagaaaaatacctggaagcccacagttatactatgtacagagttgaatacatgacgtgtaaggcaacagcaaccacaaaacatgctttatcctttccgaaagactcttttcatgaagcttgagctgtttatgtga

SEQ ID NO: 135488 - DNA, 383 bp, Homo sapiens
ctggcgcttagagttcaataattgttagttcacttgctccccaggctgtgcattaattacaatatgtgtgtgtgttatgggggaaacagaaaaaaagtttaaatcattaggtcatttaaataatatctacatccttttaaaatcaaatggaaataaacattcccagtgtatatcctatctgcacacttgttgtttgttatgatggaattatcaagactcaacaatcaacagtaggtcttcagaaattaaagaaaaatacctggaagcccacagttatactatgtacagagttgaatacatgacgtgtaaggcaacakcaaccacaaaacatgctttatcctttccgaaagactcttttcatgaagcttgagctgtttatgtga

SEQ ID NO: 135489 - DNA, 545 bp, Homo sapiens
gcaaaattaacttctctgttttttggtggtagaactttttcaaaaataataagcatgagatctttcatgtttgaaacacaatgacaagcttaaaataacttgtatagtagtactatttactttataaaagaaaatgtgtaaggcgtatctgcatttataagtttttatattttatatgtaaatctacacatcttcagtatttctgtttaaaacatggatttattttttatttcagtagtttttggggtacaggtggtttttggttacatgggtaagttctttagtggtgatttctgagattcggtgcacctgtcatccgagaagtttacagtgaacccaawatgtagtctttcattccctcacccgcttcctacctttctcccaatacccaatgtccattatattattattatgccttcgcatcctcataacttagctctcacaagtgagaacatatgacgtttgtttttccatttctgagtgactgcacttagactaatggtctccaggttcatccaagttgctgcaaaaggcactgttttttc

SEQ ID NO: 135490 - DNA, 552 bp, Homo sapiens
agtagtaagttcttacctattaataattactttatgtgtaagttacttaatttttttttaatccaaagacagagtgactgaattgacataaataagatccaactatatgctttytaaaaggaactcactatgtttttaagagcacacataggttgaaagtaaagagatagaaaaggatatttttatgcaagtggttaaaaagaagagagtagggttgtctatatttttataatacaaaatagacattaggcaaaaacggaaacatgaaagaaagaatgtcataatataatgataaaggggtcaattcatgaaaactatataaaattatatatgcacccaacattgtagcacctacatatatagcaaatattaacagaactggagggaaaatagaaaacaatatattaacagtatggaactttaatgcactgctttccaaaatagacatgtcatccagacatcaaatcaataagaaagcaatgtacttggccaacagtatggaccagatggacctaacagacacatgcagaaccttccagaccacagcagcag

SEQ ID NO: 135491 - DNA, 552 bp, Homo sapiens
agtagtaagttcttacctattaataattactttatgtgtaagttacttaatttttttttaatccaaagacagagtgactgaattgacataaataagatccaactatatgctttttaaaaggaactcactatgtttttaagagcacacataggttgaaagtaaagagatagaaaaggatatttttatgcaagtggttaaaaagaagagagtagggttgtctatatttttataatacaaaatagacattaggcaaaaacggaaacatgaaagaaagaatgtcataatataatgataaaggggtcaattcatgaaaactatataaaattatatatgcacccaacattgtagcacctacatatatagcaaatattaacagaactggagggaaaatagraaacaatatattaacagtatggaactttaatgcactgctttccaaaatagacatgtcatccagacatcaaatcaataagaaagcaatgtacttggccaacagtatggaccagatggacctaacagacacatgcagaaccttccagaccacagcagcag

SEQ ID NO: 135492 - DNA, 552 bp, Homo sapiens
agtagtaagttcttacctattaataattactttatgtgtaagttacttaatttttttttaatccaaagacagagtgactgaattgacataaataagatccaactatatgctttttaaaaggaactcactatgtttttaagagcacacataggttgaaagtaaagagatagaaaaggatatttttatgcaagtggttaaaaagaagagagtagggttgtctatatttttataatacaaaatagacattaggcaaaaacggaaacatgaaagaaagaatgtcataatataatgataaaggggtcaattcatgaaaactatataaaattatatatgcacccaacattgtagcacctacatatatagcaaatattaacagaactggagggaaaatagaaaacaatatattaacagtatggaactttaatgcactgctttccaaaatagacatgtcatccagacatcaaatcaatamgaaagcaatgtacttggccaacagtatggaccagatggacctaacagacacatgcagaaccttccagaccacagcagcag

SEQ ID NO: 135493 - DNA, 398 bp, Homo sapiens
tgacaattttacattcacgcctcaatcagagtatgtggttttatgcctacccatcatagtatatatttgcamccagtctcctatgaacaatattgtagtatttcccttcaggaaatcaaaatggagtccatgacaaagtctaataaaattgttttaagaaggagtaaatagtctatagaaggaaagaataaaacataagcaaagtaaaaatcaactactgggttatctttccaagccattcaacgtttgaacaaaggagaaaacttaaattgtaaattttgctaagaatttctccacaaaattataattattatttggttattataaccatatttttacatacataatgcagtgcctaactagatggtggagctgcattttgatacagtacatgaatg

SEQ ID NO: 135494 - DNA, 561 bp, Homo sapiens
gagtccatgacaaagtctaataaaattgttttaagaaggagtaaatagtctatagaaggaaagaataaaacataagcaaagtaaaaatcaactactgggttatctttccaagccattcaacgtttgaacaaaggagaaaacttaaattgtaaattttgctaaraatttctccacaaaattataattattatttggttattataaccatatttttacatacataatgcagtgcctaactagatggtggagctgcattttgatacagtacatgaatgtcactgataccatgaattcatgtcagtagttttattatgtaatattctaatctgttcagaaaatcattattttatggtacagaaatacacagcgcaggcatagttatttcttttttccccactagatatcttgaaatgagaataatagttttatcttttccattttttttatcttaaactcacagttccactgatatggtaacattatatgaactagatatgttttctgcaatcattacaaacacctcatttgagaaggtccagtggcctccagaggatacatttt

SEQ ID NO: 135495 - DNA, 422 bp, Homo sapiens
accataaacttttactaactatccatgactttggtgaacaccagccttattctrgttaaatgtaaaagttcagtgtgctactgagggggatggggaagcactgcccaacagagtcagtggttcttgaaatgttaactgcactgtaattgtttatgtgtttaggactattttctttcataagaagttatgaatggtttgtatcagaagtgttttgtgtaaatagtgtcagtaaaatgtaatttttaaaaaactctaaaaacataaactagaaaatgacatttttaaatcttcacaatttttatattcggtaaaattataatcagtaatttttagcacattttaatcatttcagattttttttaaaaatgaacaacttaagtggatttgatgaaaactgacacaaaagttagtgaatgcacagc

SEQ ID NO: 135496 - DNA, 421 bp, Homo sapiens
accataaacttttactaactatccatgactttggtgaacaccagccttattctggttaaatgtaaaagttcagtgtgctactgagggggatggggaagcactkcccaacagagtcagtggttcttgaaatgttaactgcactgtaattgtttatgtgtttaggactattttctttcataagaagttatgaatggtttgtatcagaagtgttttgtgtaaatagtgtcagtaaaatgtaatttttaaaaaactctaaaaacataaactagaaaatgacatttttaaatcttcacaatttttatattcggtaaaattataatcagtaatttttagcacattttaatcatttcagattttttttaaaaatgaacaacttaagtggatttgatgaaaactgacacaaaagttagtgaatgcacag

SEQ ID NO: 135497 - DNA, 422 bp, Homo sapiens
aatttttaagactgtaggaccataaacttttactaactatccatgactttggtgaacaccagccttattctggttaaatgtaaaagttcagtgtgctactgagggggatggggaagcactgcccaacagagtcagtggttcttgaaatgttaactgcactgtaattgtttatgtgtttaggactattttctttcataagaagttatgaatggtttgtatcakaagtgttttgtgtaaatagtgtcagtaaaatgtaatttttaaaaaactctaaaaacataaactagaaaatgacatttttaaatcttcacaatttttatattcggtaaaattataatcagtaatttttagcacattttaatcatttcagattttttttaaaaatgaacaacttaagtggatttgatgaaaactgacacaaa

SEQ ID NO: 135498 - DNA, 418 bp, Homo sapiens
tttaagactgtaggaccataaacttttactaactatccatgactttggtgaacaccagccttattctggttaaatgtaaaagttcagtgtgctactgagggggatggggaagcactgcccaacagagtcagtggttcttgaaatgttaactgcactgtaattgtttatgtgtttaggactattttctttcataagaagttatgaatggtttgtatcagaagygttttgtgtaaatagtgtcagtaaaatgtaatttttaaaaaactctaaaaacataaactagaaaatgacatttttaaatcttcacaatttttatattcggtaaaattataatcagtaatttttagcacattttaatcatttcagattttttttaaaaatgaacaacttaagtggatttgatgaaaactgacacaaa

SEQ ID NO: 135499 - DNA, 420 bp, Homo sapiens
accataaacttttactaactatccatgactttggtgaacaccagccttattctggttaaatgtaaaagttcagtgtgctactgagggggatggggaagcactgcccaacagagtcagtggttcttgaaatgttaactgcactgtaattgtttatgtgtttaggactattttctttcataagaagttatgaatggtttgtatcagaagtgttttgtgtaaatagtgtcagtaaaatgtaatttttaaaaaactstaaaaacataaactagaaaatgacatttttaaatcttcacaatttttatattcggtaaaattataatcagtaatttttagcacattttaatcatttcagattttttttaaaaatgaacaacttaagtggatttgatgaaaactgacacaaaagttagtgaatgcaca

SEQ ID NO: 135500 - DNA, 418 bp, Homo sapiens
tttaagactgtaggaccataaacttttactaactatccatgactttggtgaacaccagccttattctggttaaatgtaaaagttcagtgtgctactgagggggatggggaagcactgcccaacagagtcagtggttcttgaaatgttaactgcactgtaattgtttatgtgtttaggactattttctttcataagaagttatgaatggtttgtatcagaagtgttttgtgtaaatagtgtcagtaaaatgtaatttttaaaaaactctaaaaacataaactagaaaatgacatttttaaatcttcacaatttttatattyggtaaaattataatcagtaatttttagcacattttaatcatttcagattttttttaaaaatgaacaacttaagtggatttgatgaaaactgacacaaa

SEQ ID NO: 135501 - DNA, 418 bp, Homo sapiens
tttaagactgtaggaccataaacttttactaactatccatgactttggtgaacaccagccttattctggttaaatgtaaaagttcagtgtgctactgagggggatggggaagcactgcccaacagagtcagtggttcttgaaatgttaactgcactgtaattgtttatgtgtttaggactattttctttcataagaagttatgaatggtttgtatcagaagtgttttgtgtaaatagtgtcagtaaaatgtaatttttaaaaaactctaaaaacataaactagaaaatgacatttttaaatcttcacaatttttatattcggtaaaattataatcagtaatttttagyacattttaatcatttcagattttttttaaaaatgaacaacttaagtggatttgatgaaaactgacacaaa

SEQ ID NO: 135502 - DNA, 429 bp, Homo sapiens
tttttttttaagcctaggtcctattctcaatggaattgaccactttgtgaggaaacccatgtagatacacacattacaaacacagtacacttacatcacattattgacatgatatagatataaataacaagatcaccgggagtacaggaaggctgttyctaaatggactggattgtttccacagcagtactgagagatctcggttgtgaaggttgagtacggatactgggggtgaccaacacgccagggcagcagcagtgttggaggggagaatacagagtgtacctgccatagaaaccatgtatgtgaaggcacaggtgttgggagccttgccacgttcggaaacggcagttgtatgacagggtggaagtaggagctgtgtgttgacatcgatgcacccctcatgggtggcttcacttggatgttatc

SEQ ID NO: 135503 - DNA, 429 bp, Homo sapiens
tttttttttaagcctaggtcctattctcaatggaattgaccactttgtgaggaaacccatgtagatacacacattacaaacacagtacacttacatcacattattgacatgatatagatataaataacaagatcaccgggagtacaggaaggctgtttctaaatggactggattgtttccacagcagtactgagagatctsggttgtgaaggttgagtacggatactgggggtgaccaacacgccagggcagcagcagtgttggaggggagaatacagagtgtacctgccatagaaaccatgtatgtgaaggcacaggtgttgggagccttgccacgttcggaaacggcagttgtatgacagggtggaagtaggagctgtgtgttgacatcgatgcacccctcatgggtggcttcacttggatgttatc

SEQ ID NO: 135504 - DNA, 429 bp, Homo sapiens
tttttttttaagcctaggtcctattctcaatggaattgaccactttgtgaggaaacccatgtagatacacacattacaaacacagtacacttacatcacattattgacatgatatagatataaataacaagatcaccgggagtacaggaaggctgtttctaaatggactggattgtttccacagcagtactgagagatctcggttgtgaaggttgagtacsgatactgggggtgaccaacacgccagggcagcagcagtgttggaggggagaatacagagtgtacctgccatagaaaccatgtatgtgaaggcacaggtgttgggagccttgccacgttcggaaacggcagttgtatgacagggtggaagtaggagctgtgtgttgacatcgatgcacccctcatgggtggcttcacttggatgttatc

SEQ ID NO: 135505 - DNA, 429 bp, Homo sapiens
tttttttttaagcctaggtcctattctcaatggaattgaccactttgtgaggaaacccatgtagatacacacattacaaacacagtacacttacatcacattattgacatgatatagatataaataacaagatcaccgggagtacaggaaggctgtttctaaatggactggattgtttccacagcagtactgagagatctcggttgtgaaggttgagtacggatactgggggtgaccaacacgccagggcagcagcagtgttggaggggagaatacagagtgtacctgccatagaaaccatgtatgtgaaggcacaggtgttgggagccttgccacgttcrgaaacggcagttgtatgacagggtggaagtaggagctgtgtgttgacatcgatgcacccctcatgggtggcttcacttggatgttatc

SEQ ID NO: 135506 - DNA, 660 bp, Homo sapiens
ccatatgttatcttggtattaccctacctgctgcctcaccaccatctccaccatacacactgcttaaatataaagggaaaggaactatacaagagtgacttaacagattagtgctgatactcttctgtctcttctttagaagtttcttgtartctacaccagaatgtcattgatatagtatattagtatagaatagcacttaaattaccccaaagtggattttctaataggtgatgagatagaataaacttgttttttttaaaaatgctattttttagagtagttcataacgaaattgaaaggttggtatggggatatctcatctatcccctaccctcctacatgtacagcttcccccattatcaacatccccaaccaaagtgctagatttgttacaattgatgcatctacactgacacatcacaattacccaaagtccatggtttacattagggtttgctcgtggtggtgtacattctatgggtctggacaaatgtataatgacatgtatgcaccagtctagcatcatacagagtattttcactgccctgaaaatcctctgttctcagcctattcatctttcctttccgccaacccctgacaaccactgatctttttaccctctccacagtttttccaggacgtcatatagttggaatc

SEQ ID NO: 135507 - DNA, 582 bp, Homo sapiens
cagcctgggtggcaagagtgaaagttcttctcaaaaatagaagaaatgttgggcaaatatccagagacggtctgttctctgtaagaatttggtgacagctaattgtttaatattcccatttattctctaaaatttttttaaggtacttcagagaaaaacagtggatttccagacaggaaagatgtaaacctgggaagaaacatgcttcaaggcctagtttggccacgacaagactattggggctggcagaaagtggcagagggcaacaaaaagaaagtgacaggggctcagaaggtgtagtgctctgaaatcatctgcaaaatattatttctaaaaggtaaaagaaagagaactgagaagcccagatctcaactatgggagrgtccgacaatggagaaagaggggctatgcagagtttctgtattttaatttttcactgtagcagtgaggaggagccttagagtataagaagctattctgtccaatgtccactctttccctatagttcagtaaaatctaggatataattaatagaacagaatatattttgtttccatacaaaaatgtaaaaaagtagagaca

SEQ ID NO: 135508 - DNA, 599 bp, Homo sapiens
cagccctctcactcctttctgcacctgctcctagggataagaaaccaaggagtttgggtggggtgggatgattactgcattgcaaggcagggaaatcaagttctcttctcttctatatctcaggcattcagtttgaggcaggggcaaattgctaagtgagagccgttgcccttacaatagtttttatatattttaatttttcaaaaagagactgcttattccaatttctgaatggaggagggccgagtattaactcctgcaatgagattgtgtttgcaatgggccttagggacattgattgcctaagatggagcagaaagtcaggagcctgctgggacttgcctcctgaggcagctgaggttacctaccttgactaaagtttatagggatgatgagagagaaaactcaagttgygtgtttttttgtcattttttgttttgttttgtgtttttgaggcagggtcttgcttggtcactcagcctggagtacagtggtgtgaacgtggctcatggcagcatcaacctcctgaatttgagcattcctcctgcttcagcctcccatgtagctgggaccacaggcaggcaccaccacacccagct

SEQ ID NO: 135509 - DNA, 556 bp, Homo sapiens
taacaacaatgtctgaattattcaatcacttttctaagagtagaataacacaaacactgcgtttggggtgtttaaaaagtatctgtcttcctccttatgatgaatacttcctaagggcaggacttgtgctacttcatttatccaggcaactcttccacccgtggacagtgttcagggagtaagtagatgttcaraaaatattttcaactgcctgtctgatttgcgtttatataaaatatttctaaagagcaattactgtcccccacttgttcatcgacatgctggtgcatgtggaggcgcctcactgtatctctgggattttagctgaatgacttgttcagatttcccagctattaccccactgctctattcactactgtggaagacagacgatgaatgaaaaaaagatcccattgctatttttgacaatttaataaatgtatattttgcataatttataattaagtctcaagtttgtggactcttataatgtgctctaaacatttgagtatagattcattggatcgagaatactctcttcagtaatgacttaaaa

SEQ ID NO: 135510 - DNA, 537 bp, Homo sapiens
ggggcttatttctttctgggcatctacacattatccaaggtcaatgttaacagccattttacaaatggtgttaagaactaagaaagcgcaaatgaggatttttaaaaataaaatagaagtcagtagattaacaccccctacacacgtggtttatatagtaacaaaaaacttacccttatattttttwaaatttaataaccaaagaacaataatttagaatactaagaataattctcaatggagaaaggaatataacatgactaaggtaaacacagacaaatcatctggttattgactatccaatccattttgtggcgaggtatatagcttttcctttaaaaggaattgaaatagctgctgtcccatgaggatagggacattaagtattgcagaagctgtgactattaaaaagagttgctggtcatattgatttataccctccttcatcttttcccctatgaggggccaatgtgagaaccaaccagtaagaagaggatggtgagtggtcactgaggccactcagctattttataggca

SEQ ID NO: 135511 - DNA, 585 bp, Homo sapiens
taatcgttgcttacagataaataattttattggtctcacataacaaaaagtgaaagagsaggaggcccagcattgcacagctcttctagaatgttctgctatcacatgctcattcttctttttgcttagctgtcatcatcagtacctggctttcacccatgggtgacagagggctaatgtattccttggcatagtgtctatgttgcagggggatgggggagacaggtaaagatctgtgggtagagaagaacaccaacagggtctgttcctttttaaaaatttaacctaagcaccacccagcagcctctgcttccatctccctggtcagaactgggtcaactaactgctcagggctggaggaaaatgaggagttaactgtgtttagctttcttgtcattagcagaggaaggcacgaagtaaagggtttatgaatagctttagccaaactgcaaacttcaatcaaccacttagagctcagatattcactgacgaagcacaagtatctctctctgtcacacacacacacacacacacacacacagacacaaacacacagcttttctatttgtaacgatcatcagaatt

SEQ ID NO: 135512 - DNA, 426 bp, Homo sapiens
gggtgacagagggctaatgtattccttggcatagtgtctatgttgcagggggatgggggagacaggtaaagatctgtgggtagagaagaacaccaacagggtstgttcctttttaaaaatttaacctaagcaccacccagcagcctctgcttccatctccctggtcagaactgggtcaactaactgctcagggctggaggaaaatgaggagttaactgtgtttagctttcttgtcattagcagaggaaggcacgaagtaaagggtttatgaatagctttagccaaactgcaaacttcaatcaaccacttagagctcagatattcactgacgaagcacaagtatctctctctgtcacacacacacacacacacacacacacagacacaaacacacagcttttctatttgtaacgatcatcagaattc

SEQ ID NO: 135513 - DNA, 505 bp, Homo sapiens
tcattccctctgaaaggctgctccttgtcaatgttaattctgagggcaaaggtgtgttttaaaagcaatacaaacacatatccctctcaaaaatattctacttggaaggtgttagtacagtaagatctaattattcctggtagccatggtcccttacagcacaagataaaataaaactaatataataactttttcctgccagaaytttagaaaacattgtgttcacttgaactccactataccaagaagttttatctgggtgcaacctggagcaggaaaatgagcccttcactaaaaatgtatgagatgcaatattacattgtcttcttaattctctcttcagttgattccatgatctagactctcagaaaataaaaggatcatgaaataaactcctcatgtcaccatgttaatgtatattttgatattccctgatttccagtatgccaaaatattaaggttgtacttgaaaaaagcccatgttttctaaacttgtgtattggtc

SEQ ID NO: 135514 - DNA, 328 bp, Homo sapiens
ttttattcccttatttgtcccygcccatgttccatttctgtcctatcagaatgcccttttttcaatcctccctgcggttggctacttttagactcctgctgattggtgcattttacagagcgtcgattggtgcgttttacagagtattgattggtgcattttacagagtgctgattggtgcgttttacagagcgctgattggtgcattttaccatccttttgctagtaccagagtgctgattggtgcattttacaatcctttcgtaagacagaaaagttctgcaagtccccacaggacccagaagtccagctggcttcatctctcatt

SEQ ID NO: 135515 - DNA, 569 bp, Homo sapiens
agaaatcatgtgatacactcagtcttgtcatcaacaggtaaaagcagtctttccaaaacatccttctaagcaactctctatgacctgagatctgcacatttagtactctggaggagacaagggagaaaaactgtcctggacacttmatgaaaagagtgtggtaagtcatgctaataattagcacttccattaaaagctccaaaacgttgacccttgaattcatgtttcacaactaaaaagatacacaccattttccctgggcttgaaaatcttctccactgggagtccttaaacaggagtcttaagaagcttccagaagcagatgatctttggaaaaaaacagctaatgactcctggatcaagcaaatgacaaaccaaagtatacagcttccacccaagaacagaagattgtaattcttctggtatctctgctcctcctttctaaaacaattttgtttacttgtaatcttatttattattgtgctttggcatccctagtgatcaactaaaggcttctcagaatatgtgtatacattcacatacggccagtgttatcacgttctttatct

SEQ ID NO: 135516 - DNA, 539 bp, Homo sapiens
tcaaatgtcactttgttacaataatctaaatatcattttttaaaagttactcacaaaatatgtcattttatttaatggccatggtaattaatacataatatggcacagtcttgattattttcaaaacctcacacacaagatacattaactgaagtcatttaaaaccaagacaaaattacatctaattatattttgttattggtttctccattttattttaagcttcagtgccayagtgaaaaagcaaaacaatgacattgtgtggcattttaatataatgcttgctagttagaaaagcaattgttaaatttaattttactccttatgtcataaaattcctgtatcataaaaggataaaatatgaaaaatcaattgtgaagaaatatttattgagttcctactatgtattaggcattctgctaaatgccaagaataaaacagtaggcaagacaaatactggccctacttcaacgaccttaagtacaggagaagttccaatttgagaactacatattaactattaggaagagtacatatca

SEQ ID NO: 135517 - DNA, 364 bp, Homo sapiens
acttgggtgagaactttccttatgtgagccaaacattccttttgttctttaaagagcacactttcatttttcttgaaggctgtgcctccccaaaacgcagattggtatgtgtgtgtgtgkgggggggggggggtgcgggggtgggttatagaaaaaaagcaagggagtggccaagattgccaactagaagcagctagtacgcatggctctcaaggaaaggaaaggaagggccaaataaatagcaacaccttcgacgataacatccaggtacttgcactgaaattaatcaggaaaacaacctgacccaaagagaatgaagaaaagcaagacaggacaacggcccacctgggagcaacacagaccc

SEQ ID NO: 135518 - DNA, 364 bp, Homo sapiens
acttgggtgagaactttccttatgtgagccaaacattccttttgttctttaaagagcacactttcatttttcttgaaggctgtgcctccccaaaacgcagattggtatgtgtgtgtgtgtkggggggggggggtgcgggggtgggttatagaaaaaaagcaagggagtggccaagattgccaactagaagcagctagtacgcatggctctcaaggaaaggaaaggaagggccaaataaatagcaacaccttcgacgataacatccaggtacttgcactgaaattaatcaggaaaacaacctgacccaaagagaatgaagaaaagcaagacaggacaacggcccacctgggagcaacacagaccc

SEQ ID NO: 135519 - DNA, 545 bp, Homo sapiens
tccttgtgaacccactcaaccagggccttcagtctgacaaaaagagctacatggagtctcggcagagcagctgctctggcatgcatagacaccccagagtgatagatacttacaatttctgacaaaagtagctgcagttccagcaaactgggaggttagacttctgtgcacacccctaggaaagagactgactccagggcactgagcagcaacagcccgcaggccccacttccacagcacctcacaagataaaacccactggcttgaaattccagccagctaccagtagcagcattgcacctacctaagaaggagctcccaggcagtggggcataccaccatctttgctgttaaggcatcttagccgttccagccttyacactttggagagtgtgagctgacctggagtagaagggatccaccagcacagcacagctgccctaccaaaatgaggccagactgctgctttaagggagtacctgatcctgtttctcctcactgggcaagacctcccaactaaggcctccaactaccccctgcccaag

SEQ ID NO: 135520 - DNA, 491 bp, Homo sapiens
gaggcagaagaacataaattgtgaagatttcatggacatttatcagttccccaaattaatacttttataatttcttatgcctgtctttactgcagtctctgaacataaattgtgaagatttcatggacatttatcacttccccaatcaatactcttataatttcttatgcctgtctttaatctcttaatcacrttatgttcataaactgaaaacgtacatcacctcaggaccactattgtacaaatggattgtaaaacatgtgtgtttgaacaatatgaaatcagtgcaccctgaaaaagaacagaataacagtgattttcagggaacaagggaagataaccagaaagtctgactgcctgcggggtcgggcagaataaagccatatttttcttcttgcagggagcctataaacggatgtgcaagtaggagacatattgctgaattcttttcccagcaaggaatattaataattgaaaccctggggaaggaa

SEQ ID NO: 135521 - DNA, 491 bp, Homo sapiens
gaggcagaagaacataaattgtgaagatttcatggacatttatcagttccccaaattaatacttttataatttcttatgcctgtctttactgcagtctctgaacataaattgtgaagatttcatggacatttatcacttccccaatcaatactcttataatttcttatgcctgtctttaatctcttaatcacgttatsttcataaactgaaaacgtacatcacctcaggaccactattgtacaaatggattgtaaaacatgtgtgtttgaacaatatgaaatcagtgcaccctgaaaaagaacagaataacagtgattttcagggaacaagggaagataaccagaaagtctgactgcctgcggggtcgggcagaataaagccatatttttcttcttgcagggagcctataaacggatgtgcaagtaggagacatattgctgaattcttttcccagcaaggaatattaataattgaaaccctggggaaggaa

SEQ ID NO: 135522 - DNA, 468 bp, Homo sapiens
aaaaacaatttcacattgaaaagttgccatgtatacaacctggatagattattgtaacatttattgactacttttaatatggaaattatttcagcattcattgacaaccactttattagccaacagtttgacaaatgttaccttattattcataagtatagtggctcattgtcataggcaagggtggtgacagctagagcttargagcaatagtttctaaaacactagtctgtttgttataggtaaaatgcaaaaataagtccatttatagatgtatatagatgttaaaatatttggcatcatacagaaaattatgtgtttgtttcatagacatgttcatattttccctttgagtatttccagctatgtacatacatcttgtagcagaaaaatacatagccttttctaggaactgttataaaagtagagtagccaaaatgcggattaaagggagaatcctgtgtgcaa

SEQ ID NO: 135523 - DNA, 396 bp, Homo sapiens
tctttatccttgacctttgggagtttattaaatgccttgaggtagtcttctttagtttaaatctgtttaaatatgccaaagggagtactgctttagttctataaccttcttgtactyggatataatatctttctataggtttgggaagttgttattatcccattgtgtgtgtttttcccccactcacgtgatatatgttgactttgttaccctttgaattaactttctacacctatctacctacctcctctttaaggacaataacacttacacttgcccttttgaggctagttctagttctaggtcctataagtatgcttgattgtttgtttgtttttcttttctattttgtcccctctgactgtgtattttcaaatagcctgtcttgaaggtcac

SEQ ID NO: 135524 - DNA, 429 bp, Homo sapiens
tagtaatccagagaattcttccagatgttatacaaggccaccaaagtggtacctgtatgagtctgcaagaaccacrgtggtattgggcctaagacccatgtccattcaaatacctgaaacaccttctcaagaaagacaggtagaaacaagcccagactgtgaagactacaataaatacctaactcttcaatgcccagagaccaacaaacatctacaagcatcaaaaccatccagaaaaacataacctcaccaaacaagctaaataaggcaccagggcccaatcctgaaaatagagagacatgtgacctgtcagacagagaattcaatatagctattttaagaaaactcaaagaaattcaagataacacagggaaggaattcaaaattctatcagataaattcaacaaagagattaaaataattttaaaa

SEQ ID NO: 135525 - DNA, 368 bp, Homo sapiens
gatgttatacaaggccaccaaagtggtacctgtatgagtctgcaagaaccacggtggtattgrgcctaagacccatgtccattcaaatacctgaaacaccttctcaagaaagacaggtagaaacaagcccagactgtgaagactacaataaatacctaactcttcaatgcccagagaccaacaaacatctacaagcatcaaaaccatccagaaaaacataacctcaccaaacaagctaaataaggcaccagggcccaatcctgaaaatagagagacatgtgacctgtcagacagagaattcaatatagctattttaagaaaactcaaagaaattcaagataacacagggaaggaattcaaaattctat

SEQ ID NO: 135526 - DNA, 429 bp, Homo sapiens
tagtaatccagagaattcttccagatgttatacaaggccaccaaagtggtacctgtatgagtctgcaagaaccacggtggtattgggcctaagacccatgtccattcaaatacctgaaacaccttctcaagaaagacaggtagaaacaagcccagactgtgaagactamaataaatacctaactcttcaatgcccagagaccaacaaacatctacaagcatcaaaaccatccagaaaaacataacctcaccaaacaagctaaataaggcaccagggcccaatcctgaaaatagagagacatgtgacctgtcagacagagaattcaatatagctattttaagaaaactcaaagaaattcaagataacacagggaaggaattcaaaattctatcagataaattcaacaaagagattaaaataattttaaaa

SEQ ID NO: 135527 - DNA, 429 bp, Homo sapiens
tagtaatccagagaattcttccagatgttatacaaggccaccaaagtggtacctgtatgagtctgcaagaaccacggtggtattgggcctaagacccatgtccattcaaatacctgaaacaccttctcaagaaagacaggtagaaacaagcccagactgtgaagactacaataaatayctaactcttcaatgcccagagaccaacaaacatctacaagcatcaaaaccatccagaaaaacataacctcaccaaacaagctaaataaggcaccagggcccaatcctgaaaatagagagacatgtgacctgtcagacagagaattcaatatagctattttaagaaaactcaaagaaattcaagataacacagggaaggaattcaaaattctatcagataaattcaacaaagagattaaaataattttaaaa

SEQ ID NO: 135528 - DNA, 568 bp, Homo sapiens
gctatctggctttcaaatctcactgaactgttcccaggtttcatggactttctcccatgtcttatagggatagcagccaggtgaaacatacttatatattgtaaatgaaggttaggcaacttagaaacacatctaaagatttgaagccaagtaatcaccaacctactttgtctatattttctttctttgtcttgaggttagaaacatttacaatttactaatatcctgtatttccataagtatctatggatatgccatccagcagcaatctgcattcccttttatcagagaacacaaatacagttgattcttattatttgcagaccatttacgtgttgtataaaattgctataaaccatgaattagcaaatactgaactactgctcccagggaggaatatatagggttagcttcctaacagcctctgatcacattttcatcaaccaatcaactcataggctttttgtgtgtgtgtttctgtttaaacatgycttatttaatacatactgttgattgattaacaaggaactcatagccattagcactatgattcatgcctgaatgaaac

SEQ ID NO: 135529 - DNA, 557 bp, Homo sapiens
gtaggaaggacagtttcacattatttacatcacccctccctcacatccctgcagtacagtgccaagagagatcatttctgtgggggggcggggcggggaagagagtgaagtaagcacctgacttcagtgggtaccccagtatcaggccttccccagtgaccactgacacaaagccagctcctgtggatcccatctccaagcttcccctagcaccaggccatccctcctggccccaggctccaggctccccgacagtgaactcaggctgtaggcccataccaggataagaccagcccctacacacyaaggttcctgtccttttccagtgctgggccagctctgtggcctcaggctatgggctagaccctatagacctacacttcaagcctttcatgttggctcagggaccaagcaagtcccatcaccaggctagcgcccacagcctcagactccaggttggacctggtagctccagtcatcaggccagcacctgtggacacagactccatgccagcacccacagtcccaggctctagatccacccagtaccaggccag

SEQ ID NO: 135530 - DNA, 575 bp, Homo sapiens
tttaatttttttccaacaacttaccatgaaaaatttcaagcatacagaaaagttgaaagaattttrtagtgaacacccatatacccaccatctagatgttacaattaacattttatcccatctattcctttatacattcatgaatctatcgtatattttatccacctccctgcccttaggaagactttttttcccaccatgaattagttttgcttgtagataaacttcatattaatgctatgtagactatattcttctgtgtaaggcatatttcactgaggataatgtttttgagattcatttatgttgttgaatgtatcagataaatttttaggatatttcctaatttgtggttcttgttgaagtgtttttgtagacatatgttttcattacttttggataaatacctgtaagtgaaattgctggatcgtagggcaggtttatgtttatttttatgagaaattgccaggcctttttccagagtgcttttattttatactcccaccaaaaaaggtattttataccttttgggagtattttatactcccaccaaaaaaggtataagagttctggcc

SEQ ID NO: 135531 - DNA, 559 bp, Homo sapiens
gctgggcttgttccctcagtgtttgcttcagtacatcatatgtattaaaagacagctcttctggctcttcttagttgggagatagcaataaggattggaaagagacaaagggggaaggaacaggcatcagggtttcaacacaaactgatgttcattgaatccttataaagttccctagaactgaatggaaccttccaagagtggttraccagagccgactgcagctcagacccttattctaaacactcttgcaacactaatttattgttgtggccctcccattccatggctaactcgtatcattaagaagccctagagtcttcataactctaaagccatgcctcctaaatccagttggcttttggggcagaactttacttttatccctgttacacggtgccttgttgactcatccctccatccttgtctgtacagatctttagggatcctcagaattacctaacccttcccaattccatgtcagctgcacatctgattagcctgcttattctcaataaaactgcacattctttagagtttgagtcttaggcagggaaaa

SEQ ID NO: 135532 - DNA, 313 bp, Homo sapiens
cacttcttctgtttaagacacccagtctgtgggacttcgttatggcagcagcagcagattaacacacctggtaaccaaaccctcaggggaacactcactgcccgttcctccctccccctytacccacctcagttctgggccactgaggtcgctgaccactaccctccccctagaagctgcatgcccctcgcagcagtaccaagcattccccttgctagctcactcccgtgggtcctttctccttactcctgtatccagatggaaacagggttctcaccttggccctcctcccttcttcatgttcactggcatc

SEQ ID NO: 135533 - DNA, 434 bp, Homo sapiens
acctccgtgccttctcactctgtttcccgtccccttaggagcacctagaagctgccagccagcagaaccaacagctagagacccagctaagcctcgtggctctccckggagaaggtacaggagaccactcagaggaagaggagagagccccaggaggaaggggggactgttagcagcataggattgaggggttggaagagacctttagaacagctggtcgttatgccaaccgggtgtccgcactaagttcagcatcaatatggtgacctcctgggagcagggggccaccaggttgcctaaggatgaatgaactggaccagatcagaaagggagcaggtcaggactcccgcaccgaccggtagtgggactgtgcctgggcaatatagcaagatcttggttcttaaaaggaaaaataaagaacagcagctcactcc

SEQ ID NO: 135534 - DNA, 549 bp, Homo sapiens
acatctaaaattatacccaggactgacaactggcctagactcaatgtctttggaatttgctctactaaatttgctaccgtttgaatgtgttccctccaaaactcagctgtttctaatgtgaatatgatgcaaaaagtgaaaaccttatacatctttacagcagcctagaagtaaagatgaagcaatcctttttttttttttttttttttttaagaatctacagttactacaactaactgaaaaagtgggaaatctggagaccaacacatagaagaagaaaaatggcagtcaaagactcactctccaaattggacatttatttaaaccagggtttctcagcctcagcgatgtgtatatactgggccagacaatttgtggagggttctcctgtgtgttgtaggacgtttagtaacaccccctctacccaagagatgccaatagcacctcccatcatgaccagttgtgacaaccgaaaatgtctccagattatttccaracatcccatggggggcaaaaatctccttcagttgaaaattactgtgttaacta

SEQ ID NO: 135535 - DNA, 503 bp, Homo sapiens
taattgtcaacaatacaaactgtataccttgaaggacatggtctaaaatctatttttttaaggtagaaaaaggattgtcttctttactatatktccaaagagcatgattaagccctcatcaatttctgcacctgtgaatgtgctttggcattatacttacacagcatcagatattttatactccggataattagtggacagttttgcacctttgatttgatattataccatcagtattcaacagttattttaaccactactgaaatattttaaattcactgccatttaatcatagtaattatcctgtctgcggaagtttccagtgacagagaactactctgtgactgacaaccaatgatgaatagtttttttctgacactaagtttggctaacaagtaagtgaggatccttcacattttctttgctttgccttgccaagtgtcaaaactgtaagtcctctggctgacatttgacttggtgaaactataattgtctcgttagtt

SEQ ID NO: 135536 - DNA, 503 bp, Homo sapiens
taattgtcaacaatacaaactgtataccttgaaggacatggtctaaaatctatttttttaaggtagaaaaaggattgtcttctttactatatttccaaagagcatgattaagccctcatcaatttctgcacctgtgaatgtgctttggcattatacttacacagcatcagatattttatactccggataattartggacagttttgcacctttgatttgatattataccatcagtattcaacagttattttaaccactactgaaatattttaaattcactgccatttaatcatagtaattatcctgtctgcggaagtttccagtgacagagaactactctgtgactgacaaccaatgatgaatagtttttttctgacactaagtttggctaacaagtaagtgaggatccttcacattttctttgctttgccttgccaagtgtcaaaactgtaagtcctctggctgacatttgacttggtgaaactataattgtctcgttagtt

SEQ ID NO: 135537 - DNA, 503 bp, Homo sapiens
taattgtcaacaatacaaactgtataccttgaaggacatggtctaaaatctatttttttaaggtagaaaaaggattgtcttctttactatatttccaaagagcatgattaagccctcatcaatttctgcacctgtgaatgtgctttggcattatacttacacagcatcagatattttatactccggataattagtggacagttttgcacctttgatttgatattataccatcagtattcaacagttattttaaccactactgaaatattttaaattcactgccatttaatcatagtaattatcctgtctgcggaagtttccagtgacagagaactactctgtgactgacaaccaatgatgaatagtttttttctgacactaagtttggctaacaagtaagtgaggatccttcacattttctttgctttgccttgccaagtgtcaaaactgtaagtcctctkgctgacatttgacttggtgaaactataattgtctcgttagtt

SEQ ID NO: 135538 - DNA, 446 bp, Homo sapiens
tgaattcttctcttaggttctgcttctggaaaatccaaagaaaaccacttttgttaagaaccaaagacatgatcactactgcgaatgaactcacgctgagtagaaaaatagacatgcaagccagcaatttaaattttaatatgctatctaccataatagtgggatttgcaaagtcctgtgagatgaggaaagaataaatacctatctcaggtaagggaagtcggactggaaagtcttcccctaaagtaatatctgatctgaaattcagataagatwttttttttaggcagaaataataggtaaactagttataacaaatagtgtgggaaaaatttaatgttataagaacatgaaattcttcaggaactacaaataactcaacgtactattatcagaggcaatatgtgatacaagaggggggagggaactgattcgaacaggtgagt

SEQ ID NO: 135539 - DNA, 448 bp, Homo sapiens
attcatggattggaagactcaatattgtttgatgtcaactgaatatatagattcaaaataaaagcamtaaaaataaaaattgtatttaatagctcttagcaaattgattccaaagtctacgttgaaaagaaaaagacctaaaataggcaagataatactgaagagaaacaaagtttgaagactcatgctacctggttttagtatttagtataaagctaccataatcaagacaacatggtattggttaaaataagatacacagatcagcggaagagaagagacggtctagaaggagcacacacaaatatagtcagctatctttgaaaaaggtgaaaagacaactcaatggagaaagaattatattttcaacaaatgatgccgaagcaaatatacatctgtaggcaaaagaagaacctagcaacaaaccttatacatgttgcaataatca

SEQ ID NO: 135540 - DNA, 590 bp, Homo sapiens
gtaagaatttttgcttggttggataactcaacttttattcttgaagatttttcagggttcctggctttattgaattgttttagtctttcgttaccttttacttttgaacatggatgtaatcagaggtattcctgtgaaactcctggttacagaaatagtctttcctgacttcactgtgtagcagcaactcagttatttcttgataaccaggatcaaccaacccatctagtatagtaacacatgttaactatgactattggtttagtaacataggaggaagacaaaatagcaaaatgatagtctcaacttgcaattaattaaaagctctgtgtcttctggtggtagcatttctcccatagggattaasaactaaaccagcagagcccctgattatgggattacaatgcacaattctgctgatggggcattaattataatagagtgaccactctgactctcacccttttattcctagacccatgtattttggctatgagtgaaatagtatcatttattgatggcttattcaaagtatatttctcttctctatgatcacatctcagcctagcagggaaggaaagaaggagagt

SEQ ID NO: 135541 - DNA, 555 bp, Homo sapiens
tgcttattctatatatagtgtttttattatcacaaaacaatgaatacttattgaatggaagtttggctcaggcattaactgttgatacatcttgaaatttagggaacaaattttatttctttaaaaaagtgtatatgggtccataatttttattttgtatttttattaatttcatataagccatgcacttcaaaaaatgaaatagcatgaaagggcttgtcatggaaagcaacaattcccttgacttaccttatcctaacccaataggcaacaaactgtagctttctgtttcgggatcattttgttawatcttcatattattaaatagatgtttttattgctatttcttggtatatctattttagccatgatttgttgattgcttttggatggatgcaaagaaaaacacttgccttcttagatccccttcttacctttgcatgtttgattataatatgttgacttcttctagggtatctgatttgtttcagttgctttcaataaaatgcttacttacacctttattttctggcttgcctactatgggtcatagct

SEQ ID NO: 135542 - DNA, 600 bp, Homo sapiens
catctcaaaaaaaaaaaaaattacaatacagacaggctatcttattctgcatagagttcatgttcacttttgctgcctgaacacagcagatcaaatagtacggtacctacagtaaatctagccaagccttccawaggggaccctcttcagtgagaagctaaatgttacttggtgcaaatgattcagcagctggtatagctgagtttataagctgggctgaaaagtttgatgtggtgaactaggttataacatgtgatgcgtcacaaagtcattgatagatatattatgtgcaaagagagcgccaggccaactcaacctgtacagttttttttttagctttattatgtaatagtcctcaattcatcacaaagatgtttaaatcacaaagattttcagaagattccccctgcttattggtaaaacttaaaaggcaatttttacagctctgttttcttaagaaatataatgagtaagcatattgagacatttttaaacacacataggaaaatatttttgtcatgtaaattttccagggtatggttcagagaggcagtcatttgtgtgaagctatattaagatgcttatttaaaaaataactcc

SEQ ID NO: 135543 - DNA, 452 bp, Homo sapiens
tgcttattcagtgacgctttcaccaaaggaatcattccttgactctgtttttagttgggtgtggtgagacaatgttctcccttggctggaggcttggagaggggccaaagcaaacacccatgtgaacacaaaacaattaggaaagattcattctgaattagttaattcccatgaataggctgggatttattaatctgtcctgattgaaattgcttaaaatatgaacttgggagtttgtaagcaagcaggcaggagagaaggctaaattagggacagctaaatgtctgagaacataaggagagcaataagaaacataattggctaatatctttattacttttcccattttaaaagaataagagaaatattaattagtgttgtgtctatctcacaaacttggctctgtgaaagcacagatagatatrgttctaaaacattaggtctattcagta

SEQ ID NO: 135544 - DNA, 473 bp, Homo sapiens
aatttattaaactctctccttctgtccagtctagagaatatctcatctgttgattttttaaaaatttcatcaatgagtacattttgatttttaagatttctaatgtgttctttttcaaatgcttttgtttttgtatcatttctgtcttgtctggtttcataatttctttctctatcagaaatttccttctttatttctttgagtatcctaatcatgtttattttcaaatcattttcagattgctcttacatgctcattttatctggaacaatttactttctgattgttgattttgttggttttctttcttcctgccrtctttttggaattttaatttataagccttatattcatggtttacagcatctctgctgttatggtcaacatgctgacccagttactaagctaggtgtagagtcagttcctgactgcaaagtgtgtctgctctctctagcttccctagtgactttgca

SEQ ID NO: 135545 - DNA, 408 bp, Homo sapiens
tgggattttatttagtgtctagggaatggtattaatgattactacaaacatgtttatttcgtgattttttgatggttcaatttttatggtattttaaaaatcccttgggagaaaaataaggcaaaatgagggtctaggacttgagtgaccttagttttaccttattgatgtggccccgttcattcctgagatgatagctcctcaagtttcctgctgctggctgctgcracaggccaccaaagccgacagaagctatcctgggacttcatgtgaatctgtaacttatgtaacaaacaggaatagagaagattatgatttttctgtatttttgaaggaattaaagtcaaacttcttagatttccttctagctggtaaaaacaagggaaccattttttgttaagatttata

SEQ ID NO: 135546 - DNA, 460 bp, Homo sapiens
tataacttttcctcaaacatcccattcaaaaggtagatttaaagtttctctgtatgtggtgctattaaactctgaataaatgcagataagttggaaatatgccatttgttactgtgggaaaatcatgacaaaatattactcaataaagccctgtttggagactgtacacacaggtgtgggcacatgcacaccatcaacaaccttcyttatactgtaaaaaccaaagcatatgcatgcttgatttcttaagtattattcttacttgaatataatttgcttagacaaaaaaagagctaagaagtaaatccttttacaaccatcatttcacatggttttctgggaactttcatttggcaggaattctgtgccttcatgtatcttttacctaaatcttaaaaggagaggtgtaattgaaaaaatacacccagctattcgggaggctgaggtgggaagatcactt

SEQ ID NO: 135547 - DNA, 460 bp, Homo sapiens
tataacttttcctcaaacatcccattcaaaaggtagatttaaagtttctctgtatgtggtgctattaaactctgaataaatgcagataagttggaaatatgccatttgttactgtgggaaaatcatgacaaaatattactcaataaagccctgtttggagactgtacacacaggtgtgggcacatgcacaccatcaacaaccttccttatactgtaaaaaccaaagcatatgcatgcttgatttcttaagtattattcttacttgaatataatttgcttagacaaaaaaagagctaagaagtaaatccttttacaaccatcatttcacatggttttctgggaactttcatttggcaggaattctgtgccttcatgtatcttttacytaaatcttaaaaggagaggtgtaattgaaaaaatacacccagctattcgggaggctgaggtgggaagatcactt

SEQ ID NO: 135548 - DNA, 580 bp, Homo sapiens
attgtctgcactcgaatggayatcgtgcagcatttacatgaggcattgccgcaagacctaaggagctgacctaaccgagtgtctagctgtcccttcgaggaagattgtcatcagagtgctctgtctatgaggacagactttcaagaggtttactcaattaatctgacatgcttgtgatttgaggtaattaggaaagaatttataaaatgaaaaaggagatgaaagaagacaggctgaggaatctaagtgggaggtgtctgtagaggagtcaaggaaggcacgttaatgagaggcttcatgcaggtagaaggaggggattgagggttgggcagagagatcccagggagcctgagccagtgcaggagtcagggtgtggtgtgtgagctgttagctgcagagttgcagtcaccataaaaagagggaggtgcctgggaagggcccgcagcaggagggtggagatgtgggaggggcaggattgggacgcaacaaatgggaaattgctgggcctagtcgggcagggctcacccaataaatcattcacagtagctggaactggcttgagtgttttctttatattgtg

SEQ ID NO: 135549 - DNA, 580 bp, Homo sapiens
attgtctgcactcgaatggatatcgtgcagcatttacatgaggcattgccgcaagacctaaggagctgacctaaccgagtgtctagctgtcccttcgaggaagattgtcatcagagtgctctgtctatgaggacagactttcaagaggtttactcaattaatctgacatgcttgtgatttgaggtaattwggaaagaatttataaaatgaaaaaggagatgaaagaagacaggctgaggaatctaagtgggaggtgtctgtagaggagtcaaggaaggcacgttaatgagaggcttcatgcaggtagaaggaggggattgagggttgggcagagagatcccagggagcctgagccagtgcaggagtcagggtgtggtgtgtgagctgttagctgcagagttgcagtcaccataaaaagagggaggtgcctgggaagggcccgcagcaggagggtggagatgtgggaggggcaggattgggacgcaacaaatgggaaattgctgggcctagtcgggcagggctcacccaataaatcattcacagtagctggaactggcttgagtgttttctttatattgtg

SEQ ID NO: 135550 - DNA, 527 bp, Homo sapiens
ttctcacccagtccagaacacttttgagagtgacagagaccaatgtaattttgttccaacaaaaggtgtaacctgagactgggaatacttggacctsttgtcatcataactaaaggcccctgagtagttctagctaggagcaccgtaacttaaggacatgatcaagtcacttcatcttttgtttgtaactctcatggcccctgtctctatgtatagtgtgagaaagtatcatcttataacaacttccactcaagaaatgttctccttttcataagggacacatttccacccaaattcacttgggttcctgagaaaattccaaacaaaagaagctttctgtaactctctcaggacaatagtggagatgaagttcagtcctggacagtgtcatgcctgccattcctaaggctggttcactttcagcctcccattcactcaggagttgaacaagtcaagactattctctagctctttgcctggtcctctggaattactatttctacatacctcaggaaaaggtgaaatta

SEQ ID NO: 135551 - DNA, 425 bp, Homo sapiens
ctaatgtttctaaatttttcttccatttttctgacttggactcactaaaattgaaactctcttyattctgaagttctatgagctgaagctcatgtataaacaaccttgcgacacaccaactataaaccagaaaagtctgtcagattgctactgcctgcttgctataactaaagatgtttcaaacccaaatctcaatggactgccctcacaaaaaatacattttttttttgcagtttagatactaactttaaaagtagacctgtgactttgctctttttattttacaaaaaatgaatctaagtattttagaaattttatatccatcatagaattacagatcaactagctgtttaccaaacccacttactcttcttcatggatgaaaagcatcccttgaaattaggtgtggctgtgtagaatgaatt

SEQ ID NO: 135552 - DNA, 437 bp, Homo sapiens
ctgaattctttcctggctataagtctccaaactaatgtttctaaatttttcttccatttttctgacttggactcactaaaattgaaactctcttcatyctgaagttctatgagctgaagctcatgtataaacaaccttgcgacacaccaactataaaccagaaaagtctgtcagattgctactgcctgcttgctataactaaagatgtttcaaacccaaatctcaatggactgccctcacaaaaaatacattttttttttgcagtttagatactaactttaaaagtagacctgtgactttgctctttttattttacaaaaaatgaatctaagtattttagaaattttatatccatcatagaattacagatcaactagctgtttaccaaacccacttactcttcttcatggatgaaaagcatcccttgaaattaggtg

SEQ ID NO: 135553 - DNA, 586 bp, Homo sapiens
cctcctctctgctgaaagcagcagatatgataagacaatctacctgcagaggaggctccccctccaaggcctcctctctgctaggagcgaaacactcatcaggataccctagctgtgtaaaggagctacctactgtgggcctcctctaagctgttctatccctcaataaagctccctctcatcttgctcaccctccacttgtctgcatacttcattcttcctggtagcaggacagaactcagggcctgtcaaatggtggggctaaaagagctgtaacacaaacagggctgaaacatgccccttgcttgccacattgcaggtgaagagaaggagagaagagctgtggcccttcgggaagcccagacctgggaactccctgagctagagttgtgactccctctttggggtcctgcagttcctagagtctctaagcttctgggtgccactgcatttcccagtggcagccttggaagctgcttttggtatgcctggtccagccacagccttgcagaaagccggcacccatgccggtacttggagcttcctgccccactgcagcagcyggcatgcctgactgtgcacagtg

SEQ ID NO: 135554 - DNA, 608 bp, Homo sapiens
catccacgacagctgtctccacgcagagctgcacctacatcatgcagacaacacacagctacacagactgccgcatccacacccccaactcccagccactctcagaaccagtttctgagagtcgcackcatggcagaggcaacgccgatttctgtgcacataatcacacacacaaccacacacacaaccacacagtcacatgcagccacaagcacatagctcctatacaatgcacagggccacacccaagccacaaggagtcacacacatgcagtctcggttacaacccaccacatacacatttacacatgtgtcacatggtcatggtcacaaacacgacatccacacgattactcaatcacccaaaccagttctgttcatggaacttctggggctgagactcaatggcaattgaccctggggtggggacgggggcataatgtgattcccagctgcctgcccaactccctctctcctcttggctgcacctccctggccatcctgcattctaggcatccactatttggtgttctccaggctctgctgagatcctacaccctttgccttgaagacggctgcgtccaacccccattttgcatcatccattt

SEQ ID NO: 135555 - DNA, 548 bp, Homo sapiens
cccgctgtcagggtccgcgccagttttcccttcactctatcttccactgaaactcttaggccccagggtgactgttggggtgaggcgtgagataggggaattgaggttgtgtgggaaggatggaccatggatggtgggctaggacacccagctgcacgtgcatgagtgcatctatctggtataggacatagaagacaggkttacagagcctggggacctccgtgcatgctctcgccctggctgactcgccatcagcactcctgtcccacctcctggaacccccaaaccccaggagatgcacatctccatattgcctcttgatcagccgtggagagagaggccctagggaaggggaaggtgagaggcaattcttctccaagtcccactggcaggcctcctgtgacagtcccagcttttaagactctttctggagcaagcattgaaggggtgagtttggcttgcagttggagaggtggggtacaggctctcttttgccttcttttaccagcacgctcggagttgtggccctacggggacccggtgaattc

SEQ ID NO: 135556 - DNA, 535 bp, Homo sapiens
tccgcgccagttttcccttcactctatcttccactgaaactcttaggccccagggtgactgttggggtgaggcgtgagataggggaattgaggttgtgtgggaaggatggaccatggatggtgggctaggacacccagctgcacgtgcatgagtgcatctatctggtataggacatagaagacagggttacagagcctggggacctccgtgcatgctctcgccctggctgactckccatcagcactcctgtcccacctcctggaacccccaaaccccaggagatgcacatctccatattgcctcttgatcagccgtggagagagaggccctagggaaggggaaggtgagaggcaattcttctccaagtcccactggcaggcctcctgtgacagtcccagcttttaagactctttctggagcaagcattgaaggggtgagtttggcttgcagttggagaggtggggtacaggctctcttttgccttcttttaccagcacgctcggagttgtggccctacggggacccggtgaattc

SEQ ID NO: 135557 - DNA, 549 bp, Homo sapiens
cccgctgtcagggtccgcgccagttttcccttcactctatcttccactgaaactcttaggccccagggtgactgttggggtgaggcgtgagataggggaattgaggttgtgtgggaaggatggaccatggatggtgggctaggacacccagctgcacgtgcatgagtgcatctatctggtataggacatagaagacagggttacagagcctggggacctccgtgcatgctctcgccctggctgactcgccatcagcacycctgtcccacctcctggaacccccaaaccccaggagatgcacatctccatattgcctcttgatcagccgtggagagagaggccctagggaaggggaaggtgagaggcaattcttctccaagtcccactggcaggcctcctgtgacagtcccagcttttaagactctttctggagcaagcattgaaggggtgagtttggcttgcagttggagaggtggggtacaggctctcttttgccttcttttaccagcacgctcggagttgtggccctacggggacccggtgaattca

SEQ ID NO: 135558 - DNA, 438 bp, Homo sapiens
tgaaggcttattgtcaaagaaagtaggaagaatgtgtttagcgatgtttagctggatagtgaccctccacttgtactcttgtcctggaccccacactgtttaggggcggcttgcttcattgcccatttgctgctggaccccrgagcatgacccacaaaggcttcctctgcctgagactccagggttccctgctgtcttcacacagccctggaccgtggggaggtggggaatcccagaacacacattttgctgtgcttttcccaggtctcagacgacctctccttccctagtcactgtatgaggggcaagtgccagctcatacttccagtctcagcccagatctgccctccccggctccagcaggcagatggctgcccctccagatgccccatgctatttgcaagttacctattaaaaatggttcttccacgtggattc

SEQ ID NO: 135559 - DNA, 553 bp, Homo sapiens
tcctggcacgtgctcagtcaatacaaataaagacgatgagccgacactgcgcgtggtcgtgaccatgttcccctggattgccctggacttggtcttcctttagacacttccctcttcattaacctcacgtctgcatcctttctttattacacataagtgaaaatattgctattgaaggattcagcagagaaaatttccaaagaccaacatgtggcatctccagggttccccttcattttctaaattggtacttcactcaaaacatttctggcataacttcttttcaaaaaatgtgtgcttccattccaagcaacataataatagaccaatcccatcagtgagcagaggagggccatggattcctttggctcccctgctgccattcagtgctaaaacactgtccaacaaagccacatccacctcagtgaactgggtgggatccccctgcctttgttctttctcygcaaatgcctggcttagaaactaagcctgattgaaaacctgcagaccaacttaagaacattgtcttgctgaatttcagccttgattaata

SEQ ID NO: 135560 - DNA, 588 bp, Homo sapiens
  misc_feature (1)...(588): n = A,T,C or G
nnnnnnnnnnnnnnnnnnnnnnngaattctcacataaatgtttggggtgatgcatatcccagttacccagatctgatggttacacattacatacatgtaccaaaacatcacattatataatcaataacaattttatacataaataaataggaaaaaaacgaggttctgctagcgtgtggtttggcagctgtcaaatcttgtgctagagccgagtcctgaccatggtgtgccctccacgcatcgtccagctcacccatcctcccaggaaggccacccctctgctgggtgtcagcatcacggcacctgggtgggtgagccgctcactgccccgccytaccccagctgccctctctagccccactgtgccacgtccccttggcaaggccactgtctggagtctggaacacagaaaaccattcctggaccctccgcactgccaagtctgtaaaagagcaggcgcctagcctctctccttggaggctcaggccatgtcaatctcttctacgtctccctagtgccaagataataagggggaaagtttttttctcctccttccagagtgcagaccaattagcattttttaaatta

SEQ ID NO: 135561 - DNA, 584 bp, Homo sapiens
actcattttaggaggccagtattaacctcatgtcacaagcagacaaaaacacttcaagaaaaaaaatttaagccaatatccattattattatgcatgcaaaaatcctcaacaaaatactagcaatctaaattcaatataatattaatgrgattatataccatgaataagtggagttatacccagaatggatttatactcaataggcaaacatggtttaacataagaaaaacagtaatataacataccatattaatagaataaaggggaaaacacataataatctcaatggatatagaagaagtattttttaagttcaccatcctttcatgattaaaaacactcaggaaaataagaatagaagggaacatcctcaaaatgctaaaaggcacttatggtatccccatagcttactggtggtacttgaaggtgaaaggttgaaaacttttctcctaagatcaggaacaagaaatatattctcgcttccaccactactttcagcattataccaaagttccagccagggcaattaggcaaagtaaagaagtaaaattcttccaaagtagaagaaagaagtaaaactatc

SEQ ID NO: 135562 - DNA, 560 bp, Homo sapiens
aatatctttcttctaattagttgtgtcattaaaattttgcttggaatcaaaataaattttctttttagtctttacatggctcataagaaaattccctgtgattcaacaagagtatggagattagttctgattatacactgaagatcctatacaagatttaatcacaaaactaattagaaagttaattaacaaatcattattaaccccacatgaaagacaactgaaaataactcttgctttccattgtgactaaagtttagagtttcctagtcattggttagtttttctaatctgattkcagaaaccaaaaataaatgcaaaaattgaatgttagtacagtattcaaagaggatattgttttaggacaaatacaactgtgggtcaacagtctagtgatttgtgatcattcacatttaatattaaatattcatgttaaaattctgcaggttttatttagaggtaggctgaataactccacttcattcaattatttttctcatatgacagagaaaagaatctaaatctattacaaaattacaagcccaaagccctacccaatg

SEQ ID NO: 135563 - DNA, 480 bp, Homo sapiens
cctttctgtgtgaaggatttcaagattcagtccctgttcacatgcatagagtggctctaaagaaaggtaggcacgttcagacagttactaggacagacgttaccacacactcaataaacaatcggaaataacaaggatgatataagaagagcggcttcctctacaattcaactctaaggaatcaatttaatatttcttacatatgctttcgttattatatctttatactttctctgcctgccttcacttatcattgctatggtgaaaggtatgcaagtaactagcctatttatctgaactcatagtctcctttttaatcaaaatttcctttaccaagcttccttccagaggtcataactcccacatctcagkctagtaaattaccttcacctcccttctaccttttatttcttttgcttttagattttgtctctgttaagtgccaactcttttgtctctggctgtagagtgtcccagaag

SEQ ID NO: 135564 - DNA, 569 bp, Homo sapiens
  misc_feature (1)...(569): n = A,T,C or G
aatcttaaacattgttgtggcttagctgggcacagtggcatgtacctagggtcccagmtgctaggtaggctgaggcaggaggatcactcgagcctaggagttcaaggctgtggtgagctctgattgcgccagtgcactacagcctagacaacagagcaagaccctgtctcgaaaaaaaaaaaaaaaaaaaaaccatgaaaatccttgaggcctaagtgaaaaactgggaaaacatggagtagtagaaagattagaagaatgaagcaatgtaagtgagcaccacatctgtgggtcactgaggcagcctggctgcagaggcaggttaccatccagcccactccatcactacgggacagggcccatgtgttactggagtctctgagacttgccagggaagctccccagcagggccttggccatctcagattctcctgtttggatctttccccaggggttggggcagcgaatgaccacccacttcctgcctctgctcanaagtcacttctcagtttctattttaccctagcaccattctattaaaattacaaagcacctcaccgacccatctc

SEQ ID NO: 135565 - DNA, 489 bp, Homo sapiens
ttgttcacggtctttctctaccaatgcaagcgccatgagggcagggatattttcagtcttgttcaccaccacattgaaagaatgagtgtaacaaaacatgcacaatttaaaaagaaaaccaccaaaaataaaacattaactgtgctatgggaatgatattatgggtaattatttttctaatattttccagaccttttatagcttgaattgttgcctttattaaaataaatttatattggaggagagttattgttctcatgcctacctagctcattcctcaaactgttttctagggaaaaaagcacagagcaaggaacagacaggctcatcaggcaggctgatggcaaaaaaaccscacacacaatctattttcattaggcctcttttagtttcattgttttaaatcaagttaaatgttcttaactgtaactgtcatctgtttcttgtgaccacacttttatcttcactttttaattaccatttttaaaa

SEQ ID NO: 135566 - DNA, 538 bp, Homo sapiens
caacagttagtcaccaagaattacagtgagtggttgaaggatgggcagttagaccacagatatttaggcctgtgtaaatacacagtgacagaagctacaagggatttggaggatggaactcattctcttgataaaagcaaagtgagggtatttcaatgggactgaacatcacgcagaaataatgctgccattaagcattcaacttctagcaatttgtattggcctctcagtcatttaagattttctataacatgagttgtcataaagtttacacatatgatggactcatttttcccttatttacattgggaaaggtctttctcactggagataaagaaactttctcctgtgtcaacaaaaagtgtcaaactctgtaaaatatttgaagagatttattctgagccaaatgtaagtgaccartggactgtggcacagcctcaggaggtcctgagaacatgtgctcaaggtggctaggctgcagcttggttttatttattttagggaggcataaggaaccaaccaatacatgtaagaagta

SEQ ID NO: 135567 - DNA, 579 bp, Homo sapiens
agatagattcaaaggttttctgattggcaattggttgaaagagttaagttattgtctaaagacctagcatcaatagaagggaatatctgggttaagataaagggttgtggagaccagggttcccattatgcagaggaagcctccaggtagcaggcttcagagagaatagattgtaaatgtgtcttatcagagatgagtctctcctggatcaggaaaaagacctggaaaggaactgagattctctacagaatgcagattttccccacaagagacagctttgcaggcccatttcaaaatatgtcaaakaaatacactttgatttttttcagggcctgctatctgttatgtgatgccatcctagagtcaggctggaatttggtgtcctattgctgcaaagagtctgctttgttagtcataagacctgttttaatgttaatgctggtcagctgggcctgaattccaaaagggagggggagtatcatgaggcatatctgacacccgcttcccatcatggcctgaactagtttttcaggttaacttgggaatgcccttggccaagaggagaggtccattcagatg

SEQ ID NO: 135568 - DNA, 563 bp, Homo sapiens
gttttgtagcatatgccctaagaactaacctgctaaaccatgtggttgatcattgaaatggaaaaagccacttccttaaaatggggttcctgtggacctttcaaggtcatacatttaaaatcaggaggatcctcagataccacatgtgttacattgtaaaaatggtcctagtttcttaatcctccttacaccctgcatcatgtgactttgcagtaatttcccactccatctgtgggtttggccacgtggcctgccttkgtcactgggctgttagcaaatatgatatcatcagaggctagaaaagtgcttgcctaattaggcttgactgctgtctttcatgtctattacctctgctgaaaggtgagacttagagaggaaagcttagtgacccaactgcccaagctgattccattctagatcagccaacaatcaactgtgtaccagacatatgagtgaccccagccaagatcggcagcattctctagttaaccagcccagatggtgagcaacaagctcttattgctgtatgcactgaaattttgtgattgttacacagcgtcatt

SEQ ID NO: 135569 - DNA, 551 bp, Homo sapiens
gggacagggttaagtcccaggacttaagcacaagtccttgcctcctggtctagcatcccatttcagaccctgtgctgcctcttcattttgaagatgaggaaactgaggtacacagtgtagaaaccaawtgcccatggtcactgggttcagtgttgagcaaagtagcttggtagccacagtgtcctgggcctggttgtcccttagctgtgttgcttgggcacatggcttgacttctgtgagcacctggtcctcatctttaaaaatgaagcccatcactcctgtcccagtgaacctgtagagtgggatgaagtcaggcagatgaagccctatgtaagccagaaagtaccatccagagacacactacaaagagcatcacatacaggacatttggggaagagcttgagcatctattttcttagtctccaaaggccccggatgggttattaattcctggcaatcctcagacccaagggacacacggagcacaggagaggaggacagatgcccaggattccaggcaacactaatcctattacaaatgcattaagaac

SEQ ID NO: 135570 - DNA, 541 bp, Homo sapiens
ctcattctgttccctgccagcccctaatgagctcattatcctcttaaagcccctttcgcacccacttagagaagagatgtgttggaatatgaaagaacgaagagggaacaatgaaaaaggactagacccagraatatcctgagagaggcagaaagccacagggaacactacagctgaaaactttgctgtctccacgacagcaaatgtgctgaggtggcaaatggctttcaagtgtctcacatgtgcccttgaggggcggaggtggggcttatcttgagcatctcctatgcatcaggtattcctcctacaatgtttaattcagtccttccagcaacatactttttaggggagaagtcaagatcctttaggccactttacaggtgaggaacctgagtcttgctgagaagggatgtcttgccccagtcactcacctggggtaatggaagaggcaggatttgaacccaggtctgtttgcctgtggagtccacctctgttcttgcctgagtgcctctggaagggctggtgtccccttgcccatccc

SEQ ID NO: 135571 - DNA, 541 bp, Homo sapiens
ctcattctgttccctgccagcccctaatgagctcattatcctcttaaagcccctttcgcacccacttagagaagagatgtgttggaatatgaaagaacgaagagggaacaatgaaaaaggactagacccagaaatatcctgagagaggcagaaagccacagggaacactacagctgaaaactttgctgtctccacgacagcaaatgtgctgaggtggcaaatggctttcaagtgtctcacatgtgcccttgaggggcggaggtggggcttatcttgagcatctcctatgcatcaggtattcctcctacaatgtttaattcagtccttccagcaacatactttttaggggagaartcaagatcctttaggccactttacaggtgaggaacctgagtcttgctgagaagggatgtcttgccccagtcactcacctggggtaatggaagaggcaggatttgaacccaggtctgtttgcctgtggagtccacctctgttcttgcctgagtgcctctggaagggctggtgtccccttgcccatccc

SEQ ID NO: 135572 - DNA, 614 bp, Homo sapiens
cctagagggctgtcagagacctctaagaagctgggactatgggagagaaaggagtaccgtgatcaatattcactccttacagacaggggaatggatgaccagagaggttaggtaacttgttcaaggtcacacagcaagtaggtggcagactaggtcctgccagggtctgtgctcgtgatcacttgctatactttgtcatcatacccaattatcacaaaagtcctacttttagccctatttaaagatgaagaaacaggatcagagaagttaaggcacttgtctgtggtcacacagtggcaggtggcattcaatgccagatatactgggctaaagagtgccccccaaaattccgtgtccatctggaacctcagaattggatcttatttggaaatagagtctttgcagctgtaactagttaagttgaggacatactggattcaggtgggccctaaattcagtcactagtgtccttactaaagaaaacagagacatgcagacacacagagagaatgccacrtgaagacagagaaaaaaattggggttacacctctacaagttggcaaatgcaaaagatcgccagcaactgctagaagctggaagaggggcacagaaca

SEQ ID NO: 135573 - DNA, 599 bp, Homo sapiens
ctggagcctggcagtcagaggtcaaggtgtcagcaggattggttccctctgggggctgtgagagaatctgttccaggcctctcttgaagcttctggtggtttgccagcaatctttggcatttcttggctcatagaaatacgaccctgatctctgccttcctgttcccatgtcctttctcctgtgttcaagtctgtgtccaaattttccctttttctaagaacaccagtcacattggattaggggcccactctactccactatgacttcatcctaatttractaattccatctgcaattaccctatatccaaatcaagtcacattctgaaggcctggaggttagaacttaaacatttgaatttggagggaggaacacaattcaaccctttacagcccctatatgcattatgatattttcttataacagctctgcaaggtaaattggaatcaatatttctattttacagatgaagaaagtgaggttcagagagctgaaaatctcccgtaaagtcacatacaccatgtgtgtggtggcagcaccaagatttaaacatcaggttgcaccattccaaatttcattctctctaccacacacctgc

SEQ ID NO: 135574 - DNA, 611 bp, Homo sapiens
aaaagcattggctaaatggggttttctgttttctaatttacattctatttttcctcttgactgatgatcctgaacatttactcataaagctgtggtactcaactctctgtgctcattaccattatctgagagcacctggttacagatgtgggtttccccctcaaccagacattctggttggaaaggttaggaatctatattcaccaggctctcaggtgattctgaatcagttgtttctcagacccacacccgggagaccctgacaaagggtgagccatgctggtgaccgggaggctgtaaggrtgggctaccgtctggggggctgtctctgaattctcaagtgatgtccagactatgtgggaaagaggcagagtcaaagagacactggttaagagctgtgatttgcgatttggactgtcctgggtccagatcccagctccatcactcaccagctgtgtgacctccatttcctcatctgtaaagaagagaaatagttacctctcataggaatgttgggagcaataaaggagacaagtgtagatggctgggcacaaagctgagcacatggtagacactcaataaacactgaatggacaaatatgctgctaaat

SEQ ID NO: 135575 - DNA, 392 bp, Homo sapiens
agcacctggttacagatgtgggtttccccctcaaccagacattctggttggaaaggttaggaatctatattcaccaggctctcaggtgattctgaatcagttgtttctcagacccacacccgggagaccctgacaaagggtgagccatgctggtgaccgggaggctgtaaggatgggctaccgtctggggggctgtctctgaattctcaagtgatgtccagactatgtgggaaagaggcagagtcaaagagacactggttaagagctgtgatttgcgatttggactgtcctgggtccagatcccagctccatcactcaccagctgtgtgacctccatttcctcatctgtaaagwagagaaatagttacctctcataggaatgttgggagcaa

SEQ ID NO: 135576 - DNA, 523 bp, Homo sapiens
gtggtgagtaccatttggatattcctgattctctggcttttcagagcccgcaaaatacaagaataacaaaaaatacacgacggatgccattgacggtttcgatctggaggaaagggtaggggtgaatgggaaagacttgctctgctggggggaaactggggctggagagaagattcaccctcctagctgacttctattggatccctactatgggctaagcactgtgcttatccctttccatcattatcccatttaacactcacctcaactctatgagggaggaaccatctccctcattttacagatgggaaagctgaggcccaaggaagctttcccatgacccacgcaagtgtcctgtgcccttgatcacctggctgagaagtggcaggggtgtgactcataccctggccctttcagacaggctccatctgcccstggtgttgacctctgtccatgctccgcccttttcagacaaccgttgcatggacagaaggttcctgccaggcaagtccaagcagctcat

SEQ ID NO: 135577 - DNA, 580 bp, Homo sapiens
tcctaatctgtaaaatggggctaacaagtggaacctttcttatagggttgttgtaaggattrcaagttactctctagacagtgtctgtcacatagttggtgctcaataaatactagctcacattattattagggtgctatgtattttaaaaacagtagctcatttaaccctcctacctttccaatgaggcagggtggattggctctattttgcaggtgagaaaactgagtcacagagaggccccttgctgaagatcacacagccaccaccgccctgaggcaggttcagatgcaggagtgtgtgactctggccctgacccctttccacgtttcctctccgtggccattcctgtccatagtggcccaccctgaccctgcaacaagcgaagatggctgtaaagattgcccatggagcaagaggcactagagtcattacccagataaacaaaattttaatatttatttataacggacaccatatgctccctctgatttttttatttaattacatcatggcagatggctgggtgttaaaggccattaagctaatggcactttgccttctcatttattttcttgag

SEQ ID NO: 135578 - DNA, 580 bp, Homo sapiens
tcctaatctgtaaaatggggctaacaagtggaacctttcttatagggttgttgtaaggattacaagttactctctagacagtgtctgtcacatagttggtgctcaataaatactagctcacattattattagggtgctatgtattttaaaaacagtagctcatttaaccctcctacctttccaatgaggcagggtggattggctctattttgcaggtgagaaaactgagtcacagagaggccccttgctgaagatcacacagccaccaccgccctgaggcaggttcagatgcaggagtgtgtgactctggccctgacccctttccacgtttcctctccgtggccattcctgtccatagtggcccascctgaccctgcaacaagcgaagatggctgtaaagattgcccatggagcaagaggcactagagtcattacccagataaacaaaattttaatatttatttataacggacaccatatgctccctctgatttttttatttaattacatcatggcagatggctgggtgttaaaggccattaagctaatggcactttgccttctcatttattttcttgag

SEQ ID NO: 135579 - DNA, 647 bp, Homo sapiens
tgatggccttgggggtgagaggagacaaattgggtttagaatttagaagacctgaaccaaaaaggtgcaaaactaggagaataacaagtggtcctaaaaaggaaagaacccaggagaaccatttccagtctccttccctatctaaccaaccctgagaggcaagttcccataataaatggaggcttgatttggaagtcgtgtgatgttgtcctgtrcttttcacagttggtttacccaaaagcaatacttttcatctaaggctgaacaaagtcttccttgtgctgccattagcatatctagtcctcaacaattctggagggaatgcaaattaatacaaccactctgaaaaacagtatggaagttcctcaaaatactaaaaatataactaccatgagatttagtaatcccactactaggtatttattcaaaagaaaggaatcaatatgtcaaagagatatctgtattcctatatttagtactagacacaatagccaaaacatggaatcaatgtaagtgctattaatatctgaatggataaagaaaaatatgatacacatggaatattagtcataagaaagaatgaaatcctgtcacttgcagcaacgtggatgaaactgtaggtcattaagttaagtgaaacaagccag

SEQ ID NO: 135580 - DNA, 479 bp, Homo sapiens
gaggtatgttctgctaacttgtttgtgtttataatttaactatgttaatttattgaacgaatttataaaatatattgaatgtacagaatagcttttgttgaatacacataattacatgtatgagtatgtaactggtgaagatatgtatatcttcaaaaggaagtggccaaggacacactttatctctcagaggctctgatgtcactctcaagggggtgcktataatcacaatttcttagcaagagacagggtatagaattttaaacaaacagcaaactaagcattttagaatatgtaggattctcctttgtgtgatcttaactctttgtcttatctgtttttaatcctatggaccactaatgcttacccggcataaagtgaaacatattttggttgcctaagaagcaccacttccaagcatgtgcatgacaaaatgtaccaccttgcaccaccagtttagctatccacagctagtccta

SEQ ID NO: 135581 - DNA, 659 bp, Homo sapiens
gaatctcaaggcagaagaatttttcttagtacagaacaaaatggagtctcctatgtctacttctttctacacagacacagtaacaatctgatctctcttgcttttccccacaacctcagcctctcagagtgctgggattacaggcatgagccaccgcgcccagcctcccttttaaagcactttctgaagtcaagcctgattcaggattgcaagcctgcagagaactatggtggtaaagcctaaaaagatagaatccttcccacacctgagaaggcagtatttttagaaggaaacamcagaatcacacttaagtcactgcaaaggcattcatgtttatacatttctgaaactgtcttacttgaactttatgtggcttttagcactgtcaaaatgcttccataagcttctatgaggttactgttatggatctctatcttctttgacctcatctgctcagcctccttcaattgattattttcctccattcacctatcctttaaatattagtatttcctgattctttttcttttttcttttcttttcttttttttttttttttgagatggagtctcactctgtcacccagtctggagtgcagttgtgtgacctcacctcactgcaacctccaactccctggtttaagtcattctcctgccaca

SEQ ID NO: 135582 - DNA, 408 bp, Homo sapiens
agaataaagctatgcacatctggcaattgagcattaactttcatagcacaaataaaaataaccaactcaaaggcaattttaggatttttctcctcacacaagaatgtaaccattttccaaagccaatagcaatacactatttaagtaacttcctttttccttaaataagaaatctatttggttgaaggttatgaaattttcatattataggtcagaaacaagtatctacaacttcatatgcttcaaattaatatttcaaacacttccagaggtwccatggttaataagtattaatctaaggctgacatcttaaaacaaaggatcaaatattgacctgtaaaagactaccaacataagatatacagtattcaattcccatttgtcgttccaaagtaagataattaggta

SEQ ID NO: 135583 - DNA, 584 bp, Homo sapiens
gatggcaggtaaattatacagtggatttataatgacactcaaggtacattttgacagcacattaaacacgtctgctaccctcggtcaagacagttaacgagatggccttaaaatcaacacatgattctttaggcttttcctcaaactacgtctaaaattttttgcttttcctcaaactacttttaaacttttatgtaattttatcccacaatttccaatacaatttttttgggraaaaaaattccctagtgagaaagtagtagatggtttaaatttaaattgttctttcataaggtattttactagttataaaaaaaaaaaaagacagggggtggggagggaagagagagatggagttccagcttaactaacagaattgtacgtgttttttaaaaaggaaatcctgggtccaaagtaattaacattacacttaatcttttcaataatttttgttcccaaggcaattaacatgaaacattatgttagtaggtctactagtggccttcatatgctattaatcgtttctattttctcatattaaataatttcgggaatgataactaaggtggtcagaatagagaata

SEQ ID NO: 135584 - DNA, 572 bp, Homo sapiens
gactggcagccaaaaatgcatcttgagtggaagaatcgtagaaagtagagaattaagtatcctttggcttcccattgtgtttctgaaaaaaagtcaggaaagctggtgcgatggtttggatatttgtcccctccaaatctcatgttgaaatgtgatccccagtgttggaggtggggcctagtgtgaggtatgtgggctatggggtggatcccacatgaatggcttagtgctgtcctcatggtaatgagtgagttctccctttatgagttcacccaagagatggttatttaaaggagcctggcacttcctcccctctctcttgttttctctctcactatrtgatgcaccagctcccctttgccttccgccatgattggaagcttcctgaggcctccccatagtgcagatgccagcactatgcttcctgtacagcctgcagaaccgtgagccaaataaatctcttttctttgtaaattacccatcctcaggtattcctttatagccgtgtaaacagactaacacagccagggccgttggaagttttgtggaagcactgggtaggactgacgtgt

SEQ ID NO: 135585 - DNA, 572 bp, Homo sapiens
gactggcagccaaaaatgcatcttgagtggaagaatcgtagaaagtagagaattaagtatcctttggcttcccattgtgtttctgaaaaaaagtcaggaaagctggtgcgatggtttggatatttgtcccctccaaatctcatgttgaaatgtgatccccagtgttggaggtggggcctagtgtgaggtatgtgggctatggggtggatcccacatgaatggcttagtgctgtcctcatggtaatgagtgagttctccctttatgagttcacccaagagatggttatttaaaggagcctggcacttcctcccctctctcttgttttctctctcactatatgatgcaycagctcccctttgccttccgccatgattggaagcttcctgaggcctccccatagtgcagatgccagcactatgcttcctgtacagcctgcagaaccgtgagccaaataaatctcttttctttgtaaattacccatcctcaggtattcctttatagccgtgtaaacagactaacacagccagggccgttggaagttttgtggaagcactgggtaggactgacgtgt

SEQ ID NO: 135586 - DNA, 572 bp, Homo sapiens
gactggcagccaaaaatgcatcttgagtggaagaatcgtagaaagtagagaattaagtatcctttggcttcccattgtgtttctgaaaaaaagtcaggaaagctggtgcgatggtttggatatttgtcccctccaaatctcatgttgaaatgtgatccccagtgttggaggtggggcctagtgtgaggtatgtgggctatggggtggatcccacatgaatggcttagtgctgtcctcatggtaatgagtgagttctccctttatgagttcacccaagagatggttatttaaaggagcctggcacttcctcccctctctcttgttttctctctcactatatgatgcaccagctcccctttgccttccgccatgattggaagcttcctgaggcctccccatagtgcagatgccagcactatgcttcctgtacagcctgcagaaccgtgagccaaataaayctcttttctttgtaaattacccatcctcaggtattcctttatagccgtgtaaacagactaacacagccagggccgttggaagttttgtggaagcactgggtaggactgacgtgt

SEQ ID NO: 135587 - DNA, 384 bp, Homo sapiens
agggaggtagaggccactctgaactagggaagccagggtaggctttctagaggagacgggccttgagttagagctcaaagaatgagtagaattcagaaagacagatggagggaaatagacatgggatgagggttgggggcaaagggtgrgtcaagcagtgtttccccaggaggaaggctctgcataccctggaagccagtaaaggctggagcacctgcatcagagattgtgaatgagtgacagcagaaagcaaagctccgatgtgtgctgtgacctgagcctagggaacagaattgccgggttaagaactgaggaccacagcttctgggagctgggagccataaaagatgctcaggaaaaaatatggtgcttcagaaatatgat

SEQ ID NO: 135588 - DNA, 384 bp, Homo sapiens
agggaggtagaggccactctgaactagggaagccagggtaggctttctagaggagacgggccttgagttagagctcaaagaatgagtagaattcagaaagacagatggagggaaatagacatgggatgagggttgggggcaaagggtgagtcaagcagtgtttccccaggaggaaggctctgcataccctggaagccagtaaaggctggagcacctgcatsagagattgtgaatgagtgacagcagaaagcaaagctccgatgtgtgctgtgacctgagcctagggaacagaattgccgggttaagaactgaggaccacagcttctgggagctgggagccataaaagatgctcaggaaaaaatatggtgcttcagaaatatgat

SEQ ID NO: 135589 - DNA, 384 bp, Homo sapiens
agggaggtagaggccactctgaactagggaagccagggtaggctttctagaggagacgggccttgagttagagctcaaagaatgagtagaattcagaaagacagatggagggaaatagacatgggatgagggttgggggcaaagggtgagtcaagcagtgtttccccaggaggaaggctctgcataccctggaagccagtaaaggctggagcacctgcatcagagattgtgaatgagtgacagcagaaagcaaagctccgatgtgtgctgtgacctragcctagggaacagaattgccgggttaagaactgaggaccacagcttctgggagctgggagccataaaagatgctcaggaaaaaatatggtgcttcagaaatatgat

SEQ ID NO: 135590 - DNA, 585 bp, Homo sapiens
gttgctataacaaattaccataaacttagtagtttaaaacaacataaatttattaccttagggtcttgaagatcagaagtctgaaaccaattttgttgtgctaaaatcaaggcgtgtaatccttctgggagtgctagggaagatttatttccttgccttttccacgttttagaggctgtctgcattccttgtctcatggtcccatcctctatcttcaagccaacagtatagcatctttaaactmcccccctctctgactctgccctttgcttccattgttgcatcacctctacctctgcttcctgcctccctcttataagtacccttgtgattacactgggtccacctggacaatccagaaatgtcaccatctcacgatcttcaattgcatctataaagttccttttgccatgtgaggtagtaaattaatagtttctggggattaggacgtggacgtctattcagacttcactataaaataagctgcaggagattataataatttatctatcttatttattatggaattctcagtgcataaacactataaaagaacaaaagaatgaagaaagaagagagcaaaat

SEQ ID NO: 135591 - DNA, 585 bp, Homo sapiens
gttgctataacaaattaccataaacttagtagtttaaaacaacataaatttattaccttagggtcttgaagatcagaagtctgaaaccaattttgttgtgctaaaatcaaggcgtgtaatccttctgggagtgctagggaagatttatttccttgccttttccacgttttagaggctgtctgcattccttgtctcatggtcccatcctctatcttcaagccaacagtatagcatctttaaactacccccctctctgactctgccctttgcttccattgttgcatcacctctacctctgcttcctgcctccctcttataagtacccttgtgattacactgggtccacctggacaatccagaaatgtcaccatctcacgatcttcaattgcatctataaagttccttttgccatgtgaggtagtaaattaatagtttctggggattaggacgtggacgtctattcagacttcactayaaaataagctgcaggagattataataatttatctatcttatttattatggaattctcagtgcataaacactataaaagaacaaaagaatgaagaaagaagagagcaaaat

SEQ ID NO: 135592 - DNA, 606 bp, Homo sapiens
tcaaatttacaggattttaattggttttcttctgaatcatctttgcttacaataccttatgagacctggtgataacatatccsactgttaagtcaggttactaagaggaataaagaataccaacctgtatccatctcatccacactgttcaggaagtcatctggggttcgagggacactgtagctgctcatgcttagtccactgtctgtactctcatctcgagagtgataggtgccactacataaacatgacagttaaagaccaacacaaaaaattttaaaaatcaattcaaggtaaaaataaacacctgctgagcagcaacataattctcaaagaggattagtgaaaattcctgtcctgcaatgtctgaaacaagcaccctccctcagggccatagacagggcttgtgctatgaagtgaaatagacaagttaatcctaattgaagctggcagctctaaggaaccaagatttctcctaaggttctgtgcttggtgacaataagggacaaaaaaagatacccccagttagttttcctggctgacagaaaattctctgcatcagtattctcctctctgtaatatcatttgaatctgggggtgcggagg

SEQ ID NO: 135593 - DNA, 596 bp, Homo sapiens
gctctccacacagagggaatcctaggaaaattgccacaacaataggacaatgctgtaacaggttagatcttccatccattttaaaaaatcatgtacatttgctcaacaaacacacttggaacatattccaacttgagtaataagtggcatggtaacttcctcagggagcttaccaagagtaaaggtaagactgttaagtgctgaagttagttcacacaatgtagtgagagagcacagtctatgggaagattacttcctcctaggatgatcagggaaagcttgtacaggttctatttaagctgggcattgagtggttatgactaacccaacagaagtggtcagtggcagagaaagcactaggtaaggaaaactaagaatagttggaggaatgggaagtgtattagtccattctcacactgctatacagatactacttgagaccggtaatttacaagcaaaagagatttaattgactcacagttctgcacggctggggaggcctctggaattggaaacttacartcatggcagaaggtgaaggggaagcaaggtacatcttacatggcagcaggagagagacagagtgcaggggaaac

SEQ ID NO: 135594 - DNA, 602 bp, Homo sapiens
gagcttaaagccgcgaggatagattggagttaaaatagataccgtgagccggcacccccgttaataaagrtccattgttttcagcattaactttattttgtaattgtttcacttatctgttagtctgcaaaaactcacttgagaggggtaaacggttactgtaattgaagctttgagaccaggtctgtaactcagtgtaacttattaaaagaaacaaaaacactacattttccaaatagtgaaatcacatcaacttttttagtactcgaatttgcaatagtcactggaagccgcaacccaaaaaattagtgcgtcttcaggtacaagcattcatgcctctgtacctgtctttcatcctcaaggagctgggtccctacccctgctatccctgtgcctggcccaacggtggactccgttaatgtggactgaataagaaatgaatgggcaaggaggtcatcccaggcacctgatgtacaaggagcccttctggaagccactcaaaaacaatagaaatgttttttaagtcatacactctgggttttttttttttaaagcatccttgttgagatataatttatataccatacagtttttgcaatagt

SEQ ID NO: 135595 - DNA, 602 bp, Homo sapiens
gagcttaaagccgcgaggatagattggagttaaaatagataccgtgagccggcacccccgttaataaagatccattgttttcagcattaactttattttgtaattgtttcacttatctgttagtctgcaaaaactcacttgagaggggtaaacggttactgtaattgaagctttgagaccaggtctgtaactcagtgtaacttattaaaagaaacaaaaacactacattttccaaatagtgaaatcacatcaacttttttagtactcgaatttgcaatagtcactggaagccgcaacccaaaaaattagtgcktcttcaggtacaagcattcatgcctctgtacctgtctttcatcctcaaggagctgggtccctacccctgctatccctgtgcctggcccaacggtggactccgttaatgtggactgaataagaaatgaatgggcaaggaggtcatcccaggcacctgatgtacaaggagcccttctggaagccactcaaaaacaatagaaatgttttttaagtcatacactctgggttttttttttttaaagcatccttgttgagatataatttatataccatacagtttttgcaatagt

SEQ ID NO: 135596 - DNA, 634 bp, Homo sapiens
aatgaatgtcactgtaatcttgatatacctcatgttcacataaaatagccgtaacgtcatgttgacatgttaataaggtttcagtaagcaaaaggatgctcttctctacttggaaaaatgatcttttaaggagtttttaaaatsttagagacagtgaacaaggacaactgtgagagcatgtaagtaaattttgagggtatttaatgtaacaaagcagaaaatggcttccgtgaagcagggtatctacagaaaagtttcaccctgaagggagtgtcttctgagtctgctaacccgaagccttcacataaaagagaaagctacaccgtgcttttgaagcactctactgggttaatcatgctaaatgcaacttgatttacatttttattactcattatttaataaggacttcctcgctttgcttttttttgaaaaagaattcccatcattcataattgagtccagcttcatgttctgctctgagatcttgttccctcatccaactgctttccttaagatactgtaattttctttagactccccaaacctgttttctgcataattttcatggttgactaggatgaaagatcttttaagattctttccaattcttaagattttatgaaactctattttg

SEQ ID NO: 135597 - DNA, 634 bp, Homo sapiens
aatgaatgtcactgtaatcttgatatacctcatgttcacataaaatagccgtaacgtcatgttgacatgttaataaggtttcagtaagcaaaaggatgctcttctctacttggaaaaatgatcttttaaggagtttttaaaatgttagagacagtgaacaaggacaactgtgagagcatgtaagtaaattttgagggtatttaatgtaacaaagcagaaaatggcttcygtgaagcagggtatctacagaaaagtttcaccctgaagggagtgtcttctgagtctgctaacccgaagccttcacataaaagagaaagctacaccgtgcttttgaagcactctactgggttaatcatgctaaatgcaacttgatttacatttttattactcattatttaataaggacttcctcgctttgcttttttttgaaaaagaattcccatcattcataattgagtccagcttcatgttctgctctgagatcttgttccctcatccaactgctttccttaagatactgtaattttctttagactccccaaacctgttttctgcataattttcatggttgactaggatgaaagatcttttaagattctttccaattcttaagattttatgaaactctattttg

SEQ ID NO: 135598 - DNA, 540 bp, Homo sapiens
agggacagttaccaatgaaaaggcaaacaagacacatgacttacaatgaagttttgagacctatccagtccatcaagactggcatgttattaattttgtccctattacacagagtgggatccagaacaacgcctgctacataaaaccactacataggtgtttataaaatcaagagatcaaaagcacttatagtgagttcacagaaaagaatggcaggaagagcaacatcgacaatggcctactaaagactaagcattggctactcttttgggctacagttttagaaactataactacatcaaagcaagtaaccaaacactttatcccgaaccatgtgggtcttttttgagaaaaccacccagtatttgagggaagagagagaactggcttattgataagctgtgcaaattcttatctgcagtatgatgggcaccaactcaaagaagacagacaggtacaaagagggcatggtttatcctcaaacacagaggacaatgacacttacatatcattgcaaagraacagtgactattttctcac

SEQ ID NO: 135599 - DNA, 502 bp, Homo sapiens
actaaaactaattatgatagactgaaattgatgtctttaaaaaagctcacttaatagtgtttaatcaggttgagataataaagtgaaaaacagtgtaagttttgattcggataggtcttgacagtctactcctaaggcaaatgtaacatttrtttatcataccagataacaccattaaggatgttttgttgtgtgaatcctagtatgtgttttatattgattgtcttccagggtgggttgctactttgtaatgtaagatagaaagttttgtgacagacttacagaagagcaaaggaaaaggtttgatcatgaaaagttcgtacagtttttttttgccccctttcctgcaactttttcttttcttttcttctttttttttaaaaaaattcattttctggtgtcctggtatccatttcaaaggatcaggtttcaaccagaacagtaaagggcctgagactggaaagtacacacaagtctggcaaactcatctgcatgagcaaga

SEQ ID NO: 135600 - DNA, 496 bp, Homo sapiens
aaaaattacacattaactttcgctaaatttgtcaacattttctccaatgtagtatgcaccattagtattcactgtacctaacttttcaccaatagaacatataaatgttttcatatcacattgtagttgttgcaaatattttaaaataccatttatgatcattgctatttcaatgctacagtagttacgttataagatgtgcttctagattttttttttttttaatctttttgagacagggtctcactctgtcacccaatctggaatgcagtgatgcaattatagctcactgcagccttgaccttcyaggctcaagtgatcctcctgcctcagcctcatgagtagctgcagccacagaggcacaccaccatacccagctaattttttgtatttttgtagagacagggttttgccatgttgcccagctggtctcaatctcccaggctcagatgatctaccctccttggccgcccaaagtgctggcattacaagcata

SEQ ID NO: 135601 - DNA, 496 bp, Homo sapiens
aaaaattacacattaactttcgctaaatttgtcaacattttctccaatgtagtatgcaccattagtattcactgtacctaacttttcaccaatagaacatataaatgttttcatatcacattgtagttgttgcaaatattttaaaataccatttatgatcattgctatttcaatgctacagtagttacgttataagatgtgcttctagattttttttttttttaatctttttgagacagggtctcactctgtcacccaatctggaatgcagtgatgcaattatagctcactgcagccttgaccttctaggctcaagtgawcctcctgcctcagcctcatgagtagctgcagccacagaggcacaccaccatacccagctaattttttgtatttttgtagagacagggttttgccatgttgcccagctggtctcaatctcccaggctcagatgatctaccctccttggccgcccaaagtgctggcattacaagcata

SEQ ID NO: 135602 - DNA, 610 bp, Homo sapiens
tgctgccaccttgatcttgaacttctcagcctccaaaactgtgagaagtaaatttctgttgtttataagccacccagtttatggtattttgtcatagcagcctgaatacactaagatattaacaaaataatagttttggactaaatatttttatttccattttctaaatgtcattttggagcaagaaatttgagaaaaagatcaaaaataagttttcatacatgtatataatagttcaggcaattcaaaggatgccttcaggacaccaactcgttgttttactataggctttgaaatgatgaaaccaagaggagcggtttcactcacactttaccaggaggcttttctgattcctgcagcctgcattgatctctcacatctctggactcctaggctgrgcatggtgactcaggcctgtaatctcagcagtttgggaggctgaggtcaggagttcgagatcagcctggccaacatggtgaaaccccatctctactaaaaatataaaaattatctgggcatagtggcacgcacctgtaatcccagctactcgggaggctgaggcacgagaattgcttgaatacaggaggtggaggttgcggtgagctgagat

SEQ ID NO: 135603 - DNA, 574 bp, Homo sapiens
tggtggttcatggttttgtcagaatgcttttggatatatattgcaaaagcccaactcagataataagaatgtgtgggctcattgctatggtttgaatgtgtcccctccaaaattctgttgttgcctgtgtgacacttacaaggaggtagggactttaagagatgattaagccatgagggctccttccttattagtgggattaagaccctagtaacagaggcttcacacwcccttagactagcttgcttgcttgcccttctgccttctaccatgcgaggatacagcaagaagaccctcatcaggcacccaatgccaacgccctgatcttggactttcagcctctagaactgtgagagatacatttctgttctttataaattatcccatctgtattattccgttacagcaacataacatgaactaagacatttagctaaaactttgggggagattattttcaggcactaaagaaccaagtgctcaaataatactacatgaaatagttctccctccaattctcaatttttatttcctgtatattggtttcactattaggcaaactctcatttgaggt

SEQ ID NO: 135604 - DNA, 574 bp, Homo sapiens
tggtggttcatggttttgtcagaatgcttttggatatatattgcaaaagcccaactcagataataagaatgtgtgggctcattgctatggtttgaatgtgtcccctccaaaattctgttgttgcctgtgtgacacttacaaggaggtagggactttaagagatgattaagccatgagggctccttccttattagtgggattaagaccctagtaacagaggcttcacacacccttagactagcttgcttgcttgcccttctgccttctaccatgcgaggatacagcaagaagaccctcatcaggcacccaatgccaacgccctgatcttggactttcagcctctagaactgtgagagatacatttctgttctttataaattatcccatctgtattattccgttacagcaacataacatgaactaagacatttagctaaaactttgggggagattattttcaggcactaaagaaccaagtgctcaaataatactacatgaaatagttctccctccawttctcaatttttatttcctgtatattggtttcactattaggcaaactctcatttgaggt

SEQ ID NO: 135605 - DNA, 458 bp, Homo sapiens
tctgtgtttcctgccctgtgacattagcttctgtgtgtctgaaggatctggttcccagagggtatctgtgctctccattctcacaactttaagctctaagggtctaaagaccctggtttcagcagtgatgtttctaccagaggacagagtgagggtcatattaaactttgtttctgtccagtcacttyaagctgttcatgccaggagaacagcaggcaagaaaaggagtgaccattttggcagggctggaacacagtcaccaggaggaagtcagggagctttcacatgttggaggcagagaagaatacagtgagcaccctggtggccatggtggtgtttcttggtgtttcttcccctgcccagttttgatgataaaaggacaaagacaacagccatggcctgacatgggcactgaggccagaagtctgctacccagatccctcctttggaactaaaac

SEQ ID NO: 135606 - DNA, 495 bp, Homo sapiens
gaagtctgctacccagatccctcctttggaactaaaacacgttcattctcacagctcctaagagagttggctactgatttatcacagctgagtctctctctggggctttcccttgacaagggaattaccccaaattatccctgtttgatgcatctcactaccagagctctcccagaggcctctgttgcaaccatttgatttcttcctctgccacatttgatttcttcctttgcccagttactccttcctcatttaacttgtaggcgatgttcttcagatcactccccaaaacaccccctgcatgcaaatctttgtctcggagctgttttcctgggcccctgacctgagacaatagctgacatgtatggaacgcttattatgtgctatatattttatacatattaactcaatcaattctcacaaaaastaatatccccatatgacagatgagaacctttaggtttagagaggtcaaatgacttacataaagcctgg

SEQ ID NO: 135607 - DNA, 573 bp, Homo sapiens
aatggtagctgtgaattaatgtcttttctggtggagtggtggggcagagatagattttcatggtatcctgtaacaaagaagaaaaagcaattttagactaagtttttacaaaatatctatagatttaatgttgtccccatctgaatcccaacagaaatkatgtaaaactgacaaagatttaaaaaaaaataagtaaaagaggaaagagcaagagtagctagattgttcaaaaagatgaagaaatatctctctgtgtgtgctggaagctgggggacacttgccccaagacagtggttcccaagcattgctgtgtagcggaatcacctaaagagatgaaaaagaactctgagacctaagtttcttgagataggctgactcatgcctttgtggttttaagttcctgggtgattctgaagctcatcagggtttgaaaatcactgctcttgtagacatccaaacaaattctaaaactatagtaattaaaccagagtggtattggcacaggaaaagataaaaaaaaaaaaactaaaggaacagaatatagaaagtctagaaacatactggcctatatga

SEQ ID NO: 135608 - DNA, 517 bp, Homo sapiens
aggttagtttcactcttctgcctatggatattcagttttcccagtaccatttattgaagagactgtcctttccccatgtatgtcttggcacctttcgcaaaaatgagttcactataggtgtttgtatttgtttctgcattatctattctgttgcattgatctatgtgtctgtttttatgctagtatcatgctgttagggttactatagctctatagtataatttgaagtcacatgatgtgattcttccagttttgacctttttgcttaggacagctttgactattctgggtcttttgtggttctatataaattttaggattgctttttctatttccatgaagaatgtcattggtattttgatagggatcacattgactctgcagattgttttgggtagtatgcacattttaacaatataaattcttccaatccattaacattaacatggaatatttcttttttttttttttttttttttagtgttctcttcaatttccctyatcagtgttttgtagt

SEQ ID NO: 135609 - DNA, 589 bp, Homo sapiens
ctttgggttaaatctgcttggtgctctataaccttcttgcacttggatatttatatcttcctctaggtttgggaagttctctgttatacatttgaacaaactttccatgttgattttctttgagtttcctcaggatcggtccctggtgccttatttagttcatttggtgaggtcatgttttcctgaatggtgtcaatgctagtaggtgttctttggtgtctgggcattgaagggttaggtatttattgtaaccttcactgtcagggcttatttgtagccatccttcttgtgaaggcattctagatatttaaaaggagttgggtgttgtcatctaagctgtatctgctttaggaggcactccaagcctagtaacactgtggttcttgcagacttatagagataccaccttgattgtcttggaccggatctgatagaattctctagataccacgcagaggcttgtgttgtcttttctcactttctcccatacatgcagagtttctctctctttgctttgagtcacataaagctagggtggagtgatacaagcacccctgtggccrccactactatgactgcactgggtcag

SEQ ID NO: 135610 - DNA, 489 bp, Homo sapiens
tttagaactaagtgaccttaatatttgaaagttcatatgtatagaacatgcaaaaaagggattaataatacttttataaaaggattaatcatatgatgaatttaaattaacaagcttccttagtgcatttaacatttaacttgatttatacaaattcaatttatattgctggtcaggaataaatctattaagtaaagcaaggtgcacctgaaattatatttggaaatacagtcactctttccatagcttgccctttatgtaataacaaataataccaaactctttcccccggaaggaagtaataaattgttatgmcttttagattgcaaggatcttttatggagaggcaaagatatacagagctaagagaattcagaaaaagcacaatgaaaacataactttaatttctaaaaactgcaggtgttaaatcttaagaaaggattatgtggtgtgggtgttgagagcctcaaactcttgaatggaaagaca

SEQ ID NO: 135611 - DNA, 441 bp, Homo sapiens
taaccaacgtccctaatagaaaaaaagacagtaataattagttaaacaaaaacaagtaataaggtttaaaactatgcatggatttctttgttaggtttactttccatttttatgaaaaagattttaaaaataatataaactctttggtaaggcttaaattatagctgagcttcttatgtagaatgtctcttcttggagaaaatattttttcytcacttgggcatcacatttcccttagggagagtaaagcgcatccatgcagttatatcttctctccgtgaatagaaataaagaggtacaaaaatattttgacaggtattcattactagcctgtaaaggacgtgcactgttgggaaataatgtaaataaaattggctatgatttttaaaagctctgtttttgcatatttccataaattttataacaaaaataaagtagtag

SEQ ID NO: 135612 - DNA, 461 bp, Homo sapiens
taaccaacgtccctaatagaaaaaaagacagtaataattagttaaacaaaaacaagtaataaggtttaaaactatgcatggatttctttgttaggtttactttccatttttatgaaaaagattttaaaaataatataaactctttggtaaggcttaaattatagctgagcttcttatgtagaatgtctcttcttggagaaaatattttttcctcacttgggcatcacatttcccttagggagagtaaagcrcatccatgcagttatatcttctctccgtgaatagaaataaagaggtacaaaaatattttgacaggtattcattactagcctgtaaaggacgtgcactgttgggaaataatgtaaataaaattggctatgatttttaaaagctctgtttttgcatatttccataaattttataacaaaaataaagtagtaggcttttggaaaaaatctaga

SEQ ID NO: 135613 - DNA, 572 bp, Homo sapiens
ataacaatattccttggacatcagggtagaggtcatatcccttctatagcaatgatgaagaaaagatcaattgtagaagctgcagagacagtcaggtggcttgaagacagacagttattacttgtatgggagggggtaacgcagagaagaaagggaccctgaatgggagcaaatctccagcctgagctcttccatacaaagggcagagtaatgatagactaattaattttaaagatagtaaaaaaccttttatatagaacatcactcaattgaatttccagataattacttcatgccccaccttgtagtgtacgtgcatgtaatttttccttcttcatataatatttatcataactacagcaagatgataatttcrgtggttggaggctcaccatctctctcgaaaacttaattggttaaggatttggcagactgttctttccaaatatcctgggttgctgtaattttgtgggcttccagagcatgtttatctcccttattaagagatctagaaacttgatgaccaatttttccagagttgaatttacccaagggatatttatagcgttatt

SEQ ID NO: 135614 - DNA, 565 bp, Homo sapiens
gaaagaaatctgaacacttagcagttatacctggatactgaccctgggtgtaaaaagagtatgaattttggccgggcgtggtggctcaggcctataatcccagcattttgggaggctgaggcgggtggattacctgaggtcaggagttctagaccagcctggccaacatgatgaaactccatctctactaaaaatacaaaaattagctgggcatggtggcaggcacctgtaatcccagctactcaggaggctgaggcagcagaatcacttgaacctcggaaggcagaggttgcagtgagccgagatcgcaccatcgtactccagcctgggtgacaacagtgaaactgtctcaaaaaaaaaaagtatgaattttaagacccaacgtattatagaagaagagttagctggagacttaacacacttctaaacttttgagattgactacaaaattggcgaggacatctgtgggttcagcagtaaaaatataggcaggattaaagaaggcagtagaaagtggggaaagaagcaatcaccattttggataaragggagcagggaggagaga

SEQ ID NO: 135615 - DNA, 513 bp, Homo sapiens
actatcttgttcatctccggattccctgtagctagctcagtttctaccctgttgtaagctctcattaaatacatatgaaatgaatgaatagattaattgttcattttatgatcagagtcatcagggaaattgtattttatttgcagaaatttacttaaactctgtaggtgtccctctgtttctttaggcaatatttctcaacctgttcaaactctaaaaatctcctggagggcttcataaraatcaggttccagagctgtacctaagatttcactaaattaaaatgtcaggaagtagagaggtaagtatctgtattttaatgcaatttaaaaatgctaccaggggagatgatttaagcatctatttccttaacatctcagcaccataggatcatattttaaaagcctcaacctgtatttatttcaataagatgtcaggtgactctattcagctcaaatttaaagacaggattcagttgccatttccaagtctgagggtgcctgtggtgttatt

SEQ ID NO: 135616 - DNA, 513 bp, Homo sapiens
actatcttgttcatctccggattccctgtagctagctcagtttctaccctgttgtaagctctcattaaatacatatgaaatgaatgaatagattaattgttcattttatgatcagagtcatcagggaaattgtattttatttgcagaaatttacttaaactctgtaggtgtccctctgtttctttaggcaatatttctcaacctgttcaaactctaaaaatctcctggagggcttcataagaatcaggttccagagctgtacctaagatttcactaaattaaaatgtcaggaagtagagaggtaagtatctgtattttaatgcaatttaaaaatgctaccaggggagatgatttaagcatctatttccttaacatctcagcaccataggatcatattttaaaagcctcaacctgtatttatttcaataagatgtcaggtgactctattcagctcaaatttaaagamaggattcagttgccatttccaagtctgagggtgcctgtggtgttatt

SEQ ID NO: 135617 - DNA, 579 bp, Homo sapiens
aacaaaacacaagagaaccttttggagggtggagaggggaggagggaaaggaaaataactaataactcatcggtattaggcataatatctgagtaaggaaataatctgtacgacaaacccccatgacataagtttgcctgtgtaacaaacctgcactcgtacccctgaatttaaataaaagttaaaataaaaaagaaattcaactgattcctttttccaatgaacatatgagaaacacaataattagggacacatgcacacaaccttggcactaggacaaaaaaaaaactaaacaaataaattctgtaggaagttgaagagggctgaataggaatcactataggttagtgaatagaatcagcccctctcaagtccatatttatggaattcttatttctcctacctatagcttgaacacaggagtcagaaaactcttccatttgattactctgtaatttgcagaagacaacatatgatctggggaaaaatratgtttatggctgcctttgaactccaccaattagcctcattgtactcctcttacagtactcctgtaagatgctcagggcttcacctact

SEQ ID NO: 135618 - DNA, 621 bp, Homo sapiens
  misc_feature (1)...(621): n = A,T,C or G
actttttttttcagttatctttttactgcattgcaaactacccccaaatataagagcttaaaatgacaatttaaatattcagcaataaaaaagaataaaatcattgtcatttgaggcaatacggatggaactagaggatgttatgttaagtgaaacaagccaggaacaaaanaattaaacattgtgtgttcttattcatatgtggaagctaaaaaagttgatctcatagaagtaaaagtagactacaggatactaggggctggtaaaagtaggaagaaaggagggatattggagagatttgttaaagggtacaaaatcacagctagataggaagaagttctaatgctctaaagcacggtaaggatgactatagttagtaacagtattagrtaatttcaaatagctagaaaagaggatattgaatgttcccaactcaaataaattataaatgtatgagatgaggatgaatatgtacaattattgtcaatcaaaaaaattttgatcagaaaattgatcaaataattttctgttgaaacagaaaggaggggttggatttatcgccctgcctataatctcaagttcactcagaggaatagtatctattgatctttgaattggtga

SEQ ID NO: 135619 - DNA, 501 bp, Homo sapiens
ccagcaacacgtcctttgaaacggtgaaatcacttgccaagcaaaacaccacataattggggtgatattgagattgactaccaytctatagaagtcatctgaataaatacattgtatattattatgaattaggatatcaacactaacgggcaaacattattgagttcttacagaatgctagaccctgtattaagggaattatataattagctttcattaaccctcagaataaccttgggagaggcacacacggttccagtttaaggatgaagaaagcaagtgtcaaaaagttgaaataatttgctcatgccctcagctcccacagagcaatgctgggatttgaacccaatagttttgcatgacgcttaacatgacaatagaccttgatgggcctctaggctatgtgtgtaccaatctggggaagccacctaatcctgcagtccatgggaatcattggcaactgactttggaaaaagaagcacgggcctctttagtggcaaa

SEQ ID NO: 135620 - DNA, 506 bp, Homo sapiens
tgcactgagtgagcttcctattttcattgcttctattctagtctgagagcaggcaccaattgcaccagtccagaaaggaaagagccagagagggagtcctccagattgtgtatgtaaactctactcacatctctggttggctcctgaaccatacacacatgggtggactccaagaagtctagcaaaggctaaaagaactgtacagagaattgagtttctgcctaccaaaggagagagagtacttgcactccaaattcaactaagttaaatagttgctaaaaccaaagacctgtctatgtatgtatgtatgcrtgtatgtatgtatgtatgtatgtatctatctatctatctatctatctatctatctatctatctatctatctatctatcttctatctatctatctatctatctatctattatctatgttatctatgttatctatctatctacctacctacctgactacctatacatctgtccatctgttctcttcaagggaatgt

SEQ ID NO: 135621 - DNA, 506 bp, Homo sapiens
tgcactgagtgagcttcctattttcattgcttctattctagtctgagagcaggcaccaattgcaccagtccagaaaggaaagagccagagagggagtcctccagattgtgtatgtaaactctactcacatctctggttggctcctgaaccatacacacatgggtggactccaagaagtctagcaaaggctaaaagaactgtacagagaattgagtttctgcctaccaaaggagagagagtacttgcactccaaattcaactaagttaaatagttgctaaaaccaaagacctgtctatgtatgtatgtatgcatgtatgtatgtatgtatgtatgtatstatctatctatctatctatctatctatctatctatctatctatctatctatcttctatctatctatctatctatctatctattatctatgttatctatgttatctatctatctacctacctacctgactacctatacatctgtccatctgttctcttcaagggaatgt

SEQ ID NO: 135622 - DNA, 548 bp, Homo sapiens
cctggcccccctctggcacccacccccactttttacaagggccaactgggttgcaaggttaaagccagaggggaccaattggtgttgtggggcttttttacaaagtgcaaaggatcaaagtaattagcaaagggcgagagaccaggcctgttagagaaagaagccagccacccaaygctttctgcacacacgtcttgtcttccccaggcctgctgttaatgcctgcacggatcatggctgaatggcacatggcagcgtgcagagtgctggagggggctcctttgctctcaggcaggaagtaaacctggaagggccaactctgagcttagagagttttgtgggatcttcaggcagcccagaaggaagaagagaacttcttggggagtctttctgagacatttcattgcttccttcctgttttagatggaggctcaatgcctggccagacccagacctggagaccaggataaggaaataatgccttccactgaggccatctaaagcttatcagctgtgattatggcagggcaagatgtaagagagagcaa

SEQ ID NO: 135623 - DNA, 635 bp, Homo sapiens
actacctctctggccagagaatcctggtagtcactaaagagaggaagcttactgyattatgcatctgtgttttgccaactatccagcattgtactttgcattcattaatgcttgcaatcaccttgggtagtgagtgggtattagcggcattcattttatagatttattttctaagtaagatctaccacttattggattcttactatgtacagtgagacagactaaagataggtgtaagttctttgacattccttccattgagaaatgtgatctagatcccctcccattgaatcaagagagaaaggtgatctgcgattgctttgaccaatagagtatggtggaaatgatgcttccacttcttgtctttggggatgctcactttggtgcaagccaaacaccatataaggagtccaactacctgacactgccatgctgtgaggaagcacaagccacatagagaggccctccagggactctggggggataagatgccaggtggagaaaaagaagctcatgtgaatgaaaaagacatctgagaattaaatcccccaaccctaacttagtgaagttagcgaatcctcagctaaatccatgtgtatagtaggtgaaattcccagctgtctttctcacattct

SEQ ID NO: 135624 - DNA, 635 bp, Homo sapiens
actacctctctggccagagaatcctggtagtcactaaagagaggaagcttactgtattatgcatctgtgttttgccaactatccagcattgtactttgcattcattaatgcttgcaatcaccttgggtagtgagtgggtattagcggcattcattttatagatttattttctaagtaagatctaccacttattggattcttactatgtacagtgagacagactaaagataggtgtaagttctttgacattccttccattgagaaatgtgatctagatcccctcccattgaatcaagagagaaaggtgatctgcgattgctttgaccaatagagtatggtggaaatgatgcttccacttcttgtctttggggatgctcactttggtgcaagccaaacaccatataaggagtccaactacctgacactgccatgctgtgaggaagcacaagccayatagagaggccctccagggactctggggggataagatgccaggtggagaaaaagaagctcatgtgaatgaaaaagacatctgagaattaaatcccccaaccctaacttagtgaagttagcgaatcctcagctaaatccatgtgtatagtaggtgaaattcccagctgtctttctcacattct

SEQ ID NO: 135625 - DNA, 635 bp, Homo sapiens
actacctctctggccagagaatcctggtagtcactaaagagaggaagcttactgtattatgcatctgtgttttgccaactatccagcattgtactttgcattcattaatgcttgcaatcaccttgggtagtgagtgggtattagcggcattcattttatagatttattttctaagtaagatctaccacttattggattcttactatgtacagtgagacagactaaagataggtgtaagttctttgacattccttccattgagaaatgtgatctagatcccctcccattgaatcaagagagaaaggtgatctgcgattgctttgaccaatagagtatggtggaaatgatgcttccacttcttgtctttggggatgctcactttggtgcaagccaaacaccatataaggagtccaactacctgacactgccatgctgtgaggaagcacaagccacatagagaggccctccagggactctggggggatragatgccaggtggagaaaaagaagctcatgtgaatgaaaaagacatctgagaattaaatcccccaaccctaacttagtgaagttagcgaatcctcagctaaatccatgtgtatagtaggtgaaattcccagctgtctttctcacattct

SEQ ID NO: 135626 - DNA, 333 bp, Homo sapiens
cttttttttgttaaaatctttcggagaaagcattttacaagaaaatgagtctctggtctcaggcttcatcttatccttcatggctaggatgctttattcctagatgggtaggtcccaaaagctcattttagcagattgtgaagtctcatgtcctgtgaagagaaaatagcagggaggaagggagaaaaaatgacaaaygaaagaacaatccgggaaaaatcgacataggccaccttactctgaagtccatacattagtaggcagatatgaaagtggtttatgtataggttgtataccacactttttttatctgttcattttctgatgaacatt

SEQ ID NO: 135627 - DNA, 463 bp, Homo sapiens
ttgtattctttatcaccagcagccttctggctcctcccagagctccatccaccagcccagaggtgacctcaaagaaaccataagacctctaagccatatgtagaagacagcctcagtccccacggagggatggcccctgctccacctttacacagagacctcaagttttcaggaggctctggacccagttcttttctaggaaagcagcttcaccaatggatgctcaagtcaaattttaggagcctggttcttcccragcccttgaaaggaaaggagagaaggaagtcagagaaaaatctgatggggtaggcaagttattctcccactctggagaggaatgatactcatgggacaaccaggtggcagtaagaagtggcccaggagccagacatccaggtatcagtgctgctctctgagccacagtttctcctctatcactgtgaagcaaagactggatcatccc

SEQ ID NO: 135628 - DNA, 561 bp, Homo sapiens
aggtgaaagcacagggtcaccgtaagccaggttgggtagggccccataggtcattgtagactttagcttttgttcttagtgaactgggaagccatggcaggttttgaataaggattggcaggtctggttgaagatggactccagaggaacaagagtgcaggcagggagaccagtgtgtggaggctcttccaatagcccaggcaggagaggatggtggcctagccagggtggtagcagtggaggtgggctaggaagaggcttctggctgtaactaaaaggtggattcaccaagctcctgttgatacgttgggtgtggggtgtgagggaatgaggggggttaaggaagactctgaagggtttttggtttgaacaacgaggaggagttgtcttaactgagacgggaaataccgtggaaagagcaggtttggagatggcaggaaaatcaggactccagcttgggacatgcaaagttcgaggtatcttttaggtgtccaggaggacatgttaacyaggccattggatactcatttaggagtatctcggattcaggagagaggatgg

SEQ ID NO: 135629 - DNA, 536 bp, Homo sapiens
gaagtaaatatcctacgagagctgatagtaggagaacgtcatctagcttggggtttcaatggtcaggtcaagtctccccaaggaagcgagacccaagaaatgcctgtcctattttcttactgctctctgagtgcttgtcaccaacattctcagattttaacagaccagattgcctgaagataatgaacttagaaaggtcagcatttcctccagtctgtcaattcaataaactgacctccgatagaataacattcctggtggagcagaacgctgcatttgtggtagctgtaatgattgtccacaaacattccagttccctttacgggtgggtgttaagattgtagtttcctgctcctttggggttagatgtggccatgtgcctggctttagctaatgaaaaacaaacagaagcaatgtgggtgtgtaacttccaggtgaaaaccttaaaatgtcagttttattmttatggtctccacccctttttctgcctcatcagttttagaagcgtgtgttgagagggtgcttccagggagaga

SEQ ID NO: 135630 - DNA, 582 bp, Homo sapiens
gatatggggcgatgcactggtctgggtytgctggcagcccgagcagaaagtgccgttctctgcctctgtcatccctcccattgactccctccctctgatggttattctggccagaacaccagcaatgaatcctgacctcacgcaggcaccagaattgattcctaaggaattcagctgcctcctcgccagtgatatacgagcccctcagcaaagcacttgagcccctcgatgctcccctccatgatctggcccctgcccacctcatgggaattcccttcaactcagtgtgccagccacggccaaccttcttacaatccccacaatgcaccatgagttttcttgcctctgtgacttggctttttctgttccctccagtttggacttccctatgccctcctcttccccaccccctagccaggtcacctaatgaccatcagctcgtctttcaatcatcctaggtcagctcaacaatgaaggctttcctgacatgccacccaggtggaatatccaatttctgtttgtgccatcagtgtagcatggatggacttctcttagagtacctgtaacactcatgaacattgt

SEQ ID NO: 135631 - DNA, 591 bp, Homo sapiens
ccaggaatgatatggggcgatgcactggtctgggtttgctggcagcccgagcagaaagtgccgttctctgcctctgtcatccctcccattgactccctccctctgatggttattctggccagaacaccagcaatgaatcctgacctcacrcaggcaccagaattgattcctaaggaattcagctgcctcctcgccagtgatatacgagcccctcagcaaagcacttgagcccctcgatgctcccctccatgatctggcccctgcccacctcatgggaattcccttcaactcagtgtgccagccacggccaaccttcttacaatccccacaatgcaccatgagttttcttgcctctgtgacttggctttttctgttccctccagtttggacttccctatgccctcctcttccccaccccctagccaggtcacctaatgaccatcagctcgtctttcaatcatcctaggtcagctcaacaatgaaggctttcctgacatgccacccaggtggaatatccaatttctgtttgtgccatcagtgtagcatggatggacttctcttagagtacctgtaacactcatgaacattgta

SEQ ID NO: 135632 - DNA, 582 bp, Homo sapiens
gatatggggcgatgcactggtctgggtttgctggcagcccgagcagaaagtgccgttctctgcctctgtcatccctcccattgactccctccctctgatggttattctggccagaacaccagcaatgaatcctgacctcacgcaggcaccagaattgattcctaaggaattcagctgcctcctcgccagtgatatacgagcccctcagcaaagcacttgagcccctcgatgctcccctccatgatctggcccctgcccacctcatgggaattcccttcaactcagtgtgccagccacggccaaccttcttacaatccccacaatgcaccatgagttttcttgcctctgtgacttggctttttctgttccctccagtttgracttccctatgccctcctcttccccaccccctagccaggtcacctaatgaccatcagctcgtctttcaatcatcctaggtcagctcaacaatgaaggctttcctgacatgccacccaggtggaatatccaatttctgtttgtgccatcagtgtagcatggatggacttctcttagagtacctgtaacactcatgaacattgt

SEQ ID NO: 135633 - DNA, 603 bp, Homo sapiens
agatctgagaggccaggaatgatatggggcgatgcactggtctgggtttgctggcagcccgagcagaaagtgccgttctctgcctctgtcatccctcccattgactccctccctctgatggttattctggccagaacaccagcaatgaatcctgacctcacgcaggcaccagaattgattcctaaggaattcagctgcctcctcgccagtgatatacgagcccctcagcaaagcacttgagcccctcgatgctcccctccatgatctggcccctgcccacctcatgggaattcccttcaactcagtgtgccagccacggccaaccttcttacaatccccacaatgcaccatgagttttcttgcctctgtgacttggctttttctgttccctccagtttggacttccctatgccctcctcttccccacccyctagccaggtcacctaatgaccatcagctcgtctttcaatcatcctaggtcagctcaacaatgaaggctttcctgacatgccacccaggtggaatatccaatttctgtttgtgccatcagtgtagcatggatggacttctcttagagtacctgtaacactcatgaacattgta

SEQ ID NO: 135634 - DNA, 534 bp, Homo sapiens
aggttcgggcagatcaaaggttgctcctgattcagtgtgtgttgggacaaacccagaagctaatggggactgagggccattttgaggggtcagtggctgagatggtgggaatccttctcattcagggcaaggaagcaactcttggattctagataataatgagaccagggtcctctctccaaggggtgaaatgagaggggtttcaagctcccygcacgtgaaatatactagttgtatattaaaatgagggtggcggaggataggctggactattacctaagatccagtcctttctgaatgcaagacattgcctcatcatttaaactcttcacatgatggaaaaggttcagcagttgtccactatgactatcttaatgcacctggattaattaattcttttctttaattagttattaatttgttcatcaaactactattcaatccatatccctagcccttcattcaacaaacaagtaccatgagcacctactgtgtgccagatgcaagactaggcatggtaggcattgcagtaca

SEQ ID NO: 135635 - DNA, 415 bp, Homo sapiens
tttggctgtgtgggctcatttttggttccatatgaattttagaattgttttttctagttctgtgaagaatgatgatggtattttgatggaaattacattgaatctgtagattgctttgggccatatagtcgttttcacaatattgattatgygcatccatgagcatgggatatgtttccatttgtttgtgtcatctatgatttctttcagcagtgttttttagttttccttgtagagatctttcacttccatggttaagtatattcctaagtattttattttattttttgcagctggtgtaaaagggatggagttcttgatttgattctcagcatggtcattgttggtgtatagctgtgctactgatttgtatacattgatttagtatcctgaaactttgctggatttatttatc

SEQ ID NO: 135636 - DNA, 526 bp, Homo sapiens
gaattcaggctttaggagctgaggtgtcctggtttttgtttaactgagagattgtttcttgggtggaattggtcctgggaggctatrgaaggcatgtgagctgtcttattcagattgacatctacctgcttcaaaatgttcatctaacattggtgctcaggggccacattttgggagatgaggggtaggggtgtgatttcaattatgtgcgattaattatgtttaaaattataaaatagtaaaaacctgaaaagctaaaagttctattcagtggagcaagtccttttatttgatctgagaccacatgaaaatgaagctaagagctgtagaagatcactccagcaggtgcctaagggcaagtgaggattcaaagctgcatttctttgtggagaggagcctcctaaggtctgagtacctttgatgacccttatttgtatgggaagcttcacggcttgtgatgaatctttttagggagaaatggtgttgaacaagcttagctgtttgtttctcaaacccctctttgttg

SEQ ID NO: 135637 - DNA, 440 bp, Homo sapiens
ttactgtacgacagatcagtgacacaaacataagcggtggagtccacagaggggcaaacacaggagaytgagctgctgcttggggcaagaaaggctcgttggaacttggggttctgagcatgaaacctcgcattccccattcaagcaagtcacaacatctctgcttcttcagatgtagagaataacaaaatccttagaggccaagcttggggaaaagaaaagaaatggtggtatccaagtagtactgaagtagtattgcctttggaaagtaataactaagggagaaaagaagcatgattccatagttggtgctggatacaatctgaagcatctaataaatttatgtcactgtagaaatttcgattccactttgatggaaatgaaaagaaactataggtaacataacacatggtatttaatcataaggcttgaaagaggat

SEQ ID NO: 135638 - DNA, 510 bp, Homo sapiens
tgttttttttgtttgttttggtagagcacatttttgagacttttttmaaaaatgcatgtaggagataacatttccctcgattgatcctttacttggtcataaaaccctaggttcaaaatagtttcctcacagaactctgaaagcattcctccattgccctctaatatctaacatttagctgggtgtggtggtgcatgcccatagtcccagccacttgggaggctgaggcaggaggattgctacagcccaggagttagaggctgcagtgagctatgatcgtggccactgcactccagcctgggtgtcagagtgagaccctgtctcaaacaaaaccccaaaacctctaacatagttgatgagaatcctgctgccaatctgatacaaattcatttgttaaaaacctgtttttcaatcttttgaagtttttcagatttttctatttgtctttaaagttctgaaatttcatgaagatttatctagggcttttgtagttgatgtttgttggaattc

SEQ ID NO: 135639 - DNA, 576 bp, Homo sapiens
ttaattttgcggatggtacaattttacccggtttcccataattagaaaatgggacraggaaatgccataaggttaagctcgttcctctgagcagattcttttctgcagcagcaggtccccctataaatatgggtctgtgataatctgagtaatggcccccaaaagatgtctgtgtctcagtccctggaacctgttactttacatggtcaaagagactctgcggatgtgattaaatgaaggatcttgagatggggagatgagcctggatgggttctccaatcctcacaggagaccccacacccctttccacttccagaccacgaggggaggggctcacagactagaaagccctctgcaaatgctaccctgagcccatatcactattgcaatcactggtaagaatctggggacaaaggtgagtgggatctcagacagatatctctccaagttgggatataactgaaatcggcactgattacacctgacattggatacccatataaccaatggtttatgatcacagaacagcaaactctcccatcaaaatcagggtaaatataccaagatatttgtaga

SEQ ID NO: 135640 - DNA, 572 bp, Homo sapiens
cagtctgcagcattactctaagcaggaaaagacccatgattccctgtagtgtcttcagctgcctctattaatccattgtcaaaatcatggcaacaggacacaaggcaaatagcagttttgtatcatcttgcttatgaatatgatcatgagtaagtgctagtagtctccccttatgcaactgggttttataagcaatagaccagatgtatatgcccttacattataaatgtacctttaaaagtctgatgtctaaatcatgataaggaatcatttccaatgtataaaacttaaaatttccagaacagagagcaatatttatttctaccagctttctctccattaaataattgtttcaatatcaggatgtgattggagcttgaagaagcttctcttgggatatctaagaatggaatccattttgattaaatttactggtarttgagtcagtatgtaaatggcatcaaataaccaactggtcaatctccttgaatgaatcaactagccaaagtctaagtaacaatggcttaggaacagatccagattgtgtggggtctgaggctgttatgatttgg

SEQ ID NO: 135641 - DNA, 597 bp, Homo sapiens
tttgggaggccgaggagggcagatcacgaggtcaggagattgagactatcctgtctaacatggtgaaaccctgtctctactaaaaatacaaaaaaaaattagccgggcgtggtggcacgcacctgtagtcccagctactcgggaggctgaggtaggagaatcgcttgaagctgggaggtggaggttgcagtgagccaagatccgcaccactgctccctggcctgggcaacagagcaagactccatctcaaaaaaaaaaaraaaagaaaagaaaagaaaagaaagcaccatgtacaggagaagaggttttttttttttttttgttttgttttgttttgttttgttttgttttttaatttggactttctaggagggcagtgggactatatttacctgctcccccaccctagtgtgatgactttgtaagattgtaagtacacaacctcaggtcgacccatttgaaatgttcatggtgcaattaattaactgatgttctgtttatataatgttctctcctctgcccaccagtaaataaaagagaaaaaagggaaaacattcttaaaacaaccattttattcttggaagcaaccgtatttcc

SEQ ID NO: 135642 - DNA, 608 bp, Homo sapiens
aagggtatgggaattgtgtgcaaaagtctacagcaacactgcctgctgtggtgggggacaattgttgtacgtttgtaagggcactggctgtgccagaaatgcctgagtttattgaggtgctctctgaataaacaagcctcagattccactgggtcttagtactaccaattgctccaggttttaatgttgtaactayaggagtggtaagttttgtagctaattcattttctcgcccattaaggggagagagaggaggtggccattcacttaatccagcagttggagctgaggggatagtaaaacatacttttttgtttcccttttttttctttaatttcctccagtttctgttcctcacattcagaatctgaagttagttttttacacttgtcctccacttcctcatctgaatctgcctcatcatctgtttgaaatggctcaagagctgcttttattagcgcccacatggaccaaactgagactggaatttttgctccatccttatatgctttttaaaaatctctgccaattctctcccattcatccaactccatagtcccttgttctgggaaccatgggcaaaactgctttactgcactaaagagtga

SEQ ID NO: 135643 - DNA, 222 bp, Homo sapiens
ctaatattcctgcctgagtcagctgagattacacatttaataaacasttatggtgcaatgacaatatagttttcaataaaactctgttcttaataaaaccataattattcacgagtttgtgattactaacatttatatagatttttttaaatgtaatttaacttaaagttctagaatacaagtgcaggacgtgtaggttagttacataggtaaatgtgtgcc

SEQ ID NO: 135644 - DNA, 591 bp, Homo sapiens
tctcttcttcctgcggcagttgattggttttctggatcttttgaagctacaaatcttccttgatatagagagtatgggctgcctcttccccaaggagtgactctagacatttttccccaaagttacagtcttctacctacttcgtctttatctcctcgtatgtttttagaatatttccctttcagattctctttgattatgatacatatttatgtatgataatgatttcatgaactcttgacttcaaaattgggacagttccagttcatacctgtggtatcagcataattattaatggcacccrtttttgttcccagagttgtcttggtttggacaatatattatatcaatatatagtcatcctcactgtatgcattcacttctgctcttttgtcactgaacttctgttctgccagtttttatctctcatggtgaggagtctcaggtggcattgcattcttagtgcatccccagggaccctcatcatgaactgccacatctggccattgaattcaaatttgggctttgcagccactgtcttttcctacctgagcagacagactaatttatctaggtgacacaaattagcaa

SEQ ID NO: 135645 - DNA, 337 bp, Homo sapiens
tcttacttccaatggtagtaactgtcaatcggcagttcaataatttttgctttagtttttaaaattctgttttcaattcagtgtttatttcttaagaaaatgtaaaaaatgtggggttattacaaagataccagatctaaaaccagagattaaattttggcacctcatctttatgcacctgtgatgtcttcagcattatttcagtgtttcaaagagttgttactattattagcatgtgaataatctgagggaggaatttaaaaacacattttcaaacactttatatatctttctgcacwtgggtcatttaacagccaattacacaaaattcaagctt

SEQ ID NO: 135646 - DNA, 441 bp, Homo sapiens
ttatcactgaaactcactacaagctaatgtttacccatttttataaacttttaaagaacagcatctcgtcacccccatagtgccaaatattatctctgtctacattctgttcatcttagaacagtttcttttctctctgtgtcgatttcttgtcatgctaagtaattattgtatagacctcttagtttcacatgaacatcatcttcctttagctctgatgaattttaattrtctcctaaaacttccccttggcttcagtttctcaaagagatcaataaaaggtaatttgaattctttacataattgacagtgcctcatttctcttagagatgagctgacttgacattagacctaagtcttatctatttgacatgcacgagatgaatgaaaatcatttagtctgtattattctcaaagccatctcattattgctatgttaaa

SEQ ID NO: 135647 - DNA, 441 bp, Homo sapiens
ttatcactgaaactcactacaagctaatgtttacccatttttataaacttttaaagaacagcatctcgtcacccccatagtgccaaatattatctctgtctacattctgttcatcttagaacagtttcttttctctctgtgtcgatttcttgtcatgctaagtaattattgtatagacctcttagtttcacatgaacatcatcttcctttagctctgatgaattttaattatctcctaaaacttccccttggcttcagtttctcaaagagatcaataaaagrtaatttgaattctttacataattgacagtgcctcatttctcttagagatgagctgacttgacattagacctaagtcttatctatttgacatgcacgagatgaatgaaaatcatttagtctgtattattctcaaagccatctcattattgctatgttaaa

SEQ ID NO: 135648 - DNA, 495 bp, Homo sapiens
tttattctttttttctcaggattgctttggctattcaggcactttttggttccataaaaattttaggactgtttttctctttctgtgaagaggaatgctgcattgaatttataaatttttttggsaagtattgccattttaacaatattaatcctttcaacccacgagcatgaaatctcttttcattttctgattgtcctcttcaatttctttcatcaatgatttataattatctttctatagaactttcacttcttttgttacattgattcccaggtatttaatatttttctagctattgtaagtaggattgctttcttgatttttttaaatattgtttactattggtgtatataaatagtactaatttttgtatattgatttgtattgtgcaactttactgaatttatttatcagctctaagggtttttttttggtggagtctttcgggttttttttaggtataagatcatgttatctgcaaccaaggctaat

SEQ ID NO: 135649 - DNA, 588 bp, Homo sapiens
aaatttatttttctttaaaaaggaagcaaggaccccgatatctgggtctatgatacctaaataagccaaattattcaccagtggttctcaactggggttcataggggacattcagaaatgtccaagggcttttagatgtcactatatctgaaagaaatgstagcatttagttggtggggccagggctgcttaatgtcctgacatgtacagtctcacacaagaaattattctacctcattggtctcttggagaatatcaccatagaggcagctgaggacaaaggccaaggtgggctgtctcacctgtgcagaactaatcctttatttccttgccttatcagtaataaaacaccaatcatctatctatttggaaacaattgatatcttggcagctggaataaataaatgacttgctttaaaaaatagccaattcttcctttccacgtcaattggaagtgaattgtgcacattcacatacagtcatggttttgtgaaaggagatctcaggagtggaggtgaactgtgcacttcctaatactgtgggtctgggatggggagtatgaagttatgccacaaacgatgtgactct

SEQ ID NO: 135650 - DNA, 503 bp, Homo sapiens
aatcaatggggatatctagttaaggagatttctgggcagagtgttgaaggtgcctcctgttcttctcttcttgcgtctagtaaaatacaagaggagagaaacaagtcagagaaaaattataatatataaagcagtgaagacctggtgggttttaaagtttgcagcctctttggatggcaaacaatgctaaaatttaaaaaaattggcttttgaacaaagatcaaattcagggtactctcaggaagatatagtataaagatgaacctgagggtgtgactataatatgctttgtgaagaagttagagaaccagatggtgagataaaaggccctctaaggaatttaagggtgggcaacttcataacraacccgagccaggaccacttagctaagccactcctgaatttttaacctacagacaaatcacgagagataataaatatttactgctgctttaaaccattaaggtttggtttaatttgctgtgtagcaatagataataagt

SEQ ID NO: 135651 - DNA, 486 bp, Homo sapiens
gactgggtaaagaaattgtggcacatatacactatggaatgctatgcagccataaaaaagaatgagtttatgtcctttgcaggggcatggatgaagctggaaaccatcattctcagtaaactcacaggaacagaaaaccaaacaccacatgttctcactcataagtggcagttgaacaatgagaacatatggccacagggaggggaacatcaaacactggggcctgtcagggagttgggggcaaggagggataccattaaaagaaatacctaatgtagatgatgggatgatgggtgcaacaaaccaccatggcacgtgtatatctatgtaacaaacctgcatgttccrctcatatatcccagaacttaaagtataataaaaaaagtgaaaaaaagcattttattaaaaatattttgacaatggttgttataagtaactatgtttccatttttcaacctagtttgactataattgcattaaacaaag

SEQ ID NO: 135652 - DNA, 349 bp, Homo sapiens
cactgtaccttagcgtaacagtttatttatttattggctgtgtaacagttttatttttatgtcaatgttttaaaaacattggaaatcacaactttataactgcttcagcttatgataaaaatatagatattgaaaatatctgaaggtccatttttttaataaaattaggagttatctgagccagtgcaatgtgacaagaaaaaaatgaagcgggaggattttcaataaggaaggaaggagggaagaaaagtaagaaacacagaaagaaaaaagatgttggatgtgcrtaatatgattgactatgtcttaagttcaaaagaatcttgaaaatgttgaaactaaactgatc

SEQ ID NO: 135653 - DNA, 349 bp, Homo sapiens
cactgtaccttagcgtaacagtttatttatttattggctgtgtaacagttttatttttatgtcaatgttttaaaaacattggaaatcacaactttataactgcttcagcttatgataaaaatatagatattgaaaatatctgaaggtccatttttttaataaaattaggagttatctgagccagtgcaatgtgacaagaaaaaaatgaagcgggaggattttcaataaggaaggaaggagggaagaaaagtaagaaacacagaaagaaaaaagatgttggatgtgcataatatgattgactatgwcttaagttcaaaagaatcttgaaaatgttgaaactaaactgatc

SEQ ID NO: 135654 - DNA, 547 bp, Homo sapiens
cagttgctaaggtagcataattgtttgtctawtttttatcaaagcagaaataaactagcttgaggtttttaaataacagtttacataacaataaacattcagttggctcatgattctgttgtgttcagctgacttgtgctgggatagacaggtctctgccaggcttctcatgtatttatggtcagctgaagatttactgaatggggctgggcatgctcacatggagggctggaaggctattggctgatcgaggctggccttagctgggacgtggcggtaactgggctgtattccagtcaagctagcccaggcatattgttttggtggtggaggaggttgaagagttcaagagttttaaattaaacaaaacaaaacaaaaacagtgcagagttataattatcctaatcaaagatgcctcaaaatttaagtgtatacacagatacgccagagggagattcattctaatgtctgccaaaaaacaagttaaagtgacagtacaagttaatgagttgatagtctctaatatattacaatttggtgtatgaca

SEQ ID NO: 135655 - DNA, 588 bp, Homo sapiens
aaatttatttttctttaaaaaggaagcaaggaccccgatatctgggtctatgatacctaaataagccaaattattcaccagtggttctcaactggggttcataggggacattcagaaatgtccaagggcttttagatgtcactatatctgaaagaaatggtagcatttagttggtggggccagggctgcttaatgtcctgacatgtacagtctcacacaagaaattattctacctcattggtctcttggagaatatcaccatagaggcagctgaggacaaaggccaaggtgggctgtctcacctgtgcagaactaatcctttatttccttgccttatcagtaataaaacaccaatcatcyatctatttggaaacaattgatatcttggcagctggaataaataaatgacttgctttaaaaaatagccaattcttcctttccacgtcaattggaagtgaattgtgcacattcacatacagtcatggttttgtgaaaggagatctcaggagtggaggtgaactgtgcacttcctaatactgtgggtctgggatggggagtatgaagttatgccacaaacgatgtgactct

SEQ ID NO: 135656 - DNA, 550 bp, Homo sapiens
ttgccagccaaccattagaagcaaggagagaggcatgaacagattcttcttcacagccttcagaaggaagcaacctggctgacaacttgatcttggacttctaccctccagagctgtgaatcaatacatttgtgtttgtggtattttgttatgggagcccaagctaactaatacagcagtcawcaacacatccatgttatttgtgattgttctgcagccttgagtgttaccttttttttctcccacttttccctgaaaccttctgaaattggatgttggtttccttagagaaggtgtgtatgatggtaagtttgggggaggcctgggtaaggaggggcaggataaggggtgttttagggtgaatgcctgagccagcagaggatggtgaatggtggcctggagagaagaagccagagagaaaaagacagtccatgcaaatggaccccaaaagtgaacaggagtagctatttttatatcagacaaaacaaactttaaggcaacagtggttaaaaaagacaaagagggaaattatgtaatggtaaaaggcctt

SEQ ID NO: 135657 - DNA, 535 bp, Homo sapiens
ctgtcagctctccctcttggatatttattgagaggagccctctgtaaacttctcagtgtcattgactttatttgaggtttcattatatacagagtttcttccccttggttttggaagagctttgggcataaaaaacttttgagaagttcatctttgtcttaactggacaaggcagagaggcttttggtggctctggcatgtggagcagctaytagaacccaatgagaagatctgccactgaacccgacagtatacagggccagttgtgacagtggcaaatggtgtcctctctcccaaaggggagtcaccaccgaccttggttgtttactgatcaagggaaactgtgactgaccaggcttatgttgtgttttgtttctgttttcctctgataatttcctggcactactgccatcttccgcttaacagttactgttgagcaagatgtgattttaggcagtatgtgatgatcaaataaggaaaaagtggtctttctattcttggagattttaggtagacagaaaaattagaatggacg

SEQ ID NO: 135658 - DNA, 498 bp, Homo sapiens
acatgcagggatatttcaatgacagctcagctcactgccctttacccactgggcccatcaggcagggctgacaacagagtacaggagaccccacaaaggaaatagcctttccttgctggacatcagtgcaggcaagcccttactgaaattttgatttgggaccaggcttctgtctaattgtattttcccaacttcccgagtaccaggcccatctgcccttgtggacrtgcttcctcaaataccctctaagctgctcagcacattggctcttggtggtgaaggggatactgatgtgacgtcagcagccgctgctgcctctaacccttttcctgtgataacctcaagaagcctcagggcaaggatgcagcaaagaggaggcccagggtgcagacatcagccagaaggactggaatataacccagccgctccttaagatgagatgcttatgatgggaagacttctggaccagcgtggatgaggcctcagctgtgaagggtg

SEQ ID NO: 135659 - DNA, 570 bp, Homo sapiens
agctcaagataacttataaggtcatgtgtatgcctaatcagtgtctattggtctagccagccagccaaccagctaatttttacctcttagaaaagggatttgaaaagtcttgacatctgatcataaaccagtggtttgccaccaatccaattcaattcaaagtgattcaattaataaamcaaaattttattcattacctgttgtaacattaatatcttaccaggtacaaccatggttatataagaaatgaaaggtacaatccctgattttgatgagctctacagttagctgttgtcttgtatagatatttctacataagaaatctctagagacaactagaactgggctatgtataaatgtgcatatagaattcagtctatagttcagagccctttgttggttcttccttctctgactcatggcttctgagaaatgataggatccaaagttctgtctctagttttctccactttaggtctgagaacaagaaacaataactgctttccttagagaagaaataacatatagctgcagagggaataagatgtttcctagttaggaaggaaggaa

SEQ ID NO: 135660 - DNA, 441 bp, Homo sapiens
tagatgaaggataccatggacagtgaatgagctgatgacaattgggagaagatagtttactgtgtctaaaactgacagagcactgttatttagaattcacaggaaattcttgcaaatcaacaagcaaacgatgagaactccaaatgaaatacagggaaaggttatgaataggtaacttataaaagaggaaaccttaacaactaacaagtatatgcagaaataatccaaatctctttaaaatgcaaattaaaatgttactttaatgtagtagactgacaaaaatgtggaggttgaataatgtttgttgaggctgyaggaatatggaaaatctcatgccaataagaatatatattttggccaggcgcagtggctcacgcctgtaatcccagcactttgagaggccgaggctggcgaatcatgagttcaggagtttgagaccag

SEQ ID NO: 135661 - DNA, 626 bp, Homo sapiens
agtctattgttgtaatgcattatgtatattatatgcacaactgtatatattttaaaagaatgagaaaaataaatagaaatagaagctacaatacttttgtactgcatccttgtggagtcgtgggcagacattaggcactcataattcactctggcaatttgtgctcttcacagcctgcttgagagataagataggtgttgtcacttccgtcgtatggatgaagaaccatggtgaagattgtttgagtgatttgatsagggctgggatagtaacccgtgtcttctgaatcaattacagtgcattcgcttttcttccctcttgtccccaacatgggccctgtgtttctgtggcccacccttccctccatcccctgttccacggctctccatgttgattgcatctgcagaggatgacaccttgactcttgattagtccaaatcagtgttagtgatcccatgcctcctttccagatgctctttttcccagcctcccttgcagcttggagtgtccacatgacccaattctggccaatcagacatgcaggagcactctgagaagtttcacttgctgtcagaagggagcactggggaggagatgcaaagaaagtaggaagagagactgggtcc

SEQ ID NO: 135662 - DNA, 642 bp, Homo sapiens
gttcctccattttttagaccatatagggaaacttgtggatgttgccatggcatttgtaaactgtcatggtgctggcctgagtgtcttttaccatgatactgtattataattagcatataatgagcagtggggacgacccgaggtcactttcatcaccgtcttggttttggtgagttttggccagcttcttcaccacatcctgttttatcagcaaggtctttatgacctgtatcttgtgccaacccatatctcatcctgtgactaagaatgcctaaccttctgggaatgtagcccagtaggactcagcctcattttacccatcccctattcaagatggagtcactctggttcaaacacttctgacagggtatrttttactctgcaaactaggaaataacagattaaggtttaaaagctacgttgggtatttattggaatgtttaggagaatccttggtcttggtcttgggtgagaacatgcctaaccttgggtcagagcacatttctcttggcccagggctaggaacagagaactcagactgcctggcagcgtctctcactgttatcagtgttgtctacctccatgtcccactcctgggctctctccacaagcaaaacccccaaatacatacaaaatggtggg

SEQ ID NO: 135663 - DNA, 493 bp, Homo sapiens
tccatttgtcaattttggattgtgttgcaattgcttttggcatttgcatcgtgaagtctttgctcatgcctatgtcctgaatggtattgcctaggttttcttctagcgtttttatacaaatctgcgtgttctgaacatgtatcccggaacttaaagtaaaataaacaacaacaacaacaaaaataggttataggttacgtccccatgctattcagwcttatttagctttccaaatacccctttcctttaaaaactcatctctacttcctcagcctcaaggcttccttagcccatacgttgttttcatctcttgaagcttgtttcatctcaacagactaatagaatttcctctgtatgtgctctcctaactgtatgcaatttctgttttcaataaattcagctaaactgtcccagcttattggctgtaggcatattcaaaacagcatttagcatagccacaaatgcaactcagattttattctacagaattatg

SEQ ID NO: 135664 - DNA, 549 bp, Homo sapiens
actatcacaaccaatgactcatgaactgctatcatcagagtctatgttagttccaaacaaaattgaaatcccatatgaagttttctgtttgaagctgcatgagtttcaattgcaagatcttgctgctgcttcctcacatctgctaaccacttaacattggatctgccatccatcttgtttggccctctgacatcttcagttatcatcatttttaagtgttctattcttgcgtgtttaatcatccacacatttattttgtttttcgcacacagtgaacttattttgggacttctgttctgaatcgaatccttccattattctagtgtgatacccttgaatttcccacagtgtccaagaacactttgagtgtaggagttacataaacgaaaatcactttatatttctgcattactgtttcccttacaaaaacctggggggtatccagtcctggaaacatagttcagtgtcagaatcattttgtaaatttctggttcaacaccaatgcttgtaagtytctgttactcattagctcataatgtccaatagtat

SEQ ID NO: 135665 - DNA, 656 bp, Homo sapiens
tttaatggtctttcctgctgtcaatttttttgaaataacagaagactgagagcatttatagaaatatttagttttatgcaggtcagaagcactgtgctatgccaggaatcagtgaaaaaagagagaagtacaaagcctggtgcttttgctgtcaaacacaggtcctcagctgaagcatgaaattatcaaaattgtttttttcctctttcatcttcatttatttacatcttcagagaatagagacagtttctgaaattttcttgtgaataccaaaattttatgttaataaataaataatacgcaaataaataatatccwcagtaaccatgcatacggcaaattgattagtaactgttttcacattgaaaccagctataatgaaagaactgattatcattaagtattcaattgcttttagtatttgagatatcggatgttagaactaagcttagaagtctagtttggtaaagatgaatcattttttatttattctttcacttgctgttttccctgtttataacaatttattttcctattcttcttaatgttcttgtatgtctatgatcgcttgttagtgtgctgtaaatttttaagagtgtaaagaatataatctcatattctaaggaaatgaggaattgtgtaaaattggttttaaa

SEQ ID NO: 135666 - DNA, 556 bp, Homo sapiens
tcataccagcgctatcatctgttgcttcatggcagttaatcccgagagaaaattctacaactctactaaaaatttacgtttctagacttggttggggcctcaaactactagtccatctctttacttgtccatgattctaaagcttttttactctaaaaccatcctattataaatggacacatgtataaatgtattagattctcactacaattgttgagacagataccattttaattgctttttacaatttttatacggaagctggagcacagaaggtgtgatttacccaaggtcaaacagcaagtgactgcctaatgagactggactccaggcagtctaatcccagagtctatgcacttaactacattgcctgtctagctactgtttgcccaacttttaagtaaatagatcaacatatgcaacaatttattccttacaggatttatagtcatctgctgcttgaaarttcaggcaatggaaaacttataaggggaacgaggacttttgagttatgctggtttagattcctaccttttttatctctcttccttaaaaa

SEQ ID NO: 135667 - DNA, 578 bp, Homo sapiens
tgggcctggttaatgttaataaggctagttttcttctttgtttccctgcaggaattggctttcatgctttattgatgtcctttgatttgtcagtatcattcaaacttttctctacaagtcctcccacttgcaagatatctccttgtaggttcatacccactctcttattttccttgtaacaagttttttgattgaatgtggataataatttctgcagtttttaaagttgcattgaattttcagggagaacacgccaaaacctatgaataattcaacattatcagaaaaggtcacctttctgcccctctgccacaattttctacaagtttttctttttctttctttttctttctttctttctttytttttttttttttttgagacagagtttcactcttattgcccaggctggagtgcaatggtccaatctcggctgaccgcaacctccgcctcccaggttcaagtgattctcctgcctcagcctccagagtagctgggattccggccatgcgccaccatgcccagctaatttttgtatttttagtagacatggggtttctctatgttggtcaggctgg

SEQ ID NO: 135668 - DNA, 245 bp, Homo sapiens
catcccacaggctgtgggttgkacaagcttgctctatcccctccttccataagtaaaatgtggattcagtgagtgctaacaaaagcctaacaagaatgtaaccacttcctcattgcctatactcttactctctttttgccttttgtcttttcccacctgctcactctttccccctttaaatactgaagtcctcaaaaccctctttggaagaatcacaagtcacaaaaccaaccgtaacttgtgtt

SEQ ID NO: 135669 - DNA, 245 bp, Homo sapiens
catcccacaggctgtgggttgtacaagcttgctctatcccctccttccataagtaaaatgtggattcagtgagtgctaacaaaagcctaacaagaatgtaaccacttcctcattgcctatactcttactctctttttgccttttgtcttttcccacctgctcactctttccccctttaaatactgaagtcctcaaaaccctctttggaagaatcamaagtcacaaaaccaaccgtaacttgtgtt

SEQ ID NO: 135670 - DNA, 404 bp, Homo sapiens
ctcccactctcttcaaagtcatccttctgctccctgagatagatgtgtattctgattgcctcctttggaaaggcttatcagaaactccaaagaatgcaaccatttgtctctcacrtacctgtgacctgggagccccactccctgcttcgagttgtccccgcctttcttgacggaaccaatgtagttcttacatatattgattgatgtctcatgtctccctaaaatatataaaaccaagttgtcccccaactaccttgggtacatattgtcaggacttcctgaggctgtgtcacgggtatgtatcctcaaccttggcaaaataaattttctaaattaactgagacctgtctcaaattttctgggtttatagaagaaaacctaacctgaggaacagaaatgaattc

SEQ ID NO: 135671 - DNA, 404 bp, Homo sapiens
ctcccactctcttcaaagtcatccttctgctccctgagatagatgtgtattctgattgcctcctttggaaaggcttatcagaaactccaaagaatgcaaccatttgtctctcacgtacctgtgacctgggagccccactccctgcttcgagttgtccccgcctttcttgacggaaccaatgtagttcttacatatattgattgatgtctcatgtctccctaaaatatataaaaccaagttgtcccccaactaccttgggtacatattgtcaggacttcctgaggctgtgtcacgggtatgtatcctcaaccttggcaaaataaattttctaaattaactgagacctgtytcaaattttctgggtttatagaagaaaacctaacctgaggaacagaaatgaattc

SEQ ID NO: 135672 - DNA, 593 bp, Homo sapiens
aatctctggagtacggtgggagtggggtggatattagtagattttgcaagcccctaggtgactatggtatacagccaggactaggaactcctagagtgacttgtttacaaggtacaaaacaggactctggcaggaggagcagccgagaaattgctgaggatcagcaagagtgcaagaaagaatgagttgactgtttgactactgtttccctagattaattattcatgtgactcgaaacagggtctccatcaactctgcaagaactccttgcacacccaacagggccaacgttggctcacattcatttgaagagggtgcccaactgtctgcaaccctaatgctctgcccaagaagagttgaaaaccttgctaaactcactcaactcttgaagcctccatttyctcatttgcaaaatgagaacaataaaagctggttctaagggcatttgtgagcattaaaggggatattgatgttgatgaatttaccaaaatgcaaaacaaacagaaaaacatcagcctcagagaaaatattatttccaccttggaaaagactgagtagagtaaagagtacagtagagacccaggtccaagcct

SEQ ID NO: 135673 - DNA, 500 bp, Homo sapiens
cataactgtgtatgttcacatatgtgccttggaagagttttatrcaggaaaggatttgtaaatcagaaaaatgaatgctggtatctaatttcctgtccccgttttaagtccagaccaagtcacctaacccctcgggcttgcagcccgcatcatccactgggtgattaccttgagttatctggttcagtccctttgctgtgggcaccctctttacctctacaagtaaactgcaattaatctgacagcaggggcaagggaactgacgagtcttgggtgcaaatcttgagatgctttggcacattatctaattcattgtttttcttttcttttttcttttcttttcttttttttttagacaggctggagtgcagtggcacgatcttggctcactgcaacctctgcctcctgggttcaagtgatttttgtgcctctagcctcctgagtagctgggattccaggtgtgtgccatcacgcccagctaatttttgtatttttagtag

SEQ ID NO: 135674 - DNA, 608 bp, Homo sapiens
agcatgaaagcagctatatatataaatacacagataagtggccatggttgtgttcaataaaactttgtttataaaaacaggaagtgctagggcttggtccactggctattgtttgccaacagtctctagaataatgaaatggtaactgagtgaataggctctggacctcatcatccccaatacgccacacatacacacacacacatacacatacttcaaccaaggaaaatctatatttatctcttttacatatttaatttccatgtgaggttttgtttgagaatagttagttctattacacaattgaaaaacaaataaataaagctatgaaaaccagtttrgtaaacatttattataaaatatatgtgttttatatagatatatacgtatataaacatatatacatatataaacacataattataaaatatatgtgtttattataatagtattattcaactaaattctactatgtttttcaaaatataagtcaagattcaagatagaaatgtgcttgaaaagaagtttcagcgcttttatttacctgtttaaacaactgatgaatttagaaacaaactttcatggggtacctgaatatggggaaagtt

SEQ ID NO: 135675 - DNA, 630 bp, Homo sapiens
gttttttagacccatgttctctgtattgtgatttttttcaatgacatgtgtttgccctaggggtctgaagaatattttaacttttttgttgttctattcactgttgtttactgatgtctactcctaaaggaaatgtttttaaaaggtacagaaacacaactacacagagatacgatctatattttaaaggaagatttggttttagacctttctcagatgtgtttagggagttgagttcatattcagttctaaaagcatcaaccctcagtggacaccagtgttgtagtcagccaagttgaaatcattgtacaaggacgtattttcagcaagttccagacttcattcaaaagggaaaaaaagtktcttgtactttgtcttcataaagagtagctgctgtaacttcgaaggggaaaaaaaaaatcacaggaactagaagtattgatatctgatttaaaatgcaaaaaacaaaaaaaggattacaagagaaaaggagcaaaatgccaaatgcaagcatggtaataatctgtaagcatttagaagatataatgaatatttccttaggaggaagagtcatcatgtagttgagtgcagggtgctaggacaaggagaaatgggtcctgatttctgtgt

SEQ ID NO: 135676 - DNA, 586 bp, Homo sapiens
tgtcatggcaaaaaaatgcacaggagatggcaaccttaaagcctggtgtacctagctcttttgtcaagatgcaagcctgaggccgagcctgaaagtccactgtcaactctcctctacctgaagctctgagaggagtaggaaactcattctactaaagcctgcagtgcttatggtgccaatctctgaaaataaaagaattggaaccatgctagaaaataaaaatggattacctttgaaggctcacatgataaaagtaatttggaatagactttgtatttcccttagcctcaccttttacccattgcattaattttccttacatayctgtgaatcaaggcactacaaattcattacttactgataagacgtgtccaatttcttaaagaataacaatgtatcttcaaatactcagatttaaaatactgtagtcctagttttttcatactttttgcatttctcttgacacattttgggtgacataaaatgtcccacgtagccactagtaattataaaacaggtacacacagaattggaaagcacatattttatgcttgattattatttttctatctttgtccaccagtgt

SEQ ID NO: 135677 - DNA, 586 bp, Homo sapiens
tgtcatggcaaaaaaatgcacaggagatggcaaccttaaagcctggtgtacctagctcttttgtcaagatgcaagcctgaggccgagcctgaaagtccactgtcaactctcctctacctgaagctctgagaggagtaggaaactcattctactaaagcctgcagtgcttatggtgccaatctctgaaaataaaagaattggaaccatgctagaaaataaaaatggattacctttgaaggctcacatgataaaagtaatttggaatagactttgtatttcccttagcctcaccttttacccattgcattaattttccttacatacctgtgaatcaaggcactacaaattcattacttactgataagacgtgtccaatttcttaaagaataacaatgtatcttcaaatactcagatttaaaatactgtagtcctagttttttcatactttttgcatttctcttgacacattttgggtgacataaaatgtcccasgtagccactagtaattataaaacaggtacacacagaattggaaagcacatattttatgcttgattattatttttctatctttgtccaccagtgt

SEQ ID NO: 135678 - DNA, 580 bp, Homo sapiens
ggtgataatgtaatgcatgaggatgctgcccttggccatttcatcttttcacccctctggattcccagaggcaacgttttggccagatgtaaacacttttaccagtagctaaggatctgaagaagaaccacattttgcagagaagcattttaaaggatttaaataaccccctaacatttgtcacaaygggttcatcaacctgagaaaacaagaaagaaaacagacctctggaagtgctaagcagagtgatggaggctactaaggagccaaattaatacagctgtattttcatcttgattttaaacagccaactcttgagtattaaagtcacatcaaagatatatgttcctttataactcctccatcttaaatattatctttgaaaaaattaagttattcttgagtagactgttttttcttcaagtaacagcaatgtatttaagtctacttaaatcttatttaaataatttactaattctatagggttgttcattagaaaccaagattgaatttaaaaaaaatttaaggagagcaatctcagatgtaactcacttggcaaacaattgcttatgtttttcat

SEQ ID NO: 135679 - DNA, 569 bp, Homo sapiens
agatgtcaaaagttcttaaccaaatgcaggctaattggcttacttttgcaaaatagttttaaatgtatgaccatatgaacccattcctagggccccttctggagccctgaatgggaccaagacaagtgagtgaccctgaaactcaacctttgtattcacagtaggacctcctgcttcagactctaagcttccggagaacaggaactgcatcttttctatttcacatacccaactcctcacacaatgcatgatgcaagtgggaatctacataaaatatctgatggataaatggagtagcactgatgcatatgaracccagtgttaaccagaggaagcaatcaactccaagatcaactgccaagataaaaaccaggaccaaggaaagcttctgagataaaatgatttttaagattaacgtagtggatatttccaattgttttttttatacccttcatctgacctctccttcctaaatgtgagagttagccatcagttgagtattgtgagaggttgtaccctgccactaattacagaaacaaaaaaggccagctacctgctttcccggactc

SEQ ID NO: 135680 - DNA, 622 bp, Homo sapiens
acttctggttaattattgagcctcttgttttatgatctccaaaacagatgtgataagaatacttactaaaaagggctttgttactgtaacacgttatcaccgtgttgttgagtcccaccccttcctcctaagatctactttttaaaggttcttttccctttcattgttagtactctggaattgtaaagcatgttttcttttggaaatgtatttcatagttaaggttatcttaataagtgttgttgggtaggtaagtgtattagtcaaatatagccataataatgctgtgtaacaaacaaccataaaaatctcagtggcacaaacgaaatcctatygttctcgcccatgagatcagctggctaaagctgacttatggtaggctcagttggacttggattaaggttaaggattgagtcctggcttgtgtgtattccttctcatttttgggccagcagattccagaggcatgttcttctcatggacaaaggcagagtacaagagtgcaagatcacttgcatcaccatacatttgctaacatcctgttggccacagtaagtcacatggccaaccgcaaaccaagggacagtgatgtataccttacctgctatgtcgtaggtgtgat

SEQ ID NO: 135681 - DNA, 450 bp, Homo sapiens
tattggtgtctattcttgtgccatttcatacttctgtaatgattgtaactttattgtatgctgtaaaawgtgatagagtgagtcgacagctagccttttttttttccctaagttttctcacctactgtcatttacttattttctagcacttcagaatcattttgttaaattccaaataatttcttcggaattttattctagttgcacaccactagttggttgatctctggggaagaatttagatatttacattactgagtcttccaatccaggaacataatctttattttcatttatttaaaacatttaaaatttttctgcaaggttttatagtttctagtgcattttttaattaacttcattccctcataattccttttttttgtggatattttgaactgtattgggagcatgacttttagttgatgtctagcatgcattctccccttc

SEQ ID NO: 135682 - DNA, 474 bp, Homo sapiens
ttccaaatgtcaatttttggtttaataaatttcagaatcaaaaagatttttgagatacatgattttaattgctcttttagtcattcttctgaaagtacttgctcaatggtcacaagctgccacctaacacacgtccaaaaccacttcctaaacgggaagaccccttttctcactttgaagcagttggccctgactgctgacctgttctatctgtcccatgcctcccatgggcatctctgctttttctctctttcctttgctagcttcttttttttcctttatttctttaaatgcaggagcttcctaaattgtgtctttactcttttctttcttggtgttcactggtaatctcatcctctcacatggctccaattatggtttgtgtgaaatagctctcaagtttwtatcctccctcctgaattactggagcacactcccacggtgcttgtgtgttttgtatgtatcatacttcac

SEQ ID NO: 135683 - DNA, 499 bp, Homo sapiens
aaaaaatcaaatacatagaaacagtagaatagtgtttaccaggagtagggaaggaaagaaaatagggagatgtagttcaaaggataaaaacttgttgttatgtaggttgaataagtttagagtgctaatgtgctgcaggaggactatagttaataatattgcattaaaaatttgttaatagaatatattttgcatgctcttgacacacacacacacacacacacacacasacatgaattaactatggaaggtgatgtaaaatttgcttacttgtaatcatttcactatgtatatgaaaacatcatgttatttacctgaaatatatacaataaaaatatgtattgagtttgtactatgtgcttgggacttgtataaattctggtgtgcaaatgtcaaacatgatcttatcttcaaggaattcctaaacaggtaaccaataactgtaatacacagtgatttgtataatgatagaagtattttcctacctctaagtagctgc

SEQ ID NO: 135684 - DNA, 536 bp, Homo sapiens
gtgtattctgtagccattgcttgatatctgttaggcccatttggtctgtggtgcagattaagtctgacgtttcttgttgattttttgtctggatgatctgtccaaggctataagtggagtgttgaggtctctagctattattttattggggtctctctctctttttagctctaataatatttgctttatatattagcaaatatataaagcaaactttatatatatatctccagtgttggctgcatatgtatttacaagtgttatatcccctggctgaactgacccctttatcattatgtagtgaccctctttatctctttttacagyttttgtcttgaagtctattttgtctaagtatagctactcctgctcttatttggtttccatttgcatggacaatttttttttatccctttattagtctatgtgtgtctttatggagtgaagtgtttgttataggtgactgatactgggtgtttttttgttaatccattcagccactccatatcttttgattggagaacttagtccattta

SEQ ID NO: 135685 - DNA, 570 bp, Homo sapiens
gaaaacgtgtctcctaagtgaatataaataatccaggttatgaagagctttatttcctgtctatttggaatacctcaactatagtgtacaaaatccaataaggttgttttacccaaattgtgtcaaacaattaatctcagttattgtatttctaatttaaaagagccactatatgtatttagcttggtttagcttgaggtatggggcaccagctgtggcctgttgctcatgttctgtgattgctgtgattgccattgtaggcaaaaatttaaagaatattgcctttggtaaaggtctgattctgtattcaagcaccagatatctgagtactcttataatcacccctagatggattgctaatcagccctgcattgactctggactttcttttgctcctctccttacttttttcataacaraaatacttattagagtaaggattaagatggcggataggcagttggactagcttgcagctcccactcagatggacagagcacgtgtggaaactcacatcgtgaacttttgctccaagaactactgcaggaacacgttaggaaagccgaaaga

SEQ ID NO: 135686 - DNA, 369 bp, Homo sapiens
gaagaagtttggaaatattcttgaattgtactaaagcacctacagtatttcaaagtaatttgccagacatgttttctaatgtaggttttatagtttctggggtttttctacttactgactgcstgaggggcccaggaactattagagtgtgcatataacagtgtgtgtctctctacttcccaggctcccttgcagctgagttggccatatgactgacagcaagccctggaatgcagccagaagtgatagaagcctctttcacaccatgctcctaaaatattccaagaaattttccaaacctactctttttagtctgtgcatctggaagtgaaagttttagaaagggtaaagtcacttaatggaaagggc

SEQ ID NO: 135687 - DNA, 600 bp, Homo sapiens
attttgagagtacacaattcaacccctaacgctatatcatgaattaaataatataggagaatataatagaataatcatggactttaggggaaattatattagaaacagattcctggttgatccagaagtagatgcatcccatggtggtttttaatccaatgggggtctttgccactggctaagtcatttaagaatatgctgagtgtcttcttcaggmcagatattgtggcaggagctgtacaggtcagctacagtccctgtcttaaagaagctcagaacccagtgaacacccaggaaaagacatgaacaataaaaatttaatgtaataataaataagcacaaccatagaagaatagacagggcattagaagagcaaaggtaactatctcattcttcctggaaataaggaaatttccacagtataaaggacacttgagtgaaataagaagttgagcaagaagaagaaaaacgaagaaagagcatttcagagacaggaagcaacctgggtgaagtttaaaaagtggcaaattcttctgtatgcctagatgaagatgtaagctagagaataatgatgatttggtcagaagaaggaagggcctg

SEQ ID NO: 135688 - DNA, 422 bp, Homo sapiens
tggaacaatgaggactctgttcttcatgaatggaccttgagattgttttacaggtaaaaggagggaactcagctcattacaaagacttcattcaagggcaggatgtggctggaagagcagcctctctaagaacatggcttgaaaggaaatctgtgaggaagtaagagaaaatgactcacaagccagccacatgcacatcaatgcacgttagcaggatggcagatgtcacagggaggtagagtgcccttggtgccttttggatcccaatattttaatttttaccccttattgttatatagtaatatccctaaccctgygtgtggcacaattgctttaataaaaacagttataatgagtggataaagaaaatgtggtatatatacaccatggaacactactcagccattaaaaggaacaacata

SEQ ID NO: 135689 - DNA, 488 bp, Homo sapiens
acgtgacaggttctccttatctaccttttaatatcttcctccacacagtggctagagttctagtcatcatcctggaccgtcctaaaagtggcaaaacagttagctagatagagtatgagtcactaacagttttttagaagccacatcaaccctggaatacaaacctccasccttcaataatgtgagagagaatgctatctctatcaagccaactgaactgaatcatgattgatatgcttagtctcaagtcttagttttcccttccttaaactaaagctatcgtcaagttttctgtgcaaatgtaaaattatcatttacaatgccatttctgtttcagagatcaaagtggaatctagcttcaattgtatgtttaatgccctcctgaaatctatttagtgttgccaaggaaggtgatacccagagttttaagtcctctcttcacgtgtacatctccacagagttaatgatcataatgtttgatctctgag

SEQ ID NO: 135690 - DNA, 622 bp, Homo sapiens
tttaagtcctctcttcacgtgtacatctccacagagttaatgatcataatgtttgatctctgaggttcagcaacacagttctgactctagacttggtttgacatttagcgcaaacaggcattgtggggtattttctatgagctactggaacaccctccgccgaacagttccactagtttgactcgcgtattgtcctatgtaaaaaacaaaaatggaaaataatacctcttgtgaaaatttactaccaaaatcatcctttctttagccattctgaataaaatgatcagtatctgccataaagtttattaactaaggaaggatgcctttatttttagttctaaaatgctaycacaaaaagtacaaaaggaaacatgccagatgaaaacaattattcaaaacaagtttggtaaaacctatgatctttaggaaataaaatattgaacttacattattttgataatttgtaagtaacggtgtaaaaatgttttccacattgctgaactagaaccctttccctatcatttattaaaagtctccctggattttcaggcaatttagagaaatgtaacttgcaggagaaaaaacttataaaatatagtgttttaacaaaatttctcttttt

SEQ ID NO: 135691 - DNA, 475 bp, Homo sapiens
atcctgagaacagcacaaaggcctgataatccctacagaagtcttgttttaaccagacttaaaccrtacactccaaaatttaggtctgcatctacatctaattagtacacagaaaaacaaacaaccttacaaccaagagaaaaatggccaggggtcacttgaagagagcaataggattagatttttttttcccctctataaccataggttatagaatttgcatctttcccatctcagatttagcatttcttggaacaaattgtgcaaaactatgtcaattagttgatcctctgtgttgataaggctatacattcattcctcaaattttttggctttgtgagtccaaagccacaacagtgaaaaataatgtttcacaccattttccataaagttaaggattcaaataccttgccagtgttaaaatctcatatttgtaatatacctatttctctaattaacacagcacagtcattaa

SEQ ID NO: 135692 - DNA, 555 bp, Homo sapiens
ggtaaactctatatctttttctgtggttttctttcttttggttttgttctatttattttttccttttgagttactagtactttttcttttgagtcattttagctcctgattttctgcaaatgttgtatttgaaagaaattctagctttttcaaacaactatgcatagatagcataagtaataagtctattataaagaagttacacatgcttaggaataattgctgattgctaaataggaatcacaaagttattttcatggaataatgcagcaaaaagtttccatatttgataatgctgctataaaagaakaaattacctggtttggttttataaggagtgtgtgtgcatgtgcttgtgtgtcagtgagtatgtgttgtctaatatggatattattatcaggctcagcatcttactttttggaagaagcgtggtgaaaataaaacagcctggaagtgttactggaaacagataaaatgctggtggggttctctaagttcttcatttttattctgtaggttcaactgatgctctatacttatctgtccacggaattc

SEQ ID NO: 135693 - DNA, 555 bp, Homo sapiens
ggtaaactctatatctttttctgtggttttctttcttttggttttgttctatttattttttccttttgagttactagtactttttcttttgagtcattttagctcctgattttctgcaaatgttgtatttgaaagaaattctagctttttcaaacaactatgcatagatagcataagtaataagtctattataaagaagttacacatgcttaggaataattgctgattgctaaataggaatcacaaagttattttcatggaataatgcagcaaaaagtttccatatttgataatgctgctataaaagaagaaattacctggtttggttttataaggagtgtgtgtgcatgtgcttgtgtgtcagtgagtatgtgttrtctaatatggatattattatcaggctcagcatcttactttttggaagaagcgtggtgaaaataaaacagcctggaagtgttactggaaacagataaaatgctggtggggttctctaagttcttcatttttattctgtaggttcaactgatgctctatacttatctgtccacggaattc

SEQ ID NO: 135694 - DNA, 571 bp, Homo sapiens
tgtctgcatagagtcctgtgatgtgaactgtcttcaggtctctcagccatgcataccagcacctgctccagtggaggtggcaggggagtgagatggactctatgagagcccttagttgtagttttgtttattgcactagttttgtgttggttggcttccagccaggaggtggaattttcaagacagcatcarctgtggtagtatagggagaatcaggtggtgggcaggacccaagagctcccaagggattatgtcctttgtcttaggagttttttggctgttttccagggcctgtaggagtgaaacacttcctttgaagggtcttggttttggaggaatttcttataaccccaaaagactcctcattagcatgatgttcaacaaaacaaaagtgattgctttatcttcattatgatgtagaaaacttagaattacagaaaaagataataaaattaatcatgttcatctaaagctcttggccatgtcttcacatataacttctcattgaggaatgagatttgagtatccagaaagatgggcttagctaacaaatagtcaacagctggcagac

SEQ ID NO: 135695 - DNA, 545 bp, Homo sapiens
gaattcatatttgcatatggtgaaggtaagaatccattaaataaaataatgagaggacattattttggagtgagctcatacactrggcccgaacaaaccaaaccaaaatggagtcacatgtgcaaagtgccacataatgaaactggcactttaaggaagcagaaaaatttgcaaacagaccattttttcttaaaagtaagagatttacaataaccaattggaaagggattgtcaacctgagctggaattaaagaaagtctctccatgttcttagtttgttgagaatttatatcatggaacaaagttaaattttatcttttctgtcatgtaatgataagactttgattttcctctgcttccctgtggatatggtaaattgcattaattgattagtcacaatatatttaatagtatccttttctatattttctatatttctggatttcttgtttagaaaatttttaatccactttcattaattggtttgtaatttccctttttcttcctgccatttctgaaatttgagtttgaaattacgctaacac

SEQ ID NO: 135696 - DNA, 545 bp, Homo sapiens
gaattcatatttgcatatggtgaaggtaagaatccattaaataaaataatgagaggacattattttggagtgagctcatacactgggcccgaacaraccaaaccaaaatggagtcacatgtgcaaagtgccacataatgaaactggcactttaaggaagcagaaaaatttgcaaacagaccattttttcttaaaagtaagagatttacaataaccaattggaaagggattgtcaacctgagctggaattaaagaaagtctctccatgttcttagtttgttgagaatttatatcatggaacaaagttaaattttatcttttctgtcatgtaatgataagactttgattttcctctgcttccctgtggatatggtaaattgcattaattgattagtcacaatatatttaatagtatccttttctatattttctatatttctggatttcttgtttagaaaatttttaatccactttcattaattggtttgtaatttccctttttcttcctgccatttctgaaatttgagtttgaaattacgctaacac

SEQ ID NO: 135697 - DNA, 545 bp, Homo sapiens
gaattcatatttgcatatggtgaaggtaagaatccattaaataaaataatgagaggacattattttggagtgagctcatacactgggcccgaacaaaccaaaccaaaatggagtcacatgtgcaaagtgccacataatgaaactggcactttaaggaagcagaaaaatttgcaaacagaccattttttcttaaaagtaagagatttacaataaccamttggaaagggattgtcaacctgagctggaattaaagaaagtctctccatgttcttagtttgttgagaatttatatcatggaacaaagttaaattttatcttttctgtcatgtaatgataagactttgattttcctctgcttccctgtggatatggtaaattgcattaattgattagtcacaatatatttaatagtatccttttctatattttctatatttctggatttcttgtttagaaaatttttaatccactttcattaattggtttgtaatttccctttttcttcctgccatttctgaaatttgagtttgaaattacgctaacac

SEQ ID NO: 135698 - DNA, 605 bp, Homo sapiens
aaggtaagaatccattaaataaaataatgagaggacattattttggagtgagctcatacactgggcccgaacaaaccaaaccaaaatggagtcacatgtgcaaagtgccacataatgaaactggcactttaaggaagcagaaaaatttgcaaacagaccattttttcttaaaagtaagagatttacaataaccaattggaaagggattgtcaacctgagctggaattaaagaaagtctctccatgttcttagtttgttgagaatttatatcatggaacaaagttaaattttatcttttctgtcatgtaatgataagactttgattttcctctgcttccctgtggatatggtaaattgcattaattgattagtcacaatatatttaatagtatccttttctatattttctatatttctggatttcttgtttagaaaatttttaatccactttcattaattggtttgtaatttccctttttcttcctgccatttctgaaatttgagtttgaaattacgctaacactaaaatatgaagttatgctaatactgagagattgttaactcattttctgcttttcagatraatttatgtagaattggaattc

SEQ ID NO: 135699 - DNA, 570 bp, Homo sapiens
cacacactggggcctgtcagagggtggaatagggggagctagagcattggaaaaactagctaatgcrtgctgggcttaatacttaggtgatgggttgataggtgcagcaaacaactatggcacacgtttacctatgtaacaaacttgcacatcctgagcatgtaccccagaacttaaaataaaaactaaaataaaaaacctaaatttattttctgtctaagatcctcccaacattgatcattgacactcagaatatgcacccactttagtgtagactctatcttccacctactgggcatagttttacacaggggcctcaataaaacaactaaatgagaatatattagaagatcaacatattgtagtagatacactgccctctgactagctgttttaaccaatgttttccatttcctctatataacgcactgatactcataccatactgaattagcgatgctgcctgactactctagtattttatgccactctgctttcatgttttcagtttttttgcttactaagaattagtctggtacccaaacatttgtgtttgtttcttttgactac

SEQ ID NO: 135700 - DNA, 609 bp, Homo sapiens
catttaacttctaaaatttatcccaagtcttgcacacctttccacctatactatttccaatgtaattcaaaccaccacagttttccctacttcatactgtttgttttgtggtgctataacagtataccacagactgggtaatttataatgaacagaaattgaatggctcatattctggaggctgggaagtctaacatcaaggtgtcggcatgtgacatggaccttcttactgcatcattatatgatggaaaaacgagagagagagagagatctaaactcgccctttcggaacaacacsatgaggatgtagccctcatggcctaatcacctcttaaaggtcccaccttttaattctgctacaatggcaattaaatttttacatgagttttggagggaacaaacatcaaaaccatagcactccacatgagagccaatttttaaaaatataaaccagatcacactgctcctagtttatgatatttcaagagcttcccatcaaataaaattagacttcttacctaggcctataaagccttatcatctgctctctccttcctcactgacctcaactcctccactctttttcccatccaccaagtggcctttttt

SEQ ID NO: 135701 - DNA, 480 bp, Homo sapiens
aaaatacattttttttggagacagtgtctcactcggtcatccaggctggagtgcagtgatgcaatctcggctcatggcagcctcaacatcccgggctcaagtgatcctcccacctcagcttccccagtagctgagattatgagcaggcaccatcatgttcagctgattttttttttttttttttttgtagagacagtgtttcttcatgttgctcaggctggctggtctcaaattcctgggctcaagcgatctgcccaccttggccttccaaagtgctaggaatacaggcgtgagccaccrcacccagtcaataaaataactttaaataaacaaccctaacgattaatctctacttacagatagcaaaagagaggcttcagattatgaacatttccagaacagatcatggcttctttaggaccagaccaggccacgcattccctagattctgtgtctagtctgaggttagtctaaagatct

SEQ ID NO: 135702 - DNA, 627 bp, Homo sapiens
ctttgctattatgaatagcgctgcaataaacataggagtacagatgtctttttgatagaacaattggttttcttttaaatatactcccagtaatgggactgctgggtccaatggtagttgtgttttaagttctctgagaaatctccaaactgcttttcacagtggctgaactaatttacattcccaccaacagtgtgtgaatgttcccttttctccacagcctcaccagcatctgctgctttttgactttttaataacagccatccttactagtgtgagatgctatctcacggtggttttgatatacatttctctgaggatcattgatattgagtattttcttcatatttttgttggtcagtcgtatgtctcatttcaagaagtgtctctttatgtcttttgcccacattttaatggggttatttgttttttttgcttgttgaatyaagttctttacagctcaatcatcagcattttttaatcttgtgcaagcatatgttttgtttttgctggaatagtagaaatcctgttcaaagatttttatttcacttctaacatacatatattctaaaaatcctatatccagcttacagggatgtaagaaataattgaaatgaaagggaacta

SEQ ID NO: 135703 - DNA, 583 bp, Homo sapiens
cattggcattccaacattccaaagtcacctaagatacataataaataactcaagtgtccaaattaatttaacacttattttgtgtctgaggtacaagatccataactctgcactttttaaaaccctagagatgactctgatatagtctgccaatggagctgctgacctagatgacctttcatatcctctcaaatttgatgtttggtttatttggtttctatcagtgcttggagtacaggaatgagtcttatgcctttctttatatgcagggccttgctcataattggtattaggtaaatgtttcataattaaaagaacaaatgaatgaytgaataaaaggacatctcattcccccccaccgacctctctgtataatactaaagacctttataaaaattagcataaaagttaatgaaatcagtatgaaagatgaaatagaatgcagtggcaagatggaaaaaaatatgggtaaaacaaactcaattatttaacatgttggggaagaaaaggagcttgggggaaaactatttaaactaagataggatgataagtttaagaaactagaacatgctgaaaaatatgc

SEQ ID NO: 135704 - DNA, 505 bp, Homo sapiens
agccctaattcataaaatgataaagcaaaggaaatacccaagctttttcagggggtgcagagcctcatcaatggcattgcaggatgctcctatgattatgagtttattgacctcctctctatcctgcttcttacacactctccttggcaagtacactctttgaatgagactgatgaaatacagcctgagcagggagcagtctcagcatcacagcaccactttgatgagccacaggctgaagataaatgacyagggaatatatccaatttattcattggattttcccatataatttccagccaagattccttacagggcaaaggaaaagccaaagcagacaccagtgattcagtaaccttctcttcccaactactgtctcctctcttgacatatatatgttttaaaatagccacatgtatctaaatgcagattttgtctctgtctggattttaaagttcatctgttcaacattttttcttccgttttagatctctgttcccaatga

SEQ ID NO: 135705 - DNA, 576 bp, Homo sapiens
tgtttcttccataattatatagttaacaaaaaattgctaactttgaaattacattttgagtgttytgtcactgttttgctttaatttttagcttcagttaatttgtaaaattttgagaaccttaatatataaaatgtttagtaatttagtgtctagtaatttgtttttcacatcattaagatgaagaatatttggggacacaactgctctaaccgatggtttccaaaaaatatgagaaatgtaaccatagctattgctagttgaaaaacggaaggcttggtacattctaataaaaatgacattaaggtcagacattctattcatctgtgcgtattctgaacattcttcttttattctagtaagtatgcaaaatgaggtgtgactttgcaaagctttcctttttgccatctcccatcaaaagacaaaagaatatgtggggaagaaattccagctcactttcatgcagccagcttattagtagaccatgttgagcaaagtttaaaattatcttttttaacttaaagcttctgttggactagaataatatgtaagtttgagtgacagtggaaaaatatt

SEQ ID NO: 135706 - DNA, 576 bp, Homo sapiens
tgtttcttccataattatatagttaacaaaaaattgctaactttgaaattacattttgagtgttttgtcactgttttgctttaatttttagcttcagttaatttgtaaaattttgagaaccttaatatataaaatgtttagtaatttagtgtctagtaatttgtttttcacatcatkaagatgaagaatatttggggacacaactgctctaaccgatggtttccaaaaaatatgagaaatgtaaccatagctattgctagttgaaaaacggaaggcttggtacattctaataaaaatgacattaaggtcagacattctattcatctgtgcgtattctgaacattcttcttttattctagtaagtatgcaaaatgaggtgtgactttgcaaagctttcctttttgccatctcccatcaaaagacaaaagaatatgtggggaagaaattccagctcactttcatgcagccagcttattagtagaccatgttgagcaaagtttaaaattatcttttttaacttaaagcttctgttggactagaataatatgtaagtttgagtgacagtggaaaaatatt

SEQ ID NO: 135707 - DNA, 576 bp, Homo sapiens
tgtttcttccataattatatagttaacaaaaaattgctaactttgaaattacattttgagtgttttgtcactgttttgctttaatttttagcttcagttaatttgtaaaattttgagaaccttaatatataaaatgtttagtaatttagtgtctagtaatttgtttttcacatcattaagatgaagaatatttggggacacaactgctctaaccgatggtttccaaaaaatatgagaaatgtaaccatagctaytgctagttgaaaaacggaaggcttggtacattctaataaaaatgacattaaggtcagacattctattcatctgtgcgtattctgaacattcttcttttattctagtaagtatgcaaaatgaggtgtgactttgcaaagctttcctttttgccatctcccatcaaaagacaaaagaatatgtggggaagaaattccagctcactttcatgcagccagcttattagtagaccatgttgagcaaagtttaaaattatcttttttaacttaaagcttctgttggactagaataatatgtaagtttgagtgacagtggaaaaatatt

SEQ ID NO: 135708 - DNA, 593 bp, Homo sapiens
cttaactacttttatagttcttgtaaacattaagtgttaatagagaatgtattaaaaatatactaacatatattgagcattttatatctcagtatgttagaggcattttatatgttataaaatacattataaatgttatacattatgtataaagtatatatgttataaagatgccttatacactaactatatgtatatagtagtattatctaatatttgctaaatatttactagattgcaggctctatgctaagggcctgttacttatttaatactcatagtaaccctgtgatgttggtacttattgtttctttttyataggttaagaatatttaatctcaaaatagtgaaatacctcagtcaagggttcacactacttagatagcagaaaagtctgaccccagagcctgtgcttagaagcatattatgtgaagttgtaagttcttatattgttatttataatagtgaacattttggaaataagtgtcaacaaaattatgatacattcataatgttgaagaatatgcagtggttaaatatatttatatatatatatatatatgtctactaacatggaacacaacttcagaata

SEQ ID NO: 135709 - DNA, 543 bp, Homo sapiens
tggactggcagtaagcagttttgaggaatgagagcctagcaaaaggatctgcagtgttgcaaggcagcagacattactgcttactatgccacagaatttttttctctctttcagctyttctggaaatccagggtgcccaacccagtggcaagttaaagctttgtcctcatgctcacttccatgaactaaagacaaaaagggcagatgaggtgatatgctttgaaatacggagacacaagattactcattcagacaagacactggggacttactggaatggtttagctctcgtcacaaaggccttaagatcaggaaattatctaaccaattggtcttcacattacattttctgtttcttccatcttattttgggacacagtctaaactctccaccacctaacttaagccaacttcatacagtgaacacttacaccacatacatgctttcagtctggttttctgcctctttcctcacgagggtgtattttcatgcagaaactttgtgtcacttactctatatttatattggcctgttgtgtatga

SEQ ID NO: 135710 - DNA, 528 bp, Homo sapiens
gatgaaattttgagttgctcttctttgcagaaggtgagaatgcattttggtttcataaagcatagtgtattacattaggacagggttgctttatttcattttcatttttgaagtggaactatgtgaaaaggttttgtatactagagagccaaaaataacaaatgcttggcagacaaataggtatatggtggtggtcacttatcatgtcctctatgacaagcatccagttcccattttatggatggacaatttcttacttggagcgtcagtggagatacagactgctttytaccatgcaagctgaaaatgccagataccagttttctcagggcatgacatgaaatactggttttcttaaactgattcaccaactctgggcttgaaattgggagacaagagcaaagaacccattctgccagtgtgcagcattagttgcagggacaaatcccagaggcggcatagcacagtgtccagtgttcagtattgctagcggcaatttaaacaggttgcttatgttctgtggaaact

SEQ ID NO: 135711 - DNA, 394 bp, Homo sapiens
ccttccccacagttcaagtatgtactgaaatgccacctctggggagaagttatggctaaacatcctggctcactggccttttcttgatgcatatccaagaattgggaatatactyatttatgtattacagtctggagtaggaatcagcaaaccatggcctatgggtcagattcagcccaacacccagttttataaataatgttatactgggatacacatcaacacacccatcatgcacttatggtctattgctgtttgtgagctacaatagatgatttgagtcatgacaggggccacatggtccagaaagattaaaatattaattatctttcaaagaaaaagtgtagcaacccatgttccagagagaaggaaacatctataccccactgaccca

SEQ ID NO: 135712 - DNA, 421 bp, Homo sapiens
acttttgtttcagagtttggcacaactccttccccacagttcaagtatgtactgaaatgccacctctggggagaagttatggctaaacatcctggctcactggccttttcttgatgcatatccaagaattgggaatatacttatttatrtattacagtctggagtaggaatcagcaaaccatggcctatgggtcagattcagcccaacacccagttttataaataatgttatactgggatacacatcaacacacccatcatgcacttatggtctattgctgtttgtgagctacaatagatgatttgagtcatgacaggggccacatggtccagaaagattaaaatattaattatctttcaaagaaaaagtgtagcaacccatgttccagagagaaggaaacatctataccccactgaccca

SEQ ID NO: 135713 - DNA, 404 bp, Homo sapiens
tggcacaactccttccccacagttcaagtatgtactgaaatgccacctctggggagaagttatggctaaacatcctggctcactggccttttcttgatgcatatccaagaattgggaatatacttatttatgtattacagtctggagtaggaatcagcaaaccatggcctatgggtcagattcagcccaacacccagttttataaataatgttatactgggayacacatcaacacacccatcatgcacttatggtctattgctgtttgtgagctacaatagatgatttgagtcatgacaggggccacatggtccagaaagattaaaatattaattatctttcaaagaaaaagtgtagcaacccatgttccagagagaaggaaacatctataccccactgaccca

SEQ ID NO: 135714 - DNA, 404 bp, Homo sapiens
tggcacaactccttccccacagttcaagtatgtactgaaatgccacctctggggagaagttatggctaaacatcctggctcactggccttttcttgatgcatatccaagaattgggaatatacttatttatgtattacagtctggagtaggaatcagcaaaccatggcctatgggtcagattcagcccaacacccagttttataaataatgttatactgggatacacatcaacacacccatcatgcacttatggtctattgctgtttgtgagctacaatagatgatttgagtcatgacaggggccacatggtccagaaagattaaaatattmattatctttcaaagaaaaagtgtagcaacccatgttccagagagaaggaaacatctataccccactgaccca

SEQ ID NO: 135715 - DNA, 599 bp, Homo sapiens
  misc_feature (1)...(599): n = A,T,C or G
ctgttagccccacaatactcacctgaactcagctgttttttggaattccacaggtgttccctaaatattttgcctgcartttgagctgtctcagtgatatcatcaaccaggttttcagcattgctcaccacaaactttagacattttcctataaggtgtatctcatctgtatttaatacattattttccatcaaatcatcaaaaatgccatctagaaaggtcttgatcagcaacttcaccatgtggaccagaacaccgttggatggtttctcatctgtgaaaatgatagaatcttagatatggacagaactttagatccccattctagggtagtggttcccaaattttaacgtgcataagaatcacctagaaagcttagtaagcagagcttcctgcatcctagtccaaataatttttatttgataggtgagaatgggcccatgaattttcatttataacaatttctcaggtgatgccaaagcctctggtgcaaggaccacacgtggagaagctcctgtcttgttcaattctctccattttcatagatggtgaaatagattcagggaagcaaagtgaattccgcgnnnnnnnnnnnnnnn

SEQ ID NO: 135716 - DNA, 505 bp, Homo sapiens
gaattccacaggtgttccctaaatattttgcctgcagtttgagctgtctcagtgatatcatcaaccaggttttcagcattgctcaccacaaactttagacattttcctataaggtgtatctcatctgtatttaayacattattttccatcaaatcatcaaaaatgccatctagaaaggtcttgatcagcaacttcaccatgtggaccagaacaccgttggatggtttctcatctgtgaaaatgatagaatcttagatatggacagaactttagatccccattctagggtagtggttcccaaattttaacgtgcataagaatcacctagaaagcttagtaagcagagcttcctgcatcctagtccaaataatttttatttgataggtgagaatgggcccatgaattttcatttataacaatttctcaggtgatgccaaagcctctggtgcaaggaccacacgtggagaagctcctgtcttgttcaattctctccattttcatagat

SEQ ID NO: 135717 - DNA, 509 bp, Homo sapiens
ctggtgcataagaaaaggtctcaggagctgtcttggcatactatctagtttagtaccaagtacagtgagctgcatgatatatgaaccttgttcaaaatgacatgacaatttagaatcttttttatttctccatgaaataccacatatattttattgagggtcgaaaatcccacttttacacagtaaaaatgctttaaacttaggatcccracatgaacagcataaaaatattttttaaaatctagaaaaaatagaatctcatttttgaaaaaaatccttgtctcctttcaaaaaaaaaaaaaaaaaaaaaggttgttcaatatgctcccattaactctctaggaacatttaagttgactaaggctgacctttttgcttatttttcagtttaaaaatgtgaatcattttgccattttctatttctttagtctttatttgaattttgtgaatgtgctgcaaaacatctttccccaacagggcttttagaatcatttgcctctgctagtgct

SEQ ID NO: 135718 - DNA, 625 bp, Homo sapiens
actacacacatgcaaacatatattggtaatttattttaaaaatttacatcattttgatagtttttaatagtaactattaaggattaaacaggctggcctttatatgtgcttataggttaacttataggtgaactcaggtataaaacatgttcaagtattattggtttattaaaaaatatcatttgtagctccctaaaaaatatgtattattaaaaatatcctatgaaataatgaaaaataaatcaagaaagatgagaatcccttctataaatataaatatgggatttcaaaatcaactattagcaaaattattttaagtgtagaagaaataaataaacctacattacaaagatgtcatactwagaaagcaatcactgcttcatattagaccactggctagtatgatcatataagtattctaaatacaaagattatactttccatttattctatctattctacatgaggacttcaaataacactgagagatgaatcatatgaaaaatagcaatgtaaatatacatttaattatataaaagctagctaaaaatcaacaggaaatatatttaatcaggaaactggaagaattcctattaagataataattcagaatattcgctatcat

SEQ ID NO: 135719 - DNA, 432 bp, Homo sapiens
tgtacacatttaaattccattagaaccctattttaattatcagaaaacttatacagtcattataaaatttacctggaaacacacacagtatgtgactaaggacagtaagaacaagaaagggctaaagaggatgatcaaacagtaattagcaatgtaatacagcataagtcctgaaagatgaatcggtgaatgtaacactaattatctctaccataaacaattgcccactgtgtggcaggcagtgcaacagggaggtgctacatgcacataatattatacctgctcaatatgagtcagatactagcacgcccacttcatacctggaaactggtgtcagataagctaatttattaaaagtaccataattagtaawctgaaaatttatgattcagaaggagtcattacacaatgaagatgctaatcaaagagaat

SEQ ID NO: 135720 - DNA, 416 bp, Homo sapiens
gttcttttatgtgtgatctcggatgagtttcttacctttctttaactgtttctcccactgtaggaaacagatttaacttaattcaatatttgttgcactttcatctaagaataaaagacccagtctcctaggtaagtcctttaaacaactcaaagacgtcatgagagcaagagctagactggatacatttttgatattgggctttgcttaaaaggtaggaccaggaacctctcttckgctgaatcaacacagtgtcattacctccgtagacacgggccaagtgctgccaatgaggaaaaggtgggatcccaggaaagagatgctgaggtgaaatttgcatggagaaaacttaatggggaatgcccttgggatcaagtcctaaggagtgagaagaaagcaggataggacagaaggaa

SEQ ID NO: 135721 - DNA, 399 bp, Homo sapiens
ctcggatgagtttcttacctttctttaactgtttctcccactgtaggaaacagatttaacttaattcaatatttgttgcactttcatctaagaataaaagacccagtctcctaggtaagtcctttaaacaactcaaagacgtcatgagagcaagagctagactggatacatttttgatattgggctttgcttaaaaggtaggaccaggaacctctcttctgctgaatcaacacagtgtcattacctccgtagacacgggccaagtgctgccratgaggaaaaggtgggatcccaggaaagagatgctgaggtgaaatttgcatggagaaaacttaatggggaatgcccttgggatcaagtcctaaggagtgagaagaaagcaggataggacagaaggaa

SEQ ID NO: 135722 - DNA, 536 bp, Homo sapiens
tgtttgtgggaatctgatgcatgtgtgtacatgaagaaggtagattttctgtttctcacccagattatactgatatgtagaacaagtggaagtggaaacagcaaagatgccccacacagtgatatttgattacatagatgttgtttctgtttttgaatgtgcctctgacggtttgaatagtaaactaccaggatttagagactgttaggatgctagcttggaggactccatcagacgcactcagggcgttcataagattagccttyccagccctgatccctctcccaaccatcccactcagatctatctagtcagaatctgtacatgccactcagggaatctgtttctttaataagaattcttgggtgattctaaagttttaaccagttttggagctactaaacttttccagtttctctgtgttatagaagaagaaatgagactcagcatggtataaccctaaactgtcagaaaatgttgcagaggttttcagtgatgtgctaaggtcatgcagctattcagcgacagccctgttc

SEQ ID NO: 135723 - DNA, 536 bp, Homo sapiens
tgtttgtgggaatctgatgcatgtgtgtacatgaagaaggtagattttctgtttctcacccagattatactgatatgtagaacaagtggaagtggaaacagcaaagatgccccacacagtgatatttgattacatagatgttgtttctgtttttgaatgtgcctctgacggtttgaatagtaaactaccaggatttagagactgttaggatgctagcttggaggactccatcagacgcactcagggcgttcataagattagccttcccagccctgatccctctcccaaccatcccactcagatctatctagtcagaatctgtacatgccactcagggaatctgtttctttaataagaattcttgggkgattctaaagttttaaccagttttggagctactaaacttttccagtttctctgtgttatagaagaagaaatgagactcagcatggtataaccctaaactgtcagaaaatgttgcagaggttttcagtgatgtgctaaggtcatgcagctattcagcgacagccctgttc

SEQ ID NO: 135724 - DNA, 536 bp, Homo sapiens
tgtttgtgggaatctgatgcatgtgtgtacatgaagaaggtagattttctgtttctcacccagattatactgatatgtagaacaagtggaagtggaaacagcaaagatgccccacacagtgatatttgattacatagatgttgtttctgtttttgaatgtgcctctgacggtttgaatagtaaactaccaggatttagagactgttaggatgctagcttggaggactccatcagacgcactcagggcgttcataagattagccttcccagccctgatccctctcccaaccatcccactcagatctatctagtcagaatctgtacatgccactcagggaatctgtttctttaataagaattcttgggtgattctaaagttttaaccagttttggagctactaaacttttccagtttctcwgtgttatagaagaagaaatgagactcagcatggtataaccctaaactgtcagaaaatgttgcagaggttttcagtgatgtgctaaggtcatgcagctattcagcgacagccctgttc

SEQ ID NO: 135725 - DNA, 534 bp, Homo sapiens
tatcatagatatttcatataaacaaagtcatacaatgtgtgatcatttttgtacagtttctttcacttaacgtgtttttaagattcatcagccttgtagcatgaaatattccattgtgtagatatactacaatgtatttatccattcatgggttgacatctccatgtgtaggagtgaactagatgaacagcgcctgaagtgaaacccccacaaaccgaagcagccctacagaagagggacctgaccattgaaagaaaagaaaaacaagcaaacagaaagcaacaacaacagcatcaacaacaaaaaagtccccacaaaaaccccattcaagggtcagcagcctcaagaatcgaaactagacaaactcrtgaagatgagaaagaatcaaagaagaaatactgaaaacccaaaaggccagagtgactcttctcctccaaatgattgcaatgcctctccagcaagggctcagaactagacagaggatgagatggacgaattgacagaagtatgcttcagaagatgggtaataaaaaa

SEQ ID NO: 135726 - DNA, 590 bp, Homo sapiens
tatggcagaaacacccaattctctgtactctctcctccactgctgtggagggtcgtggagggtggtttgtgttgatgtacaaaagccacaagattgaagcaacctggatcactgagtyattacctgagggatggtggtttcagagggtatcctaggccaaatggattttggatgagtaataaataaagcttagataagccatggagatttggagatcatttgtcaccacagcacaatatagccttttgttatggtgtagatatggtttgtccctgccaaaactcaggttgaaatttgatccccaatgtggcaatgttgggaggtggggcctagtaggaggtgtttggctcatggatggggatcattgatgaacagattaatgcccttccttgggggtgagtaactgcttcatttctgggaaatgaatgtattaggccccttgagaatgggttgttaagaagagtctggcttcctcagtttctctaccttgctttctctctcaccatgtgatctctttgcacatgtccacccccctgcctctttctgccatgagtggaagcagcatgaggccctcaccagacacagctgcc

SEQ ID NO: 135727 - DNA, 565 bp, Homo sapiens
aacacacccaaagtgggggttatgggctaaattgtgtccctccccattcatatgttggagccctaacccacagtatctcagaatgtgactgtgtttagagatagggtctttaaagaggtaattaaggtaaattgaggtaatgagggtgggccctaatcccataggactggtgtccttataagaagaaaagattaggatgtagacacacaagaaggaagaccatgtgaagacatggggaaaagacaaccgtccacaaatctacaagccrcggagagagacctcagagtaaacccaacctgttgacatcttgatcttgcacttccagcctccagactgtgaaaaaaaataaataaatttttgttatttaagtcacccagcatgtggtatttgttatgacagccccagctgtcatacagtgggttagcgttaggtgtatgccaaggaagtagcttcctggaactcatcatttccattttcttctctgataaggcaggaccacgtgtcctgaagggaggaggttacatccacttgacagcttcatggcccagctgtatgagatgaattc

SEQ ID NO: 135728 - DNA, 428 bp, Homo sapiens
ctgcttttgcacatcatcttagtttgctaggggtgccaaaacaaagtaccacagactaaggggcttaaagaacagaaatttaatttattttctcacaattctggaggctggaagtygaagatcaaggtgccggcagagttgtttcttctgaggcctctgtccttggcttgcagatggccgccttctccctgtgtgttcacatggtcttcctgctgtgtgtcctaatctcctcttccaataaggacaccagtcatattggattggagcccacccatatgagctcatctagccttaatgacctcttgaaagacagtcacattctgagatactgggcttaggacttcaacataggaatttggggggtgggggaaggacatagtttatcacataacatacatcaaacaaagcatccagaaagttctccaaat

SEQ ID NO: 135729 - DNA, 428 bp, Homo sapiens
ctgcttttgcacatcatcttagtttgctaggggtgccaaaacaaagtaccacagactaaggggcttaaagaacagaaatttaatttattttctcacaattctggaggctggaagtcgaagatcaaggtgccggcagagttgtttcttctgaggcctctrtccttggcttgcagatggccgccttctccctgtgtgttcacatggtcttcctgctgtgtgtcctaatctcctcttccaataaggacaccagtcatattggattggagcccacccatatgagctcatctagccttaatgacctcttgaaagacagtcacattctgagatactgggcttaggacttcaacataggaatttggggggtgggggaaggacatagtttatcacataacatacatcaaacaaagcatccagaaagttctccaaat

SEQ ID NO: 135730 - DNA, 514 bp, Homo sapiens
gaaaaaaaaaaaaaaaccctgccaaacatttttttttttttaccaacttttgaactgcaatatggatgaactgaaactcacattctttcatttaacctgaaaaatagttggggaaatcttgacatgtgtaatacttatgtttgttwaaaatatgtttaaaactttagtttaaattaaagtaatcccggcactatcacttgaagccaggagtctgaaaccagcctgggcaacatagtgagaccttgtctcaacaacaaaaaataaataaaacaaaaatagcagggtgtggtgtcccatgcctgcaattctagctactttggagtctgaggtgggaggatcgcttgatcccaggagatcgaggcttcagtgagttatgattgcaccattgcactccagcctgggtgacagggcaagatcctgtctcaaaaaaaacaaaaccaaacaacaataacaaaaacccaaaagtaaattatattattgatggtaattattgaggctattcattatattattc

SEQ ID NO: 135731 - DNA, 470 bp, Homo sapiens
agtagtaaattatgtaacttcatacttcatatttgtattggtctgttctcacactgctaataacatayccaagagtgggtaatttataaaggaaagaggttttttaattgactcacagttccacatggctggggaggcctcataatcatggtggaagcgaaggaggagcaaagtcacatcttacatggcgacagtcaagagaagagatcatgtgcaggggaactcccctttataaacccatcaggtttcgtgagactttttcactatcatgagagcagcatggcaaagacccgcccccatcattcagttacctcccaccaggtccctcccatgacatgtgggaattatgggagctacaatttgagatttgggtgggaacacagccaaaccatatcaatattcaagatcagctttttataaattcagggtagcaagtttttctgtgagttttggggtatagttgcaaaata

SEQ ID NO: 135732 - DNA, 474 bp, Homo sapiens
ggcaggcatttgcaggtgttaattcccattatgaggcacgcacactgatggctacacagcaggaaaaatctcctattggagaatacaattgagatgtacaaggcagggggcatttcgtgcttgattcttttctccatggagaatttggaagatgatattatttcagtcatttaaatatttgtagaaattactctctttaggaggaataacatgatgccaacatattgtgggctcaaacaagcatcagaaaaaccatgtcgtctggtcaatgtctacttttccttgtgacatttcccatctctgaatcccatggcagttctgtctttggaatcatctgtgcaactctctaaggacatgtggacacctcttcacttctaggtaaaatcacatgttaaaattgtctgtggccatctgtccagatagaaaggaartgaactatgtgcctacttgtcaagatgcttcagtatttatttg

SEQ ID NO: 135733 - DNA, 555 bp, Homo sapiens
agatccattttataacactaagcttcagcatgccaagcttggagaaagaaagttcagttattaccagaagtcatccagttttccccttggtcatcataggtcacagctctctccagctcaactccatgagtacttcctatgtgtatggtgccctgctaggttactacagcatcctgggaagcacatgtagagggtgtgccataaatgccaaaaggagttattgacaaggcrttccatcctagttggaggcatcaatatatatgtaatagaaattaataaataagctggacatggtagttcacacctgtaattccagcagtttgggaggccaacacaggagaattatttgaggctaggagttcaataccagcttgggcattatagtgagaccctttctctaaaatacatatatatatatatattagccaggtgtgttttgggatgttgaaatgggaggatcagttaagcacaggggttcaagccttcagggagctacgatcatgccaccacactccagcctgggcaagagagtgagaccctgtctctgtccatcat

SEQ ID NO: 135734 - DNA, 555 bp, Homo sapiens
agatccattttataacactaagcttcagcatgccaagcttggagaaagaaagttcagttattaccagaagtcatccagttttccccttggtcatcataggtcacagctctctccagctcaactccatgagtacttcctatgtgtatggtgccctgctaggttactacagcatcctgggaagcacatgtagagggtgtgccataaatgccaaaaggagttattgacaaggcattccatcctagttggaggcaycaatatatatgtaatagaaattaataaataagctggacatggtagttcacacctgtaattccagcagtttgggaggccaacacaggagaattatttgaggctaggagttcaataccagcttgggcattatagtgagaccctttctctaaaatacatatatatatatatattagccaggtgtgttttgggatgttgaaatgggaggatcagttaagcacaggggttcaagccttcagggagctacgatcatgccaccacactccagcctgggcaagagagtgagaccctgtctctgtccatcat

SEQ ID NO: 135735 - DNA, 568 bp, Homo sapiens
tctaatgattcacctcatggtgttacctggggctggctctgctccctagtctgcatatttgtgtctgaatcttgtctcattctgccccaggtcctctccaagactgagcacctttacttttgtctcttgcagcatccctggacattccattgcccacccagatcacttttttgggattgctcacttggcattcctcagccacacattatagaatgtgaacatcccagggtcaagagccctcatctctttgccctggttggctttaccatctccaggactgtcgctgctagtccagatgcagttccgtccttcaacctaagactcagagtccagcccttgaggcctcttctgtcctggggctcagcctttcatgcttctctggcgctttgaatctgccaagtgcctkgtccctagccagaacccccactttcttcctgacgttggatattggatgccatgtctgcctatgggatagtttcttcccaggtccatcccatctaaaccttgcctgagcttcaggagctcagaaggagcatcacaggagccctgtagtactgtgcccacgtct

SEQ ID NO: 135736 - DNA, 592 bp, Homo sapiens
gaagagacacaccaccatcagtcctatatctacccatcagtttttgggaaatgcaggggtcaggggaacatgacaccatcaagatacaagtagcaaagtctagactgtggaaaactctacaggtttctttaataaatatattttatgacaggatgtccaccagctgcagtgcatgggccttatttcaatcttgattctaacaaaccagaaaaacaataaataataagttgggcatgtgactcatgcctgatgaaacaatcaaaactatgagactgaatagctgaacatgttaaggaattattaatttttttacatgaatatagttgtgttttttaaaraggatccttatttttaagagctataaatatatatgctaaaatgatatatctggtaaccacttcaaaataataaaataatcttccagcaggggcagagggtcagatgggaagtgtgaatgaagccaagattggccatggattgatcattgttggctgctgggtgcattggtagtgtattacactatctacctttgtaattgttagaagttttccacagtcagaagttcttcttcttttttttttttttaaatgat

SEQ ID NO: 135737 - DNA, 592 bp, Homo sapiens
gaagagacacaccaccatcagtcctatatctacccatcagtttttgggaaatgcaggggtcaggggaacatgacaccatcaagatacaagtagcaaagtctagactgtggaaaactctacaggtttctttaataaatatattttatgacaggatgtccaccagctgcagtgcatgggccttatttcaatcttgattctaacaaaccagaaaaacaataaataataagttgggcatgtgactcatgcctgatgaaacaatcaaaactatgagactgaatagctgaacatgttaaggaattattaatttttttacatgaatatagttgtgttttttaaaaaggatccttatttttaagagctataaatatatatgctaaaatgatatatctggtaaccacttcaaaataataaaataatcttccagcaggggcagagggtcagatgggaagtgtgaatgaagccaagattggccatggaktgatcattgttggctgctgggtgcattggtagtgtattacactatctacctttgtaattgttagaagttttccacagtcagaagttcttcttcttttttttttttttaaatgat

SEQ ID NO: 135738 - DNA, 540 bp, Homo sapiens
agctcctggcagcaatatctgtatgtacgccctactccctgaccctgacagattgatcactagtggatgttgaccgacccaaacagaccaaatcagattctgtctcgcaggagttcagatttgggatccagatatgctagttgtacctgttggccacttgaactgaaaagatgtaatctggcagccatggggtggccaccttctgtcctgtggagaaagagtctgaaactccctctgcagagagaggagaggaatgaactaaccaggtgaacagaaacagagagagacatcacayagggccagacagaggctgaaagaccccaagcctggttccggagggcatccttgctcaggcctggtcacaggatcagcccctggattctgcaatactcatttgttcttataataaatcccccccacacacacaccctttttaaaattaagctaatacaagtgggtttctgttacttgtaactgaaagaacattggctaccacagcataggaaggtccacaggccaaggtaggcaaggtttgtatgg

SEQ ID NO: 135739 - DNA, 299 bp, Homo sapiens
ttggaaactgcaagtttaagtgaaacaacatgtaacaaaaccacttttaccacatataaacaagaggtaagttcctagagcatatttgtggtccccaaaacattactaaacttctaaacaaagacccaaacacttctaatattaaacattgaaataagtgtgagctacatatacattaagaaaggttaataaaaacaaggtaattgtttacccaatttttggtaaatcagctaatgatggtggtcatagtggtgatgagttaaatcaagaaataartgcttgcaaagcaaaaattgtca

SEQ ID NO: 135740 - DNA, 241 bp, Homo sapiens
tagaaacctgagttaactggtaccatatttccaatttattctagggatatttcagcatttcttataaactcgcaccccaggcagctgcccagttggctcaccgtttaatatagctctttttttttttttaatcactgaraaatgcttggataggaggcttgccaggacctcagtagtatggcctatgtgtagtctatttattcattttttcagcaaatactagaagttatcccagcctgca

SEQ ID NO: 135741 - DNA, 615 bp, Homo sapiens
tgattggggatggggcaggaggtaaaatatatagaaagatagtagctaccactcaaactacatatttaccagaaggcagcatgtttatctgctcaagatgttctgtttttagcctccagaaaagccacgtccctaggttctgagggtagtaccaagtccatgttagagatgagcaaagaagcccagataggttaagtggagtggccaaaataaccctgtagaaaggggtagaactgtctgactccagcttccaagcatcttacctttaggcaggaaggcaagggttccaaacacccacgcattccccaggcaagctcaccaaggcccactgaccccagcagccagaggacagccctgaaaagtgaggggcgggagtccttggctatgttctaagaactgagagaagcattcacaatgaaatccagaaggctctttggagaagtctgcagttttggaacaatcctgctaagtcatagatgctttgaattccttagcttttgccttcagaattcctggcagctgcagrcagtggatgagtattcgtggacagacactgatttctcccctgctggcgaaggccagggcaggccaggtccaagactgagaagccagcag

SEQ ID NO: 135742 - DNA, 615 bp, Homo sapiens
tgattggggatggggcaggaggtaaaatatatagaaagatagtagctaccactcaaactacatatttaccagaaggcagcatgtttatctgctcaagatgttctgtttttagcctccagaaaagccacgtccctaggttctgagggtagtaccaagtccatgttagagatgagcaaagaagcccagataggttaagtggagtggccaaaataaccctgtagaaaggggtagaactgtctgactccagcttccaagcatcttacctttaggcaggaaggcaagggttccaaacacccacgcattccccaggcaagctcaccaaggcccactgaccccagcagccagaggacagccctgaaaagtgaggggcgggagtccttggctatgttctaagaactgagagaagcattcacaatgaaatccagaaggctctttggagaagtctgcagttttggaacaatcctgctaagtcatagatgctttgaattccttagcttttgccttcagaattcctggcagctgcagacagtggatgagtattcgtggacagacactgatttctcccctgctggygaaggccagggcaggccaggtccaagactgagaagccagcag

SEQ ID NO: 135743 - DNA, 545 bp, Homo sapiens
atacactaaactttccacatggaattctttgcccacttctgtacctggaaagctcctattgcaaaggaaggaaggcaaagagggaggatgggaagatccgggggcacggaagaagggaggaatagagggagggarggaggatgggaggatcagaggaaaggagggagggagggaggaagtgagcgagagagggaatggtagcatagaagctgaggaacctccagctgaagttttagcacctcaaacccttctgccatgctgtattcttaatcggaacctgtctgtcccccatgacgcctatttcctgagtactccttgcaagtcccccttctctgctaggcaagcttctgtgaggcagcttgagtcctaatgcaccccctggtcttccactgcagccccaggccttcccctccttttcaccacccatggttggttctatgatggaggttggaggcagtgggcaaagagcccctgggacaggtggggattgtggggagggtcaggccttcttatctggagatgctgtgccccagcacctctaccct

SEQ ID NO: 135744 - DNA, 545 bp, Homo sapiens
atacactaaactttccacatggaattctttgcccacttctgtacctggaaagctcctattgcaaaggaaggaaggcaaagagggaggatgggaagatccgggggcacggaagaagggaggaatagagggagggaaggaggatgggaggatcagaggaaaggagggagggagggaggaagtgagcgagagagggaatggtagcatagaagctgaggaacctccagctgaagttttagcacctcaaacccttctgccatgctgtattcttaatcggaacctgtctgtcccccatgacgcctatttcctgagtactccttgcaagtcccccttctctgctaggcaagcttctgtgaggcagcttgagtcctaaygcaccccctggtcttccactgcagccccaggccttcccctccttttcaccacccatggttggttctatgatggaggttggaggcagtgggcaaagagcccctgggacaggtggggattgtggggagggtcaggccttcttatctggagatgctgtgccccagcacctctaccct

SEQ ID NO: 135745 - DNA, 384 bp, Homo sapiens
tgtcttcttccaacccagataaaaagggactgcatcctctcagctcaaaaggactgtagacttcactctgagcaggttgaactggaggttgtggactcagagcaccaggccacctaaaagtgagggtgagggttctcaccaaaaacagagagaggatgtaagactctacagaatgactcaccagacagacctctggcctccttccctgagtaggctccaaggacactggcagctggtttattctgtccatcaagccattggagaacacctctctatggatgctataagtctacaaatacatgccaactgtcaagatctccgaacaagacgcataggtccttactggcastgtgatccagcaggaaacaagccctgaccccatag

SEQ ID NO: 135746 - DNA, 601 bp, Homo sapiens
gcagaatgtgcatcatttccaatggcatatattacattcactaagacgtaccatatgctggaccctaaatcagtctgaacgtattttaaaagatttaagtcatacaaagtatgttctctgacaaaattaaattagaaatcaatttttaacaagatagctataaaacctcccaagcactttgaaattcagcagcaaactgccaaataacctatgggttaaagaagaaattgcaagaaaaaattagaaactatgtttttaattgaatgatgaaaacatacccaatcaaaatatgtagaattcagctaaaacagtgcttaaagggaattttatagctttaagtttttttaagtttaaaatataatcaaatttcctaccttaagaagctaaaaaaatgagggcaaattaaactcctactaagtagaaggaaggamgtaataaagctaagagagggaatcaataaactaaaaagttaacaaacaataaaggaaatcaaagaaataaaaagtggttctctgaaaagattaataaaggtgataatcccacagaccagctgacaagagagagtgagagagggatggagggagagagaacacaaattaac

SEQ ID NO: 135747 - DNA, 607 bp, Homo sapiens
aacctgttgtatagtctgtgatttttttttgctttcacatacatcattcatgtacccaatttggtcatttatttctttagacattcaataactattcatttaacagatactttttacatacctctgtatcccagccagtcttctaggcaccaaaggggtggaaaatgaatggatcaagttaagtcactggtttcttagtgcttctgtgttactaggagccttaggtaataaatacacatctgatgttatatgctatggataaaattatagcaggataggaggatagagaatgctgtgtgtgagcatgtgattatgttctgtataataatcaggaaagacttcacgatagatgacatttgagttggtgcctgaagatatagagtragccatacaaatatctacaggagaaaaagatcccataaatttttctgagctgaatctaaggaggtgaggggcaaacaggaagtgcagatacaaatgcagaggttgccttaaagccctgcttgctttctcagcagggaagcttgtagcctggggcaagatctcagccctgcctgccatgccacctgaacaacacagtacaggtagccataataccatttggacc

SEQ ID NO: 135748 - DNA, 607 bp, Homo sapiens
aacctgttgtatagtctgtgatttttttttgctttcacatacatcattcatgtacccaatttggtcatttatttctttagacattcaataactattcatttaacagatactttttacatacctctgtatcccagccagtcttctaggcaccaaaggggtggaaaatgaatggatcaagttaagtcactggtttcttagtgcttctgtgttactaggagccttaggtaataaatacacatctgatgttatatgctatggataaaattatagcaggataggaggatagagaatgctgtgtgtgagcatgtgattatgttctgtataataatcaggaaagacttcacgatagatgacatttgagttggtgcctgaagatatagagtgagccatacaaatatctacaggagaaaaagatcccataaatttttctgagctgaatctaaggaggtgaggggcaaacaggaagtgcagatacaaatgcagaggttgccktaaagccctgcttgctttctcagcagggaagcttgtagcctggggcaagatctcagccctgcctgccatgccacctgaacaacacagtacaggtagccataataccatttggacc

SEQ ID NO: 135749 - DNA, 562 bp, Homo sapiens
ctaacataacatacaaaataccaagaaatcatgtctcatacaagaaaatcaacctgaaggagaaaaggcaatcaacaccaaaaggtaaggctcatactgagatgagtcagaacttggaattattcgaaaaggattttaaagcagcccacgtacatgctgctataatcaattataaattcttttgaaacaaataaaaataaacccagtcatgaatagaaattataaaaagaaccaaatagaaattaaagaaccaaaaaacataataatggaaaaataaatttgccgaatggacttaatattagagtggatatgacaaaggagagaatcagtgaatttaaagacatatcaataaaatttatyccaatccaaacaacagggagaatgcagactgtaaaataaacaaacaaacagaaaacaaaaatagcacctccaacacctgtgggacaaaatcaaaagatccatcatgtgttgtattagaagcccacaggatgggagaaagtgaacctgaaagagtattcaaggaaataatggctaaaaacttcccaaattgggcaaaagacat

SEQ ID NO: 135750 - DNA, 578 bp, Homo sapiens
cattcatatctatgtgtctgcaaacattatatctggctagttatgtttatttttttgtgggccagtatcagtcagacttcaattggagaatcaggactaggagataatgataggtagagagagacagrtatatagttgataggtaggtagattcataatagacaagttgcaaggatttacgattgtgggaggtgatcacacaatctgtgagaaagctttctgcataactattgctggagcttgatgtccacagggcaggtagaacagaagggaagatgaacacaaagtggagccgaccaagcacaacctggacccacatcagtatggactgagacccgtgttagttcttgttgccactgaccagggtgatgtgagataatgcagaagccaaaaccctttgtcatggagctaactaagcatgcacacctggccagacattgcctcacaccagtgaagtgagttagcaagtatcattggtgagctcctacctttccctagttactcatttattatattaaatgttccctgttgaagttaccaatgtggtctctgtctcctaagtggacactgactgattt

SEQ ID NO: 135751 - DNA, 417 bp, Homo sapiens
atttaatatcttgccttaattatttctttcctctaatctctttctaaccttgttctgaagtccctactatgtggataatagatatggctttcccattaccagtatgtagtaatcttgcttttttctgatactttacctctgatgttttgctctaccttctgggagacatcctttttcatcaacttctaactcagtcttcaaccgtagcctattattcttcagccttcttattacatttttaattctgatcatcatattttaatttctaatacatattttgtagtcactgattactctttttaatagcagtcagttcatattttgtggatgtaaaatycttcagtttttccttgaagtgtaaattagatgttttcattctttattttctatttttgttttttcctcttactattgtct

SEQ ID NO: 135752 - DNA, 524 bp, Homo sapiens
attgttgtctccaaggtcagcatttttctggagctttgactgaaagcactgatctcacctctgtaatgggtccctcctccctctctctctctctctctcctcaaagtttgttcactgccttcwatctcccaggaatatctcaatgtttctgacccaatgatgatataattttcccactctgccactgttatgaataaatttcttaaaactaatttctatcttgacttttaaatgggattttggtagtgagtcatgagaagtaaaaacacaagaatttcattagccaaactgaaccaaaatattttgattgcttctttttccagaaaaatcttatttacatatcaccttcagaataatatatgtaaaaccgaagtacagttgctgcattttctggaagagaaagcgttttttcttcgggttagtcttgagggcgtaagaaagaaatctagggatataggatgtacatattcaagtttatcctcagggtagcgaccacttttacaagaaaacattggaagcttaga

SEQ ID NO: 135753 - DNA, 524 bp, Homo sapiens
attgttgtctccaaggtcagcatttttctggagctttgactgaaagcactgatctcacctctgtaatgggtccctcctccctctctctctctctctctcctcaaagtttgttcactgccttctatctcccaggaatatctcaatgtttctgacccaatgatgatataattttcccactctgccactgttatgaataaatttcttaaaactaatttctatcttgacttttaaatgggattttggtagtgagtcatgagaagtaaaaacacaagaatttcattagccaaactgaaccaaaatattttgattgcttctttttccagaaaaatcttatttacatatcaccttcagaataatatatgtaaaacygaagtacagttgctgcattttctggaagagaaagcgttttttcttcgggttagtcttgagggcgtaagaaagaaatctagggatataggatgtacatattcaagtttatcctcagggtagcgaccacttttacaagaaaacattggaagcttaga

SEQ ID NO: 135754 - DNA, 524 bp, Homo sapiens
attgttgtctccaaggtcagcatttttctggagctttgactgaaagcactgatctcacctctgtaatgggtccctcctccctctctctctctctctctcctcaaagtttgttcactgccttctatctcccaggaatatctcaatgtttctgacccaatgatgatataattttcccactctgccactgttatgaataaatttcttaaaactaatttctatcttgacttttaaatgggattttggtagtgagtcatgagaagtaaaaacacaagaatttcattagccaaactgaaccaaaatattttgattgcttctttttccagaaaaatcttatttacatatcaccttcagaataatatatgtaaaaccgaagtacagttgctgcattttctggaagagaaagcgttttttcttckggttagtcttgagggcgtaagaaagaaatctagggatataggatgtacatattcaagtttatcctcagggtagcgaccacttttacaagaaaacattggaagcttaga

SEQ ID NO: 135755 - DNA, 590 bp, Homo sapiens
catgcccctgctgtgatatctaactatatgtgccacttccacctgagtgttagccatttgttctgagatatcccacaacattctctatgaacttccatatatgttatgcccttctagttgtttagtttcttgtcttttcccctagtattttgcaaaaggaaatttctcacaatagaaaataagaaccatagctttgcaaagtatctgtamctagtacatgtgtgctaaatacctaaatggttattcgcagagttttttttttttttggtctcaacaaagtgagagcatgatttaaggatttatatttgggaagtgcaactggaaatttgcattaaaccagcaactatcaaaaatctagaaaatttgtcttcactatttcagtgtttcaaaatatttcagtgtttcaccatatttcactgtttctctatttaaagagaacaaataaaatatttgccactgcattatttgcttttggcatctctttgagctttgccaagaagcataaggtttattatattcaccacgggcctttttatgctggcaaacatacaaactacattagaagaacaaatttaggttgagtgaaaaat

SEQ ID NO: 135756 - DNA, 590 bp, Homo sapiens
catgcccctgctgtgatatctaactatatgtgccacttccacctgagtgttagccatttgttctgagatatcccacaacattctctatgaacttccatatatgttatgcccttctagttgtttagtttcttgtcttttcccctagtattttgcaaaaggaaatttctcacaatagaaaataagaaccatagctttgcaaagtatctgtaactagtacatgtgtgctaaatacctaaatggttattcrcagagttttttttttttttggtctcaacaaagtgagagcatgatttaaggatttatatttgggaagtgcaactggaaatttgcattaaaccagcaactatcaaaaatctagaaaatttgtcttcactatttcagtgtttcaaaatatttcagtgtttcaccatatttcactgtttctctatttaaagagaacaaataaaatatttgccactgcattatttgcttttggcatctctttgagctttgccaagaagcataaggtttattatattcaccacgggcctttttatgctggcaaacatacaaactacattagaagaacaaatttaggttgagtgaaaaat

SEQ ID NO: 135757 - DNA, 616 bp, Homo sapiens
aaatagtgtatttcatttacaaaacgtatgtaacaaaaccagcaatatgtgcatcctggccttcatctgaaatgtagtctctaggggcaactctggctttaaatacttagcccactctacttkcaataatgattataaaaatacaaagcaaatgtctggagatgaacagtaatttatttctggtttctagttttcatgtttttcagacttggatgggttttttgattcttgagctcttataattctaggaactataaagaacatgaaaaagtggtcaagaagccaaaggagagaacgtaagctattccctctgtgcgtattctctgtttcactctgtccttgtgggcatttttatcaacctgaagggggtatttgcatgttaggttgtcttagggagccttagaccatctcattgaataggttcagaagtcccctagaacagcagtccccaaccttttaggcaccagagactggttttgtggaagacaatttttccatggattctgggttggggatggtttcaggatgaaactgttccacctctgatcatcaggaattagattctcataaagagtgcgcaacctagatccctcgcatgcacagttcacaacagggt

SEQ ID NO: 135758 - DNA, 616 bp, Homo sapiens
aaatagtgtatttcatttacaaaacgtatgtaacaaaaccagcaatatgtgcatcctggccttcatctgaaatgtagtctctaggggcaactctggctttaaatacttagcccactctactttcaataatgattataaaaatacaaagcaaatgtctggagatgaacagtaatttatttctggtttctagttttcatgtttttcagacttgratgggttttttgattcttgagctcttataattctaggaactataaagaacatgaaaaagtggtcaagaagccaaaggagagaacgtaagctattccctctgtgcgtattctctgtttcactctgtccttgtgggcatttttatcaacctgaagggggtatttgcatgttaggttgtcttagggagccttagaccatctcattgaataggttcagaagtcccctagaacagcagtccccaaccttttaggcaccagagactggttttgtggaagacaatttttccatggattctgggttggggatggtttcaggatgaaactgttccacctctgatcatcaggaattagattctcataaagagtgcgcaacctagatccctcgcatgcacagttcacaacagggt

SEQ ID NO: 135759 - DNA, 616 bp, Homo sapiens
aaatagtgtatttcatttacaaaacgtatgtaacaaaaccagcaatatgtgcatcctggccttcatctgaaatgtagtctctaggggcaactctggctttaaatacttagcccactctactttcaataatgattataaaaatacaaagcaaatgtctggagatgaacagtaatttatttctggtttctagttttcatgtttttcagacttggatgggttttttgattcttgagctcttataattctaggaactataaagaacatgaaaaagtggtcaagaagccaaaggagagaacgtaagctattccctctgtgcgtattctctgtttcactctgtccttgtgggcatttttatcaacctgaagggggtatttgcatgttaggttgtcttagggagccttagaccatctcattgaataggttcagaagtcccctagaasagcagtccccaaccttttaggcaccagagactggttttgtggaagacaatttttccatggattctgggttggggatggtttcaggatgaaactgttccacctctgatcatcaggaattagattctcataaagagtgcgcaacctagatccctcgcatgcacagttcacaacagggt

SEQ ID NO: 135760 - DNA, 425 bp, Homo sapiens
gagaactagagcaagttgctggagagagagcagcttaaagtggaaaycactgtgaaacagtcaaatcccgggactctgagaaatgctagaaaaatgtgttacagattgtcatttagccacttctattaaagctgaagagtagctctagggattagaacagagtcatttctatgctgtttaaactaatttattctttatacgaaccagaataagtaagaaactcgattggaaaaattggttcaagaaacttcctgagtgagcacatttctgagcactgtgggctatgataaaatgaatgagtcatagtctatcttaaagaggttcccactccagtaagaaagatatggccagatacacaaatcactcttcaggacataatggagaaaggcacagagaggtaaaaagtgtaacagatgctcagaatt

SEQ ID NO: 135761 - DNA, 427 bp, Homo sapiens
tgagaactagagcaagttgctggagagagagcagcttaaagtggaaaccactgtgaaacagtcaaatcccgggactctgagaaatgctagaaaaatgtgttacagattgtcatttagccacttctattaaagctgaagagtagctctagggattagaacagagtcatttctatgctgtttaaactaatttattctttatacgaaccagaataagtaagaaactcgaytggaaaaattggttcaagaaacttcctgagtgagcacatttctgagcactgtgggctatgataaaatgaatgagtcatagtctatcttaaagaggttcccactccagtaagaaagatatggccagatacacaaatcactcttcaggacataatggagaaaggcacagagaggtaaaaagtgtaacagatgctcagaattc

SEQ ID NO: 135762 - DNA, 639 bp, Homo sapiens
taggcttcataaaaactccagggagacagggagagactggaattcttgccatcaaggttaggtattgaatcaatgaattaaaaactgaaaattagtagaggcaagactatactttcaccctatgttatagagtatacattcagcttgcaacaagaattacttatttataaaggaatgtacatttctaacaagctaggtttaaatattcctagaacctcctagtacattccactagaatataagttccaggagggtaaaggattcagtgccatattctcaaaacttgggaatatagcaggctgttaatgagtawttattgtataagtgaataaaaggtgtattgattataatattttgagcttcttaaatactaattaaatagatggatcattacaaggtatggagaaaaatacaaacacatgatttatttctttttcatagcagaaataaatattttagattcatctacgtgtaagttagaaaattaaacataattgaattgaatttatataaacattccttgggtgcttatattatgtgagatactgggctaaaaatttaattgaatgagcgagttcctgttcttcagcaatctggtgaagaaatacaacctaaggtgacattaccgttcactttaac

SEQ ID NO: 135763 - DNA, 639 bp, Homo sapiens
taggcttcataaaaactccagggagacagggagagactggaattcttgccatcaaggttaggtattgaatcaatgaattaaaaactgaaaattagtagaggcaagactatactttcaccctatgttatagagtatacattcagcttgcaacaagaattacttatttataaaggaatgtacatttctaacaagctaggtttaaatattcctagaacctcctagtacattccactagaatataagttccaggagggtaaaggattcagtgccatattctcaaaacttgggaatatagcaggctgttaatgagtatttattgtataagtgaataaaaggtgtattgattataatattttgagcttcttaaatactaattaaatagatggatcattacaaggtatggagaaaaatacaaacacatgatttatttctttttcatagcagaaataaatattttagattcatctasgtgtaagttagaaaattaaacataattgaattgaatttatataaacattccttgggtgcttatattatgtgagatactgggctaaaaatttaattgaatgagcgagttcctgttcttcagcaatctggtgaagaaatacaacctaaggtgacattaccgttcactttaac

SEQ ID NO: 135764 - DNA, 576 bp, Homo sapiens
agcattaaccagttttctacctaaatgaattatcattcaagaatttacaaaaaaataacaaccttgtcattcccactattatagatattataaccctactcaacctatacttttatatatgcctaatctattctacttcagtcacattattccccatatccaataatgtaaaaataaagtgacagtttgaaaacacaaagcccatactacttctcccccggcttaccatcctcgccatcttcctcctaccaatctccctacttaccctgcttatcttctagaaatttaggttaaacaagaccaagagccttcaaagcccttagtaagtagactatacttaatttctgaaaacccaaggactgcaaaactctactctgcaaatttgagaacttttcagtcatcatttcatggaatactttttcaataatgttctttttttaaatctccttctgggcctttgataatatgcatgctagatcttttggtattgttcacaggttcttgatattctgttaattttttctcagtctattttctctstatagttaagagtggaaaaattctatagatctgttt

SEQ ID NO: 135765 - DNA, 592 bp, Homo sapiens
tcagtctacactaacgacatgcaagtttcattttcagtcatgttagctaacagaactgcaaagagagactaaatctttgataatgtgttttttggagtgattttttaaatggattatacaaacgttaccattcactagaattcatattacttagaggcatctgagcacattttgaaatgaagtgtttcagcagagaaagaaaatcctcacccccaccaaaaagaaaaaaattggggatttaaaaaaaaattaaaaaataaaataagtccatccttggaaaaggctttttwaaaataaattagatgtatgaaacagaaacaaatgaaacaaaatttttttgtgtgtttaatcagcatctaagaggtttattaaattgcctttctaatgttgatataaggcaaaagtgcaaccactacttccattaaagggagaaaaaaatgctagaataatgtagaaaagaaattatttctgtgcactctatgataggctgatcatttcacatcttggcatattgctgttgaatgtggcatgcgaagttggacgatagtaaaaagattgttgaaactcaacgattacagcacatgctttaaaa

SEQ ID NO: 135766 - DNA, 467 bp, Homo sapiens
tcataaatataaaaatattaatcagatgttttactttcttcccctcatataaagttttcaaaaccggtagtattttacacttctcaatctggacaagacacatttcaagtgctcaacagccacatgtggctactgtactggacagcacattctagatttccaaacatatgaagctttttggcctaaaaaaaccatacactttaaaatctttctatgtcacattctctatgatccatatggttgatgggattttattttgggccaatcacttcgtgaacctatttcacttctttcctccactcttttgactctcatatctactacccaccctaatgcctttgcatacagaattttaaaaacccaatcacctattcttttcagcttctcctaaccaagacytgagatgttctctaatccgcacatctatcaccaagcagaaagccagaaggtgcagcaagattatttat

SEQ ID NO: 135767 - DNA, 356 bp, Homo sapiens
tccttggtctgcagtctatgtgacttggccctttctcaactccagctcctgagcttcmtctcccaccatcctttgagacccaggctcttttctacttctcagatatgccaagctcattctggcccttgcgctggtcaatcactcttcctgaactactcttcctggagtcgtctgcatggtgctctcaatcctctcactgttcaggtcttagcttaaatattaccttttcaaataggccatctcaggagaccacctacgtaaagatgattttcccatcttctctttatccttttactatgctggattttcttctggtcactatcactatctagaagtcctttaaaattttatttctt

SEQ ID NO: 135768 - DNA, 416 bp, Homo sapiens
gggcccagggatgctgtccagactggggtgaggaaggaaagtctcaggaatccaccagacctcaaaaatccaggctctggtgccatcgggaagggaggctrcccagtgccccagcagacttcctcccctcgtgtgcgagaaagaggagcaatagccacagtcattaagtgggaggctagtgacaattatttcatttactccagaagggacagagatcccttgcaggcccaaggagctgaaaacgtgacccagaaatggaatgatgtggccatcccagtgtggagtctcctggaagaagaccaaccttccctaaaagaggctttggatgcctcctaccatccaaaaagaaacaagccgtccacagaggaccgcaagaagaagggactgctctggcattcggttacactattgctgtg

SEQ ID NO: 135769 - DNA, 416 bp, Homo sapiens
gggcccagggatgctgtccagactggggtgaggaaggaaagtctcaggaatccaccagacctcaaaaatccaggctctggtgccatcgggaagggaggctacccagtgccccagcagacttcctcccctcgtgtgcgagaaagaggagcaatagccacagtcattaagtgggaggctagtgacaattatttcatttactccagaagggacagagatcccttgcaggcccaaggagctgaaaacgtgacccagaaatggaatgatgtggccatcccagtgtggagtctcctggaagaagaccaaycttccctaaaagaggctttggatgcctcctaccatccaaaaagaaacaagccgtccacagaggaccgcaagaagaagggactgctctggcattcggttacactattgctgtg

SEQ ID NO: 135770 - DNA, 378 bp, Homo sapiens
tgggcattttaaatacactgttattgtaaagatgtatacagttcaatactagattcttcaaaaccaaaattaattagaaaagtcaaaattggtcaaactgaaatgtgatattactgcagctaatatggtagtatcctggaaataaaatacagagtagaaatacaaagttcttattataatctagtgcagttttttartattactgtattatttcattttcatattaatgcaaagcaaataaggtagatcttaagagaagtaaagcataataattaaatttaaatattatcatatttgaaaaatgtactagcttagcagaaagatcatagtctttattttgaggaaggattcagcttaaattctgactaaataaaagtt

SEQ ID NO: 135771 - DNA, 603 bp, Homo sapiens
cacttctcctgctttcttgttacaaaatcttatcaaagtartaatggaagttgaaagatttataagtatttctgaaacattctcagaataactgtaaagggtagatggaactattgtaaattagtcagcacattttatggcaaggtcaaatggggaaggtctgaacattttttcattaatgttaatattcagaagggtacagagttttcatttggtatgatgaaaattctagaaatggatagtggtgatggttgtacaacattgcaaatgtatttaatgcccataattcttcacttaaacatgattaaaatggcaaattttatattatgtttatattttatcgcaataaaaataatacattcaggtttgataactaaatgatattttgtctcacttagtacactaagatacttaatagttcgacttaaattcaactgtgtccatgtcatgcctggcacttgtctactgtaactgatgtgttaaaaaataaaatcccaaccaacctactttatctttttatcatctaagatggactacttcacagacttatgaagtatttactcaatcaataatggaaatgtataaaatccctaaacacatcat

SEQ ID NO: 135772 - DNA, 614 bp, Homo sapiens
ttccaaatccatgtttcacatacaaattgctgcagtaattttcccaggtcagcataaaatttgttcctgctggcccacatttggaaagatgatctatgggaaaacaaatgatctggctgacatttcttttctttcttttctcttattttcatgagtttgcatttgcagtacttctctcaaggtaatttctaatgcgattggaccctcagccaaagtgagctctggttagggatctcaaatattacatacatagcattagtattgcattgcaaaggattaaaaagtaatataataaggcttcaatctctcttttttttcacttcagctkttattaaatgtacaaaagaaatatcatgtgttttaccctctataatccaaattgtccccaacctggccttccatacggtagaagaaataatgatggaaatgcaaaatgcagtaaaaatgtgaaattgcctttctgatgagggttcagctatcaagtaatttttagctctgaaattttggtaacttgagtaataacctggatatctatattcttcagacagggaacgttagttggaaaagagtcactgggggatagctagggaggacttcggacagataagttactg

SEQ ID NO: 135773 - DNA, 607 bp, Homo sapiens
atgagagacttggtgaaaacaagctttcttgtgagtcatccttaataccattgggaaaataggcatcgcattccagtggactgggcagctaacaaccctcacccccacaaaatggaaaatctgtaaagttcttttgattcccacaaccagagatattcctcttctcattcaactcttttattttgtgayggtgcaacatcttttctgagaatagcttaaggtttgggacccaaaggtcctaaatttaagggggtggaaaaggtttaatagtaaatgtcacgtgcatgaatgtcctttatcctgtatttattcataaaataataatagttatcatttattgaatactccctatgcagtatgcattatctcacttctatcattacagtgtctttcctgttaagtaccttgattcttaacgaatgaatgaaaaaatttaaagataaggaaaacaggaaaaagacctcaaggaggataaatggctagcaagagtaaagggaaatttgaactaagactgatacgactacaaagcccttgcttccaagtattatacactctgcctctctttaaacttcttaagggagaaattttttaaaaatcagaaaaagga

SEQ ID NO: 135774 - DNA, 225 bp, Homo sapiens
atttagcaaggctttatctttgcctgtaagaaaacttactccaattacttcaaaatataaatgagtttgaaaccaatatgagtctcctgatactgatctcttatttctcaactgcatacaaggtaactcacattaaaaaaaaaaaaaaamcctagttgcaaaagactgtagataattttaccactttcttatgttatattaccttcctgcaggtcattttaataa

SEQ ID NO: 135775 - DNA, 433 bp, Homo sapiens
ctgatggtatttaaagtgtttgacggttcctccttcacaggtgctctctcatgtgctgccatgtaagaagtgcctgcttccccttctgccatgattataagtttcctggggccttcccagccatgcagaactgttagtcaattaaayttctttactttataaattatctctggcagttctttatagcagtgtaaaaatggactaatacactccctaggaatgggagcaagacaaggatgtctactctcatttctcctattcaacatattactggaagtcctagtcagagcaattaggtgtgaagaagatataaaagtaatacaaataggaaaagaagaagtagaattatctctgctagctgatgacatgatcctatacctagaaagcctaatgactgctccaaaggactcctagacctgataaatgacttcag

SEQ ID NO: 135776 - DNA, 569 bp, Homo sapiens
tgtttgacggttcctccttcacaggtgctctctcatgtgctgccatgtaagaagtgcctgcttccccttctgccatgattataagtttcctggggccttcccagccatgcagaactgttagtcaattaaacttctttactttataaattatctctggcagttctttatagcagtgtaaaaatggactaatacactccctaggaatgggagcaagacaaggatgtctactctcatttctcctattcaacatattactggaagtcctagtcagagcaattaggtgtgaagaagatataaaagtaatacaaataggaaaagaagaagtagaattatctctgctagctgatgacatgatcctatacctagaaagcctaatgactgctccaaaggactcctagacctgataaatgacttcagtacagtttcaggatacaaaaataatgcacaaaaaaatcagttgcattcctatacaccagmaacactcaagctgagaaccaaatcaaacactcaatcccacttacatttgccacaaaaaatactatatctaaaaatgcatttaactaataagg

SEQ ID NO: 135777 - DNA, 657 bp, Homo sapiens
tctgcttctgtcctgtgggatagtagtgatccccatccctgcctctgactttggaaatagatacatggaagtcataccaactttacrtagctgtgaaactgactctagacctccattttgcaagtcgcttcccctcttgatgtctcagtttccttgctcacaaagtggagttaatagtaacacccacctttatggggttttcaatgtttataaataatatttgcaaaacacttggcacagagtaggcacttaacatataaagagaatttcttctgctttgtttactcatcctgaaaatacaggagtaataacatgaagggaatatatactcttagtgaagcaagtgacacaggctaggccaatatgcatgcattttggagccccaaggaaaagcgcttcaggttttctttgtcaaattaaaatcagttccatcttaaaattcccctctgcaaacatttggaaagatggtatttaattgatcataacatcctcagactctcaggcaggctctttcctcctcttgctcatcaccactgattactcaaggtatttttatgtaaacagaaaatggctcctgcataattagacccatccacctccacactccctgctctttctttgcttctagcctcttggagccgcccagtcacctctgag

SEQ ID NO: 135778 - DNA, 580 bp, Homo sapiens
catccaagtgtgtgatgagtggactcatcttgttgaacagggtttagaccacaagcgttggcttatgaagcatgggaaaaaattagtctttcataatagattatttgagaagtgcaggtgtagaagctgygtcttgcagcttgtccactgttagaagattggtttccatgttcagctggaatggggataaggtgtgtctggttgaaaggagagctgaaaatagtaataatagctacattggtgagaaattgatcatttcaattacaaatggaaatcaccatagcccgtcatccagtctctctgcacaaagattaaaagtgaaggctctggaataagagagactcaggttcaaaccttacttccaacattttctagctgtgccataaagtactaggataaagtactaggagtgttggagcctcagttttctcctctgtaaaatggaactaacactcaggttgctgtacagactagtgcctgattagtggtcactctttcataggaactttcttgagctgtagatagaggtaagggggatgatatcactcctgttttgtgattaaagaatcgaagaactgag

SEQ ID NO: 135779 - DNA, 580 bp, Homo sapiens
catccaagtgtgtgatgagtggactcatcttgttgaacagggtttagaccacaagcgttggcttatgaagcatgggaaaaaattagtctttcataatagattatttgagaagtgcaggtgtagaagctgcgtcttgcagcttgtccactgttagaagattggtttccatgttcagctggaatggggataaggtgtgtctggttgaaaggagagctgaaaatagtaataatagctacattggtgagaaattgatcatttcaattacaaatggaaatcaccatagcccgtcatccagtctctctgcacaaagattaaaagtgaaggctytggaataagagagactcaggttcaaaccttacttccaacattttctagctgtgccataaagtactaggataaagtactaggagtgttggagcctcagttttctcctctgtaaaatggaactaacactcaggttgctgtacagactagtgcctgattagtggtcactctttcataggaactttcttgagctgtagatagaggtaagggggatgatatcactcctgttttgtgattaaagaatcgaagaactgag

SEQ ID NO: 135780 - DNA, 587 bp, Homo sapiens
gagcaggtggaaaaatagtattgagatttttgcattgtagattttaggagtaactaataataagtacatagtaaataaaagcaagaggaaattattattattgttttagattcagggagtacatgtgcaggtttgttacatgagtatatmgtgcaatgctaaagtttgggcttctaatgatcccagcatccacatagtgaacatagtgcccagtaggtagtattttcggcccttgcctccctctctgcctccccacttttggcatccccagggtttattgttcccacctttatgtctgtgtgtacccaatgcgtagctcccatttttaagtgagaacttgtggcatctagttttctgttcttctgtgaatttgcttaggacaatggcctccagctgtacccatactgctgcaaacgacatgatttcattctttttttatggctgcatagtattccatggtgtatgtgtgccacattttctttattcaatctatcattgatgggcacctggattgattccatgtctttgctattgtgaatagtgccatgataaacatgtgggtacaagtgtctttttggtagaatagt

SEQ ID NO: 135781 - DNA, 587 bp, Homo sapiens
gagcaggtggaaaaatagtattgagatttttgcattgtagattttaggagtaactaataataagtacatagtaaataaaagcaagaggaaattattattattgttttagattcagggagtacatgtgcaggtttgttacatgagtatatcrtgcaatgctaaagtttgggcttctaatgatcccagcatccacatagtgaacatagtgcccagtaggtagtattttcggcccttgcctccctctctgcctccccacttttggcatccccagggtttattgttcccacctttatgtctgtgtgtacccaatgcgtagctcccatttttaagtgagaacttgtggcatctagttttctgttcttctgtgaatttgcttaggacaatggcctccagctgtacccatactgctgcaaacgacatgatttcattctttttttatggctgcatagtattccatggtgtatgtgtgccacattttctttattcaatctatcattgatgggcacctggattgattccatgtctttgctattgtgaatagtgccatgataaacatgtgggtacaagtgtctttttggtagaatagt

SEQ ID NO: 135782 - DNA, 587 bp, Homo sapiens
gagcaggtggaaaaatagtattgagatttttgcattgtagattttaggagtaactaataataagtacatagtaaataaaagcaagaggaaattattattattgttttagattcagggagtacatgtgcaggtttgttacatgagtatatcgtgcaatgctaaagtttgggcttctaatgatcccagcatccacatagtgaacatagtgcccagtaggtagtattttyggcccttgcctccctctctgcctccccacttttggcatccccagggtttattgttcccacctttatgtctgtgtgtacccaatgcgtagctcccatttttaagtgagaacttgtggcatctagttttctgttcttctgtgaatttgcttaggacaatggcctccagctgtacccatactgctgcaaacgacatgatttcattctttttttatggctgcatagtattccatggtgtatgtgtgccacattttctttattcaatctatcattgatgggcacctggattgattccatgtctttgctattgtgaatagtgccatgataaacatgtgggtacaagtgtctttttggtagaatagt

SEQ ID NO: 135783 - DNA, 503 bp, Homo sapiens
cttgttaaaataaaattatttaaaagtttaaatatcctacatcacagactacagggagaaaatggaagcaaggaaatatcttgagtatttcactttgccrataaaaacatatgatcccttagcttcagcttttacttttttgttgtactttgtagctttgttactcaactaggagatggaaattacacccccccattaatataaatcattaacaggcttggtattttgccactttggccaaatttgggatcctgccatcactgagttttctctctttctgttaaagcttcttttccgttcgcaaagatacctgcaatgtgaaaagggggagttgaaattctagtcatgtttctcctcggttcggtctgattttcagaaattgcagtaaatcagtgtcactgaaaattggcctttttttttttttccctgggggtgttggtttggcttgatgagaaagcaaaaacaaatggagtttataaatgtaactaatcaggaagttaaat

SEQ ID NO: 135784 - DNA, 503 bp, Homo sapiens
cttgttaaaataaaattatttaaaagtttaaatatcctacatcacagactacagggagaaaatggaagcaaggaaatatcttgagtatttcactttgccgataaaaacatatgatcccttagcttcagcttttacttttttgttgtactttgtagctttgttactcaactaggagatggaaattacacccccccattaatataaatcattaacaggcttggtattttgccactttggccaaatttgggatmctgccatcactgagttttctctctttctgttaaagcttcttttccgttcgcaaagatacctgcaatgtgaaaagggggagttgaaattctagtcatgtttctcctcggttcggtctgattttcagaaattgcagtaaatcagtgtcactgaaaattggcctttttttttttttccctgggggtgttggtttggcttgatgagaaagcaaaaacaaatggagtttataaatgtaactaatcaggaagttaaat

SEQ ID NO: 135785 - DNA, 460 bp, Homo sapiens
cacccagccgagctggtcttgagaccccaagcttcagccaggggtctccaagtttcctagaacgattctcagtgtgatggaggctggtttcttctcaaattcccaaagctggcagacacccagctggatcccacctgggcctgatcacccagttgtctctacaataaatgaagtcaggcaggcccacagaggcttycaaaggaccggagagcaaacttgttcattaggcaaaatttactgagtgcctactctgtgccaggcattggtgaatgctggggtgcaacattgaaccagtcatggccctgccctcagcaagctccaaacccagtcagagagacggccaataaaataagcaactactgtactgaggaacagggctgtggcaaacaaatgacactcatttttgaatgagtgagtgaattcaagattcagtgaatgaatgaagtgcagtgtattgtgc

SEQ ID NO: 135786 - DNA, 460 bp, Homo sapiens
cacccagccgagctggtcttgagaccccaagcttcagccaggggtctccaagtttcctagaacgattctcagtgtgatggaggctggtttcttctcaaattcccaaagctggcagacacccagctggatcccacctgggcctgatcacccagttgtctctacaataaatgaagtcaggcaggcccacagaggctttcaarggaccggagagcaaacttgttcattaggcaaaatttactgagtgcctactctgtgccaggcattggtgaatgctggggtgcaacattgaaccagtcatggccctgccctcagcaagctccaaacccagtcagagagacggccaataaaataagcaactactgtactgaggaacagggctgtggcaaacaaatgacactcatttttgaatgagtgagtgaattcaagattcagtgaatgaatgaagtgcagtgtattgtgc

SEQ ID NO: 135787 - DNA, 460 bp, Homo sapiens
cacccagccgagctggtcttgagaccccaagcttcagccaggggtctccaagtttcctagaacgattctcagtgtgatggaggctggtttcttctcaaattcccaaagctggcagacacccagctggatcccacctgggcctgatcacccagttgtctctacaataaatgaagtcaggcaggcccacagaggctttcaaaggaccggagagcaaacttgttcattaggcaaaatttactgagtgcctactctgtgccaggcattggtgaatgctggggtgcaacattgaaccagtcatggccctgccctcagcaagctccaaacccagtcagagagayggccaataaaataagcaactactgtactgaggaacagggctgtggcaaacaaatgacactcatttttgaatgagtgagtgaattcaagattcagtgaatgaatgaagtgcagtgtattgtgc

SEQ ID NO: 135788 - DNA, 460 bp, Homo sapiens
cacccagccgagctggtcttgagaccccaagcttcagccaggggtctccaagtttcctagaacgattctcagtgtgatggaggctggtttcttctcaaattcccaaagctggcagacacccagctggatcccacctgggcctgatcacccagttgtctctacaataaatgaagtcaggcaggcccacagaggctttcaaaggaccggagagcaaacttgttcattaggcaaaatttactgagtgcctactctgtgccaggcattggtgaatgctggggtgcaacattgaaccagtcatggccctgccctcagcaagctccaaacccagtcagagagacggccaataaaataagcaactactgtacygaggaacagggctgtggcaaacaaatgacactcatttttgaatgagtgagtgaattcaagattcagtgaatgaatgaagtgcagtgtattgtgc

SEQ ID NO: 135789 - DNA, 545 bp, Homo sapiens
ctgcaatgggctttcactgatgacattcacaggttgtttcctgggctccattactcaaaagcatatggattgttagaactatagaaaggtttgttggtatcaattacagagcaagctgcagaataacaactarttatattggtgtgccttctcaaagggtataatgtatgccttaaagccagtttaaggtgtgaccttttgcaaatttcccagttttcaagggtccagaacctaaaggttaaggtgtggtggctcttctcataattatactcaacaatctactaaaattacttttcttcctattcccacagtcttggacttggtgtgtttggacataaaagtgctccagaaaaactaattcctctagaaacatagtttgattattatcagttagaagctgagagtgcaccctgacaattttattctactaaattggcatgcttctgaatcattatactgggcaagatgcttgatacccataacctagagtaaattagattatggctgcatgatatagcatgtaggactatgtctggaacctggag

SEQ ID NO: 135790 - DNA, 527 bp, Homo sapiens
atgcaaataaaagcagagagcacagttaattctgtactccttacatagcataagcttatatttgtataggccatttcttatgtagtaaacttatttccttctgcagattctactttcatgttttttcagtccaatcctagtgtgaagatggttgaataaaactatcatttatctatacacacaaaaatacttatttttagaagaaggcatggctttgcttcacactgggcaaagagcaagcgttgtgaatctgacagggacttgcctaaatgtccctagagcatctgatatgccccaaatatttaggacactatttaatcagctgggtcataaataccaagtggcaaaacagcttgctcctacaaactagaacagctgtagatctttatctggcttgtggcatcatttaaaactckcaaccctactatttaatcaatcaaagcagcacatacataggaattatatgttccctctataatctagaatcttactaaaaatgtgcccatgtcttagtagtaggtagtgta

SEQ ID NO: 135791 - DNA, 609 bp, Homo sapiens
attgccaatgttctattaagaactaaggtcttttaagtcagcttgtggcgaatgctgcttggcctgtgactcacccatcagggaaacgggctcctctcaggcacagagcaggtccagaaatgcctccaagagctaagtgctgtaatcgggggctccaagagtttgcttggtgttctacccycagtggccaagctggtacctacagtgcaagacaaagtcccctttacttttctctctgcttttctcaagaagcagcggtcttgacactacagctggagatgtgctgagtctcacctgaagcctacaagtctcagggtttcacccactgcccttgacatagtacctgacgatggctgctggttattcatggctcaaagtttcttcaattagcagctgatgaatgctgccaggaaggggtccttcccttcaggatagtgagttccctctgggcgcaggatgcatctaaatatgtcatccaggagctaaggcctggaaaggaggccttatgacgctgacccataccctatgccactgtggctcagctcgtatccaagatgcaggacaaattctccccactctttcctcttttctcttcaagcagaaggaagg

SEQ ID NO: 135792 - DNA, 556 bp, Homo sapiens
ctctgcatatatagataacctgctcttcagaagggaaccattccactagcaacacagtctcatttaaattttaggtaggtgtaacattccagcccctttgtttcaacttgcaagaacactaaagagtcatcttaggtttgaaattccccataacattgaccaatgcctctgtggcactgttgcagaattggagagagaagaaaatgaaaccaatgagtaaactgattgtcataatttaggaccttataggttgtaatacagaacttggctttcactttgagtgagatgggaagtcatttcagggtttgaatcactcttgctacttcataggaaataaaccctgggttgcaggaaggagacgacgatggaacaagaaaagggtgaagtctgaacaagattcattgaaatgggtagaaataatagatttacattatcccttatattagtctgttttcatgctgctcataragacataccccaaaatgggtaattaatttaaaaaaataggtttaatggactcatagttccatgtggctggggaggcctcactatcatt

SEQ ID NO: 135793 - DNA, 603 bp, Homo sapiens
tttttctagttctgtgaagaatgtcaatggtagttgaatagtaataaatagcattaaatgtacaaatcgcattgggcagtatggacattttaacaatattgattcttcttgtccatgagcatgacatgtttttccatttgtgtcatctctgatttctttgagcagtggtttgtagttctcttggtagagatctttcatttctatagttagttgtatctgtaggtattttattctttttgtggcaattctgartgacagtttattgttgctttggtccttgtattgactgttgttggtgtatatgaatgctagtgatttatatggaatatcttttttcaaaccttcactttcagttatgtgaatctttacaggtgattagagtgttttttaggcagaatacagtggggtcttttgaaaacatctatttagcttgtctgtatcttaattggaggatttaaaactttgacactcaaggttgttattgataagtgaggacatacttcagtcattttgttaattggcttctgattatcttgtatgttattttttcttatcttggtctcttactgtttatctttgtgatttggtagttttctatagtga

SEQ ID NO: 135794 - DNA, 446 bp, Homo sapiens
aactcagcgaaaagtggtccaaagtcctggactgcagctctaggaacttggttcagaaattttgtccaggggcagaggcaagtctcaacagagaactctgaagctttactgaaaagaactgacttcacttaagtagagtctggcgaagttcaagcctaacggtgctttccaaaacattgaaggtgttaataaagcaattacatggaggtaacttcatgaraagaataagatcagtcatactcaagccgctttaggagagacgaggggaatgagacagctaagaaaagcaatcctggagtcataaaaacctcatatagtggccccaaatactatctgggcaaaggtcctcaatttaattggaacagtctatagaacaatatatgccccatggaatttttgaaaacagagtacctgatcagcaactcgatgtgatcagtgtaagaaac

SEQ ID NO: 135795 - DNA, 339 bp, Homo sapiens
gtgagatgttactgtgtttgtatctctgtgaatgtgcatgcccacatttatacagttaagtttacttagacacagacaagaaattacgctcaattcttccagatttgttcagtgaggtttattatcaagtgtgtatgcaaacagcaggggcttgtatgcttccttgaaataaacgataawatatgtgtaataaaaatacttggatctataattgcactatagcctatgtagaagtaaatacaaataaaaagattttgttttactccacaggggtttttttttttttttttttttttttttttaccttaaaacacgggtcctgttttcatagttatgtat

SEQ ID NO: 135796 - DNA, 606 bp, Homo sapiens
ggctctctccaaactctgcaatagctaagtctagaaaactcatgtatcaacactggatgttaagagttaaagggccctagaccagactcttgtgatgcaactatcccaggtacaacatctctggcaggtaattaattaaccactgattgaatatttctagggatggagacttcactgccatctaacactgtcattgttgggaaaaactcatagctacaaacttcagtctttggaacttgaattgtgccagtaatctgtggtaaagatgttctgtgcccccaccagcccttcccccaatcctcgtcatcgtttctttattatagaacactatttcttaattatttgattatcctgattaaacattgtattaggccgttcttgcattgctataaataccagagactaggcaatttataaagaaaagaagtttaattgggtcatgattctgcaggctttacaggatatatggtgctggcatctgctccttggaggcctcaggaagtttataatcatggtagaaagcraagagaaaacaggcgtttcatatggcaggggcctgagtaagagagagaatggaggggaggtcacacacacttttaagtaacc

SEQ ID NO: 135797 - DNA, 606 bp, Homo sapiens
aaactttctgtagcgagtgcaagagaatttagttttctgcagagcggttgagagaaaaatgaatcacagagaggaatcttaagagattcaaacatggcaaataaatctgtgttctggagtggaaagccttaggcacacagatgccacattccgaggcaaaaagtgaaatattcagctgcagtcttcccattttggtttaaatctttggatatttacagaaaatgtgtatcaagcatacggtttctcttctctgcttgttaccctgtaccacttcaaccaaggttgtttcccactctcttcatgccccacttttcattaatgtgtccatattatttgtcaatctagcaggataaactagcgatttaatgaagaggtkgtctaagtaaatttgtgagaggtatttgaactttatattagaattccttttagtttgaaatccgatggtatttgattttaagatacggtatcacctcttttcactgattctctatcaagtaattcaacatactggataatgctatgtcatggaaatcttggatataggacaaatgctttttattagaggctcttgagctgaagaaaatgtaagtccttttaaacttccag

SEQ ID NO: 135798 - DNA, 588 bp, Homo sapiens
aaatatttatgcctatttttctcctaagatttttacaagttttagcttttttaagtatttgaattattgtcagataatgtttgtatacggtataattagaagttcaacgtcattcttttgcwtgtgtgtcttaaattgttgcagcactattggttgaaaagaattttggatagtcgactgaccatatacgtaaggctttatttctggactcccaattatgtttcattgatctatgtatctatctttatgccagtaccacacaattttgattactgtggctttgtattaagttctgaaatgaacaagttttggttctctaacttggttcttttccagattgttttggttattctggttctctcaaatttttaaatgaattttgggatcgatttcatcaactaaataaagacagcagtggttttgataaaactattgaatctatagattgatttggggagactgacatgttaacaatattaaatctttcaatccatgagcatgggaggtctttttatgtaggtttttaaaaatgtcaatagtattttgtagcttttattgtacagtgtggcacaactttattttttaaat

SEQ ID NO: 135799 - DNA, 588 bp, Homo sapiens
aaatatttatgcctatttttctcctaagatttttacaagttttagcttttttaagtatttgaattattgtcagataatgtttgtatacggtataattagaagttcaacgtcattcttttgcttgtgtgtcttaaattgttgcagcactattggttgaaaagaattttggatagtcgactgaccatatacgtaaggctttatttctggactcccaattatgtttcattgatctatgtatctatctttatgccagtaccacacaattttgattactgtggctttgtattaagttctgaaatgaacaagttttggttctctaacttggttcttttccrgattgttttggttattctggttctctcaaatttttaaatgaattttgggatcgatttcatcaactaaataaagacagcagtggttttgataaaactattgaatctatagattgatttggggagactgacatgttaacaatattaaatctttcaatccatgagcatgggaggtctttttatgtaggtttttaaaaatgtcaatagtattttgtagcttttattgtacagtgtggcacaactttattttttaaat

SEQ ID NO: 135800 - DNA, 453 bp, Homo sapiens
ggcttttttgtggttaggctatttattactggctcaatttcagagcccattattggtctcttcagggtttcaatttcttcctggttcattcttgggagggtgcagttgtccaggaatgtattcattttctccacctctttattttgagcttatgtgtgtcattgtatgtgagatgggtctgttgaagacagcataccaatgggtcttgatcctttatccagctcaccactctgtctttgaattgggacatttagcctatttatttacatgtaaggtttgtattgatgtgtgtatatttgatcctggcatcatgatgttagctggttattttgcacacttacgtggttgctttatagtgacactggtctgtgtacttcagtgtgcttttgtactggctggtaatggtctttcctttccatatttartgcttgcttcatgacctcttgtaaggca

SEQ ID NO: 135801 - DNA, 598 bp, Homo sapiens
ggtaacagggacaatgtaaaaactcttctttctcctgtgttcaatgcattttttttcttatttatgttctacatctagatgctgtgatctctcatctggttcatttagctcttatgaaagtatattttacatgcaggcagtgattcaagttgctactactctaggggtattcaaggtataaagtctatgaagtcttactctgcaatcttgcaatatctatccccaacccaaaatttatygtctgttgttttatgcaattgttttttaaaatcaggtagaaaaaatttctacaaaaataccatctttcatattcacctatgtagttatttctagcactgcttcatattcatggcaattattttaccttccttttacttcagcctgataaacttcaatacttcttgtaaagactggtattgccgaattctctcacatttttcttgttgttttgtttttcttttatattggaagtatttcttttgccttgttttgagcctttttctgtttgttagcactttgaatatgtcattccactgtgttctgggttccatagtttttctcaaagttggctatattaatctattttaagccattttta

SEQ ID NO: 135802 - DNA, 462 bp, Homo sapiens
ccaacactctaactcccttcttggcctgttggcttaaacataggaggaacccaaagtgccgaggtggcaatcataacttccagtttaataaaatctttgtcgtgtctcctggtggcagcattcctccctctggaastaggaactctaggccagcagaacataatgtcatgggaacaggaagcaaaaattttgcttgtgcatcactaggggtgatggtgagtggtgctacttccacttccaccccttgattcctggacccgtgaatcctggctatagaagaaacagtaacatatattggacagtgattcagagcatacaaagccttctggagaactttgccccagccctgcaaagtattgtcacctagttggcattgtaattgtggcctcaaaaggccattccaccgttctatcatacagctgtttcaggatgatggggaacatggtaagaccagtgaattcc

SEQ ID NO: 135803 - DNA, 438 bp, Homo sapiens
caatcatcccagccaacactctaactcccttcttggcctgttggcttaaacataggaggaacccaaagtgccgaggtggcaatcataacttccagtttaataaaatctttgtcgtgtctcctggtggcagcattcctccctctggaactaggaactctaggccagcagaacataatgtcatgggaacaggaagcaaaaattttgcttgtgcatcactaggggtgatggtgagtggtgctacttccacttccaccccttgattcctggacccgtgaatcctggctatagaagaaacagtaacatatattggacagtgattcagagcatacaaagccttctggagaactttgccccagccctgcaaagtattgtcacctagttggcattgtaattgtggcctcraaaggccattccaccgttctatcatacagctgtttc

SEQ ID NO: 135804 - DNA, 674 bp, Homo sapiens
tggctttacttgcctgtctattggactcttcttaactaaagagaactttgtttctcctgatgttagcacaagtgttggtacaagatatctactcagatgcctgttgaattagtgcacaaatgacttgtttccttctagtttctttttttataactcataaatttatccrtctttcatttcgtgttttgattaaatcttagttttgcagccaaactttagtttaaatctagtgcaactgaccaattcattttccccctcaaccttgcactttcttttttcttctagaaacacaacatcatggaagctttttcacaatctcttttcctcagagctggatagagtgtgctttgcttgtgttgggggaaagcagaaagtatctatgtcagatgattttttcaacgttagagagtaaactgtgaatcaaatctaggtcttctgaaacacactctaaagttccattcatttgtcctatgtttatttttaaataaattgtttcaaggtatcatttacacaaaatgaaatgcacacaacttaggtaaacacttttatgagctttgacaattttgtacacctaggtaattaccctgattcaatatatagaatgtttttattaccccatagtttctttcaccactttgcagtcagttctaccctcatttttgcccccaagcaac

SEQ ID NO: 135805 - DNA, 674 bp, Homo sapiens
tggctttacttgcctgtctattggactcttcttaactaaagagaactttgtttctcctgatgttagcacaagtgttggtacaagatatctactcagatgcctgttgaattagtgcacaaatgacttgtttccttctagtttctttttttataactcataaatttatccatctttcrtttcgtgttttgattaaatcttagttttgcagccaaactttagtttaaatctagtgcaactgaccaattcattttccccctcaaccttgcactttcttttttcttctagaaacacaacatcatggaagctttttcacaatctcttttcctcagagctggatagagtgtgctttgcttgtgttgggggaaagcagaaagtatctatgtcagatgattttttcaacgttagagagtaaactgtgaatcaaatctaggtcttctgaaacacactctaaagttccattcatttgtcctatgtttatttttaaataaattgtttcaaggtatcatttacacaaaatgaaatgcacacaacttaggtaaacacttttatgagctttgacaattttgtacacctaggtaattaccctgattcaatatatagaatgtttttattaccccatagtttctttcaccactttgcagtcagttctaccctcatttttgcccccaagcaac

SEQ ID NO: 135806 - DNA, 539 bp, Homo sapiens
tggttctccattcttcggattgttcaggccctgaattagcccatagactctcattttgggtgtgtctactctgtgggtaatctggttgtcttttttttttttatttttgatacctctttgggacagtgtattctagtttgtgtgttgaatgctaattttttaaaaatgttccaaaaactatgtggtctaccatgttctgctttgtaaatactatgacatttaaaatgaatgcaaagtggacaaaatatactctttatcaaaggaagttaacaatatagcatttaagtttcttctttggtgatgcttggccaatttgcttaatgttatagtrtgaaaaaaaaaaaaaaaaaaacacacatgaccaaaaagttctgtctaaagaattgggaaatttgggcttgaagatgtaatttaagatagaggaattcagtttattcatttagagttcttggcatatcctcctgtattgactgcaggtatgtgggccgagggtaatttttgcctgaagatggaaagaatacctcttacttgctgacgta

SEQ ID NO: 135807 - DNA, 594 bp, Homo sapiens
gtgtttgcttgaatagtgggactacagtttagacaagttgacacataatcctgaccctcacaatccccaaattgaaccttggcaacaagtatgattccacatttccttatgtggagattttcattgccaacattagctgaagggttttgattgatgaagatttagagtaagggttttgtcccccccatactatattttgtttgtaggaaagtayctacagtttgtaacatttgatttagtgcacttaattatattttgaaggaaaaagaaatctggaataagaggtccagaagatttaaataacagacccagagcaatttcccaggtagatgaaccagatcatttaatagcactggtttatatgacttcctataatttagtgtataaaaaaatgcccattatagaaattcattagggttgtttgaacgtataaagtggttgattcaacgtttctgagttttgcttccccgttgttctcagcataaaggggtccaagtacttaaataaaaaattcatggctttctgtattacaggttttatgttgtgtgactctgccacataatgatatactgttaatgtctaaaaatctcgtag

SEQ ID NO: 135808 - DNA, 575 bp, Homo sapiens
gaaccttggcaacaagtatgattccacatttccttatgtggagattttcattgccaacattagctgaagggttttgattgatgaagatttagagtaagggttttgtcccccccatactatattttgtttgtaggaaagtatctacagtttgtaacatttgatttagtgcacttaattatattttgaaggaaaaagaaatctggaataagaggtccagaagatttaaataacagacccagagcaatttcccaggtagatgaaccagatcatttaatagcactggtttatatgacttcctatartttagtgtataaaaaaatgcccattatagaaattcattagggttgtttgaacgtataaagtggttgattcaacgtttctgagttttgcttccccgttgttctcagcataaaggggtccaagtacttaaataaaaaattcatggctttctgtattacaggttttatgttgtgtgactctgccacataatgatatactgttaatgtctaaaaatctcgtagcactaatttctttataaattaagtcataatcatttaaattgaaactaactactt

SEQ ID NO: 135809 - DNA, 438 bp, Homo sapiens
aagctcccaaaatggcaccccgttgaggctgctctaggcttggatgcctgtgggattccttgtgggttccctttctgcagcagcgtctctgtgcaatctttaggcagttctgtatgtcaggaacaaggccctagtgagtggagggtttctcttgtagcsaagattgtagaagcccgttttggattgtggagccctggggatttctctctcactatttgcctgtattcagaaatctctcctggcccgcagtcagtccctggaccaggcaagctgcctcaagccctttccttacttctggtgcttcctgtcttttctctggtgatcatgttgttctctcctctcaagtttactttgtgtacagggaaggttgaagagggcaacttgaaattaactccagctcttgggattacaagaaacctaattcattttaactgctga

SEQ ID NO: 135810 - DNA, 586 bp, Homo sapiens
atattgcccaggctggagtacggtggctattcacaggtgctatcatagtgcactgcagcctcaaactcctggccttaagtgattctcctacctcagcctcctgagtaactgcgactacagggatgccacctcacctggcttttacagttaaaactttaatgcgcatggaatagaattttgcggtgtgagttgtaggaaacagtttcattttttccctctatgtctacctaattgtcttagaaccttttgtttaaaggattgcctttccccattgytctagagtgccctagttctatctgtatagtgatctttttaggcctctattctctgtcattggtttaattcttaattacaatatttaaaatactttgtatgtgagctgggcatgctgatgcacaactgcagccccagctacttgggaggctgaggtgggaggattccttgagccatctgaggctgcagtgagctatgatcacactactgcactctagtctgggcaacagagcaagatcttgtctcaaaaaaacaaacaagcaaacaaaaaaagaattaaaaataaaaaaaagaattcaggcttacattcctc

SEQ ID NO: 135811 - DNA, 416 bp, Homo sapiens
aaccttacaattatttaatattgatgaataattgagaaaaaaaatttttggccaggctcaatggctcatgcctatactcccagtgctttgggaggttgaggagggaggatcacttgagcccaggagttcaagaccagcctggacaacatagaaagatcctgtstctacaaaaaaaaaaaaaaaaaaaaaatagtggagcatggcagtgcatacctaatacctatagtcccagctacttaggaggatgagggaggaggatcacttaagcccaggagcttgaggctgtggtgagtcccactgtactccagcctgggtgacagagcaagactgtctattccattagaatagacattctaaatagaatagggaagatattttaaaaaatacaatatagtttgataaagctacattagaat

SEQ ID NO: 135812 - DNA, 226 bp, Homo sapiens
gtgcatacctaatacctatagtcccagctacttaggaggatgaggsaggaggatcacttaagcccaggagcttgaggctgtggtgagtcccactgtactccagcctgggtgacagagcaagactgtctattccattagaatagacattctaaatagaatagggaagatattttaaaaaatacaatatagtttgataaagctacattagaattatgtaaatggtaga

SEQ ID NO: 135813 - DNA, 465 bp, Homo sapiens
aagaatatgtttaagagttatcttatcacagaaacatatctaagtagagaagtaggattgattcaagaaatctgtgactacttgaaatgtgaattaagcttcatcactagctatgaggacctggagtgaactcataaaacaaaaaccagagaaatatagtctacagaaaacaggaactgaagaatatactcataatttaaagcaggaattggcagatggcagcccaaagacccaatccatttcaccacctgttttttaaataaagttttattggaacacagttacactcattcatttacatgttatctacagctgcttttgtgttacaggtagagtggaatagttgtcagagacgccatatgtcctgcaaaatgttgccaactcattgcttggaagcaaagtaacctaaataatccagtggttamgacatgaactttagagtcagactaagctttgaattttgat

SEQ ID NO: 135814 - DNA, 561 bp, Homo sapiens
tttttttaatacctatccctaagccatccttatagattgtgattcaattggtctgggtaagtaccaaatcatcagtaattttaaaacccaccagacacatctattgagcagccagtgagaactactcctctattcattagggtctgtgggggaactgtactgaatagtgtacgtgaataccttgtgcttagtaaacatgttagctttgattcccaaacatcacagctgctgtctcactaatcagaggaatcagaggcccaggtatatgggagaagactgttaacctgaagctgggccatgagcaagtaagagctgaagatcattctaatggtttttccctaaggggaaaaaatgactgccagtctataacttgatcacagctaaataaccaccgctgtgttgattttaatgggtaagctaacttggctatttyaagagatggcttatttattgatttatttaaatttccatttttactacaagccattcagtgcttaatattgtttcatactagcaaatgctaattaggagtagaattaagaacatatcttagaatcatat

SEQ ID NO: 135815 - DNA, 599 bp, Homo sapiens
gaaaatactggcaacaaaatgagatagaaatagtgctagctcaattcatttttaaatgcttataaattaattctgtcacttctcttttcaagttctagcatggtcttatccaaattatgacatcagcaataaaaaacaattttcctgaaatttcttcacatctgcagaaacgggcttcaaaagtctgcaagtgctttgcctttccccagtttcttgatgagcattgagtcataatagttccacccattttgtcaactaatagttatcaacataaccctcaaaacagtttactaaagtattccacaatgtactacagtgttattttttatcagttacttatgataaaattatagatgaaagatatatatcttataataatatatggtttatataatatatatgattttatatatmtatatatggtttcacttagtcttcccaaaaaccttacaaaatagggactaatgttttggttttactgatgaggaagccaaggctgggagggtaggtaatttctcatgaccacatagccacacagagaaagtcctgatctctctaatgccaaaactcaagcatgatctcaactgctacatgataaa

SEQ ID NO: 135816 - DNA, 473 bp, Homo sapiens
actgcttctgtcttctcttctcactctgctctggcctatttcttctttttctcttctcttcttcttttttttttttgagacagaatttcactgttgttgcycaggctggagtgcaatggcacaatctcagatcgctgaaacctccgcctcccaggttcaagcaattctcctggctcagcctcccgagtagctggcacaggcatgtgccacgacacctggctaattttgtatttttagtagatatggggtttctccatgttggtcaggctggtctcgaactcccaacctcaggtgatccacccgccttggcctcccaaagtgctgggattacaggcgtgagccaccatgctggtcctgctatggcctatttcttccactactcttgttgttcatgtactaactcctttaccagctcttcttttttcttcttctcaaacaaaggtgtctccaaggtccgacctttgttctcctct

SEQ ID NO: 135817 - DNA, 570 bp, Homo sapiens
tacagtgaatggaaatcctttccatagtactgctttattttaaggtcagtatcccttttataatacaaatgtttcataaaagccatgattattactttttaatgacagactaatctttgtccctcacccctatcagtcctactctttaaatatctccatccatggaagtactctatcagtaggccaatattcaccttttaaaaattgtggtaaatacacataatataaaatttaccaatgtaaccatttttagtgtatcattcagtggcattaagtacatttacartgttatgtaacctcatcactcactagttccagaatactttcatcaccccaaaaggaaacccacttagcagtcactcctatttctctcctacctgcagcccctggcaaccactaatctgctttctgtctctgtagatttgcctattctggatactttacataaatagaattatctaatatgtggcctttggcatctttcacttaacatactacattttcaaggttcatccatgttgtatcaagtattaatactttattcctttttacaactgaataatatttcat

SEQ ID NO: 135818 - DNA, 590 bp, Homo sapiens
gatattgatcaaggaacaacagggagagaagaaacatttgaagtaaaggaggcttgtagcagcaggtgggtgttaggatgaaatagcgtttagtcaccttggcagaagaggatcctagcgcattaagatcagcacctcggagagaatcagaagagaaagattgggtagaaatgaaataaacaaaatctggacaatcaaaaatgaagtacgttggggatattggcaaattatttgaattgtcctagcccctaaatatagatgtacctacagttttaacgctaacatacatttaagttgattcctgaactctgattggacaataaagatacagtttattattttcactytcagaaagtagagttgttaaagaaaagtttttacatcaagtaattgttcttgtcattactaatatagttacagttgtgttcaccacccaaaataaaattggctatgacacacaagaattaaagacaggaatcttaaaattcacgtaaatttggcactgagcaagtctatatgcatgattcttccactaatccttatgagaacttaatcaaatagatgatctatatgtgaaaggatcctaaatt

SEQ ID NO: 135819 - DNA, 534 bp, Homo sapiens
cattactgggtatatacccagaggaagataaatcattttgccataaagacacatgcatgtggatgtttactgcagcattattcacaacagcagagacaaggaatcaacctaaatgcccatcaatgacagattgcataaagaaaatatggtacatatacaccatggaatactatgcagccataaaaaagaacaaggtcatgtcttttgcaggaacatggatggagctggaggctattattcttagaaaaataacacrgttacagaaaaccaaataccacatgttcttacttataagtggtagctaaatgataaaatataattttgctaattatagctaaattataagaacctataaacacaagaaggaaataacagacactgggtctacttgaagggggaggatgcgaggagagaaaggagcagaaaagataactattggatactgggcttaatatctgggtgatgaaataatatctacaacaaacccctgtaacacatgtttacatatgtaaaaaaccttcacatgtgcctcca

SEQ ID NO: 135820 - DNA, 409 bp, Homo sapiens
agggcagccttgaaagactgtaccgggaggaacagtgcactgcggcccaratattgcacttttcccatggtcttcacaaccggcagaccatgaaattccctccagtgcctggctcggcaggtcccacccccatagagccgagcaagctaagatccactggcttgaaattcttgctgctagcacagcagtctgaggtcgacttagaatgctcaagctttgtagggggaggggcatccaccattgctaaggatggagtaggtggttttgccctcacagtgtaaacaaagcctctcgtaagtctgaactgggcggagcccaccacagctcagcaaggctgctgtggccagactgcctctctaggcagggcatctctgaaaaaaaggcaacagcctcagtcagggacttacag

SEQ ID NO: 135821 - DNA, 575 bp, Homo sapiens
aatcacgcccatctatcatacatgccatatccatcaaaatgccaataaattatatgattatatgatagyaattatttagaataaatatttccaaggactataaatggaacagaaacagaaagcagtcagtgaagcctaatgggttccatatctgaaagcaagcaaagatggtcaggagttcaacttctgtaggtcaatgaaaatttaaggtgtctcacttaaggcaggggactgaggccaggcacattgcttaaagccaggaagtgggcagcactccagaaatgacactggaaaaagcagttatgtcatactgtacaataaaacaggcaggaggcaccaaaatctaagccagccacttgctagctcagtggctagatatgtactatttaccattatcacaatgatcagaaatctgagttacctacaggaaccagatggaggcaaccacaaaactgataggctgggtaggatatgatgatattggttaacaactgtcattcgagttaagctttcaagccaaaattccaaatacatgaaaaaaattaacaccacgattaccaataaaatcaactatt

SEQ ID NO: 135822 - DNA, 575 bp, Homo sapiens
aatcacgcccatctatcatacatgccatatccatcaaaatgccaataaattatatgattatatgatagcaattatttagaataaatatttccaaggactataaatggaacagaaacagaaagcagtcagtgaagcctaatgggttccatatctgaaagcaagcaaagatggtcaggagttcaacttctgtaggtcaatgaaaatttaaggtgtctcacttaaggcaggggactgaggccaggcacattgcttaaagccaggaagtgggcagcactccagaaatgacactggaaaaagcagttatgtcatactgtacaataaaacaggcaggaggcaccaaaatctaagccagccacttgctagctcagtggctagatatgtactatttaccattatcacaatgatcagaaatctgagttacctacaggaaccagatggaggcaaccacaaaactgataggctgggtaggatatgatgatattggttaacaactgtcattcgagttaagctttcaarccaaaattccaaatacatgaaaaaaattaacaccacgattaccaataaaatcaactatt

SEQ ID NO: 135823 - DNA, 596 bp, Homo sapiens
gtgactactgcttggctactgctgatgtttattcaaggcccaggggctctttagtcagcagatggtgaatcttgccaggacatggtctttctcttcaacacagcaggttttcttctggcccaggctgagtctagaaatgccatccaggagtgagggcctgggctcagaggcttcaggaatctgcttggtgctttatttttactgtggctgagctggtacccaggtggcaaaacaaagtcctctttacttttctctcttgtttccacragaggaaggagtctctctttgagctgcactgcctggagagttgggggatgggtgacacaagtactcccctggccaccacaactggtgtctcactgggtcttgtgcactccatttccactggctctgagcccaacatagtacccagatttgcccaaggactgcagtccttgtggcttgactgcctttcaagtttattcaggaccctagggcacttgtttagtcagctggtgctggagctagctggaactcaggttcctaccactggggcagaggattgccctctggcaagggccagcttaaatgctccctctgtgggtgctggcagaatt

SEQ ID NO: 135824 - DNA, 516 bp, Homo sapiens
gtgagtgcccagcaggtcagagaagctctggggcagagcatgagcgagtcctgatggagttgagacacagggctatcagctcgcacttcaggaaggtgtgtgttaaatcactttagctgccacggaaataagtggagtaaaaggtgggcmaaggggatgtgagatggggcgccacatgtgtccaaaacacgctaagtttgaaatcctacagatgcagactcatagaatttgaaaataagtggagaggagagagaaacaggaaagaagtttggtggattcgtgtcactccctgatcttcagttgagcttcacggagtcattgtctcatctcctcacagcctaacttcttcctcttcaccatctccaattgcacaagcttgctcacccaaattcttccacagatatttttcttccaccgcatcagtatgtgcttctttctctccatctctaccagcatcctcctgtcctccctttttccaaatccagttcagaatccatggtccataatttcagttac

SEQ ID NO: 135825 - DNA, 607 bp, Homo sapiens
tactgaatttctggggaattgcatagattattgccaccatcagagacttggaagactcaggagtagagatagttatcacatctctatgtaatttgcctatgtgagctgtgcagaagccagattaattttgggaggtgactgtgggtcattatagacttaatcagatggtggtgatagagactgcagctgctttctcagatacagcatttttactggtgcaaaacaacatagtctggtatattgatggcattatgccgattagatttgaatagctgtaagtaggaagaatcttgcaaaccggataatggaagattaaccccatgaaatttcaggggcctcttactgcagtgaagtttctggggtccagtggcctggataatgtcaaaatatcccctccaaggtgaaagacaagttgccattccttccaccatctaccatgaaaaagagttacaactcttggtaggtctttctgggttttagagataatatatattgcatttgggtgtgttactttggcctttctactgagatactgataagtgtgcagttttgagtgggaaccagaagaagacaaagctctatagtaygttcaggctgcattgcaagc

SEQ ID NO: 135826 - DNA, 558 bp, Homo sapiens
tcactttgggagacaggtggattccctgaggtcagaatttccagaccagcctgaccaacatggtgaaacgctgtcgctactaaaaatacaaaattagccaggtgtggtggtgcatgcctataatcccaactactcaagaggctgasgcaggagaatcatttgaacacgggaggcggaggttgaagtgagctgagattgcatcattgcactccagcctgggccacgagagcaaaactctgtctcaaaaaaaaaaaaaaaaagaaacaaattcacattcaactataaaacctattatctcccaaaaatttctcaagtggggaaaaaggatatgatagagattgaaaccctctatccccagaagcccttctttttggcaatccatgtaatttattgcttaaggcatttattggagacaagtttcttatggctcttatttgtttatctcttgagatgaggaatatacctgaacttatcaagtcaaagctaatattcactaactttagtcttgtattacaataaaaatagctcattagtttttttcattttaaaaatattatc

SEQ ID NO: 135827 - DNA, 558 bp, Homo sapiens
tcactttgggagacaggtggattccctgaggtcagaatttccagaccagcctgaccaacatggtgaaacgctgtcgctactaaaaatacaaaattagccaggtgtggtggtgcatgcctataatcccaactactcaagaggctgaggcaggagaatcatttgaacacgggaggcrgaggttgaagtgagctgagattgcatcattgcactccagcctgggccacgagagcaaaactctgtctcaaaaaaaaaaaaaaaaagaaacaaattcacattcaactataaaacctattatctcccaaaaatttctcaagtggggaaaaaggatatgatagagattgaaaccctctatccccagaagcccttctttttggcaatccatgtaatttattgcttaaggcatttattggagacaagtttcttatggctcttatttgtttatctcttgagatgaggaatatacctgaacttatcaagtcaaagctaatattcactaactttagtcttgtattacaataaaaatagctcattagtttttttcattttaaaaatattatc

SEQ ID NO: 135828 - DNA, 503 bp, Homo sapiens
attcaggttttcctacttcagcactgattcccacagaggtttccgcttgtgggtttctgctcaggtaagctgtggttttccgtgtccacctgtctctctctccaatttggsgtcagtggtttcacctgtgacctcacttatctgaagggtttaagaacagtctgcttattcagttaagatttctacttgctgttaggatggagtacagatttctaagctccttaaaactgaaagtctctcagatttttagtaatgcttttgaaaaagtatctacaatactatggttacaaccgttctctttttaaatatttgcacactatagtttttctacttttaatattttgtgtttttattttaaacatgtcttttgtagaatagcaaagtttgacgagctttaagtctgaaaatctttatctcacatggggcatttgttctacttatatttaaacaattctttaggggtgctttggttggctgaataactcaacaattatttttctttg

SEQ ID NO: 135829 - DNA, 583 bp, Homo sapiens
aatatggcttctctctttccacccattctatcctcatatccctttcatagacatgaatagattcyctgtcagcagctggtaagatttgtggtgattttttctgttaccttgcttttcttgtctatcttccatgtgaacactcttcactcattttttaaaaataaatgtacattttttattttgtatataccagggattgtttatctttttgctatggtactaagttcccttgtgttcccctagagagacttctcagggcaaaagaagcatctgataaacttacatttatctgtcaggaatagatttcctctctgatgtatttgcatgccccaaaagtggtgaaaggtagaatttgaagcacagtggatagataaggtgtatttgggtatgtttacatttttagtgttttgaaaatttgattgctgacccacagtaggaaatgcattttatgtcataactgaattcacatatgaatacatatatgtgcaaatataactgaaaatatattttgatgcaataatgcttacattataaggtacaaatctactttctataatttttcagttaacaaaatgcaatttga

SEQ ID NO: 135830 - DNA, 583 bp, Homo sapiens
aatatggcttctctctttccacccattctatcctcatatccctttcatagacatgaatagattccctgtcagcagctggtaagatttgtggtgattttttctgttaccttgcttttcttgtctatcttccatgtkaacactcttcactcattttttaaaaataaatgtacattttttattttgtatataccagggattgtttatctttttgctatggtactaagttcccttgtgttcccctagagagacttctcagggcaaaagaagcatctgataaacttacatttatctgtcaggaatagatttcctctctgatgtatttgcatgccccaaaagtggtgaaaggtagaatttgaagcacagtggatagataaggtgtatttgggtatgtttacatttttagtgttttgaaaatttgattgctgacccacagtaggaaatgcattttatgtcataactgaattcacatatgaatacatatatgtgcaaatataactgaaaatatattttgatgcaataatgcttacattataaggtacaaatctactttctataatttttcagttaacaaaatgcaatttga

SEQ ID NO: 135831 - DNA, 549 bp, Homo sapiens
gtgctaaaggaaagaaatcaggaattggatttgtgcaaacatcagaaacggagtgagttgctattctttgtttactttcttaacactaatttgatgacattaaatcttacgggatgcacctctgacattattacagcaatttctgtgtcaattagttgggaattttggttacattccatgagagcaggaaacttgtacattttgttcaaccctaaaaacccagagtctaaaaaaatgcctgycaaacagtaagtgcctaataagtgcatgttaaatgtctggatgaatgaatggatggccactgatcaggcacaatattatgcctagtggaatgctaatgaaggaaacatatgactgctgcccacagaaaactatgtctaactggggagggaagattgctgttagaaactaagcaatctctgtgtgatcagggcttaaaagctctattgcagactcaggctgtggatataaagtgtgatgttaatggaggtgagtactaagttgctcctaggttgatgaacaggttttcaattgccagaggaggagggg

SEQ ID NO: 135832 - DNA, 611 bp, Homo sapiens
gacaagagcagagccctcgctggaaattttaaataagtgaatcaagcttgaaacatttattcaaagaattgtaacaggagatgaaacatggcttgatcttgaagacacaacacaaaacaatgtctatgaagaggtggaagtggtctaatcaaagtaaaagcagaccattcaagarcaaaggtcatggcaatagttttttgggatgttcaaggaattttgcttattgacttcctaggaagtgaaagaatgataacatctgcttagcaggagagtgttctgaaaaagttagccacagcttagcagaaaaatgcctgggaaaacttcaccagagagttctcctccaccatgacaatgctcctgttcattcctctcatcaaacaagggcagttttgcaagaatttcaacgggaatttattaggcatctactttatattcctgatttggcatcttctgactttttcccccagtattaaaaatatctttagagggcacccatttttcttcacttagtaatgtaaatacaacttcattgacatggttaaattctcaggactctgttctttgaggatgaactaaatggttgatatgatcacttacaactgtgtcttaaa

SEQ ID NO: 135833 - DNA, 540 bp, Homo sapiens
tctccctcatatattcttggtacccttgttaaagattagttgaccatatatgcatgggtttattgctaggctctctattctgtttcattggtttatgtttccatttttatgctagtatcatactgctttattatagcttcgtattatagtttgaaatcatggcgtgtgatgcctccaggtttamtcttctcaaattgctttggatatttgttttctatgcgaatcttagattttttttttcccattttagttaaaaatgtcattggaattttgatagcaattgccacaaatctgtagatcacttgggatagcgtgggcattttgaaagttctagttatttcaatccatgaacatgacacatctttcaattcatttatatcttctacagtttatttcatcagtgtcttgtgctttaccgatccttcacctacttggctaaatctattcctaaatattttattattgttgatgctattataaatgaaattttaatttttattccaatagttcattgttagtgtacaaaggccaatgaaaagc

SEQ ID NO: 135834 - DNA, 540 bp, Homo sapiens
tctccctcatatattcttggtacccttgttaaagattagttgaccatatatgcatgggtttattgctaggctctctattctgtttcattggtttatgtttccatttttatgctagtatcatactgctttattatagcttcgtattatagtttgaaatcatggcgtgtgatgcctccaggtttaatcttctcaaattgctttggatatttgttttctatgcgaatcttagattttttttttcccattttagttaaaaatgtcattggaattttgatagcaattgccacaaatctgtagatcacttgggatagcgtgggcattttgaaagttytagttatttcaatccatgaacatgacacatctttcaattcatttatatcttctacagtttatttcatcagtgtcttgtgctttaccgatccttcacctacttggctaaatctattcctaaatattttattattgttgatgctattataaatgaaattttaatttttattccaatagttcattgttagtgtacaaaggccaatgaaaagc

SEQ ID NO: 135835 - DNA, 501 bp, Homo sapiens
tgaaatgaatgtgtgatagagatgaaagctgggctaatttaaatacctaccagacctgtcttaattacagaggtaaaatgagatataaaaattatagcagcaaggaaaaaaaaacttgaaacagttcattccayacattacagaaaatgcctttgcgagccaccatacacaaagccagagctctgatttccatctgccttaaagcagtgctgaaatggagttggctatgtctttcttctacaggaagtaaaagggaggcatccttgggacttcaggccaaatactttttgctgtgtctccaaaatgtaaaaaaaaaaaaaaaaaaacaaaaaactcaactgtagaagcacatccatatgcaccttctgaaattcaaatcctcagaaaaaaaatcaagtggggctgaatggaattcaggatgtgaccaaaagggattcaatgaaaatttcttctaatttttcatactatgattcgtgtggatttcacatgggtttataaaaa

SEQ ID NO: 135836 - DNA, 501 bp, Homo sapiens
tgaaatgaatgtgtgatagagatgaaagctgggctaatttaaatacctaccagacctgtcttaattacagaggtaaaatgagatataaaaattatagcagcaaggaaaaaaaaacttgaaacagttcattccatacattacagaaaatgcctttgcgagccaccatacacaaagccagagctctgatttccatctgccttaaagcagtgctgaaatggagttggctatgtctttcttctacaggaagtaaaagggaggcatccttgggacttcaggccaaatactttttgctgtstctccaaaatgtaaaaaaaaaaaaaaaaaaacaaaaaactcaactgtagaagcacatccatatgcaccttctgaaattcaaatcctcagaaaaaaaatcaagtggggctgaatggaattcaggatgtgaccaaaagggattcaatgaaaatttcttctaatttttcatactatgattcgtgtggatttcacatgggtttataaaaa

SEQ ID NO: 135837 - DNA, 323 bp, Homo sapiens
ttggatggtttgctttattggctagtgaattccacaatggggcagtgttcaggcagagcctaagagatatttaagtgaaggtagagggccaaaaatccatataaagggaggctgcaaagaatgacctcacagtttctttactttaatccwagtgctatttctatcaaggagtttacaaacaagtagagctgttgaaattagaataaattaagtggaatacaaggcagtaagcgatacagtgttttcaagaattttccttcaaatagagtaaaagtctttttttccaggaattcttagaaaaacccgatgtgttaaatttgaac

SEQ ID NO: 135838 - DNA, 533 bp, Homo sapiens
gaattcagatcctgggcagaggccattatcttcctgaactatcacccaatattctgaatagaaggttcagggcacatgaataatgccacactaggagaggagtgtctgtgttcccaagcttaccaattcccatatgcctccctgtctacctgttgtggcagagctgcagcaagaagccaattatttcagaaggcttttgttttgcagtaaggcaagttcactgactgctgcacattaattcctggctatagatataatggccacctggttagtttcgcctacaaatgtcagtccacagraaaaactctaatccccaaactctaacactattaagcagaaaagatattaaggcttatgttggacctgattggagagtaattatgattcaatctaacagaagtcttcatagtgagactatctgacttccttccatggtgcagtagcatcttgtattgtgagaactctagcaatgaacagtattcaatggagaagacccgtatgtgatctccatgatggaagagaaagggcctttg

SEQ ID NO: 135839 - DNA, 533 bp, Homo sapiens
gaattcagatcctgggcagaggccattatcttcctgaactatcacccaatattctgaatagaaggttcagggcacatgaataatgccacactaggagaggagtgtctgtgttcccaagcttaccaattcccatatgcctccctgtctacctgttgtggcagagctgcagcaagaagccaattatttcagaaggcttttgttttgcagtaaggcaagttcactgactgctgcacattaattcctggctatagatataatggccacctggttagtttcgcctacaaatgtcagtccacaggaaaaactctaatccccaaactctaacactattaagcagaaaagatattaaggcttatgttggacctgaytggagagtaattatgattcaatctaacagaagtcttcatagtgagactatctgacttccttccatggtgcagtagcatcttgtattgtgagaactctagcaatgaacagtattcaatggagaagacccgtatgtgatctccatgatggaagagaaagggcctttg

SEQ ID NO: 135840 - DNA, 533 bp, Homo sapiens
gaattcagatcctgggcagaggccattatcttcctgaactatcacccaatattctgaatagaaggttcagggcacatgaataatgccacactaggagaggagtgtctgtgttcccaagcttaccaattcccatatgcctccctgtctacctgttgtggcagagctgcagcaagaagccaattatttcagaaggcttttgttttgcagtaaggcaagttcactgactgctgcacattaattcctggctatagatataatggccacctggttagtttcgcctacaaatgtcagtccacaggaaaaactctaatccccaaactctaacactattaagcagaaaagatattaaggcttatgttggacctgattggagagtaattatgattcaatctaacagaartcttcatagtgagactatctgacttccttccatggtgcagtagcatcttgtattgtgagaactctagcaatgaacagtattcaatggagaagacccgtatgtgatctccatgatggaagagaaagggcctttg

SEQ ID NO: 135841 - DNA, 580 bp, Homo sapiens
gaatgtgtaacatgctgtatgaactaaagcaggttgtattggactacataactcactatagtttcaatcatatgtacaatgcttatttgggggttctacccagtaacaattctggcttcagaatatattgttttcagagtcttctgacattactcaggcatgctggttgtacataaaatatgtctgggcttgagaaggctaagttgcatataagctcaagttcctctttgccyttatgtttaaacaaaaataactatcttatttccagatccagtcagaccacaagaaaaactaccacttcttgccaagtagcaagggacagattggtaagaacagagtgggggaaaaaagacaaaacttattttccctctcagaacaaacaaagcaaggaatccagttggaaggcaagaggcattgctttatagactgggacaaggctgaagccagcttccccatggcttgatcctgtctaatcagaaaacaacacttacaaataccagacaatactgactgtattagttaggattctccagaggcaaagaataaataaggagtgtgtgtgtgtgtgtgtgtgtgtgtg

SEQ ID NO: 135842 - DNA, 586 bp, Homo sapiens
agcatgttcattatggaaagtttttatactcacataatgacatgtgcccagccagacattaatcctcagaatctaacacagtgcttggggcatgcagcaaatactcactcaatgtttgctaggtaaatgaataaatgaatgaatgaatgaatgcatgttatataatcagagatctcaattatataaatacccattaaagatcttttgagtgctcaatattgactccaatgagcatgaaaagtgtacaggacgatgtctgcagactggaaaatatcattttttagaattttaaaacaaacaatttgtatagtagcttctcattattgagtaaacaaactaatgaatttacttaatargtacatttccactatcaatttgtgactaaggacaaatcataatgtggcatgtaaaaaaaaataaacaaagtcattctacaaccaacagaccaattatgagtgtctctcagctgctttgtttgatgctgaacctgaagtatacagaccattacttggggcatcttttgttcattctcttatcctaagctttacacattttggctattactactactgttaacaaaagccag

SEQ ID NO: 135843 - DNA, 655 bp, Homo sapiens
ctgactgggaagggcttggctgcgatgtgtgttttcttcgtacttgaatgccctcaggtaagggtggattaactttcctgtggctttcttggaatgaggcatcatccgtcacgccgtatgtctttttacatttttcttggcttgaacctttccattttgtcatcacacgtaagattgccggcagttccaactgtgagctatttgagttctcaggtgtgtttttgaggagacgaagacctgtgccaggaatgcaggtaaatgtcagtgccaaacacaaatccacytctatcagattcctgagaaattctggaagtgactgttagaataacacagatcagtcacatggtgttctttttctgagaagagatgcattggatccatactattcttagggaaaggtgactagtctgaactgaatttttcatatgtgcaggtgtttgtgattacaatcccatctttaacctgttcagccccatttgtactgggtgctatgaaagttgaccagaagcccaccatcatgactgaagcattcatttccccaggtgttgggaatattagtgtaggtagctaatattagtgtaggtaatattaggtaggaatattagtataggtagcttgtcccttttccaaaacctgcctttggctggctaaagag

SEQ ID NO: 135844 - DNA, 655 bp, Homo sapiens
ctgactgggaagggcttggctgcgatgtgtgttttcttcgtacttgaatgccctcaggtaagggtggattaactttcctgtggctttcttggaatgaggcatcatccgtcacgccgtatgtctttttacatttttcttggcttgaacctttccattttgtcatcacacgtaagattgccggcagttccaactgtgagctatttgagttctcaggtgtgtttttgaggagacgaagacctgtgccaggaatgcaggtaaatgtcagtgccaaacacaaatccacttctatcagattcctgagaaattctggaagtgactgttagaataacacagatcagtcacatggtgttctttttctgagaagagatgcattggatccatactattcttagggaaaggtgactagtctgaactgaatttttcatatgtgcaggtgtttgtgattacaatcccatctttaacctgttcagccccatttgtactgggtgctatgaaagttgaccagaagcccaccatcatgactgaagcattcatttccccaggtgttgggaatattastgtaggtagctaatattagtgtaggtaatattaggtaggaatattagtataggtagcttgtcccttttccaaaacctgcctttggctggctaaagag

SEQ ID NO: 135845 - DNA, 655 bp, Homo sapiens
ctgactgggaagggcttggctgcgatgtgtgttttcttcgtacttgaatgccctcaggtaagggtggattaactttcctgtggctttcttggaatgaggcatcatccgtcacgccgtatgtctttttacatttttcttggcttgaacctttccattttgtcatcacacgtaagattgccggcagttccaactgtgagctatttgagttctcaggtgtgtttttgaggagacgaagacctgtgccaggaatgcaggtaaatgtcagtgccaaacacaaatccacttctatcagattcctgagaaattctggaagtgactgttagaataacacagatcagtcacatggtgttctttttctgagaagagatgcattggatccatactattcttagggaaaggtgactagtctgaactgaatttttcatatgtgcaggtgtttgtgattacaatcccatctttaacctgttcagccccatttgtactgggtgctatgaaagttgaccagaagcccaccatcatgactgaagcattcatttccccaggtgttgggaatattagtgtargtagctaatattagtgtaggtaatattaggtaggaatattagtataggtagcttgtcccttttccaaaacctgcctttggctggctaaagag

SEQ ID NO: 135846 - DNA, 412 bp, Homo sapiens
ttatgagaaacagttttgctgcttactcttatagcctccagtggtatactgagttgatcatgaccctcactctttctggcctccaacaaactgacagtctcagactttatttaagaagaaatttctagggaaacccaaaaactacagggaagacaaaaacaaggacaccagaggaaattgaagccccgacacrtatagctacattaaacaagataaacttttatcattacataaagtccttctttgtcttttttcttactgttgttgctttaaagtctgttttgtctgacataaaaaaagccactcctgctcacttttggtttccattatgtggaaaatctttttccacacctttgcattaagtttatgtgagtcctatgtgttaggtgagtctcttgaagacagcaagcag

SEQ ID NO: 135847 - DNA, 559 bp, Homo sapiens
ctttgcattaagtttatgtgagtcctatgtgttaggtgagtctcttgaagacagcaagcagatatttggtttgtaattttttaatccattctgtcatcctgtaccttttcagtgaagcatttaggkcatttacattcaatgttaatattgagatatgaggtactgttttattcatcatttagttgtcacctatatactttgtttttttttcattgtgttattgttttatatgctttgtgagatttatgctttaaggaggttttattttggtgtatattgacctttcataatagtaggctttgattcatttttctttctcttttgtacaattacacaggtatttttttctttgtaattacttaagcttacataaaaccttttatagttatagctgtccattataataacttggattgcatacataaattctacatttatttctcctcttattccacattgtatgttattgatgtcataatttactttttaaaatattgtgtgttgattatcaatttatagtagctataattattttaatatttttgtctttttaactttt

SEQ ID NO: 135848 - DNA, 559 bp, Homo sapiens
tggcttattctcttgcaaagctttccaccatgaccttccattttgtatctctaccacctcccgaacaaacactgttcagtagaaatataatacgacccatgtgtgtaattttaaattttctaatagctacattaaaaaagtaaaaagcaggtaaatcagttttaayaatttcttaattagcccaatatatgtgtagtattatattagcatgtcatcagtatgaaaatatttagtattttgtattatttggttatatgtcttcaatatctattgtatattttactcatgacatcatgtttcaactcagattagcacagttcagtgcctaatagctggatgtaattagtgactactatatataattgtacagttttaaagcactgacatatttccagccacgtacatatgggctggggaaaatagcaccaagggagcatgggaggtttcagagggtttgcttgaaaaagccttatatcacatttactcgtattccagtagccagaactcaaattatctggagccagttaatggcaagagagttttaaaaatgtaatattta

SEQ ID NO: 135849 - DNA, 530 bp, Homo sapiens
ggggcaaagtgatgcaatgtggagaaggactcaacccaccattactggctttgaagatggaggaagaggccatgagccaagaaatgcaggtgaccactagaaactggaaaagaggggaaaatggattctcctctaaagcctgcagaaagaatacagccctgtcaacactttgatcttaacccagtgagacctgtgtctgacttctaacttacagaaccatcagataatatatttgtgttgttttaagccaccctgtttgcggaaattgttacagcagcaatggaaagcaacacaaagttcaataaatatttgtttaattaatctgttgtagtgatttttaatcattttatttctaaaasaggtattatatcaactcaaatctcacagagagtcgtatttagaaacattttctttatggagataagaagaaatataaattttctttcttttcattcatatatacattcaaacaatttttttaaagcttaaagaaggagagaagttcattcacaacctcactgagatctaac

SEQ ID NO: 135850 - DNA, 549 bp, Homo sapiens
gattctgagatcaagttcattgagactcccaggaatagccaaccacagaaagagatgcctgttgtggagaaccaaagctttccctgcggcagctctatgtcacacaccccaccaactctgtccacctcccagaagtccatgcacattgtgttctgaggtgctacttatttttaggtaatgttttgctcctgcttctgcagctgtttttaatcacaagccttgggcactgcatcctaaagaaactctggcagagacaaaggtgaaaagaaggagggagaaggacatgtccaaacatcttggacatgatattgacagaaagggaacttatccccatagaatttcacatttattactgtgccgtgacagaagtagtagaggctgcaataccagacaagccttggttggagtccgcatctccctcttaattgycagttgagtgaccttggagaagccacttaactgaattccaatcttctccatataacagtaaatatgccaagttgtaagggttcaatgactatgtaaaactgccttttgaactataataac

SEQ ID NO: 135851 - DNA, 467 bp, Homo sapiens
gaacattggaaaagtttccttgcactcataggcagcagttatctcaccacttgcccaaggatgaggtggacatggaggaggcaaatcagaagaacagcagggaaatggtgctagagtccctggaataagtcatcccagaaacctgcacttcctccggactcgtagcttcctgaaccactaagtctcctcaccatttaagtcagcatgacttggactatctccccttttggcggagagaaggagcatcttcagacttcactccaaccctttcccctccagaccattgagaaaatgtttacagcatttaaaaaagtattaatttggatgcttttgattgcaagtaacaagagtaaatagtagctaacttaagcaaaagagataacttttttggaaaattggracatttcatggaatccaaggacagagtcacagcctggcctctggaataagccaattgtaaggaattc

SEQ ID NO: 135852 - DNA, 439 bp, Homo sapiens
aaaccacttcttatgcagaaagtaaagcccagcaaaggccaccaggtattcctaacaggaatacacctaacagggcctttcctccccctcttcccagccccaccaactccttccccmctctttgccctacagggaacctctgcacggccaagctaggatattgggtttctggactcttgctagaacttctttgagtcattcattttctttttatttatatatactgtgttgcctcaactatattgcaccatttagtctcaggtctctgggaaagagaggatctcacaacagaaacatttttctagaaaaaccctgagagggggctggcctctttgagggcttaaatgtctctgcgacgtcacagaggcatgccaatttctgtcttagtccattcggactgctctaacaaaaatagcacagactgggtggcttaaacagc

SEQ ID NO: 135853 - DNA, 442 bp, Homo sapiens
tcagcttggggaaaaccacttcttatgcagaaagtaaagcccagcaaaggccaccaggtattcctaacaggaatacacctaacagggcctttcctccccctcttcccagccccaccaactccttcccccctctttgccctacagggaacctctgcacggccaagctaggatattgggtttctggactcttgctagaacttctytgagtcattcattttctttttatttatatatactgtgttgcctcaactatattgcaccatttagtctcaggtctctgggaaagagaggatctcacaacagaaacatttttctagaaaaaccctgagagggggctggcctctttgagggcttaaatgtctctgcgacgtcacagaggcatgccaatttctgtcttagtccattcggactgctctaacaaaaatagcacagactgggtggc

SEQ ID NO: 135854 - DNA, 439 bp, Homo sapiens
aaaccacttcttatgcagaaagtaaagcccagcaaaggccaccaggtattcctaacaggaatacacctaacagggcctttcctccccctcttcccagccccaccaactccttcccccctctttgccctacagggaacctctgcacggccaagctaggatattgggtttctggactcttgctagaacttctttgagtcattcattttctttttatttatatatactgtgttgcctcaactatattgcaccatttagtctcaggtctctgggaaagagaggatctcacaacagaaacatttttcyagaaaaaccctgagagggggctggcctctttgagggcttaaatgtctctgcgacgtcacagaggcatgccaatttctgtcttagtccattcggactgctctaacaaaaatagcacagactgggtggcttaaacagc

SEQ ID NO: 135855 - DNA, 572 bp, Homo sapiens
tggtcctcagcctatagagcttaaaggtatttatttatataataatgaaaaactgtgagaaaaatctaaatgtctaccagtaggagtaattagagtgtacccctttatccatggggaatatgttccaagctcccccagtggatgcctgaaactgaggatagtcctgaactctatacgtgctatgttttttttttatccaataacagagatggctactaagtgactaatggacagatggtgtagacagcatgaatatgctggacgaaaggatgatccacataacaggctggacagagtggaatggcacacaatttgatgacactactcagtaggatgcacaatttaaaacttatgagttttttctggaattttccatttaactgcagttgaccatgggtaaccaaaccacagttgaccatgggtaactaaagctctggaaagtgaaaccatggatygggggaactattgtacatatcttataaaatattatattgccatttaaaaattgtgatgaatatacgtgtactggcatggaaagatgtctgaattgtatggctaagtgagaaaaagca

SEQ ID NO: 135856 - DNA, 523 bp, Homo sapiens
tggcactgcagtaggaacacgcgtgggtgagcgtcagggcgtggctgacacatgcacagctccagcacaactctgccgtgggctgtgggtaccccaaaggcctgaacttgtccttgccataagtgagaattactccagatccgcatgttctcacctttcccatggcccaagctctcgtgatccctgagcacaatactgcacaagctaatgagagcaatccacctaccaagccttctttctgggagcaagtcctggacacaagtsccaggaaacacctcaaattttgagaagggcgttccaaagcagaggggtcgtgtgtgggacagacccacttgcctggatctaagggtggtaggaaagctctcgctccctgcctctgcctcctactgagtacctctgaaaagaggcagtgtggagggtttgcagaaggtatcttcagtggctctggggtgcagtgtccctcctccctctgatggtttggaaggtaaggggagaagccaaaagtagctggaaagagtagctg

SEQ ID NO: 135857 - DNA, 523 bp, Homo sapiens
tggcactgcagtaggaacacgcgtgggtgagcgtcagggcgtggctgacacatgcacagctccagcacaactctgccgtgggctgtgggtaccccaaaggcctgaacttgtccttgccataagtgagaattactccagatccgcatgttctcacctttcccatggcccaagctctcgtgatccctgagcacaatactgcacaagctaatgagagcaatccacctaccaagccttctttctgggagcaagtcctggacacaagtcccaggaaacacctcaaattttgagaagggcgttccaaagcagaggggtcgtgtgtgggacagacccacttgcctggatctaagggtggtaggaaagctctcgctccctgcctctgcctcctactgagtacctctgaaaagaggcagtgtggagggtttgcagaaggtatcttcagtggctctggggtgcagtgtccctmctccctctgatggtttggaaggtaaggggagaagccaaaagtagctggaaagagtagctg

SEQ ID NO: 135858 - DNA, 371 bp, Homo sapiens
gacatggatcccagtgagggccagtgtggggaaggggaagccagatactcaatatcttggttagatgttctatatccagagaatagaattattcccagtttacacaatgttatggcacctgtgatgctgtactataggcagctatgtacctgcttgtctctgccactagactatggggttcttggaggcaggaagcatatcttctccatcaccgtgccctcaggggtkgcatgggataggctctctgcaagtgtttggtggataaactgattcataaaagatgttcattccctggctgggttaccagttcccaggggttcatcagtggtgtactctgacttcagccttgcactgtgtatctcagcacactt

SEQ ID NO: 135859 - DNA, 568 bp, Homo sapiens
tagggggcaaaattttaagttataggatcttagagacactaagggatcatctgggttggataggttgtcaactctgataaattggtggggatggcttggagcattgtattgaaaaggattgctaggctgagtttagctcagcagggaagacagctgtcattgattagtcatagactcccattgctgggggtggtggcatgtatatggtgtatgactaactctaagactaggccactcttttccaatgccataatctcttctacacttttcttgacagctgaattctactcattgtaggaattctttcagtrattgtgagcttactatttttcaggaatgctcattgctacgttgaacagctcttctacatgttcaagtctaaaatctatctcacagcaacgtctaatcatgtctcctaattctaccgtttagagccatacaaacccattttatacctattctacatcacagctcttcaaatatcagaagacagccattttgtaacctcttctagataaaaaccaccatttctttcaattatttctcagatattgtggttcctgggtct

SEQ ID NO: 135860 - DNA, 580 bp, Homo sapiens
tcaacctaaatgtccatcaatgatagactggataaagaaaatgtggtacatatacaccatggaatactatgcagccataaaaaggaatgagatcatgccctttgcagggacatggatggagctggaagctattatcttcagcaaaagaatgcaggaacagaaaaccaaatactggatgttctcacgtgtaagtgggagttgaatgatgagaacacatggacacagggaggggaacaacagacactgggccctgccagagactgaaggagggagagcaacaggaagaatagctaatgcatgctgggctttacctatgtagttagatgatctgtgcaacaaaccaccatggcacacgtttacttatataacaaacctgcacatcctacacatgtgcccctgaacttaaaataaaagctggaaattagaaaaaaaaatgcagggattatggaggcaaccagatcatttctgtcattttctagttgtacgrccttgggtaagttactcaatttctctgtaaatagtctataaaatggggaggtaattcctcccatccaggtttgctaagaggcttaaatgtaaa

SEQ ID NO: 135861 - DNA, 429 bp, Homo sapiens
gaattcactgagaaggtgacatctgagtagacacttgaatgaagtgagggtctctgggggaagaatgttctgcaagaggtagctagtgcaaaggccctgtggtaggaaggagcctgatgtgctagaagcccagtgagggcgccagtgtggctagagcagttgagagaagcagacaatagcagcagatgggtcagctccctagccaaggtgtgtgaagccgtgtagtcctgggaaggattgggcttttacattgagataggatgggaagtcattggarggttgtgagccaaggacttatgttttgcaagggtcactctggttgctgtgttgagaatagaccataggcaagcctacccaggaagcagggaaacgggttaggaggctattgcctctgcgtgacaggtggtggagtggaccagggtgtagctg

SEQ ID NO: 135862 - DNA, 587 bp, Homo sapiens
agatcttgatgagtgtgcaaccaagcaacacaactgccagttcctatgtgttaacaccattggcggcttcacatgcaaatgtcctcccggatttacccaacaccatacgtcctgcattggtgagtaggagaggaaaaaatcctacatggattgtagcgattcttttaagggattattttctatttcctctgctgttgggataagaaaataaaagctcaaagaaatatatgagtgcatgtatgtgtgagcacacctgtacatgtatgtgaagmgttgttggccttatttggccttttccgagttatccttctaattttcttttaaatgatacaaagagagctttggggaattttaacccctctttgcccccactgcttctcatagataacaatgaatgcacctctgacatcaatctgtgcgggtctaagggcatttgccagaacactcctggaagcttcacctgtgaatgccagcggggattctcacttgatcagaccggctccagctgtgaaggtgggtggagacttcagctgcgatccagctggtgaatccttgtggaggtggcctgtgtggctattggcaccttc

SEQ ID NO: 135863 - DNA, 608 bp, Homo sapiens
attatagctaacatttattaagaatgtaccaggtaccagacacaattaagaagtttatatgagtaattcattttattcttacattatcaccattttacagactagaaagaagccctactagaaattgagtggtaccctcttcaagggttcacagctaataaatagcaggacagggatttgagcccaggcactctgacgccaaacctgcattcaccactaatgcctgtctagatccacaggagacccgaacatccccrgagagggcgaagagcagctacaggagtaccaggaccgtttgtgtgggaagcagaagttgacggaagagagaaaggagatgagaaggcctgattgattattaggtcaacagaatctgggcactgagagggaatgatctatttcgtgaacagactgctttgctcttggagtcatagtctctggaagtggatcagagaaaaacccagaaaataaatgcagctttagtgaacagagaagtaaccttagcctgaacccagagaaacagggtatgggaattaagatgagaactcgggcttcctggaaggctgggcaggaggctctgtctctgttctatgctgcagagacaagaaggt

SEQ ID NO: 135864 - DNA, 496 bp, Homo sapiens
gtaaattccttggctgaaaattatccagatgtcctgcacaactaaacaggcaagaggttaaatagtcctgtataatgacgaattgcaaagatttttcctaagtagcaaaatattcttcaacttaaatcttatgcagatgtccaatatctaagacaggtgaaagtggtactgcagggatgttccaccatgatgtcgtgttgaccctaaggaaacttcacaaacttgaccctaaggctccccagaacatggaytggaaaccactactgtacaggattctgaaatgggatgaagaaatcaaaaagtttgcagctcatttcaacagtttcttcacttagcaattatagcttctgttccatgacctgcctctgaacccaagcctcttggattctattcagagccagggaatggggtgacctataataaagcaagcttcccactcccttgttcaatttcttctccaagtttttcaccaaattcctgctcttgtatgtcctgc

SEQ ID NO: 135865 - DNA, 547 bp, Homo sapiens
acattaagtcaaaagtgcacaaataatacttttttttagtagaattcattttgtaaatgtatctttgagcattaggaaatcacagtatggtgatctgtttccaatgtgcgtgttgtgttagcagctggagttgtttaatatttttttttgtatttggttttgttttttgttttttgagacagagtcttgctctgtcacccasgctggagtgcagtggtgcaattacaacttaccgcaacttccgcctctagggctcaagtgatccttcccacctcagcctcccaagtagctgggactacaggcatacaccaccacacctgactaatgtttgttattattattattattttttttttgtagagacagggtttcactgtgttgcccagactgttctcgaactcctgagctcaagctatcctcctgcctcggcttcccaaagtgctgggattacagatgtgagccaccgtgcttggcctaacatctttaaatacctgttatttcttactcctctgaacttctcactttccctgagaataattttaccacc

SEQ ID NO: 135866 - DNA, 547 bp, Homo sapiens
acattaagtcaaaagtgcacaaataatacttttttttagtagaattcattttgtaaatgtatctttgagcattaggaaatcacagtatggtgatctgtttccaatgtgcgtgttgtgttagcagctggagttgtttaatatttttttttgtatttggttttgttttttgttttttgagacagagtcttgctctgtcacccacgctggagtgcagtggtgcaattacaacttaccgcaacttccgcctctagggctcaagtgatccttcccacctcagcctcccaagtagctgggactacaggcatacaccaccacacctgactaatgtttgttattattattattwttttttttttgtagagacagggtttcactgtgttgcccagactgttctcgaactcctgagctcaagctatcctcctgcctcggcttcccaaagtgctgggattacagatgtgagccaccgtgcttggcctaacatctttaaatacctgttatttcttactcctctgaacttctcactttccctgagaataattttaccacc

SEQ ID NO: 135867 - DNA, 552 bp, Homo sapiens
aatattgaaggcaggattctaagatggcctgtgtaatctcctcctcttgagtctgggagggacctgtgagtatggtggggtgcccctctaattattagcttactttataaggaaaagatgaaaatttttgcagatataattaaaatccttaatctgttgactttaagtttgatctttttaaaaattattttattttattattattwttttttgagagggaatcttgctcccgttgggcaggctggagtgcagtagagcgatcttggctcactgcaacttctgcctcccgggttcaagcaattctcttgcctcagcctcccaagtagctgggattacaggcacgggccaccacacccagctaatttttatatttttagtagagatgggattttaccatgttggccaggctgatctctaactcctgacctcaggtgatccaccagcctctgcctcccaaagtgctagtattacaggtgtgagccaccatgcccggcctttaagttcaatcataagggagattgactaaagtgggcctgacttaatcaggtaagc

SEQ ID NO: 135868 - DNA, 552 bp, Homo sapiens
aatattgaaggcaggattctaagatggcctgtgtaatctcctcctcttgagtctgggagggacctgtgagtatggtggggtgcccctctaattattagcttactttataaggaaaagatgaaaatttttgcagatataattaaaatccttaatctgttgactttaagtttgatctttttaaaaattattttattttattattatttttttttgagagggartcttgctcccgttgggcaggctggagtgcagtagagcgatcttggctcactgcaacttctgcctcccgggttcaagcaattctcttgcctcagcctcccaagtagctgggattacaggcacgggccaccacacccagctaatttttatatttttagtagagatgggattttaccatgttggccaggctgatctctaactcctgacctcaggtgatccaccagcctctgcctcccaaagtgctagtattacaggtgtgagccaccatgcccggcctttaagttcaatcataagggagattgactaaagtgggcctgacttaatcaggtaagc

SEQ ID NO: 135869 - DNA, 552 bp, Homo sapiens
aatattgaaggcaggattctaagatggcctgtgtaatctcctcctcttgagtctgggagggacctgtgagtatggtggggtgcccctctaattattagcttactttataaggaaaagatgaaaatttttgcagatataattaaaatccttaatctgttgactttaagtttgatctttttaaaaattattttattttattattatttttttttgagagggaatcttgctcccgttgggcaggctggagtgcagtagagcgatcttggctcactgcaacttctgcctccygggttcaagcaattctcttgcctcagcctcccaagtagctgggattacaggcacgggccaccacacccagctaatttttatatttttagtagagatgggattttaccatgttggccaggctgatctctaactcctgacctcaggtgatccaccagcctctgcctcccaaagtgctagtattacaggtgtgagccaccatgcccggcctttaagttcaatcataagggagattgactaaagtgggcctgacttaatcaggtaagc

SEQ ID NO: 135870 - DNA, 552 bp, Homo sapiens
aatattgaaggcaggattctaagatggcctgtgtaatctcctcctcttgagtctgggagggacctgtgagtatggtggggtgcccctctaattattagcttactttataaggaaaagatgaaaatttttgcagatataattaaaatccttaatctgttgactttaagtttgatctttttaaaaattattttattttattattatttttttttgagagggaatcttgctcccgttgggcaggctggagtgcagtagagcgatcttggctcactgcaacttctgcctcccgggttcaagcaattctcttgcctcagcctcccaagtagctgggattacaggcacgggccaccacacccagctaatttttatatttttagtagagatgggattttaccatgttggccaggctgatctctaactcctgacctcaggtgatccaccagcctctgcctcccaaagtgctagtattacagktgtgagccaccatgcccggcctttaagttcaatcataagggagattgactaaagtgggcctgacttaatcaggtaagc

SEQ ID NO: 135871 - DNA, 567 bp, Homo sapiens
cacatgtatagaagatggaacctctcttgcytcctcaaaattttttaaactggccaggcatggtgtttcagggctgtaattccagcaccttgagaggccaaatcaggaggatcacttgagcccaggagttcaagaccagcctgggcaacatagcaagaccccatctctacaaaataatttttaaaattaggtgtgtgcctatagtcccagctactttggaagctgaggcaagaggatcacttgagcccaggagtgcaaacctgctgtgggctatgatcctgcgtgacacagtgagaccctgcctcaaaaaaaaaaaattctaaactgtggtgttttttttttttgtaggggggaggtggttgtatacagaaagacaaactgttgaaacatgacatttgtatggatctctgagtgaaaaaattcactcttaaaaggtcacatactgtatgattccattcatataatgttctcaaaacaagattctaaacatggaaaagagattagtagttgagaattactgtttagggatcatgacaagggagggggtagggagatgaatgtgactat

SEQ ID NO: 135872 - DNA, 576 bp, Homo sapiens
attttcaggggtagaataacaacacatgtatagaagatggaacctctcttgcctcctcaaaattttytaaactggccaggcatggtgtttcagggctgtaattccagcaccttgagaggccaaatcaggaggatcacttgagcccaggagttcaagaccagcctgggcaacatagcaagaccccatctctacaaaataatttttaaaattaggtgtgtgcctatagtcccagctactttggaagctgaggcaagaggatcacttgagcccaggagtgcaaacctgctgtgggctatgatcctgcgtgacacagtgagaccctgcctcaaaaaaaaaaaattctaaactgtggtgttttttttttttgtaggggggaggtggttgtatacagaaagacaaactgttgaaacatgacatttgtatggatctctgagtgaaaaaattcactcttaaaaggtcacatactgtatgattccattcatataatgttctcaaaacaagattctaaacatggaaaagagattagtagttgagaattactgtttagggatcatgacaagggagggggtagggaga

SEQ ID NO: 135873 - DNA, 579 bp, Homo sapiens
gtagaataacaacacatgtatagaagatggaacctctcttgcctcctcaaaattttttaaactggccaggcatggtgtttcagggctgtaattccagcaccttgagaggccaaatcaggaggatcacttgagcccaggagttcaagaccagcctgggcaacatagcaagaccccatctctacaaaataatttttaaaattaggtgtgtgcctatagtcccagctactytggaagctgaggcaagaggatcacttgagcccaggagtgcaaacctgctgtgggctatgatcctgcgtgacacagtgagaccctgcctcaaaaaaaaaaaattctaaactgtggtgttttttttttttgtaggggggaggtggttgtatacagaaagacaaactgttgaaacatgacatttgtatggatctctgagtgaaaaaattcactcttaaaaggtcacatactgtatgattccattcatataatgttctcaaaacaagattctaaacatggaaaagagattagtagttgagaattactgtttagggatcatgacaagggagggggtagggagatgaatgtgactat

SEQ ID NO: 135874 - DNA, 589 bp, Homo sapiens
catcatcatggcgcacactttctcaatctgatccgtcggtgtcactgtcatcagtactgtcatcatgcttatcttgatccacgtcctcaggatagccatcatcttcactggtgctaaaaacatcatcatcatgacctcgctgggcaatttcaggactatgtaccatgccttcatctcacctaggagggggaagatctagggcaacacccactttacggccatacatctgcacgacttgaggagggggtggaccagggggagggccaagaggttttctgccaggaggcaaatgtggaacaccacgtcccaagaagagaaggatagaaactgcctgagttggaggtccayaggctgagggtttcttaaggatggagggtggctgggcaccaggaagtggaatttcctggatcaaaatgttagaagaagcatgtggcatatctggtaaaggaatactctccacttccacgtgctgggcattctcgacagcattcaaatattggttgagtcctcttctgttcatactctatttctagctttctcaattctttctaaatatctggatcctctttttcatagagtcatagaatat

SEQ ID NO: 135875 - DNA, 550 bp, Homo sapiens
gtaaaatagcatagtatttacatataacttgcacacatcttcctatatacactaaatcatgtctacatyactttataatacctaatacaatgtaaatgctatgtaaatagttgttatactgtattgtatcaagaataatggcaggagaaaatctgaacatgttcagtacagaggcaatcattcatttttattccaaatatttttgaactgtagttggttggatacacatgtgtggaacccatggatatggaggtccaactgtatatctagcacatagtaattattcaacacatttcaactgtttagtttttaaaaatggggtataacatattttaaggtaaatatatgaatatctttgtatgtcactagttgcatttttctataacattaaagagttgagtagtatctgagcacgtgactgtgccataattgaaccaaacctctattgttgggcatttgggtttttcaaacttgtgctgttacaaatagttatgatacaaatatttttataagtacgtatttggaataaatccttgagtgcttttctatg

SEQ ID NO: 135876 - DNA, 449 bp, Homo sapiens
ggccaaagagggaaaggggaccaacatgagtcaaatagagtcagctcttctgtcataaccctgctgccctacgtaggaaggaagtgaagttcagtcttagaaactaacatacactttttcagacagacatgtatggtcatcctttctcraaccccaccatggtatagtaattaccagattcagttgttttaggtgtctcatgtcaaacctagatgcggaacatgttgagctacaaaataatgatggtcatttaatcagatactttaaatatttttcaaatttaaataagatattagtcatttagtcagatattttaaagaaaatactagatttcttttgtggtataaggaatggcttgatagtattaacagtcttaggtgaagtaattcaacaaattcttgataaacatctatgatgggcaaagtgcacttaggcaacataagtatgtt

SEQ ID NO: 135877 - DNA, 581 bp, Homo sapiens
agatactaaaaataagcttgttgataaggtctttgaaaacagacagttttttttggagtatagtttactgtttgtaaacagtaaatttctgtatgtgtgtaaacacacatacagaaaaagtgcataaatcattagtgtgcattttgataaatcttcacagtgcaaacgcctccatgaacccagcaccgggattaagaaatagaccctagccaagacaccaaaagtctcattttacccccctttcagtaaatagccattccccaaaaatgactactctcttggcttctcaaatctcagattagttttgcttgttttcaactttatgaaaacagaataatagaatatgaattttctatggttttaatgtgtcccctaaaatttcatgtgttgakaacttaatttccattgtaacagtattaagagatggggcctttaggaggtgattaggtcatgagggcttcccatgatgaatgaattaatgccattattttggaagtgggtcagttatcaagggaaagggcttctaatcaaaggataagttcagctccaatttcctttctgtcttttgcacttacttgctg

SEQ ID NO: 135878 - DNA, 583 bp, Homo sapiens
tcagaaatctgggggtagttattggcaggattcagctcctcaagggctgttggactggcagcctaagctcctcaatgaccattcactggagactgcctcagttcctccctgtgagcctttccatagggcagctcataacatggcagccagcttccawcagagaagcaagagagcaagagaggggtaggtagcaagatggaaaccatagtcttttggttacctaatcatggaaggaatataccatcacatgtgccacatgtgaagcaagttgccaagcctggtccacactcaaggggaactgattccacaaggtgtaaataacagcaggcggggatcactggaggtcattttattggttctttcaacctagcaagctggagatagtgaggaattgcagtaggtggttcctgttggcaaggagcgaggggaatggcatgaaaatgaagacagaattagaattgccaggacttgcaaacagattggattgggaggatgattggaagaaaggagtcaagcctggctgattgggatgattgccgagggactcacagaaggacgaaacacatgagaaacagatttggga

SEQ ID NO: 135879 - DNA, 615 bp, Homo sapiens
tttattgccttttgaagcatgtgatctctgtgacccacaccctattcgtacactccctcccctttgaaaattgctaataaaaacttgctggttttcaggctcaggggcatcacggaaactgccaacatgggatgtcacccctggagagccagctgtaaaatttctctcttttgtactctttccctttatttctcagaccagccgacacttagggaaaatagaaaagaacctactttgaaatattgggggctgtttcccccgatactatactgcagaaaccccctacccaaaggctaactttgggtaagtggtggggtccagtaacatctttctcacaaaccacraaagggacaaactgaggccacccttgacccaaaggaactagactggagaactgattggatgactttgggtaagtggtggggtacccagataaagaatgggattgggttagaggcccaacttaggggagttagagtctctcctacgacagagtgggttagaggcccctcttaataaaatgcaaggaagcttgaccaacctcgggttagaggcccaacttaggagggttagagtcccttagatttagggggttagaggcccctctcagtaaag

SEQ ID NO: 135880 - DNA, 548 bp, Homo sapiens
cacactacacctgtctgagaccatgtaagaacttccaaaatcctttataaggcttcggcttgattccctctatttgaacagggtccattgctattatcaatggaaaaataagcccacacttgtgaacatgtgacttaatgggcttgtgtgggcaacaccatctttcttagatatgtcacaacctgattctaatataaattacagcactggtagctcttgagttacataagacaccctaaacccatgatttctaatggcatagagggccaaacactttacctttcacaaaatcaaagtatctagcaccgaccctatgaacaaatgagcatgaatgaaatcagcagccaaggaatcccatggaatagttcaagtggtaagaacagattaaaccttagartgtgaacgcctaatagattcatctttgttctatcactgttgtgttcagaaagattgtgaggctaagtataggctcagcaagaaagacacatcaattagctgtgccatgtatgaacttagagaaggggtgtggcacatatgttatgcatttg

SEQ ID NO: 135881 - DNA, 575 bp, Homo sapiens
gatggaatacaggcatcattagaggggaaaggtgattcrgagcacattcttgactgttactcagcccctcctcagcaaaatctaaaagagctatttcaccagtctccagtggccagacagtgagattgtaagttgtgtctcattttcagctgtgaacaaagatggcacccttggccttaagcaggggttgtgtgccctcctagacaacagcagccacaacctgacttagcagtagcaacaatggccagggttgtggggcataatcatcccagagagcaagaacaaagaaaaaaaaatggcagatgccatatagtttcaggagtacatgtgaagaagggtctatgaggacttccagaaatatctgggaggcatttgagaatgaccatattttccacagaaaaagcaagattggagccagagaagttagaccagcaggtccctgatcccatcctacggttatttccccagttccagatgcatcgttggtatagccatccaggcataccttgaagatattgcaggtttggatccacaccaccacaataaagcaaatattgcaataaagtaagtcacac

SEQ ID NO: 135882 - DNA, 516 bp, Homo sapiens
aaggacaggggaggatgccacagtgaggctttctttgtgagagccctccagttggcacagtatctaggagaggtgctcaatatttacctcccatataagcctgctattttttattgtttcactccagttctttgaatatgtacagccatcacctgtttgcagcgggctgcctccctctttgggctctttactccaggagccccacacaactatgtgacccattagctgacattgcttactggcttgtttgttgtctacctctccaccaggcaggagagctttatctgggaacattccatccctgcatgaataaaagtttgytcacctcccccaacagcccaatatatatgtctgttcccacgccatatatagtttcacagctgggttgttataattatgactgagaattattttttatctaaactaaagttactatttgcctacaatcttctcagtatgttttttgtgggggaggagggctgaaatatcacatcttcatctatgcagatctgtatg

SEQ ID NO: 135883 - DNA, 618 bp, Homo sapiens
tttttttaaaaactaattatcctgttactagttgttcttccctaattcaaagaccagttttagggtcaagcatggtggctcatgcctgtaatctcagccctttgggaggctaatgcagaaggatcacttgagctcaggagtttgagaccagcctgagcaatatagcaagacccatctctataaataatttaaaaattagctggatgtggtggtgcatgcctgtggtccaagctactcaggaggcagtggcgagatgattgcttgagcccgggaggtgaaggctgccgtgagctgtgatcacaccaccacactccaacctgggcaacagaaggagattctgtctcaamaaaataaaataaaatagatatttttaaagacaaattttatttttaaatgtgaagtactgtgcaccctctctcccacagtgatatgggttgaaaaatcagttccctaatgtagagccaccaggatggctcacagaggtataacatctgctccaggtcagattgtaccctctttacagccccctatatgcctggatcccacccagcccatggctcccaccccctcctcatcgcttttcattcatgcatcactcctattagtggacaacatgta

SEQ ID NO: 135884 - DNA, 583 bp, Homo sapiens
agatggtttggttatcttttacttaatacacattaaaatatataacttttaaaataaaagatgggcctggcacggtggctcacatctgtaatcccagcactctgggaggctgaggtggatggatcacttgaggccaagagttcaagaccagcctggccaacatggtgaaagtccgtctctaccaaaaatacaaaaattagccaggcctggtggcacatgcctgtaatcccagctacttgggaggctgaggcgtgagaatcacttgaacctgagaggcggaggctgcagtgagctgagatcatgccactgcactccagcatggggcaacagagccagactctgtcttggaagaaaaaaaaaaaaagagtaacttacatcaattgattaggaaacatcgctctaaagcacaaggaattaatttagtcttaagaaaatgtagcttgagatcaagagacatgcaaaaactaaaaactaayttctttcccacaaataataatctcatttattacatatatatatttccaaaaaatgaaggaattagcagcaagagcaaatttaataaactttcaaggaaagttttttt

SEQ ID NO: 135885 - DNA, 598 bp, Homo sapiens
ggagtttccctgaacaagcgctctctttgcctgctgccatccacataagatgacttgctcctccatgccttctgccatgattgtgaggcctccccagccatatggaactgtaattccaataaacctctttcttttgtaaattgcccagtcttgggtatgtctttatcagcagcatgaaaatggactaatacagccagcgatagataactgaaacacttgcctatcatctgggtcaatgcctagaatgtgagctcccagaggcagggacttccagggtcttgatcaccttatatctttgatggttacttttaygtgtcaactcggccagaccacgggttgcccagatagttggtcagatgttattcggggtgtttctataagagtgtttttgagtgaattaacatttaaatggtaggctctgagtaaagcagattgctctctataacgtgggtggacctcatccaaccagttgaaaatttgaacagaaccaaaagaccagcctcccccgagcaacataattttccagtagactgcatttggtcttcatttgcagcatcaactcttcctggtactatagtagacagcctttggacttgaa

SEQ ID NO: 135886 - DNA, 588 bp, Homo sapiens
actcaataaaatgtaacaatgtactggggtgagtctttgtcccggggttatttgagcattagctgtggcagctgcatccagccccaagtgacatgtatgatcaattcttgccaacatgagggycacacatccagctcttcctttatacagacagccctttgcagaacggctccccaaagggttataattagaattgtaaaagcacataaacaaaatacaagccacatgagcctgcctgcccagcttcaggaaatttgaaagtgtcagagaaaaatctttgtttaaaagtttttaggacaaaaatacaaaagagtagaattagattgaaacaaaatggtcaaacaaaaatagggcaaaatagtggcaaaaaaaaaaaaagctatttgtttattgaggattatgtttaaaggtaggaatttagctggagagaatgaattgaaacctggggaactatctggttcctgtgacctcttttaacttgtgactggaaaagctcatttgaggactttgatgagctagaaaactcagcttgcagggtgtgtctttggagaaatcccttagtagtaaatggttgtatataaatctgac

SEQ ID NO: 135887 - DNA, 588 bp, Homo sapiens
actcaataaaatgtaacaatgtactggggtgagtctttgtcccggggttatttgagcattagctgtggcagctgcatccagccccaagtgacatgtatgatcaattcttgccaacatgagggtcayacatccagctcttcctttatacagacagccctttgcagaacggctccccaaagggttataattagaattgtaaaagcacataaacaaaatacaagccacatgagcctgcctgcccagcttcaggaaatttgaaagtgtcagagaaaaatctttgtttaaaagtttttaggacaaaaatacaaaagagtagaattagattgaaacaaaatggtcaaacaaaaatagggcaaaatagtggcaaaaaaaaaaaaagctatttgtttattgaggattatgtttaaaggtaggaatttagctggagagaatgaattgaaacctggggaactatctggttcctgtgacctcttttaacttgtgactggaaaagctcatttgaggactttgatgagctagaaaactcagcttgcagggtgtgtctttggagaaatcccttagtagtaaatggttgtatataaatctgac

SEQ ID NO: 135888 - DNA, 641 bp, Homo sapiens
ccagacagggcctggggcagaaaggacttaatttggaacagtgtccaaggctcccagaaagggtctgttctttccacccctctctaatgccacactgaccctgcctcatggatacatgcatcatgggaaggtataattacctaaaatcatacaaattagtgattagaaggtgaatattggatttttacaaagaatgctgttgttggtttcccctttcttggaaagtttgtatcttctgattatttggttttaggacaagacacattggtcggtcttagtcttgttaaaaatactgcctttgttatatatttgctcatttattttggaaaaaaaacaactgtaaaaattgatgtcagctttgtggaaactacctaaaactcaaagaaaagtagtgaattttctaagtgtatttttcttttaaagatgactttttcatcttcctaaaacttgagatgatgaaatagcacaggaatcaagaactcttttggataaagttcatctcyaaaatgacaaacttacgcaagttttctgccttaagtaggggaaagcatcaaacacacacacacacatccacacacatgcttacacaaactcacaattgcttgggaatcataggctatgcatactcctttgcaggtaag

SEQ ID NO: 135889 - DNA, 641 bp, Homo sapiens
ccagacagggcctggggcagaaaggacttaatttggaacagtgtccaaggctcccagaaagggtctgttctttccacccctctctaatgccacactgaccctgcctcatggatacatgcatcatgggaaggtataattacctaaaatcatacaaattagtgattagaaggtgaatattggatttttacaaagaatgctgttgttggtttcccctttcttggaaagtttgtatcttctgattatttggttttaggacaagacacattggtcggtcttagtcttgttaaaaatactgcctttgttatatatttgctcatttattttggaaaaaaaacaactgtaaaaattgatgtcagctttgtggaaactacctaaaactcaaagaaaagtagtgaattttctaagtgtatttttcttttaaagatgactttttcatcttcctaaaacttgagatgatgaaatagcacaggaatcaagaactcttttggataaagttcatctccaaaatgacaaacttacgcaagttttctgccttaagtaggggaaagcatcaaacacacacacacacatccacacacaygcttacacaaactcacaattgcttgggaatcataggctatgcatactcctttgcaggtaag

SEQ ID NO: 135890 - DNA, 563 bp, Homo sapiens
tatggaaaacatagaggtaaggaggctgaagattatgtacaacacctcctaagggatggattgaagaagggttctttaagtcaagcctgaagagatgataagcctttttgcaaggcaaagagaaaggcattctagtttcaacaaacaaaaccaaagaaatgaggatatatgaacacctgggtgtgaggttgggaaaaagtgaacataactataaaggtcaagtgcaagcatctaatggaatcctgctacacattacagatgctaaaacactatcttgcattcttaatacatggttagattcttgagaaagaatttgcttagaaagcagaaggaactaatttaagcataccctgtagttgattgcctttccctccaggtctgaaaaacaaaatctagagatttcaatttgtcagcatcagttgactgataatattagcccagagagggacttgtcttgaggcatttggcatgaagagcatcyagacagatagatagatagatagatagatagatagatagatagatagatagataatggtttggctgtgtccccacccaaatct

SEQ ID NO: 135891 - DNA, 631 bp, Homo sapiens
tccttcccgtgggttcttggtctcacttacttcaagaatcaatctgcagaccgtcgcgatgagtgttacagttcttaaagatggtgtgcccagagtttgttccttcacatgttcagatgtgtccagagtttcttcttcccggtgggttcctggtctcgctgacttcaggaatgaagccacagacctttgcagtgagtgttacacatcataaacatagtgcagactcagagagcgagcagcagcaagatttattgtgaagagggaataaacaaacctcccacaccacagaacagaacccaagcgggttgcagctgctggctccggtggccagcttttgttcccttatttggccctgcccacatcctgctgattgttccattttacagaacactcattggtccattttacagcgtgccgattggtccattttacagagtgctgattggtccattttacagagtgctgattggtgtgtttacaatcctttagctagacacagaatgctgattggtgcatttacaatcctttagctagacacagaagttctccaagtccccacctgaacyagaagcccagctggcttcacctctcacctctggtgtgtttttggaaaagatcttttgtttcagac

SEQ ID NO: 135892 - DNA, 622 bp, Homo sapiens
agatctgagagagagaagaaaatgaggccasatcatgcagagagggccctggcggccaagagatttttgatagtttggatttattttgaatgcactatcaagccactgaatagtttaaagtgacaggatatggtcaacaacttaatatcactctgtccgccatgtggagaatgagtttagtgaaagtaggaagcgggtaataatgcaagcaaggaaaccacttcagaggccatttcagcaggctggctggtgatgtaaagtgaagtggaatgttggagatggaaaaaatgtgaacaggttgagaatatgtttgaagtaaggttgaagggacatgctggtagattgaatgtgaaggtttgagggaatcaagacaatgaagaatcaaggacaatgtctgtctctttagcttggaccactggatagtaccatttacagaggtacagctgaggaagggtcagactggagcagagagtgacagggagttctgttttgactgtataaaacttgacataactactagacatccaagtggagatacaaagtctgtaggtgaagatacaatttcagtcctccaaattgagatgacgactggaaatatcaatgtgggagtcattggatataa

SEQ ID NO: 135893 - DNA, 430 bp, Homo sapiens
gatagtgctgatttgtatttgcttgctgacaagtcagccagtagaatttttattgtttatgaacaattaaggttgtgatagataacttgaaagccgctgtaatctctgatcatacaataattcatttcaccttctcaaaagctaagaagttctttctatgaaatcctacaaaaatcttttgggaatagaaaggaaaaaagataaatatttaaaatggtgaatctcaaaagcatggaatctgtagtctcttttcttgatgtatcataagtgaggaatttttgggtgatwtataaaggaagctttcaagtgaataaaaggaaatgctgatgcctttgaagaacaaacacagatatgcatgacagcagaagaaaagagaggaagatggtgaagaactatgagaccagatattgaaaatcagaaattcactgaa

SEQ ID NO: 135894 - DNA, 413 bp, Homo sapiens
gggtgccaagcccagataaactctggatttaggttgtttgggggccaactgagtttccagatctgatgagatcttcagactgtcttggaagacttgcttcctccaatttttatggaagataaattccagtgttaccacaagacttctgacaatccccaaagctggcttatgggaatatgatcaatgtttacaaaagtagagtcatctattgaatgcggggcaatggtcaggggcccaccaaagatcaccctccttctgcagagaagagggtgatctttaccacagactctgcccacctagaccaaggttctggtcttagttccctctgtaggatacaaaatgaagaaaatatcagcctttytgttccatggccagtgaagtgtcaagggatggaaaacttaattcaggaattc

SEQ ID NO: 135895 - DNA, 630 bp, Homo sapiens
gaagttgggtgacttgcccaagccacaaagaggaaaagaatcaaactcaagtttctcgactttcagttaatggctaattttaattgcataatattggagagtcagaaatgttcattttattgtggaagcgatccaaaacctcatgctataacctagattctagaaaaaggatgatcaagccctattagcgctgtaaaaataaggtaatcaagccctatcagtgctgtaaagaaagttttgcaaactaagttaaacttagaaaataaatagcaagaaataaatcagggaagcaaggtttccctgagactactgagtccatcatactggaagtcatccaaagttatcaacagcagattcattaactgggtacaaatgtacagctggaattcaaagtagactcggtgcccttctgtgtgccctgatggaagaaacatcgtgttctcattctgtggctgtgtactctctggggatcattggttttaccaagtttttacattgctttttcaaagacaataatgcctgtttcctgtatagtttatttaagtaaacaagaaggagacagcaaagttctgtctmctttacaaaacgagactttaaaaattttatctaaagaaagagagcaagagatct

SEQ ID NO: 135896 - DNA, 615 bp, Homo sapiens
gcaacatatttgcacaatgggcaaatttgtctaatctatgaagaatttcacatcaagaagaaaagaggtcaggcacagtggctcatgcctgtaatcccagagcactttgggaggccaagacaggtggatcacctgaactcaggagtttgagaccagcctgggtaacatcgcgaaaccccatctctaccaaaaataaataaataaattagctgggcatggcggcgtgtgcctgtagtcccagctacttgggaggctgtggcgggaggatcgcttgagcctgggaggttgaggttgcagtgagccgtgatagcgccactgcaccccagcctgggtgacagaatgagaccctgtctcaaaaaaaacaaaaagtgatttcctttttttgcacataaaggcaaatatatactatattctaatttttctccttttctttcttttgttaaacacaaaagggrtaagtacagtacaatattctgtactttatttgttaatatatcttgacacgtactcctttttttcatagagctgcattgcgtggacataccagagagtaatcagttccctagcagtgtacatttcagttgtttccagtcttttgctattacaaacatttct

SEQ ID NO: 135897 - DNA, 569 bp, Homo sapiens
aatagatccaggcataggttataaaagcagcatgttagtatgatgatgcatataactgctaatggccaaaagtgattcatacaaatcttaagactcccaaatataaaggcttggattcaaacttagattataatgctacagaagctaaagaatggataaatgttattttcaaaaagaggctgggcacagtggctcatgcctgtaatcctagcaccttgggaggccgaggaaggcagatcactgaggtgaggagttcgagaccagcttggccaacatggtgaaaccccgtccctactaaaaatacaaaaaatagctgggtgtggtggtgcatgcctgtaatcccagctactggggaggctgaggcaggagaactgcttgaacctgggagatggaggctgcagtgagccaaaactgtaccactgtactccagcctgtgtgacaaaatgagactccatgtcaaaaaaaaaaaaaaagaaagagaaaagaaaaraaaaagagaaaagaaaaaggtagcattcccccaactcctccaagtcaagaatattacagtaatatccaccttaaagctt

SEQ ID NO: 135898 - DNA, 597 bp, Homo sapiens
ctgggcgcagtggctcaagcctgtaatcccagcactttgggaggccgaggcaggtggatcacttgaggttaggagttcaagactagcctggccaacatagcaaaaaccccgtctcgactaaaaaaaaaaaaattagctgggcatggtggcgcgtgcctgtaatcccaactacctgggaggctgaggcaggagaatcacctgaacccaggaggcagaggtttcagtgagccgagatcatgccactgcactccagcctgggggacagagtgagactccatctcaaaaaacagaataaaaaaaagacaagtttaaaggtggctaaattatttggaagagatggtcctttcaagaaaattcccattaatttctagctgcctgagaaaagygataacttcactactttgtaactagaagactctcctaagcctattactttaccagcttgcttggagggaaattattaacacagtgatctttgtaccacttcaggaagcatttaaattctgtttatcactttagtatcccaggtcccctgagagggaggtcacagggtttggagttttgttgacaaagaagttcaggattaaatgaccataa

SEQ ID NO: 135899 - DNA, 597 bp, Homo sapiens
ctgggcgcagtggctcaagcctgtaatcccagcactttgggaggccgaggcaggtggatcacttgaggttaggagttcaagactagcctggccaacatagcaaaaaccccgtctcgactaaaaaaaaaaaaattagctgggcatggtggcgcgtgcctgtaatcccaactacctgggaggctgaggcaggagaatcacctgaacccaggaggcagaggtttcagtgagccgagatcatgccactgcactccagcctgggggacagagtgagactccatctcaaaaaacagaataaaaaaaagacaagtttaaaggtggctaaattatttggaagagatggtcctttcaagaaaattcccattaatttctagctgcctgagaaaagtrataacttcactactttgtaactagaagactctcctaagcctattactttaccagcttgcttggagggaaattattaacacagtgatctttgtaccacttcaggaagcatttaaattctgtttatcactttagtatcccaggtcccctgagagggaggtcacagggtttggagttttgttgacaaagaagttcaggattaaatgaccataa

SEQ ID NO: 135900 - DNA, 597 bp, Homo sapiens
ctgggcgcagtggctcaagcctgtaatcccagcactttgggaggccgaggcaggtggatcacttgaggttaggagttcaagactagcctggccaacatagcaaaaaccccgtctcgactaaaaaaaaaaaaattagctgggcatggtggcgcgtgcctgtaatcccaactacctgggaggctgaggcaggagaatcacctgaacccaggaggcagaggtttcagtgagccgagatcatgccactgcactccagcctgggggacagagtgagactccatctcaaaaaacagaataaaaaaaagacaagtttaaaggtggctaaattatttggaagagatggtcctttcaagaaaattcccattaatttctagctgcctgagaaaagtgataacttcactactttgtaactagaagactctcctaagcctattactttaccagcttgcttggagggaaattattaacacagtgatctttgtaccrcttcaggaagcatttaaattctgtttatcactttagtatcccaggtcccctgagagggaggtcacagggtttggagttttgttgacaaagaagttcaggattaaatgaccataa

SEQ ID NO: 135901 - DNA, 605 bp, Homo sapiens
tgcccacttacacaaaggaagaaataagggaaaacattctacttagttaatcactctcatctgaggttgagtaggggatgggatagcaaagctactgacttaagtgatttttaaaatattatagtgaatattttctattttgccrtcttcccgcattgtatttgggcctttgctttcaaagcgactgtttgtaatgaaaggccattctgattcatttcttgcagtgtatggttgtcagctcccattcggtttttgtagttgcctaaaaacaatgtcatctagggaaagttatttattggagcatgatattgctaaagctcagtgtttctttcctccagttacagactgaagctacagtctgtactggacaaggctccagtacaggggtctcaatgaggctttatgacacctgctggagtgtgggaggaggaagacagaaagggaaccaaaaaagagttccaggggccacacatagaaccatgatatttggaaggagaaataatattggccagaaccctgaaaaagctgaatagattcaacttacctctagtgttgactgcgtccccccagaattagataacctctgtggtcccttctagcctaaa

SEQ ID NO: 135902 - DNA, 511 bp, Homo sapiens
aactgaaattatggaccatggattctgaactggatttggaaaaagggaggacaggaggatgctggtagatggagagaaagaagcacatactgatgcggtggaagaaaaatatctgtggaagaatttgggtgagcaagcttgtgcaattggagatggtgaagaggaagaagttaggctgtgaggagatgagacaatgactccgtgaagctcaactgaagatcagggagtgacacgaatccaccaaacttctttcctgtttctctctcctctccacttattttcaaattctatgagtctgcatctgtaggatttcaaacttagcgtgttttggacacatgtggcgccccatctcacatccccttkgcccaccttttactccacttatttccgtggcagctaaagtgatttaacacacaccttcctgaagtgcgagctgatagccctgtgtctcaactccatcaggactcgctcatgctctgccccagagcttctctgacctgctgggcactca

SEQ ID NO: 135903 - DNA, 433 bp, Homo sapiens
gatcaggaggggcaattcctgtgggtagrgttgtcagctttgaacactgggctcccagggacacgtggcatacatgcctccccactcttcagggaaagtgttctgttctacgtagttgacctaagaaacttatcaggagtccctggaaattctcaatttaacttttaaatctaattttatgttgtgtgtggaatgctaaaggaatgagaaaagtttgacagaatgttaaatacaggcaacaaagaaggatgttacaactagcaatgccaatactgtggtgctggaggcctgcttctccgggcactgctgggcacctaccccaaatccatgccctcttccccactcagcaacaggactctgatttttttcaggctggcaatgtgtccattaaatcaattccctccctggaccctctgcaactgaagctggcccc

SEQ ID NO: 135904 - DNA, 396 bp, Homo sapiens
gagaaacacacactggggtaaacaccaatcagtgaagggcagcaagcagcttaagaatcccagcacattttgaaaggaagctgatcaactacagctcccctggctggcctgtcaacatcccacagcagtgacaggcactaacyctgtcactgtgctcctcgtctgaagggctcacttgttctgaggatcctgcatgtaattttgatacagaattggtgcccaaatggcattgctggaaacctgactcagacagtttcatactcacccaaaaagatgataaatgcatgcagcaacgcagggagttaaaattaattcatgattataagctcttgcatgtttattctaaattatgctttacaaagtgctttctcctaccccttataccttaaaagagga

SEQ ID NO: 135905 - DNA, 575 bp, Homo sapiens
tgcatgtatgttcaattgagtgtgacaaggaggctaaggtaattctgtaggaagtcttttctracatagaaaaacaatgtcattttggtatttaataaccctctacttcctacaaaatatgctaggttttctttttttgtaatttctttatagaaggtcagtgtgttagtacaatgtcagtattagtaaaaatctgcttatatactgctaaagaaccccattattactgtatttactattaacgtacaagtatatgggaatcatttgttcttcatttcttaaaatttgctgagtttcctctactggatatttcagtctactttgtctacttttgtctactcatactttgaaactgttttctttgctttcttatttgcaagactgtttgattgacgtgggaatgtagagaacagaatctcatataaagcagtggcaacaaaacattcccagtttttatgttcttttccctctgaattttcaatctggtttgaaatagttaagtatacttacgtctcttttatcttaaaaatgctcctttcactatatatttcccccttgtcactaccttctttgca

SEQ ID NO: 135906 - DNA, 571 bp, Homo sapiens
ttgagtgtgacaaggaggctaaggtaattctgtaggaagtcttttctgacatagaaaaacaatgtcattttggtatttaataaccctctacttcctacaaaatatgctaggttttctttttttgtaatttctttatagaaggtcagtgtgttagtacaatgtcagtattagtaaaaatctgcttatatactgctaaagaaccccattattactgtatttactattaacgtacaagtatatgggaatmatttgttcttcatttcttaaaatttgctgagtttcctctactggatatttcagtctactttgtctacttttgtctactcatactttgaaactgttttctttgctttcttatttgcaagactgtttgattgacgtgggaatgtagagaacagaatctcatataaagcagtggcaacaaaacattcccagtttttatgttcttttccctctgaattttcaatctggtttgaaatagttaagtatacttacgtctcttttatcttaaaaatgctcctttcactatatatttcccccttgtcactaccttctttgcattacaagacat

SEQ ID NO: 135907 - DNA, 563 bp, Homo sapiens
gacctggctgcttttgaaggctttctaccatagtgtggccaaatgtgacgytgggaacaaactgcaaaaaactgactgtcctaaagagcagggtccgtgttcgttacatccaggtacagataatcgaccacagagtcgattatctggaggcacctgttccctaaattggccgagccactgttgaggataggtgggccaatcttgcagtctgacaccatagtcttggcttatataatttataatataatgttttcttgctctattatagaattatctttagatattcgtccacagcataattttaacattttatttgaagagaaataaacacactaagaaattaaccatcacctgtaatccctccatgtaaaagcaatcatataatgaagttaaagtttcccattcttctgcctcttttgtctttccaatccctatgcccctgttcctaactctcattgctgtgccagaggaattgctagtaacaatctgcttgatgactgaattactgacaagcattctgtattgacatatttaattcaaatgtggtagataatttgaaaagg

SEQ ID NO: 135908 - DNA, 534 bp, Homo sapiens
agatctttttttccttccttctatcttgcttttttttggtttttattttttatttcaataggtttttgrgaacagatggggtttggtaacatgagtaagttatttagtggtgatttctccgattttggtgcacccaccactcaagcaatgcatactgtatgcactgtgtagtcttttatcccttagtgccctcccactctttccaccaagtccccaaagtccattgtatcattactatgcctttgcgtccccatagtgagaacacacaatgtttgatttttcattcttgagttacttcgcttagaataatggtctccaattcaatccaggttgctgtgaatgccattattttattcctttttatgactgagtagtattccatggtgtacttatatatcacactttctttatccattcactcattgatgggcatttgggctggttccatatttttgcaattacaaattgtgctgctacaaacgtgtgtgcaagtatcttttttcatataatgacttcttctcctatgggtagata

SEQ ID NO: 135909 - DNA, 582 bp, Homo sapiens
acactgtacccaatatgtattcttttaactctcactccctttcccatgctttctcctgagtctccaaggtctgttctatcttcttatgcctttgaattttcatagcttagcctcccacttatagtgagaacatatgatgtttggttttccattcctgagttacttcagttagaataatggcctccaactccagccacgttgctgcaaatgccattatttcattttgttttatgtctgagtagtattccatggtgtatatataccacattttctttatccacgtgttggttgacaggcatttaggttggttccatatttttgtaattgtgaattatgctgctatacatgtgtgtgtccatgtgtctttttcatataatgactgcttttctgttgggtagatacccagtagtaggattgctggatcaaataatagtcctacttttagttctttaaggaatttccatactgtggttgtaccagtttacattctcacatgcagtgtaaaagtgttcyctttcaccacatccatgccaacatctatttaaaaagattcttaattatggtgattcttgcaggagtaag

SEQ ID NO: 135910 - DNA, 432 bp, Homo sapiens
tgcaagcccaattcatagggagtgactgatagtgtagctggatcaagactggagaacwagtgcaagaaatcacgagggagaagtatgtatgtagatttctcagaatggacccagagtggagggtatttatgttctatatgaatcctcaccggaaggtttcactatggagcaaactcaatcagacaatgtatctagtgcatgtcggtcaatctctgtcttcagccagttaactcatgaaccagtggctatggcaacagagacagaagaatctcccccataaaagtcaaccaggcactaccactgatgagtgctcaaactgccagcaacaccaagcagccctaagtcctaatatataaaactatttatctgggttgagggcaaccaggtagctatcctgtaacagactgattgcattggcctctttccatcaag

SEQ ID NO: 135911 - DNA, 585 bp, Homo sapiens
accagtgcaggcattctggctacagaactctgtgctaacctgactctacctgagccatggagcgttatcaaaatttggcatttgtaactaaaattagtactttactmaaatttactgaggattcttatgcagtagtctaataaactagctatctactgtgcaacattacaaatctcctactaaacatgagtatatgcagtacttgagttttcctaagttgctaaatccaatggtcaattctcagtcctcaccatactcaatctatcagaagcatttgacacagactcccctcttcctcagaatattttcttatttttggcttccaaaatactagtcccttttagaaagaatatagttggctcaccattttgtttctgtgacagtacatattttactagtgctatgctatgaatgtgtgttatttaacacattatcaaggttaatgtgctaaaattactaagctacatttcagtttataaggtgatcaaataaataaccatttttcaatttttgtttctcttcagctctttattataaggcctttttcaactggaaagtaagtctaataattgtaccattataatt

SEQ ID NO: 135912 - DNA, 518 bp, Homo sapiens
cctcatcatggagaccggtatcatatttgtcctctcactttggcttctttcttttctggggacacatgatgaagtgtttggggtttctctggagaggggcaataatcccctctcctccttccaggtatagcacatccttcactgtgctgaggyccctcaccttacacaggtttaccaggccatgctgtcatctcttcatagtctgttcttgaaatcagtgtggcttttgttaggggccccaagccactggcaatttttcccccacataaaatgtaatttgaaatttccactggagaacacagttatcaagaccagcaaaatatctgctttctagcattgattttcaaagttgaacttcttcatctgaagactgcatgaagcctgtgggatcccatatttcatgatgataagacttggaattcttactgtcagtgaagtctgtgcctgcatctctgatgatgtacaaacttgtatcatttgattcacaacgtacaacttttgattcacaggccccttca

SEQ ID NO: 135913 - DNA, 553 bp, Homo sapiens
atgctcataaattaagaatctgttagttatacagtgttaagacaatcttcttaatgctcactacccccatttccattttcctagaagcaaccactttcatctcttttagctgagacataacattttagtcagacatcgcgtaatgactggaatacattctgagaaatgcatcatagtataaacattatagcgtgtgcttatacaaactagatagcataggctactactcaccttggctacatggtagcctgttgctcctaggcttgaaatctgttcarcgtattactgtagtttgtgctacggacacttgtaacacaatggtaagtattgtgtgtctaaacatatcaaaacatagacaaggtacagttaaaatatggtattacaatcttgtgggaccacagtcatatatgtggtatgtcatggaccaaaaggtagttatatggtgtatgactgtctataaatttgtatgtcagtgtgtgtgtgtgtgtgtgtgtgtgtgtgtgtgtgtgtgtgtgtgagagagagagagagagagagagagatttacattcat

SEQ ID NO: 135914 - DNA, 631 bp, Homo sapiens
taaggttctttagagagctattctagcattctgtcacctcaaccatttaaaatttaaaatggcaaaagagctttattagtagagcatctaatttcaaatccaccattttaagctttgctattattacagaaaagcaagtacaaagtgttgagaagagaaaacaaatgggattttgcttctgtaagttaatagttacatttcagctgttctgtttacacaccattaaatgtacrctccagaatgtggtagaacaagaaaaacaatagtacagttcttacaatttgtaataagctgcacttcacagcactttacaaataaacagcaatcatatctgatctggtggactcagagagtaagcagaggctaccccagtttattatagacataagcccaccatgcaacagactaagggaaggcttacagagaaatgtccaaactttctttggaatacaaccttatactctttgttatggaaggcaggcactgttctcaaatgctcttcccattgactgggcaggcacttacacagaataatcaaacagctgttgactttggaattgaatttttttttttcccaaacttctcagtactagttctaaaccatggctgcacattaaaatcacctgttgaa

SEQ ID NO: 135915 - DNA, 417 bp, Homo sapiens
tgtgctgctggatttgctttgctagtattttgtagaggatttttacacytatgttcatcaggaatattggcgtgaagttttcttttttcactgtctctgccaggttttggtatcagagtgaaagacagttagagagaaggagaagttcacatgcaaagggcaccccatcaggctaacaacagacttttcatcagaaaccttacaagttagagagattggaaccctattttcagcatcttaaaaaaaaggaaatttcaaccaaaattttacatcctatcaaagcttcataagcaaaggataaataaaatcctttttagataagcaaatgttaaaggaacttattaccaccagacctgtcttacaagaggtccttaagggagtgttgaacatggaaatgaaatgaagatacctgtcacc

SEQ ID NO: 135916 - DNA, 514 bp, Homo sapiens
agatttttgaagaaaagaaatgtaaatatcacccaacacctcccagcaatgggaaacaccttcctctatctactaaaatgagagatttttttttttttcataaacagcatggatttggtycctaccacagctttaccaaagtggaagcttgcaatacccagccagaaataaaattaaaaaacacacatgagtcactgcattttagagaggattttactaccaaagaagttattgactgaaccaaaaccacaaactgttccacctcagaaagattaataactgacaacaaaagtaatgttccagaaattggactggacatgtatgataaggacagaaaactaaatagaagaccaggcatgtttctaatcctcttaatgctacccagctgccagtatccaataatttcaattaaaaaatcagatttttttctggcttttttgctctttcacagcctgaaggaatttccatgtccatgaagttggttttctcatcaattacaatttaagaacttaaa

SEQ ID NO: 135917 - DNA, 414 bp, Homo sapiens
taagttcgatttctaatgtagcaggctttctgaagtagctattgccactgtgccttgtttatcatttgtctattctgtgtggctttatatatttgtatgtgcatgatgatacatatcagaagacacttttctcagcctaatccagaaaacagaaaattctttttactaagttgtattttgtgattggtgctgccagcattaatctctgtaggactcgtgttttcttggttgcattaagcaagtttccatgcttaccaatgytttgttgtttcaattctctttgccttatttcatcaaaagtgcttttctcttaagaacactgagcctgtcagaccaggactcagagaccccctagtcctttaacaagacacaccctccagcaagaacacagactggtagtctcagttttcacgt

SEQ ID NO: 135918 - DNA, 491 bp, Homo sapiens
tattcaaattctgtttcttcctttggctatttagaaatgcatgagtagaaaatcagagagggtaagtggttgcaaaccagatgaataaatgcagttaccagatgttcgttttaaatttaaaattaatgtggtgaaaaagtatatagtttgtcaaaagcgtctatggaatggaaaatattaataagaagaatgccttataaatgatgtactccccaaacagctgagtatacaagataagttcattttcaaagccctcatgtcattaacaaactactcatgcttttctcaccaggcttatggattctccaggaccttctgtgcattgcctcacatggtaaagattcattaacttctcttccctattttgttattgtttgacccctgaattaatctgtctctgtagaatttccatcagtatctttttttttccagaccaaattacagaagagtaaattcaatctgartgacaaatcttgcacaagttctcactg

SEQ ID NO: 135919 - DNA, 323 bp, Homo sapiens
acaacaaaggaggcagaggaatagagtccagttgtatatgttcactaagaagaaatagatggtggcagtcatgaaaattcactgcgcaggcctcccacagtggagagcataatatactattgtccccagctgctgtcgctmtgggtccaccgctgcatttgtactgaagcaacactttggataggccgctgttagccaatgactgagtatgtcaggatatgacgccaggcctattcttgtgagacacagaactcctcctaggaatgactttggcttgagaactccctcttggcctggccaaatctttcttagaactgcactgc

SEQ ID NO: 135920 - DNA, 579 bp, Homo sapiens
ttatactatttcacctcattgaaattagacttggaagttcatgtgacttctgtcaatgagatgtaaattaaagggacataagcactttctagcagaaactttaagatccgttatgtggctccatcatctctctttttcttctactatgagttggccaatccttgataggagcctctccttcagattctaaccttgaataaaaatcaatgttgaggggaaggggacaagatggctgactagaggcagccaggaagtgctgctctcactgagggagacamaaatattgagtaaaccaacataatttgagcaggtattcggagagaaaacactgagagtggatggagaggcaatgcagactctggagctgaagagggaggaagctggaaacactgaatggagtatttgaatgctaagactagttcccaaccccaaacggctcctggggaaggggtgaatgaagggattgagtcacagctcactcttaccatgtacttctgggatcctcgctacaggggactccacattccccatggacatttgagctagtagggggctctacccagagagtaggcagagaca

SEQ ID NO: 135921 - DNA, 635 bp, Homo sapiens
gactgtaacagaaataggaaatgatcagatcctaaactggtgtatagcatgggatgataatcagggacatggtctccaagaccgacattttgtacactttgattgatgtctgtagaatcatatgtgggtgttaattcagatgaatgtgtgtgtgtgtggggtgtgtgtgtgtgtgtgtgtgtgtgtkgtgctgttagcacaccttttaattgttaagctaattggccttgctcttcctgaattactttgtaaagagtaattacctgagaccatgttgtagcagtttggtcctgcaagagaactgtttttgtgtaccacttaaaataaacctggcttgttgagctgttgtttttagccatctctcttgctccctttcaatttagagagaactctcagaggtaaaccacaggaagactcacacaggaaaattccctgaggtcaaagctagtagccgtgccaagttggagactccaggcatatgacagctctttgggagttaggtcttacagtgcctgccaaatgggaatttgagataagcaaggcgaacattggacttcttgtaacattttttgtgaaggtgaaaaatgaagatgcttctaattagcaaaaatggtttgtaacaacggttcgaattc

SEQ ID NO: 135922 - DNA, 575 bp, Homo sapiens
tagtgatacgttcatgaatgtctttaatatgaaccttgcttctgagttgtgggaggaaaaatcactggatattgatgtctgtggcaatgatccctgagctcttctagtaaacaatccatcagcatccacagataggaggggaacatgaattgcatgcatcatctagcacgcaataaacactaacaagtaataataagaaaagttgaagtgcaggttcgtaactggagggaaataagaatgggtactaaaagggaaggaaacatttgaattttctttgtaatagctacttctgtctgccttcttgcttatgaagttttatttcctttgcactcttgtactttcatcctgatgacatggctattattttatagcagtttcaagcagttaattaatgaactgcacacaagtgacatgacaccaccttgcccaattatctctagtatctatttttacagtacaaagcactgccgctttgtgaattgtctcgttcgcaaawtggctcaggaggtagttactttaatagccaaaacaatgcaacagtagtgccacacaggtgacacagagtaattgtaaat

SEQ ID NO: 135923 - DNA, 483 bp, Homo sapiens
ctgtaatcccagcactttgggaggccaaggcaagaggatcacttgaggccaggagttcaagacaagcctggataatgtagcaagacttcatctctacaaaacattaaaaaaaaaatagctgggtgtggtggcatgtgcctgtaggcccagctactcaggaggctgaggtggaagaattgcttgagcgcaggagttcaatgagctgcaatgagctgtgattgtgccactgcactacagaatgggtgacagagtgagactctgtctaatatatgtgtgtgtgtgtgtgtgtgtgtgtgtgtgtgtgtgttaacatgactatgacttctataaaaatagagtagataaacaagaatggatatgtatagtgcagttgtagctcaggctagagacaatgagtgtacactagaatagttactayggttatgtagttgctatggttttaaagacgaaaaaataaacctgagaaatgtgtaggtaaaacta

SEQ ID NO: 135924 - DNA, 618 bp, Homo sapiens
ccaagcttagaatgcacatttgttccaataacagaaatatttggggagagatgggctgatgcaaataattgtgtaggtggaaaaaggaaagtgaagtagcatttgttgagtactccctgtgtgccaggcagtgcaaatgttatcctgcacattcacctaacaagacaagtatttttcaaattcttactgtgccaggagtcagatatatgataatggacaggaaagatttagtttatactatcctggaacttacaatcaccttgcaatgggtatctaagttgccctaatttaggatgaataagagctcagagaagtgaaataattagttcaatgtcgtattgtcaggaaatggcaaagataggatccaaacctaggtctgtctctcttcaaagcctgggtatcttatgccatcagcaaattcagttgaaaagtgaatacatgctcaggtatrtaataacaaacatgtgcctatgtctattcatttggtaaattcctagtcccctggatttctttgggttaaaaaatttatatatataaagcatatcatttttcaaatcttggcaggagcttatgtctgggcctgagtcatttcattacatttgactgtcacacataaaa

SEQ ID NO: 135925 - DNA, 612 bp, Homo sapiens
ttttctaatgaaagaaaatattttgaatgatgaaaatagcaagtagagaagtgtatctacagatttcgtatctatactgtggttttcttattttgcaatgtacggtcaaagacaaattagaaaaccgactagatatggtccacagattcctttttctgcaacaacctaaaatctgattatgaagtctttcactgataattacatttgtgtttaaggcaatgtttccctgttgtttgatgatatggtttggctgtgtccccacccaaatctcattttgaattgtagttcccatatttttcttgaggtctgggagggacccagtgggaggtaattgaatcgtggaggcagttacccgtatgctgctrttctcataatagtgagtaagttctcagaagatctgatggttttataaggagattttccctcttttgcttggcacttcttgctgccaccatgtgaggaagaacatgtttgtttcccctttccccatgattgtaaattttctgaggccttcccagccatgctgaactgtgagtcaattaaacctccttcctttataaatttcccagttttgggtacgtctttattagcagtgtgagaatggactaatac

SEQ ID NO: 135926 - DNA, 460 bp, Homo sapiens
tctgcaatattgtcagaaaatctggcttctagaactaactcccctaccgactatgtgggtgacttgtgcaagccatttaacatcccttgctttcagttgtcctattgctcaaatgagaataatagcatctatcatttctgctttgttctgaagagcaaggtatgtatgtggacaaactttaagtatatcaaatattaacaattataaatcattatctctgtgtgatacagagtttgcactagtgagtcactgtgagttatggcttttgacttgtccatatcttttagaatgaaagttaactattagtaaatatctttcatcyggtaaccactcatgactatctctaagtgttcccacactggtccaaatcaaagagtataaaatgatgaggcacatttccaataatcattctgctttagggctagaactttattgtgcaaaatatatttttgtaagtctt

SEQ ID NO: 135927 - DNA, 559 bp, Homo sapiens
gggattaattaacatagaacttaacaaaattgcctaggggagtcaagacagaaccaacatatcacaacatccaamcaattcatcatctgaaaacacagaagtaaaactaggtaagaaaagaagtccaagacaggaaaggggtgtgctaaaagtatggaataccctgagataattgaatcttaaatgcagaaatttttgacaaagtgactgtagcctcaatcacggtcccgtaggatgtcatttgggacatgcatctatcccttaccaagatttttattgatagtgatgggaagtgggaggagaattaaatccacaaaattaaatgtaagctatataccagaagctttgaaagcaaccaaattgaaaagatatgtgattaagaattcaccctgcatctaagacaggcttgctactctggactgccctgcttcctcctcacttcatccaatccacttcactgagaccacagtttctagactttgccctgctggctaaaaagtactttttcagccctggcctgtaacagacagagattgctaagtactaatagtattcattt

SEQ ID NO: 135928 - DNA, 559 bp, Homo sapiens
gggattaattaacatagaacttaacaaaattgcctaggggagtcaagacagaaccaacatatcacaacatccaaacaattcatcatctgaaaacacagaagtaaaactaggtaagaaaagaagtccaagacaggaaaggggtgtgctaaaagtatggaataccctgagataattgaatcttaaatgcagaaatttttgacaaagtgactgtagcctcaatcacggtcccgtaggatgtcatttgggacatgcrtctatcccttaccaagatttttattgatagtgatgggaagtgggaggagaattaaatccacaaaattaaatgtaagctatataccagaagctttgaaagcaaccaaattgaaaagatatgtgattaagaattcaccctgcatctaagacaggcttgctactctggactgccctgcttcctcctcacttcatccaatccacttcactgagaccacagtttctagactttgccctgctggctaaaaagtactttttcagccctggcctgtaacagacagagattgctaagtactaatagtattcattt

SEQ ID NO: 135929 - DNA, 599 bp, Homo sapiens
atgggaagctggaatggaagattatgagaaatacagagctcatgaaccacaggccttccgccccttgtatggacccaagagtttctgtgagaaatagccagagcatgagttccaatttagatataccttccagtgtttctcaaagaggagaccaaaggcactctctttcagcaactcatttgattgttactgaatcagaatatctgcacttagggcctgaagctttaggcttttaaaggatcctttatgcctttaatggctcatgtccctttttaacctagaacatctttttataaatgccrataacctattgaaatgatcagactggttgctttataatatgttacaccttttgaatttgtctaattgtttctttgtggtgtcattgacattgtacccctggatttcctgcaaactggaagtcaagtctctaagcttacttgaattctggttgaacattttgagcaagaacatctcagaagtatgttttatattaatatagcatattccttcctgtaagattcttcccggggcctgaaagcttaaggggatgagtaacttctctcttctcaggcccagccccaaggcgcaaggccact

SEQ ID NO: 135930 - DNA, 502 bp, Homo sapiens
cctaatgcctgtgttccaggtccctcctgagattcgctcctccgaatgcttgatagatggatcaatttaggggattgatggtcagatttagcctgayataacaccatgcagtggtctgttaccagacatagagctggaaaacccaggcccttgcatacaagttcaggaaggtaaatttgcaaatgaaaaacattttaagacacatctcacagctgcttcctcatcccccaccctattgtttgtgtttttagagatgtttaagagaaaaggaggcaataacaaagacgctctgctgtgctttggaatcctcatttatgttgaaaaagggtccatttatcatctccttggatatttccacaaggagactttgctcatctcaccagggaatggagtggtagagcaaacacttctctgtccacctgatgatggaggagaaccaactaactgaaaggcagagagcctgaaattattatcctctctctgcctgcctgctgcaagatat

SEQ ID NO: 135931 - DNA, 502 bp, Homo sapiens
cctaatgcctgtgttccaggtccctcctgagattcgctcctccgaatgcttgatagatggatcaatttaggggattgatggtcagatttagcctgacataacaccatgcrgtggtctgttaccagacatagagctggaaaacccaggcccttgcatacaagttcaggaaggtaaatttgcaaatgaaaaacattttaagacacatctcacagctgcttcctcatcccccaccctattgtttgtgtttttagagatgtttaagagaaaaggaggcaataacaaagacgctctgctgtgctttggaatcctcatttatgttgaaaaagggtccatttatcatctccttggatatttccacaaggagactttgctcatctcaccagggaatggagtggtagagcaaacacttctctgtccacctgatgatggaggagaaccaactaactgaaaggcagagagcctgaaattattatcctctctctgcctgcctgctgcaagatat

SEQ ID NO: 135932 - DNA, 559 bp, Homo sapiens
taccaataccatttcccttccttaatggattaattctattagtgtctctgtatttcccctctgcacctctcttctgagtctcacatcaaccacagctctgccttactggctttctctcttgtactagcctcttaaaaaatgtgaagcttasaggggcactaagataggctcaaacagaccataaacatcgcttacctgaaactgcaagcttcactgaagttatcagaagcattttctttccctactgtagattttattacccagactttttactttttggtgttcaccttgtcatgatagcaaattttcgtgtctgttaccttacccatattttcctctttccaaagctacttccccctataagttatcatcttgcaacaactgggttgtctcacacaatccacttcacgttgaggggccgtagggcattcatggtcaccttctagcactaatgaccacagaaaccaaggctcccagcattactgcatgttcccatcaggccatgcacgagcgaaatggctcatatcctaagctttacatctaaaggaagaggaaatca

SEQ ID NO: 135933 - DNA, 632 bp, Homo sapiens
ttgtgaggaaacactttcagacagtgttgatgatggagcaagttgacaggtgttccacctcaccctttggcaacatatagctacactttaaacatctacagcctttgaccctgcaactccaaccagcaggatttaacctaagaaaataattagatgatgaaacaaagatacggacatgaaattattaataacctctgcctcgtttatattataagaacaaggtggtggtgtgggggagcttggcaaggggagagtgaggggaggctcatacctgtgaaggagtgatgggggagaaggacaaaaagagaaacagaggggtatgaagaggacacrggggtcggggtggagagagagagaggtttgtttgcaagggtgagaaaggaacgggggctggggtcgtggggtggtgggtgagcttaagaggaaagtatggggaagagaaaaggcagagagaagaagggagagatctctccatcaaagcacagtcaaccatggtatatccatatcatgcacaccttaaagggaacggtgcaatcctctatatgaaatagaaagatggttaattggaaagatcaggatacagaacagcaagcatagtgtgatcccatttatctaaagtgatacataaagat

SEQ ID NO: 135934 - DNA, 620 bp, Homo sapiens
aggcactaacaggacactgttaaaagatcattacccctcataggtgaaatggctggactctaaaacagcatttataggatgccttcggggtaggtttatattttaaacagaaatgttctatgattgaaacaatacacacacccttcttaagttctctccaacaatgcttccttgcaattcatattatttagctttgtttgatttttaagatagtttgatagtaggggtaaatgttaccttttgggattttattaatagtattactttttaatgagtcttttgaagtctttcattataaacagcctgctttccccagagataataacttgccatgccaaatatttgcatttcacttgaaacaaaaccaaggggttgaatgttttaaatataagcaaatctaattctcctgtgtctagagaaactgtataatgaaccatatgtatgtggcttaagcagacagatgtgaaagatttctccctctctccttttatttaaaaaacaaaacactggcagagctcaaaattggcaccaagtagcaaayatctctgctcagccaacaaaaccactggagctggagttgatggggggaggcctctttagggtgcatgcaaaagtggagc

SEQ ID NO: 135935 - DNA, 526 bp, Homo sapiens
tcagatctagacaccagatgtatctataatttttttcccttttctccctaaaactggatgtggtaaagtaagtaacataatctctagaccttctagatgtgaaatgtagatatagccaaactaagacagaaaattctagccaagttatttactttaaccaagctttaattccctagtaaacaattttgattstatttttatcagttgggcattaataagctatactgaatcagaactgttttgagaagaggtttgagaactttatatgagggccccaaatcacattcggaactccctcagggtttttagcttttgaaccaaatgaggactgatttggatgatccccagaaggaacttggagaattcccccagtgttgggccatggatggaagggcttagccaagtgcttaggaagccttagctatggatcaataaataggagttgttatagttattgttgtcatcaccattgtcattatcatcatcatcaccattatgattactgtgatgacaatttaggatacct

SEQ ID NO: 135936 - DNA, 367 bp, Homo sapiens
gcaagagcttgagtgtccagagtcttccaactcattggccccttagtcattgctgaccctcagcctactcttaacaccttacactggaatctgatcgtagcaattaggaaatgacaggaagctgaacgaattgagaacatgttgtgtttgcggatgtgatcccasacatcagtgtaaatgcacatttgcatacagctctaatccatgaggaagttctcttctggacacagcttctgtccttagtgtttatctgtttcttggctttgtgagtgtgggagtgtgacatggagcccagctacaattttcctatcttactgggcagctgagaagcagtgcagcacagcattccgtgttagagctactccca

SEQ ID NO: 135937 - DNA, 367 bp, Homo sapiens
gcaagagcttgagtgtccagagtcttccaactcattggccccttagtcattgctgaccctcagcctactcttaacaccttacactggaatctgatcgtagcaattaggaaatgacaggaagctgaacgaattgagaacatgttgtgtttgcggatgtgatcccagacatcagtgtaaatgcacatttgcatacagctctaatccatgaggaagttctcttctggacacagcttctgtccttagtgtttatctgtttcttggctttgtgagtgtgggagtgtgacatggarcccagctacaattttcctatcttactgggcagctgagaagcagtgcagcacagcattccgtgttagagctactccca

SEQ ID NO: 135938 - DNA, 618 bp, Homo sapiens
catccttaatatttttaaatgttgcatatattagaatattctgacttcatacttgaaggtcctgtgacaatgtctaaaattcttggcacactaaactctttcctattgaaaacatttatcttcttttgcaacctgttgtcaaaaagattgctaaagaggaagctttgaaactatctcattttttgtactttattacttgttcagagaatattaaatttttactttaccttgtgaatgtaactaaatgtagatcaattttcactaacattgcttgcaactcactcagtccttttagctcagggaaaatccattctaatataacttctgaccacttatttttcatttaatctaatcacttaaaggagcagatggacagtagaattttcttatatatgaacrcttttctgatttgtttcaatcccaaatctctgagtcacaaggcagacagacacacaggagagatcagggtaaatgtatttctctttaaagactcagagattcaaaatgatgtgttgaatttgggacaggtctatcttagtctagctctatattttcagtcaggtgaagtgtcttcaaaatttttgtcttcagtagtccctcagctttctattctatttt

SEQ ID NO: 135939 - DNA, 618 bp, Homo sapiens
catccttaatatttttaaatgttgcatatattagaatattctgacttcatacttgaaggtcctgtgacaatgtctaaaattcttggcacactaaactctttcctattgaaaacatttatcttcttttgcaacctgttgtcaaaaagattgctaaagaggaagctttgaaactatctcattttttgtactttattacttgttcagagaatattaaatttttactttaccttgtgaatgtaactaaatgtagatcaattttcactaacattgcttgcaactcactcagtccttttagctcagggaaaatccattctaatataacttctgaccacttatttttcatttaatctaatcacttaaaggagcagatggacagtagaattttcttatatatgaacacttttctgatttgtttcaatcccaaatctctgagtcacaaggcagacagacacacaggagagatcagggtaaatgtatttctctttaaagactcagagattcaaaatgatgtgttgaatttgggacaggtcwatcttagtctagctctatattttcagtcaggtgaagtgtcttcaaaatttttgtcttcagtagtccctcagctttctattctatttt

SEQ ID NO: 135940 - DNA, 510 bp, Homo sapiens
gaacacttttctgatttgtttcaatcccaaatctctgagtcacaaggcagacagacacacaggagagatcagggtaaatgtatttctctttaaagactcagagattcaaaatgatgtgttgaatttgggacaggtctatcttagtctagctctatattttcagtcaggtgaagtgtcttcaaaatttttgtcttcagtagtccctcagctttctattctattttattatacatcttcttagggaggttttcactattttgttttttccatttgttttaattttgcartgttgactgaggctgtcttttaaaatgatatttgagtatgttgtccaagtacctttttaaagcaaaacctatgcattttttttccacaaaaggcaaatttgggttaacaggcagaatatggtattcagagaatttgtgacaaagtataggcacaggcaagtggttaaatgtcagggactttccaagagggatatcagaaaatcaccgatagtcaggtcattgg

SEQ ID NO: 135941 - DNA, 572 bp, Homo sapiens
tctcttgggtgattctctgaattggaaattgtgaccttgaggcagtactgatagatcacttcttgtgtgctgtgactccatgactatgttgaattccagagaagagcatctttcctttgctctgggtgattcatttatctcaagggtctttgctactcttccctcatggggacaatttcatgtatgtgacctctctgggcactgaatgcaagtacaaacacatggccaattatatgcttacaatatattcatatagctaagaggatggaagaagccaggtagaacatataaatcaaggagtctattcagccaaataatttcatgatatagcatatatgggtcagagaatatttttgaataaatcacacatcttagaaattattagtaaaacaaatgtttacttgagaattgaacttattttttacattgctattttaacatttgactataatacttacactaatacttaaatcarattttaaggacaaatcaggattatctcattcaataaccagcatcctagaaaatagttcattaagatttttccttattacaagggaggaaactgacca

SEQ ID NO: 135942 - DNA, 572 bp, Homo sapiens
tctcttgggtgattctctgaattggaaattgtgaccttgaggcagtactgatagatcacttcttgtgtgctgtgactccatgactatgttgaattccagagaagagcatctttcctttgctctgggtgattcatttatctcaagggtctttgctactcttccctcatggggacaatttcatgtatgtgacctctctgggcactgaatgcaagtacaaacacatggccaattatatgcttacaatatattcatatagctaagaggatggaagaagccaggtagaacatataaatcaaggagtctattcagccaaataatttcatgatatagcatatatgggtcagagaatatttttgaataaatcacacatcttagaaattattagtaaaacaaatgtttacttgagaattgaacttattttttacattgctattttaacatttgactataatacttacactaatacttaaatcaaattttaaggacaaatcaggattatctcattcaataaccagcatcctagaraatagttcattaagatttttccttattacaagggaggaaactgacca

SEQ ID NO: 135943 - DNA, 666 bp, Homo sapiens
cttgaaactcacactataatgtggaattctacgcgatttaacatcttaygttgtcactaataatactgcatagttgaacgtcttaggcttaatttcctaaattagtggatctctctttaacaaaggaaagattctttcatgagtagtgaagtccctgaaaaaaaaagtttgaaaagttctttttgaagtcttagcagtaaagtcaaagacatgacagggtactgtgcatttagacgtatattttcactagcttttgctgggataagcactctctggaagaaactcttagaatgccaaaggttgaaactgcttccagcttgtttttatacatagtcatggatctcaccatttgtgatctaaagttctgagaatagactctaaagctggtgatcagcagtgaaagagagcttaaatatatcagtttcttatttgtttatgttaaataagcaagagaagaaagtttaaagatatcagtaatatagcaattgagactccatttaatttgttccacatagagtcagcatttttgcttaatttaaatgttttgaatctatttaatttttaaattagatttatctttataaatattgtttttaaattattgtgagagcacagaagaggaaaatcgtgtgacagacagatgtttaggcaaaaccaaacaaaaac

SEQ ID NO: 135944 - DNA, 666 bp, Homo sapiens
cttgaaactcacactataatgtggaattctacgcgatttaacatcttatgttgtcactaataatactgcatagttgaacgtcttaggcttaatttcctaaattagtggatctctctttaacaaaggaaagattctttcatgagtagtgaagtccctgaaaaaaaaagtttgaaaagttctttttgaagtcttagcagtaaagtcaaagacatgacagggtactgtgcatttagacgtatattttcactagcttttgctgggataagcactctctggaagaaactctyagaatgccaaaggttgaaactgcttccagcttgtttttatacatagtcatggatctcaccatttgtgatctaaagttctgagaatagactctaaagctggtgatcagcagtgaaagagagcttaaatatatcagtttcttatttgtttatgttaaataagcaagagaagaaagtttaaagatatcagtaatatagcaattgagactccatttaatttgttccacatagagtcagcatttttgcttaatttaaatgttttgaatctatttaatttttaaattagatttatctttataaatattgtttttaaattattgtgagagcacagaagaggaaaatcgtgtgacagacagatgtttaggcaaaaccaaacaaaaac

SEQ ID NO: 135945 - DNA, 569 bp, Homo sapiens
agcactacagctaaaagagtggctgcaagtagaaatgaaaaatcaaaaaaacatatttaggaagaaaaaagcaacatgatggaatgattgataaaataccagaacagaaagagagtagggtacaggaatatgtagaggtaggagtaagagaaaggtagtggaaagactgtagccttaatctcaggtttttagtgagatggataagatattagccaggtggaaggacaattatatatgtgtttttgaaatttaaagaaacagtctaggccagatggagtgatgtgagagtgtgtagtcttgaccttgtgtgagaattcagccagacaaaatgcattgagtgatagaggaagaatttaataatkaaataatgtagaataccaagtgagaatcttttttgaagagataaaatatactggtacactttcaaggaatcagtacatttagctaacatcttctgagaaatgataatacagagcttttgttttctactctaatttcttcaaaatatatcgctggagactacattctgtagttcctaaaggagagctcgagcagacctgtaactctgc

SEQ ID NO: 135946 - DNA, 594 bp, Homo sapiens
tgcaactaaatatttgctttggactttttataaagttaatccagtcttttccatttgatgtgaacaaggatgctgggtatcacaatttctgctaacagacatctcatgtttatgaggagaactgaccttatgatgactgtaatcttcagtggcagagaaagggcacagaaataaacttagcccttcataacatcttttagaagccaaatcaaacattccaggagactggcctaaatctggactacctactrtgtgggttcatacattttatttttaaatgctatttaagatgtagtttccatttttcatatgtaaaataattaaatgagatgcagaataggtacctggaaatattctttagatatattttaaaacataaaggacaaaagtttaaaaattttggaagaaagaggtttaattattaaagattggatcaaaattatgtttatatatgttaattatatttacatgtaatcattattatttaatcactttatctgtaaattttgagctcctcccaaactgaaaattccaaaggagctacgagaattattagatctgtggacttcaaagcatctgagtataaaatgaaag

SEQ ID NO: 135947 - DNA, 640 bp, Homo sapiens
aggaccttcactgaaaatttttggaaaggaacgatcatcatgcaatttttacacaaaaacttgttttgttgagaactaatctaaaatctgttaaagatcacatatcacttttaaaaaatttgactatgagcccagaaattcttgggatcataaatttacataaagaacattttaaccatataaagatctgatgttttatattatctaaaaagaaaccattatgcaactaaatttaaatacataccccttgaggctgggcatggtggctcacacctgttatcccagcactttgggaagctgaggtgggtggttcacttgaggccaggagtctcagaccagcctggccaacatggcaaacacctgtctctactaaaaatacaaaaattagccgggcatggtggtgtgtgcctgtagtcccagctactcaggaggctgaggcatgagaatcacttgaacctgrgaggcggaagttacagtgagctgagatcacatcactgtactccagcctgggtgacagagagagggacgctctgtctccagccagccccccccacccccctcaatgaaaaccaagatctaaaatccataacataaacaaatgtaaacaatgtggttattagtatctccagctgatgatggc

SEQ ID NO: 135948 - DNA, 640 bp, Homo sapiens
aggaccttcactgaaaatttttggaaaggaacgatcatcatgcaatttttacacaaaaacttgttttgttgagaactaatctaaaatctgttaaagatcacatatcacttttaaaaaatttgactatgagcccagaaattcttgggatcataaatttacataaagaacattttaaccatataaagatctgatgttttatattatctaaaaagaaaccattatgcaactaaatttaaatacataccccttgaggctgggcatggtggctcacacctgttatcccagcactttgggaagctgaggtgggtggttcacttgaggccaggagtctcagaccagcctggccaacatggcaaacacctgtctctactaaaaatacaaaaattagccgggcatggtggtgtgtgcctgtagtcccagctactcaggaggctgaggcatgagaatcacttgaacctgggaggcggaagttacagtgagctgagatcacatcactgtactccagcctgggtgacagagagagggacgctctgtctccagccagcccccccsacccccctcaatgaaaaccaagatctaaaatccataacataaacaaatgtaaacaatgtggttattagtatctccagctgatgatggc

SEQ ID NO: 135949 - DNA, 565 bp, Homo sapiens
aaagaaaggagagagagatggctgcatggtgtgcacttagccatatgtgcgtcctttccccgtaaagtatctgtttttctaagtgcttttttttcttttaatctgtctacctcattgagtcagcggggctgctagtcccattatcactccactttgaggactggraagggctgataaatgtattttggtcgtgatttaccacaaatcacttttgttgctctgaggtgtaggtcactgttgcaagtataggtcagcaagaggagagcacgtgggacaagtgaattaaataaataaactaccgtttggatgatcacactgacaaatatttttaaacaaatataatagacagtctttgttagcgtgtggaatatattaatcgtttccatgagtgctgttgggagtgtgtctttcatatgaagcatcagcaattccattttataatggcaaaaagttggtaacacctttatcttcaacaatagccggttaatagaaattgaattatgctttattaaaatgagaaaatactaagacacttaaatggtgatgtaaaataatatttaattac

SEQ ID NO: 135950 - DNA, 383 bp, Homo sapiens
aagcttcttgatgtgcttctggattcaatttgccagtattttattgagaatttttgcatcaatgttcatcaaggatatcggcctgaagttcttttttgttgttgtatctctgccaggttttagaatttttatgttgattctattacatcttctggataaagaatcatgtttattttcacaaaatgataatcatataactccttttcaataattttatgtccattctggcctcccatcagarctctacaattggataaccagcttgtcacttgaatctctacttaagggcttaataaatgtattaatcttaaaccacattttctcatccctaagcatttcctttctcattaaatgataccactatccatcaaatttcttagcca

SEQ ID NO: 135951 - DNA, 525 bp, Homo sapiens
aaacatcacattaaaagttattaatttacacacaatatgaatgaatctcagaaacaaaatgttgaataaaagaagccagacacaaaaaagtacatacagtatgattttactcacataaagttcaaaaacaggcaaaactagtgtgtgttctaaaacaatagggtagtgattacccttgggatagtacttgaaagtggggcaaagtaggggcttccgctacgtgagtaacattctctttcttgctctagctaaaggttacctgacacatttataytgtggaaattgatcccactgcacgttgatagtttgtatactttgtttgaatatcattcttcaattgaaaaagtaaaagaagaattaacttgtaaagtaaaataacagttactttagaaaacacaaaaccactataaaaattatttttcaacataattcagaattattaatgataatgataattatttatggaacacatctgtgttagacatggttctaagtgtttgaattacgttactttccttagtgatt

SEQ ID NO: 135952 - DNA, 577 bp, Homo sapiens
acttctgcttctccagttgaagaattttgttaaagtgtgtccctgactgacagacaaaataaaccccctaaaagttaaaacagaaccaggtggccacagcttgstgagggagtggtgacatactctggattcttagaaccgtgttgtaaaagtaccacaggacttcctgtattagcttgccacatggaacatataatcctggcattcattttttaagaaggaaggggaagagaaggagcaaaagagaggaagagagaaaaggaagaaaagaagaataacagaatgaaacaaagtgcacaaaataaaaaatttattaaggtgattggacctggtgaatattctaaaacattcaagcttgttcagaagccagatacaatcaagccaaaccaattcctgttgataccaagataaactgtggctggaacacccccctccttcctccctcaacacacatacactggggcatttgaaagaaacatctcacagagacttctggtttggggctcacaaaccaaccaatcacaggtcactgccaatcagagctcagctatattgaccaatcagaactaagtgagtt

SEQ ID NO: 135953 - DNA, 432 bp, Homo sapiens
tatatgccaacagtgaacaatgtaaaaaggaaataaaaaagtaatttcaattttacagaacccacaaaataaaattaaataccctaggaatttaggttaagcaaaaaagtgaaggatctctacaatgaaacccgtgaaaggctgatgaaaaaaatttgaaaaagttcaccaaaaattggaaagatattctatatttatggatcagaagaatcaatactgttaaaatatccatactacccaaagcaatctacagatccaatgcaatttctatgaaaataccaataacattcttcacaagagaaatagaaaaaacaatcctaagactaatatggaatcacaaaagacccagaatggccaaagcaaaaagaacatgackgaaggaatcacattacctgacctcaaattatactacagagatatagtaaccccaaa

SEQ ID NO: 135954 - DNA, 473 bp, Homo sapiens
ccacagatgagtccattattatgcccatttgacagatgagggcattaaggcacagagagattgagtccttgtccaagttcttgcagctggtaagatgcagctttctaatttgaacccaggtgatgtgactctgaagtttagcccattgaccacttctctgcactggacttgaaatgttgccttcattatattttctcacctctgccacttggtgtcacttcctttgacctcagtagttcgagttctcacacttctccagaatttagtgctgccttgagcgctgtaagttcagatgatgggctgatggtgtcttgatgaggtccagatgtggtccctgagccactggacatcaggcaggaacatctcatggtcacgtatttgtacatggttatggctaccaggaaggccagwagggaagacaggaggggagtgaggtcctgcttcctgagaatgtaagacaaatagtgacatac

SEQ ID NO: 135955 - DNA, 413 bp, Homo sapiens
cattcagggtttcgatttcttccttttgcartctttcagggggcggtgtatgtttccaggtatttatccatgtcttccaagttttctactttttgtgcatagagtgtttgtaatagtatctgaaggatttttaccattcctgtgcaactggtggtaatgtcccctctgtcatttctaagtgtgtttatttgtttcttttctcttcttttggtctagctagcagtatatccatcttatttattctttcaaataactgacttttggttttgttgatcttttgtatgatttctcatgtctcaattttgttttgtctagctctgattttggctcttttcttctgttagttttgaggttgttttacccttgtttttctagttcctctaggtgtgatattaggttgttaatttgagatc

SEQ ID NO: 135956 - DNA, 391 bp, Homo sapiens
gatttcttccttttgcaatctttsagggggcggtgtatgtttccaggtatttatccatgtcttccaagttttctactttttgtgcatagagtgtttgtaatagtatctgaaggatttttaccattcctgtgcaactggtggtaatgtcccctctgtcatttctaagtgtgtttatttgtttcttttctcttcttttggtctagctagcagtatatccatcttatttattctttcaaataactgacttttggttttgttgatcttttgtatgatttctcatgtctcaattttgttttgtctagctctgattttggctcttttcttctgttagttttgaggttgttttacccttgtttttctagttcctctaggtgtgatattaggttgttaa

SEQ ID NO: 135957 - DNA, 576 bp, Homo sapiens
ctcacaagtgagaacatattgtattaggtttttcattcctgagttacttcacttagagcaatggcccccagctccatccaggttgctgcaaaagacattattgtgttccttttcatggctgagtagttttctatggtgcatatatactatattttccttatctactcactggttgatgggctcttagattggttccatatctttgcaactgtgagttgtgctgctataaacatatgtgtgtatgtgtctttctcatataaagatttcttttcctttgggtagataaccagcagtgggactgatggattgaatggcggatctacttttagttgcctgagctatctccatactgttttctctagaggctgtactaatctacatgccagtcawcagcagtgcataagccataagcattcccctttcaccacacccatgccaacatatattggttttcgacgttttaataatggccattcctgaaggagtaaggtggtatttcattgtggtactaatttgcattttcctgatgcttagtgatgtaaagcatcacttcatgtttgttggccgtttgtagat

SEQ ID NO: 135958 - DNA, 576 bp, Homo sapiens
ctcacaagtgagaacatattgtattaggtttttcattcctgagttacttcacttagagcaatggcccccagctccatccaggttgctgcaaaagacattattgtgttccttttcatggctgagtagttttctatggtgcatatatactatattttccttatctactcactggttgatgggctcttagattggttccatatctttgcaactgtgagttgtgctgctataaacatatgtgtgtatgtgtctttctcatataaagatttcttttcctttgggtagataaccagcagtgggactgatggattgaatggcggatctacttttagttgcctgagctatctccatactgttttctctagaggctgtactaatctacatgccagtcatcagcagtgcataagccataagcattcccctttcaccacacccatgccaacatatattggttttcgacgttttaataatggccrttcctgaaggagtaaggtggtatttcattgtggtactaatttgcattttcctgatgcttagtgatgtaaagcatcacttcatgtttgttggccgtttgtagat

SEQ ID NO: 135959 - DNA, 574 bp, Homo sapiens
tttgctcatgtttacctggcagcttctgccccaacctgaggttaggacccagtctaggtctccttccacactgcctctcagacaactaactgttcaaggaacataccaggctgtattgagaaaagagatgaactaactggatttgttcttccagctatttcttatactgtggraacgcataggtattggggaatcttcccatgcccctctgccagggcacagagctcagcagtcagaaattgaccaattgtgttgttggagagggagagtccctgggggtgagggtaactctcccagcagaaggcttttcctgtgctggacctctcaggacgctctttatggatgggttatgtcttttatttgcatcacatttggaactcaatttttagccactctgagtatagatggctggcctgcctctgcattttgatgacactgtatgttttgacatcctgggtgacatgtccacgtaaatacattaagacaggaacagcaaaggtcgtaactttccttattactgaagataaaatgtaatgagctagatcacaggctgctttaagaatggctgtgccag

SEQ ID NO: 135960 - DNA, 572 bp, Homo sapiens
aataaaagacctccttaaattctctgttatcctcaacctcatgactatttacgggccctttactacacatggctacaagggggccattgaagagccttttgacaattgaagatccatcagatacatggatgaaaacactttgaaatttcaaagtaacagaatttctctatgacctcatgcatcagtttgcacactattgatttttgaaaagcttttgaggaaccaacacatctacttttccaagtgaagcatatgtgtcattattatcagcaaggaaatatcaaaaaatccaagggagtgtgtgtgtgggggtaatgttttctgaatgaaagcatcartgacatttattggaactgtgggaaagtcactgcagacgagggcagctgtatttctgagtgctgccttttgagatgtttataagggaaagagcactaaataaatggtgcaagcagtgtcagtttattggaatttcctttgtttccaagaggttaaagattttaaaagggaattctaatatcagtttttcagaccacaattgaaaatacttacataatgactccagatttttaaaa

SEQ ID NO: 135961 - DNA, 577 bp, Homo sapiens
cgctttattttttcttcctagcacttaacactgttttaaaatatataatatatttggctgttgcttaattttaggtctcctccaatcaaaagaaagctccttgagaagttgttctgtcctgttaactgttatatctccagtgactaaaagctgtctgggaaatagtaatcactcattgaatatctgtcagataggaaagaaggaagagaacattttataggagatattggtaagaaaaatatatatgtaattgtaaaggttaagaagttattacaatagttttgtgaaggattctagataagggcagaaaaactggaaagaagggagactatgagatattttagaggtagaatccatgaaatttagtggttgactgaacgccacaatcctgcagcaaagayatatcaaatataattatgagaggtcaagttaaggaatctgcaaaggtaattgtgacattcagacatgaactcacgtcagcaatgtacctgaacaccaactctatgccatatagtgtgctaagtctatataagcagttgacaacttttagacaggaatcatgtctgatttattattt

SEQ ID NO: 135962 - DNA, 577 bp, Homo sapiens
cgctttattttttcttcctagcacttaacactgttttaaaatatataatatatttggctgttgcttaattttaggtctcctccaatcaaaagaaagctccttgagaagttgttctgtcctgttaactgttatatctccagtgactaaaagctgtctgggaaatagtaatcactcattgaatatctgtcagataggaaagaaggaagagaacattttataggagatattggtaagaaaaatatatatgtaattgtaaaggttaagaagttattacaatagttttgtgaaggattctagataagggcagaaaaactggaaagaagggagactatgagatattttagaggtagaatccatgaaatttagtggttgactgaacgccacaatcctgcagcaaagatatatcaaatrtaattatgagaggtcaagttaaggaatctgcaaaggtaattgtgacattcagacatgaactcacgtcagcaatgtacctgaacaccaactctatgccatatagtgtgctaagtctatataagcagttgacaacttttagacaggaatcatgtctgatttattattt

SEQ ID NO: 135963 - DNA, 577 bp, Homo sapiens
cgctttattttttcttcctagcacttaacactgttttaaaatatataatatatttggctgttgcttaattttaggtctcctccaatcaaaagaaagctccttgagaagttgttctgtcctgttaactgttatatctccagtgactaaaagctgtctgggaaatagtaatcactcattgaatatctgtcagataggaaagaaggaagagaacattttataggagatattggtaagaaaaatatatatgtaattgtaaaggttaagaagttattacaatagttttgtgaaggattctagataagggcagaaaaactggaaagaagggagactatgagatattttagaggtagaatccatgaaatttagtggttgactgaacgccacaatcctgcagcaaagatatatcaaatataattatgagaggtcaagttaaggaatctgcaaaggtaattgtgacattcagacatgaactcacgtcagcaatgtacctgaacaccaactstatgccatatagtgtgctaagtctatataagcagttgacaacttttagacaggaatcatgtctgatttattattt

SEQ ID NO: 135964 - DNA, 588 bp, Homo sapiens
cagctttatttatttatttatttatttttatttttgagatggagtctcgctctgttgcccaggctggagtgcagtggcacgatcttggttcactgcaacctccacctcctgggttcaagcaattctcctgcctcagcctcccgagtagctgggattacaggcatacgccaccacacctggctaatttttttgtatttttaktagagatggggtttcaccatattggccaggctgatcttgaactcttgaccttgtgatctgcctgtctcggcctcccaaagtgctgggattacaggggtgagctaccgtgcccagcagcagctttatttttaacatcaaggaactggaaacatcccagtacctgatggcccagtactagactcctttttctttcaccattaacttattcagtcattaactacattccagccacactggatttctctctaattcttaaacctgccattactttttccctcagagtgtttgcccaattattcagaagagtcttaccctagaccttcatttggcttgtcgttaccatttccaatctttcctcacaagttctagtcctttagatctcccaac

SEQ ID NO: 135965 - DNA, 453 bp, Homo sapiens
agtaaaacttaaatgaaaagtgtctaatgtacttgttttcagggcagcaaggaagtggggaggtggagagaccctatcttccctgttacatacccagawttagccaaaggccagcaagcaatagagaagatgtcaccatctagggccaggcagtgtcaccatcttctctaatgaaggaggattgtaaaggaggctacagccctaaggcctgtacagcagggaagaaaggaatataaagagaaccaacgtagaatcaagaatggaccctgagaacttaacggccagaaagccctgtgtttttcaataacatgaaagcagaaagtgcaagtgaagcaagagaaatgcaaggtaaacaaggcatgactaacacttcttgattcctgcaatctcactgtgtactatttttaccaaaattattttttgtaaagatagccaagaatcccctttaaaaag

SEQ ID NO: 135966 - DNA, 618 bp, Homo sapiens
aaattgcaattgccaagtttaggtccatcaaattcatgccgacattttgttgcaatgcttaatactacttatttaaatcaggagggggggaaatatcctaaatttgatggtatatgaagagaataaacataagtggggatcatcttgggcaaactgggtcataatgaaacacttacagcagtttaaattcacaatggaaataaattcaattcaaatctacaaacatctgttgagaacctactaagccccagaacttttgctatgagctgaaaggaaaatacaaataggaatgaagtcaacttcctcctcttatctctaggttcctcaggagaatggcatgacattttcttgaaaattaacgaagtgatcctcttacatcaaagaaaaaaactcttgtgtttcttgccaatgataaaacttgagctttcaagtaaaaatatgaatttggaaaakttgtgtctgccactgtgagcttgacaatttcttaatatttaaaagcttttctgatgaaattgatggtaatattaacaaaatgtaataatgaaacatgtcaacatttggaggacttgaataacccagaaaatcaatgtttttaaatttaacttttaagttcagggg

SEQ ID NO: 135967 - DNA, 276 bp, Homo sapiens
ttcttagttctttttgccctagtctcacaagcttccattccatcctctacattgctrccaaaaccaatagtacaaaagcaacagatcatgctgttttcctgttttgaaaccttttgatgcctccctccaggataaatcactaacacctcaatggtacttaaactgccattcattatctggcccttgattacatcttcatactgttgcttggtggggcccctcctcagccatgacaaacatgttccttgctcctgccatatcaaaaagcttgcagtt

SEQ ID NO: 135968 - DNA, 276 bp, Homo sapiens
ttcttagttctttttgccctagtctcacaagcttccattccatcctctacattgctgccaaaaccaatagtacaaaagcaacagatcatgctgttttcctgtttkgaaaccttttgatgcctccctccaggataaatcactaacacctcaatggtacttaaactgccattcattatctggcccttgattacatcttcatactgttgcttggtggggcccctcctcagccatgacaaacatgttccttgctcctgccatatcaaaaagcttgcagtt

SEQ ID NO: 135969 - DNA, 513 bp, Homo sapiens
gacagaattaaactgacccgctgattttaataattgaatacaactacttcaggaaccctrttaggattagattttaataagtctaaaggtaatgaatgttgttctggaaaagctgcagagctcaagatatctaggcctctgtccttacagaccagtcttgaaggacaagggggaaacaatgacaaagatcacaagctctgcagacctggggcttgtactaaggtggacagcctgagacataggtgacgataataaactatgactagaaaaacatgccactggagtgggatttggaggtagaaaaaaaaaatgacaaggtgttacttccaagtcagctgggcttttgaggccaacagtcatctggtttaaaactggcatattactggctggtgagcctaggtagcaaatcacatctgaagggcttcacatgtcagtcagtccaggtaataaaattatattttcttgggttctcttatgttagggatatgtgccatcctcatgtctccctaaaac

SEQ ID NO: 135970 - DNA, 504 bp, Homo sapiens
gcttttctcacaatgttttcctgcgaccctgacacaaagacctcacacaaactatggaaaatgagtgtagagcttgaatgttattacaggaacacaccaatgagtttttttgctgcacacacacacacacacacacacacacacacacaaacaataaatgaaagaaggctcaagatgagcattttgaattctagctatttgaattctgttttatacataattcactgacctttctcacaatactgtaactgaaactataacaccagagctggaatgttcttgaaaaagtttagtctctacagacttcttgccattcattgacatgccatgatcttgcaagccttctgtgtcattgctccaggtactccctaggtctggaagttctcrgtccaattcagacatcagggtctagtttgaatgttaacacttctctttattgctccctgatgatactatgcagaattaattttttcatgatttgtatttcataatacattatattaa

SEQ ID NO: 135971 - DNA, 403 bp, Homo sapiens
atttttaattgacaaataatagttgcatgtattatggggtacaacgtgatgtagtgatacatgtatacattgtggaatgatcaaatcaggctaattagcatatccatcacctcaaatatttatcatttctttgtgacgagaacatttaaactccttttttttwtagctattttgaaatatacaatacgttattatcaactatagtaccctgctgtgcagtagaacatcagaattttttggccttaactttctatagcagtggttgtgaatcttgaccacacatcagaattccctttggaatgtttataaatcctgatgtccagggtgaaccccagaccaataatgaaatcaaggttgggtacaaactatggtatttattttaaataatctttccttttgggac

SEQ ID NO: 135972 - DNA, 614 bp, Homo sapiens
tgccttaataatgatcttttgaaaaccacaaatgtattgctgggtattttaggaaggatgatttagggggagtgtaggactggattctgacatagcctaacaaccttactgaatcctgaaaatagagatgccattagcagagaatctccacagcaccctttcctagcaatctgcttcagctcttcagtgaatcgccgcaaagaggtcccacattgaaatcgtcacatgcagaactcagaagaaacccactacccactctattcttgaggcctggctgccaaagagccaccagagaacaacagcactcagccactctgtccccatatttcaattagtaggcaagcgattctaaaactgtacactatcaggatcgtagaatacttgggcaagacagagcttcgtagactgcacagtccaatttctttcttacttctttaccacctaagttaaaatatttgtctctctctccctacacacacacacacacacacacasagagagagagagagagagagagagagagagagagaaaccgatgagacaggaagggtgagagatttttctaaagccacgctgcaagttaaatcaaagctggaattaaaacccaaatctca

SEQ ID NO: 135973 - DNA, 441 bp, Homo sapiens
gaattcaggcagaagagagagcccccaaaagttcctatgtcaggaagtaggtgtctggcatgtttcaggagtagaaggatgccacagagtctggagcagaggaaatgaggggaaggttgtrggagaggagggcctagaggttagggggtaggcagatagtataggatccttaggctattttaaagtttggtttttaatttgaatgaaaaaggagtccttacaggttttgaactgaggaatgacatgatttgactcactttccaattttttttactgatatgggaggcaggtgttcagaacaatatttatttttacagtcgcagtgagatttcaggcctcagaaatgtattctgtaatcgtttgctttcacacaggttttcttggtcatggccaagatttgagaacagcaagtgttttggagcctcctgcactataaaagca

SEQ ID NO: 135974 - DNA, 581 bp, Homo sapiens
gccagaatacaccatctcttactgcagggtccctcatggcttcctttggctaggggagggagttccctgaccccttttacttcctgggtgaggcaacgccccaccctgcttctgctcgccctctgtgggttgcacccactgtctaaccagtctcaatgagatgaactgagtacctcagttggaartgcagaaattacctgccttctgcattggtcttgctgggagctgcagagcagagctgttcctatttggccatcttgcctgggaatcccccttttgaattttgaaggatattttattgcacatagaaatctaagttgagtaattttctttcagacttttaaagattatatttctttgtacagtggtttccattattttattactgcaagtcgtttgcctttattttcttgctacttttaataagttatttttatctttgattttcagcagatttcctaagatgatcctaggcaaggttttctttgtatttattctgctaggcaattatagaggttttaaatctctggcatggtattttatcagcattgaaaaattctttgttattttatcttcaaata

SEQ ID NO: 135975 - DNA, 558 bp, Homo sapiens
gggaggaaggaaggaagaaagggagagagggagggagggaaggagaaaaggaaagaattcagcttcctcttttttctttcccagtgagggcacatgacatctgccttgctttggcycaaaaacaagacaaagaatctgtgaccattttccattatttttacacctacattataacaaatatatttgaaataattcttatccctgaattgctttacctcttataccccaactttaatcagagattaattaaaataggctccattaagaaatataattcatatgcttctcagtgtacatacattgggattatcaatgaaatattgaacttcttgttacataagtacacagagatatgtttatttgtgtacagatatgtataattatgtgtgtagagtatgtgcatgtaaaaaataccaaatgatcagtatttcttatttctatatctagattattaaaacttacctgtattatcatccttctcatataaatatgtagaataaagtattcatctacatttattagacattcttaatagaaactacatgtgtgtgtatatat

SEQ ID NO: 135976 - DNA, 558 bp, Homo sapiens
gggaggaaggaaggaagaaagggagagagggagggagggaaggagaaaaggaaagaattcagcttcctcttttttctttcccagtgagggcacatgacatctgccttgctttggcccaaaaacaagacaaagaatctgtgaccattttccattatttttacacctacattataacaaatatatttgaaataattcttatccctgaattgctttacctcttataccccaactttaatcagagattaattaaaataggctccattaagaaatataattcatatgcttctcagtgtacatacattgggattatcaatgaaatattgaacttcttgttacataagtacacagagatatgtttatttgtgtacagatatgtrtaattatgtgtgtagagtatgtgcatgtaaaaaataccaaatgatcagtatttcttatttctatatctagattattaaaacttacctgtattatcatccttctcatataaatatgtagaataaagtattcatctacatttattagacattcttaatagaaactacatgtgtgtgtatatat

SEQ ID NO: 135977 - DNA, 465 bp, Homo sapiens
aaccatagtgttgctgcctttatgtattgtagatatggagagtatgtgtcagattttcatctcaagagtaagtaatgctgctaaaataaattggaaaaacaatgccttggctcatagcatcagaaattctgtgctatcataatattagctgaattagattttgttataatgatttttacaattatcattgtttgtgttctgacccaccttaaagtccttaaataaatttcacattttagctcttagttctacaggccagaagtgtcactgcacttgcctgggttcattgcttagtttcttacagrcccatctctacaggttgttcaggctgaattgtcattggagaaaatctgccaccatgttctttcttgttgttaggagaattcgtgggtttttttgtttggttaattttttttttcaattcaaggactgaagtctccatttaattaatagttcccggtcagg

SEQ ID NO: 135978 - DNA, 346 bp, Homo sapiens
tcattattgtttcttctggacagctgcatttgtggtaccaggaatgtttgcaaatttaactcagtaagagaataaaccaagtctatcacctacatgatagagttacaaacacttgaagttggctaacatatgtttgtgcataatcaaaacatatcacattatgtatttcttatgtaacacatttgctagatttttcaccttagttgctcatctctgaccaagtgctcacttactattgttgctttcagatatagaaccagcattattaaaactcaggctcytgagcagtgtagcctggaatctgaatggacactaccttttgatcttagcaaattacataaaattt

SEQ ID NO: 135979 - DNA, 597 bp, Homo sapiens
gctgcttgtttttttcaactagtagtttgggaaatttttcaatttattcagatttaaaaattgggcttaaagtgacttagaatcttcctattataatttgttattcatttgataatttattgtttaaggtggtgacactgttttattatattaattatcataggaactaattttactactacaatatagaaaccagccaaaaaattactgatttaatgataagtaaaatatttagtttcattactgaggcactaagccttttactgctgagctcaaatcttagctattaagacatagaaaatagatgatatagaattttcccttcttatattatatagactagaatgtggagtccacaaaattgatttgtcatcaactttatttattttacattagtcaaccaacatattttaattaatttttaaattttactktgtaaatacttagttttatagcattaacatcaattaatttttatttattttttaaattttacactctaaataataattttgcagcattcatgtagaaattctacaatgtgtgctattgtaattgatatagttgttaactcacacaacttctatttattaaaaa

SEQ ID NO: 135980 - DNA, 683 bp, Homo sapiens
tggctttataaaccaccgtaaaggctttgatgtttactctgagtgagagcaaaggcaataaaggttattgcgacatgatcagatataagttttaacggctcattctgccggttctattgagcatagagcatgggcaggcaaaggagtggcagggtatcaaaattattgcartaatttagatgaggtaggatgatggcttggagccttggaccagggccataatgtgatggtggtgagaaattgtccaagtttgaatttcttttaaggaagaattgataggagtggctaatggattgatcgtagctcagagaaataaaaagcctgccttcaaatttttggtctgagcaactatgatgtgtaagtgagcattactagaaatggaaaaagcgtggaaagtattgggtattagatgatgaccaggagcttggctgtggacatttattaaagtggagatgccaagtaagcagtcctatataccagcctaaatattcctgaggaggtgtgatgtaacaatgcaaatagttgagttatcaccatgacatttaaggatgtttaaaacaatgagtatgcagggcatggttctcaaatacaattttgccagtacaacatattaatccattacatttaaataaacaaatatgtactgttcacccactctatttaagactgtgctaggctcaaag

SEQ ID NO: 135981 - DNA, 644 bp, Homo sapiens
caatgcttgtttccttgacaaaaaaaaaaaaactatttttgctgaatgaggtgtttgctttaaagtagaaaacctctttctgagctatgataatgggttctttataaattcttgctaaaataactaactttaacaaatgaccctttcaagtttcaaacttgacaattttaattggattataaactaaaacgataaaaagagatcaaatataggttcaaagtccatctattaaacttactacctaaatggtaataggaaagattgcctttgccacttctctgtgcctcagcttcttcactgtaaactggggttgctcatattagcattggccgtgaaaaattctggtgaggggaaaatacaacaatgtgtataaagttactggcacatactaggtgctccataaatgttgctttttttcttttctccctgtctctttttctcaagtttaggatgcacgccytccacgttgtagttggcaagagactctttcgagattttcattcttaaaacaacagtgttggggttcttcagaacaatcaagccaattaatcatgagccacctgtaccaatataaagattatctagaacctgtggctattttactttattcttctatcaaatatttctccgttacctaccaagta

SEQ ID NO: 135982 - DNA, 644 bp, Homo sapiens
caatgcttgtttccttgacaaaaaaaaaaaaactatttttgctgaatgaggtgtttgctttaaagtagaaaacctctttctgagctatgataatgggttctttataaattcttgctaaaataactaactttaacaaatgaccctttcaagtttcaaacttgacaattttaattggattataaactaaaacgataaaaagagatcaaatataggttcaaagtccatctattaaacttactacctaaatggtaataggaaagattgcctttgccacttctctgtgcctcagcttcttcactgtaaactggggttgctcatattagcattggccgtgaaaaattctggtgaggggaaaatacaacaatgtgtataaagttactggcacatactaggtgctccataaatgttgctttttttcttttctccctgtctctttttctcaagtttaggatgcacgccttccacgttgtagttggcaagagactctttcgagattttcattcttaaaacaacagtgttggggttcttcagaacaatcaagccaattaatcatgagccamctgtaccaatataaagattatctagaacctgtggctattttactttattcttctatcaaatatttctccgttacctaccaagta

SEQ ID NO: 135983 - DNA, 416 bp, Homo sapiens
acctgtggctattttactttattcttctatcaaatatttctycgttacctaccaagtaccagtattgcatggaaaacctgattctgagggtggataaatactggcatttttctgccctatttcagcttatacttgagttaataagttagatgatttttaaaaaacgtataataaatgttttggtataggaaagtgtatcagggtctttctgaaatcctgtctcctgtgctgttacctggaaactcattctaggcagtaagctggaacaattgcaaggctgattttaaatgttatccttatccccagaatcacagaaatttactgcctctcatctaatgtctgaaaccttttgttctatatgttttactttatttgctacatgattacagtgtggggaaaattgctatagaaatcac

SEQ ID NO: 135984 - DNA, 605 bp, Homo sapiens
ttcaccttgttaggaataaatcattaattttgaggcatttttattttatgaatttatatacaaggtaagacacataattacaatagaatacacaagtgttgccttggttttcatacattttctaaattatagatgtaaaatatatattaaaaaaataaacgtggccaattggagacattactctgaaaaagtaatgaaaagcaattttaattaactgacacattgtactattttagtggttaaatattcctttattaacttttaaaaaatctatttacttaataaactgttctgatacatagctattagctaaataggcagagctatgattagtttcaatataactgggactgttattttaggttcaaattgaaggggactgtcagatacccagagatttagtcaataccasgagaaaggagtgggtggagaagggaagaaagtggtaatatccacaaggtatgactaagtcccctaaggcaacacgctgaagacatttcaactctcattccaactatgatgcacaagttgcttattatctttctacagtgtcttttccgccttcaatttgtattcattgttgatttaaaattcatgtcacatgg

SEQ ID NO: 135985 - DNA, 413 bp, Homo sapiens
tctaaattatagatgtaaaatatatattaaaaaaataaacgtggccaattggagacattactctgaaaaagtaatgaaaagcaattttaattaactgacacattgtactattttagtggttaaatattcctttattaacttttaaaaaatctatttacttaataaactgttctgatacatagctattagctaaataggcagagctatgattagtttcaatataactgggactgttattttaggttcaaattgaaggggactgtcagatacccagagatttagtcaataccacgagaaaggagtgggtggagaagggaagaaagtggtaatatccacaaggtatgactaagtcccctaaggcaacaygctgaagacatttcaactctcattccaactatgatgcacaagttgct

SEQ ID NO: 135986 - DNA, 545 bp, Homo sapiens
tatgtctattctttcatatggccatattcttcttacctaaaatactttttcaccagaagaaacaaatttatatcattcatatatatatatatacatatatatgtatgcatatatatttggtcagtttgaatctgattaattaaaaagttaataggaaaaaaatcagtcttcttttagggctctgaaatagaaatgcatatgaattcatagctacctatcttcactgcctcacatatgtaaactcatgtgaatttcttcattaattttgataagcttatgctgtggtattataatgccaccatacataaatgatttatagagtttaaatttaaattatggtctcttaatacaaayagaattaatgagtcttgaaggacaagttttcctttaaatttttttaatgtacatttaaatttttaataaagtctctgactgtttgttcatgtttcctgcctaagtatgtgtcaaaaatcctttcggtagaatttaataaatttgtgataagccttattgagtgtttgagatgttagctctgttccagttaa

SEQ ID NO: 135987 - DNA, 593 bp, Homo sapiens
taatttttgtatttttagtagagacggggtttcaccatgttggccggttagtctcaaactcctgaccccgtgattcacccacctcagccttccagagtgctgggattacaagtgtgagccactgtgcctggccttgggtatgtatttttataaactattcacacacacacacacacacacacacacacacacacacacacacaaatggtattccatatatcccgcatatggtattctataacattccacatatagtattttataacgttattttcacatagcaatatatggtaggtaattttccaygttaatacatgtacattaatttcattatttgaagtagctgcagattagtccattaatgccaagttgaaaaaattttcttaaccagtcttatattctaagattttgttgtttcttttaatttcttattgcagaaaagtaataaagtttttaaattctaaaaatatgtattgtcaataagcttaaattttataatgtatgtgtaatgaggaggtcttagaaacaactttaaaacaaagtggctaactttgaaacattctaagagtggagcccatgatcaacaaaatttc

SEQ ID NO: 135988 - DNA, 501 bp, Homo sapiens
agttccttcaactaatataattcaaacacagagtccagatgtggtggctcatgcatgtaatcccagcactttagaagccttaagcaggagaatcacttgagcctaggaattcaagactaamctgggcaacctgtctctacaaaaaaaaaaaaaaaaaaaaaaaaaaaaaaaatttaaaattaactgggcataatggtgcacacctgtagtcccagctactcaggaggctggggtgggaggatcacttgagtctaggaggttgaggctgccgtaaactgtgatcatgccgctgaactctagcttgggcaacaaagtgagatgctatttcaaaaaccaaaccaaaacaaaagaacacagagacagtggatgtcaagaccaatggtatttgctttttttccatgtgtatttaacattcctatattcaaatgtatgaacaattttctaaataattatagcatgtcggttatgtcatattctagaaaaataatgttcttacaaatt

SEQ ID NO: 135989 - DNA, 504 bp, Homo sapiens
aaatgttatatattattggatatttgtacaataatatataatatgtattcttggatatatttatatattatttaatatattattggatttctatattattggatatttctatattgtcctgttcctgttgcctcctcagaatattttacattaattactgacttttctatgaaacagctcataacttgtagttgtgaatattattgttttaaagtagaaacatgtttgagaaatacttctgtgatattgtacaattagcaactttaaaaatctcttttcatttgatgctgatgcactaaaatattcatcttgatcaaaagttcactatattgaaatatctattgtgatatttmggggaagaatttaatctaatatcaccttaatcgttatacatgctttagcaacattttgtaaatcagaccactaataacttacattcttgtctgttttggaaattgcttctctttgcttttgaccaaacttgtctgaaaacatgctttcatt

SEQ ID NO: 135990 - DNA, 605 bp, Homo sapiens
aaataataaaagaaaagatgtgattaaattaaaggagaagacctaaataaatctaaaatgctgcatttaataaaatgatgcaataaaatctacaagattgaaaggcatgggctaggttggttaggagaaaacrcaaagaaatgtatttgtataagttttgctttagaattgaattaaatgttatagcttctcaagtttcagggcaaaaatgacagatatagccgtgattaagaaataaaaatggatagcttttattattcaaagaagtagactgtgacattaaacaaaagtaaccaaagagaatgcatttcacttatttgatgagcatatttggacagaatttaatgttcagaatgggtgttagtacattaaaatgttcaatttcctccacccctaattctacggatgcataaatcatttttggttgggacattcatttaagatattcgtctttcagatttttctgaaaaaaattgtaaaattgtacataaaaggacgtttttaatggtttggtttttacaatatttccaaatattatcttctaggactagcattttgacccttttcaagatgttataaagaccaaaaaaaatgtatttgtagtt

SEQ ID NO: 135991 - DNA, 561 bp, Homo sapiens
gtaaattgaaaaccttctggaaagcacttaacattttggaaggcattaggaatattcatgattcatggaaggaggtgaaaatatcaaaatacttgctatggagacatttttgtgcttgtgaaaggaggagtcagttgatgtgaaaaatgtcattgtcacattgacaagaaattgtcacagctaccccacccttcagcaaccaccaccctgatcagtcgagagccatcaactttgagacaagacccttcaccagtgacaagattagcactcactgaaggctcagatgattgtaggaaatttttaacaataaagtattcttaattaaggtgtgtacaattttgaacattatcctagtacacacttaatagactacagtatactgtaaacataaattttatatgcattgggcaaccaaaaattttctgtgacttgytatattgtgatgtctacttttttgtggttgtctggaactgaacccataatgtctctgaggtatgcttgtgtataccaagggctctaactcctaataccattacattaggaggttaggatttcaaaatt

SEQ ID NO: 135992 - DNA, 577 bp, Homo sapiens
ccttcaccagtgacaagattagcactcactgaaggctcagatgattgtaggaaatttttaacaataaagtattcttaattaaggtgtgtacaattttgaacattatcctagtacacacttaatagactacagtatactgtaaacataaattttatatgcattgggcaaccaaaaattttctgtgacttgctatattgtgatgtctacttttttgtggttgtctggaactgaacccataatgtctctgaggtatgcytgtgtataccaagggctctaactcctaataccattacattaggaggttaggatttcaaaatttaaatttgtgaagtcacaaacattcagttcacagcatgtcttttattgacttaaaaagttgacttatctaaaagtctttgaagattaaaaacaaaatggaaacacaggaaatattaatattttagtaaccaaacattatgtatctaactgacacgtatttaaatattaaaaaagagagagcatcaaaaaggagaatccagggtttacagtttcaactttaatttttattcttctgttatgttcagctatgtgtactttg

SEQ ID NO: 135993 - DNA, 564 bp, Homo sapiens
gttagacttagtagctgacacctcaaaatagaatataataaatagggaaatagattaactttatagtggagaaacctgataaacactatttaatccartgattgtggttaatatcaccagtgttatcatgtggaagtcatgtaacctctgacaggatgttacaagaagagaagttcacttctgataatctttccaaaaacaaataatccttgtgtaatcattattttttaaacaacagacaattcaaatttgaaggacattttgcaaaattcttgactagtcttcctcacaactgtcaaggtcatgaaaaacaaggaaacactaagaaacagtcacagactagagaaggctaaggagacatgagtaaatgctttatgatatctttaattgaatcttagtacagaaatagggtatcaacaaaaagctggtgaaatccaaataaagtctgcagtttagtttataagaatgtacccatgttggtttcctagtgttgacacatatatcatactaatgtaaggtgttaacaggaggaaatgaaagtaggtgagggaaatatgtaaactg

SEQ ID NO: 135994 - DNA, 564 bp, Homo sapiens
gttagacttagtagctgacacctcaaaatagaatataataaatagggaaatagattaactttatagtggagaaacctgataaacactatttaatccaatgattgtggttaatatcaccagtgttatcatgtggaagtcatgtaacctctgacaggatgttacaagaagagaagttcacttctgataatctttccaaaaacaaataatycttgtgtaatcattattttttaaacaacagacaattcaaatttgaaggacattttgcaaaattcttgactagtcttcctcacaactgtcaaggtcatgaaaaacaaggaaacactaagaaacagtcacagactagagaaggctaaggagacatgagtaaatgctttatgatatctttaattgaatcttagtacagaaatagggtatcaacaaaaagctggtgaaatccaaataaagtctgcagtttagtttataagaatgtacccatgttggtttcctagtgttgacacatatatcatactaatgtaaggtgttaacaggaggaaatgaaagtaggtgagggaaatatgtaaactg

SEQ ID NO: 135995 - DNA, 564 bp, Homo sapiens
gttagacttagtagctgacacctcaaaatagaatataataaatagggaaatagattaactttatagtggagaaacctgataaacactatttaatccaatgattgtggttaatatcaccagtgttatcatgtggaagtcatgtaacctctgacaggatgttacaagaagagaagttcacttctgataatctttccaaaaacaaataatccttgtgtaatcattattttttaaacawcagacaattcaaatttgaaggacattttgcaaaattcttgactagtcttcctcacaactgtcaaggtcatgaaaaacaaggaaacactaagaaacagtcacagactagagaaggctaaggagacatgagtaaatgctttatgatatctttaattgaatcttagtacagaaatagggtatcaacaaaaagctggtgaaatccaaataaagtctgcagtttagtttataagaatgtacccatgttggtttcctagtgttgacacatatatcatactaatgtaaggtgttaacaggaggaaatgaaagtaggtgagggaaatatgtaaactg

SEQ ID NO: 135996 - DNA, 585 bp, Homo sapiens
tggactcatgtttctaattatttgttgcctcagaatagctgtaaacagcatcttgagaaaacaacactgaggagtatggcctgccaattttagtggctaacactgaaacaacagtggggtggagtaacaatacacctgtggattattatacaattattgagccagagggtaaaaagcggttgatgttaaattctctcaccactytagaacgtaggtctcatgacacattcttgatttgtcagtcttcctcgactgctcatcaatataaaaggaaagactcaaaaatgttgtgtatatgcactgtccaaaaaggacatagaatgtgcaaaacagtgtagaaattgttttcccaaaagagaattacctcttaaagagacaaacattcttcctatgaaaacatagatcactcccctgaataatgtgcattgtttcacgatttgccatagaaatatgcttatcaaaacaacatgattagcaacaattcactctaggaaacacaagccttaaatatataaagggttccagattacataataataactacaatgtatgtaaatgaaatgcatacatcaatgaaggagagag

SEQ ID NO: 135997 - DNA, 421 bp, Homo sapiens
atggtttcataataggaaacccttttacttagccctcattctctctcttgcccgctgccatgtaagacatgtctttcaccttctgccatgattgtgaggcttcttcagccacatggaattgtgagtccattaaacatctttttctttgtaaattacccagtcttgggtaagtctttatcagcaatgtaagaacagactaatacaccaaccaagaagcagtgcctgtgtgtaaacacccaaagagaaaattaaagacatgacattatcagtaagggcatgtaaaggtggaagtagcttttctaacctaacctaacctattattttaaaaaatcaactatgatggaagcaagatggatttacctttccttttctctatagaaaatgatattacaamatgtttatcttatgaagtggcaagcaa

SEQ ID NO: 135998 - DNA, 438 bp, Homo sapiens
aacccttttacttagccctcattctctctcttgcccgctgccatgtaagacatgtctttcaccttctgccatgattgtgaggcttcttcagccacatggaattgtgagtccattaaacatctttttctttgtaaattacccagtcttgggtaagtctttatcagcaatgtaagaacagactaatacaccaaccaagaagcagtgcctgtgtgtaaacacccaaagagaaaattaaagacatgacattatcagtaagggcatgtaaaggtggaagtagcttttctaacctaacctaacctattattttaaaaaatcaactatgatggaagcaagatggatttacctttccttttctctatagaaaatgatattacaacatgtttatcttatgaagtggcaagcaaggaacacgaagtaaaaaaaraaaaaagaaaaaaa

SEQ ID NO: 135999 - DNA, 498 bp, Homo sapiens
actggttatatacccaaaataatataaatcattctattataaaaatatatgcacatgtatgttcattgaagcgctgttcacaatagcaaagacatggaatcaatccaagtattcatcaacaatagactggctaaagaaaatctggtacatacacaccatggaatactatgcagccataaaaatgaacaagatcatgtcctttgcagggacatggacgaaacaggagccgttatcctcagcaaactaaagcaggaacagaaaaaccaaacaatgcatgctctcacttataagtaggagccaatgaggagaacatatggacacatgatgaggaacaacacatactggcacctataactgggggggctggagaagggaaagcatcaggaagaatagctmatggatgctgggcttaatacctggtgatggtttgatctctgcagaaaaccaatatggcacatgtttaactatgtacaaaccttcatatcctgcacatgtacc

SEQ ID NO: 136000 - DNA, 439 bp, Homo sapiens
cttagggaatattgttgtggctagcatgatattctattcagaccaccaaaactttctttagatcagcaataaggctgtttcagtttgttatcattcatgtgttcactagaatagcacttttactttccttcaagaacttttacattgcactctcarcttggctaattgtttggctcagaaggccttagttttcagcctatcttgttttttaacatgccttcctcactaaactaaattgtttctagcttttgatttgaaatgagagatgtgtgactctcctttcacttgaacacttagaaaacattataaggttattcattggcctaatttcaatattattttgtcttagggagtagggagacttgaggaaaagaggatagacagggaaatggccagtaattggggcagttagaacacacacagtatttttcaattaagt

SEQ ID NO: 136001 - DNA, 439 bp, Homo sapiens
cttagggaatattgttgtggctagcatgatattctattcagaccaccaaaactttctttagatcagcaataaggctgtttcagtttgttatcattcatgtgttcactagaatagcacttttactttccttcaagaacttttacattgcactctcaacttggctaattgtttggctcagaaggccttagttttcagcctatcttgttttttaacatgccttcctcactaaactaaattgtttctagcttttgatttraaatgagagatgtgtgactctcctttcacttgaacacttagaaaacattataaggttattcattggcctaatttcaatattattttgtcttagggagtagggagacttgaggaaaagaggatagacagggaaatggccagtaattggggcagttagaacacacacagtatttttcaattaagt

SEQ ID NO: 136002 - DNA, 599 bp, Homo sapiens
gataccccatttaccctgatgtgatttttacatattgcatgcctatatcaaaatatctcatgtaccccataaatatatacacttatatacccacaacattaaaaattaaaaaggtaaccatggaaatgatgagttcatctagaaacatagaacttgaatttttttcttacttttaacatgttagtgctctattaaaacagcttgactaagacttctcagctgtattacatgtaattataaatttgtgtagctttggctatgagtcagctaagagcaggaatcaaatgtgaagaaggaaatttcatcattcctcccactagctttaatccatgttagaagtatgctgtttctatataaattttatatcctacatttttccaagtatggtttacatagttaaaagacagtggaaaataagccatttatgaatgaaacaaaacagaacattttaaaggaagcrcaaaagtaggtattactaggtacttgcaaataaccaaatttctaccattggcaataattttctgtgctttctggcaggaagggagaagggttttttttttttcaattggtattggtttttttctgatgagatatttaat

SEQ ID NO: 136003 - DNA, 426 bp, Homo sapiens
caacatccatgataacaaggaatgaatactctatctggaatacaaaatggtaattcaaattaagtaaaccttgccccaaatttctttcatctctcctaattcttataacagagaatacttgtaggaattacaagagtggcctaaataaaggtactgtcattgtaattcaatacacttaaggatcattaaggtcattatagatctcttcaaaatggtgcttactgatcaataatatccttctgggtacattattmcacaatagaaaactaaggaaaaagcaatgtaagtttttgacatcaaaatcatcaagcaaaggctgatctcagatgcaaaaatactaatgaatcgaaatgtcccctttaagaggaataaccctatatcaaaggtttacaaatttaaaattttacatatgaattcaaatatccc

SEQ ID NO: 136004 - DNA, 620 bp, Homo sapiens
ttgcagtaggttggatttggtcattacatcttgcagtaacattatctactagggttatgtatccagggaaaggatcccaaaggctcagtgtgacaccacgtatcatatgcttggcaacacaaaataactaaacgaaactggcttgatagctacatgccatatgatactaataggcaaaatccttaaagttgctagtgccttttgtcactcacttagtaaatacttttgatcaacaagctatgtgccaaatactatttgagtgtactctggaatcttctaacttcaaacttatccctaatctcaagtatttattgaatgagtttggtacagaaaaataatactgaaattgaagttcaggagtcctgggtcctaaaactgactggagtcactgtagcaacctctctgrgtatgcttcattagtctcttacagtctctttcaacctaaataattctacaataatcctgaaaccatcttatgtattatctcaccaactgttaggacctgcgccaagaagactgtcttgtgtttatctttcaccaagattctaacacatacctacttacacttggaagattagctttttcttattgccaaatttaagactggccgtggtgggaaa

SEQ ID NO: 136005 - DNA, 577 bp, Homo sapiens
actctaataatgcacaatcttgatttatgagacggtctgtaactacagagtgaatatgaaagaaagtttatactcttccccttcattaaaagctctaaaatactttttcatttaaaatataaattacaagagacaacttcgccaaatgtgtaacataattctgccagagttccacagacaaaattatgagtatttcattgttacctctgagaccaatcataagttcttagtatctatcaacttcctgaaattttactgtaagtcagaaaaagaatacacttaaaaaaatagaaatgtccagtagtataccttagtactaaaactatttttttaaaagatctagatgggaaaaggcagtccctcgagatcatgaaacaaaataagttaggcagtcagcaagtagaaaaatstgtcaattctgtttccggtaaaatgtttacttcaaagaaatttttatataggctgaggctaatatattcaagagtataaacacttttcctttggattacctaaaaacaaacttttaaagtatcatatttcaattgactaaaaatatagccaaatctgtcacaacaca

SEQ ID NO: 136006 - DNA, 557 bp, Homo sapiens
gctttgcacaggttgacctgtgatctctaagttggatttctgagttccttgacacatgagtcagttgcggcagctaaacaaggtgaatggctttttttggtctggattaaatgacagctaaattgaattactctaaaccagtgattttcaaagagggcatcagcatcacctgaaacttattagaaatgcacatccttgggccacacccagaccttgtggacccactggtgatgggtcaggggcggggccccaacagtytgttgcagcaggcccttcaagggattgcaatgtgctcaagtttaagagccggtgccctaagcttgcaacacacatccttttatatcgctataccacacataatatttttcccataaattgacctgttgagaatgtcttttttttttttttttttttttttatgagctccaacaatgtatgcagaatcctaggtggagaaaagacatacaagaagccaagggaggttctccttaccttcaggtgcgggtaaaagtaacaataggaaatttagttagtagtgaaagcattgcaagacaaga

SEQ ID NO: 136007 - DNA, 557 bp, Homo sapiens
gctttgcacaggttgacctgtgatctctaagttggatttctgagttccttgacacatgagtcagttgcggcagctaaacaaggtgaatggctttttttggtctggattaaatgacagctaaattgaattactctaaaccagtgattttcaaagagggcatcagcatcacctgaaacttattagaaatgcacatccttgggccacacccagaccttgtggacccactggtgatgggtcaggggcggggccccaacagtttgttgcagcaggccctycaagggattgcaatgtgctcaagtttaagagccggtgccctaagcttgcaacacacatccttttatatcgctataccacacataatatttttcccataaattgacctgttgagaatgtcttttttttttttttttttttttttatgagctccaacaatgtatgcagaatcctaggtggagaaaagacatacaagaagccaagggaggttctccttaccttcaggtgcgggtaaaagtaacaataggaaatttagttagtagtgaaagcattgcaagacaaga

SEQ ID NO: 136008 - DNA, 557 bp, Homo sapiens
gctttgcacaggttgacctgtgatctctaagttggatttctgagttccttgacacatgagtcagttgcggcagctaaacaaggtgaatggctttttttggtctggattaaatgacagctaaattgaattactctaaaccagtgattttcaaagagggcatcagcatcacctgaaacttattagaaatgcacatccttgggccacacccagaccttgtggacccactggtgatgggtcaggggcggggccccaacagtttgttgcagcaggcccttcaagggattgcaatgtgctcaagtytaagagccggtgccctaagcttgcaacacacatccttttatatcgctataccacacataatatttttcccataaattgacctgttgagaatgtcttttttttttttttttttttttttatgagctccaacaatgtatgcagaatcctaggtggagaaaagacatacaagaagccaagggaggttctccttaccttcaggtgcgggtaaaagtaacaataggaaatttagttagtagtgaaagcattgcaagacaaga

SEQ ID NO: 136009 - DNA, 557 bp, Homo sapiens
gctttgcacaggttgacctgtgatctctaagttggatttctgagttccttgacacatgagtcagttgcggcagctaaacaaggtgaatggctttttttggtctggattaaatgacagctaaattgaattactctaaaccagtgattttcaaagagggcatcagcatcacctgaaacttattagaaatgcacatccttgggccacacccagaccttgtggacccactggtgatgggtcaggggcggggccccaacagtttgttgcagcaggcccttcaagggattgcaatgtgctcaagtttaagagccggtgccctaagcttgcaacacacatcctyttatatcgctataccacacataatatttttcccataaattgacctgttgagaatgtcttttttttttttttttttttttttatgagctccaacaatgtatgcagaatcctaggtggagaaaagacatacaagaagccaagggaggttctccttaccttcaggtgcgggtaaaagtaacaataggaaatttagttagtagtgaaagcattgcaagacaaga

SEQ ID NO: 136010 - DNA, 387 bp, Homo sapiens
gataatattactgactctcagaacaaggatctctaaggaaaagggttttaaaaaaaaaggagaaaagaaaaagaaaaaaagaaataaaaaatattactgacccactgtaagtagtgcaactactttgagcagtttatccaaaggaactcgtacatttttccttctccagccacactatctgacccaccccttttgtgaacagagaacrgcagcacattcttatggcactcgctgcaagagtaatatttcagagtttgagggaaattttatgttcgttgatcacaaatgtttggaagagcttcatcttcatttctggaagtttttgttaaggatgtttaaagtatcactgccatcttttatgaaactgctatcatgactatggaattc

SEQ ID NO: 136011 - DNA, 478 bp, Homo sapiens
aataaatgtatagtgtgtgctactatatatagggaagtcctgaattccctagttcttttaatatggaagaaaatataaagatgtcagtctgcttgcatacataaaccctaacacccacttataaaattttgcttcctaatatgaaaagaattccaaagaagagtgacattcacattttttccccctttgcagggattgatttgtgtgtgtgtgkgggggggtggggatgggggggtggttcaaggtacagggaattctgtagaaaagatacatcttccattgttttgtcagtcaaagatttaaaacggaattgctaaaatgttatttgtgtatatttttgcaacacttattattcaatgatggttaatggatatttaaatgtttttctaattaaattgggaaaacaacttatctttgttatgaatgactttcttaaagaggctttcaacagagcctcagggtagttactgacagcatg

SEQ ID NO: 136012 - DNA, 583 bp, Homo sapiens
ttaatattattatactattctccattctttagcctaaaaaaatatagacttgttccaaaattcttccaccaatgagtggcggagctgtgacttgaatcctgatacgctggtccaaactattctctggctactctgctgggtaatttgaccagttctgccttgctacagagtgccaagctaggataaatggctggaaattccagagagtaagatttatctgcaatgaagcaccatatgtaatgagtttttacgtttaaaaaattgacttaatgagtgctcttgcctggccaaaaatcccctgaccattttctggatggacaggtgacaagggttttacccagggacctcttgcaccaattgtgacttgcatcactacctctgagcttctcagaatrtggaacatacattgctaatggtaaatgaactattagagtgtcatgaaatgatttttagaactccacagatgcagcattcaaaatcactgaccttcctaatgagacttttcaattccctttttaattatagtttcactccctccattacggcctaagggaaagcctcagattggtgccataatactttt

SEQ ID NO: 136013 - DNA, 414 bp, Homo sapiens
ctacatgagcagagttcagggttataataaaaagtaaaccacccgggcgtagtggctcacacctgtaatcctaacactttggaggctgaggtgggtggattgcctgagctcaggagtttgagaccagcctgggcaacatggtgaaaccccatctctactaaaatacaaaatactagccaagtgtggtggcatacacctgtagtcccagcttcaggaggctgagrcaggagaattgcttgaaccttggaggtggaggttgtagtgggacaagattgtgacagtgcatgccagcctgggtaacagagcgagtctgcacttcaaaaaaaaaccaaaagtcgaatggataaaagctaatgaatggtaagatggtattatgctcatgttgattaactatgaatgtaagcagtgcccata

SEQ ID NO: 136014 - DNA, 443 bp, Homo sapiens
tgttttcactttactcagtgaacttaccctgaattctttcctgtgtgaaatccaagaactttctcttggggtctggattgggacccctttgtggtaacacatggatttcaaagccagtgagaagccaagacccgggctccttctaccctgtggctccatcattctctatagattttggtgacaatgtgtgtctccctggaggaagaagaggaagcacagagyatgtccagggagggctttatgggacatctaattagctagaactcagtcacatggccacacctgcagcaagggaagctgggaaaggaaatttagctgtttcctgggagatacaggaaatgagtttggaaataggtagctagtctttgccttgtttggaattgtcctggtggctggtctaggaatgtcagaggagggatttaaaatgatttttttgtttgttt

SEQ ID NO: 136015 - DNA, 543 bp, Homo sapiens
tatcctccttgattcattgatttataaggcttggtttctaaactgcacctgtggtagaagtgggttaccaaatgacatctatgataataagcggatagcaaacactagctttggagtcaaacatatctggttttcctcatcactaaaatttagaaaatagtatgtgtcttagaatgtaattgttagaaataagtaatacatgcaaagtcccccaaaatatgcctggtacatagtacaagctcaatgaatagtagctctmttaatgtgatttgtctaatgagataaataagagtaaaatgaaatgaggtttgaccaacaagagaaaatcagagtatttaatgcacagctgtcttaaggtcttgaaaaaatggtaaggaagctgatacattaaattctgagcaatggaatggccccaaaagtggataatgtgatcatagctcacatacagaaaatgaaaacatatcaggtgtccagagaaacccagaatttcctgacactgaaacttgagagaaattttataaaagagacaatggtttaggaagt

SEQ ID NO: 136016 - DNA, 399 bp, Homo sapiens
tttacatcagtagactttgagtaaagcagattgccctccataaggtgggtaatcttcacccagtcagttgaaggctgaatagaacaaacgaatgamcttccctgaagcaagagagaaatctgctgctgacagcgttcagacttgaactgcagcattggctctgaggctctgctctgcaaattttggacatggcaccctccataaacacgagccaatttcttaaatatctctctcatacacacacacacatacacacacacacacccacacacacacacacaattggttctgtttctctagagaatagtacacttgatttctccgtatttggggtaaattctagttgtccagtagggcagccttgaatagcaatatcaaaactctgtaaaaaggttaatc

SEQ ID NO: 136017 - DNA, 316 bp, Homo sapiens
ttccctgggaagataacccaatacttgtcaattcttgctttcattttttgctccacatgaactaccttacctgtcttattgttgagatgtgagtaatggagttaaaataaacttaattttaatgtgtttattatctgttcagattcttattcaaaaatttaaaagaattaagacctttaaaatgtgcaaatatgctccaatatttatttttccactattttagaagaaaaagatccaaaaactttggttgaattttaagttkttagccactagatggcagtggataactatctcttattttgctttcccgcattca

SEQ ID NO: 136018 - DNA, 613 bp, Homo sapiens
agtttttagtgttcatttgtcataatccctttgcagggcataaaacaaattagtaaaatcccatcaagtccattgtcyttgtacacactgttcccctcataatttttgaaggcctgatgtcccgaatcaccaccaatgaaagttttagcaattaggccaccatcttgtgccaaagattatccatgccccacattccattccagaggagatctaccttactagccagaaagtgagtgatcctgtccccaaacctctttgactacctgccttcttggattaatcctggttccagttcggttgtctgggaagctgatgccaagatggaattagaagggcaaaagatttattggacaaaacagctgtgaaaggtaaagggatgagggagcagaagtaggctctgacatctgtgaaaggaaatgaggaaggaagaagggttggataagaagaggctccaactgaagtgcagtctgagaaaatcagccagtacaatggggaacctcagagtaaatattggccattagaagagtcccacgttgggcaaaaatgatgagctctagtacccctgcctgctcagttattgactgggaacagcccatggggagcatgacctcgg

SEQ ID NO: 136019 - DNA, 613 bp, Homo sapiens
agtttttagtgttcatttgtcataatccctttgcagggcataaaacaaattagtaaaatcccatcaagtccattgtctttgtacacactgttcccctcataatttttgaaggcctgatgtcccgaatcaccaccaatgaaagttttagcaattaggccaccatcttgtgccaaagattatccatgccccacattccattccagaggagatctaccttactagccagaaagtgagtgatccwgtccccaaacctctttgactacctgccttcttggattaatcctggttccagttcggttgtctgggaagctgatgccaagatggaattagaagggcaaaagatttattggacaaaacagctgtgaaaggtaaagggatgagggagcagaagtaggctctgacatctgtgaaaggaaatgaggaaggaagaagggttggataagaagaggctccaactgaagtgcagtctgagaaaatcagccagtacaatggggaacctcagagtaaatattggccattagaagagtcccacgttgggcaaaaatgatgagctctagtacccctgcctgctcagttattgactgggaacagcccatggggagcatgacctcgg

SEQ ID NO: 136020 - DNA, 583 bp, Homo sapiens
gattaaaaaaaacaaacaagtcccaactatatgctgtctacaagaaacctactttaaatataaagaaatatataaattaaaagtaaagggctgaagaaagataaaccatgttaacactaattaaaagaaattaggaatagctatattaattttagacagagcagacttcagagcaaggaaacttagcaggaagaaaaaggggcattaaataataataaaaggatcaatacatgaagaagacataacaatccttaatgtgtatgagcctaacagtgtcaaaatacaggaggcaaaaactgatagaactgcaaggagaaatagatgaatccacaattgtagttggagacttcaatacccctgtattagaaatgaacagatccagcgggcagaaaatcagcaaggacatagttaaactcaacagcaccatcaatcaactgtatataattaacatctctagaagttcctccaacaacaacatattacacattcttttcargctcacatgcaacatttaccaagatagacatattctgagccataaaatacaccttaacaaacttaaaagaatagaaatcatacagtg

SEQ ID NO: 136021 - DNA, 371 bp, Homo sapiens
ctacatatacattcatatacatttaaaagggaggactttcctttctgctcattgagttattagcctagagaaaaactgtcattttgtcattttgatgacatttagtagagacggggtttcaccatgttagccaggctggtctcaaactcctgacctcaagtgatctgcccgcctcggtttcctgaagtgttgggattacaggygtgagccaccgtgcccagcctatagacaagaaagccaggctgtgcacatcacatgtgactgagaagagtctacatttgaaagaataagctaaattccacagaactacagtgaaccttgaaaatcactgacctctcctcttctttctcagttttacttgtttcttcctc

SEQ ID NO: 136022 - DNA, 504 bp, Homo sapiens
gaattctccattaggggctttttgatgatcctattgcaaatcaaagaaagcaaccagggaacttggcagtgggatgaacagaaacctgcaggtgatgtggaaggagtcccagaggagttccatcttattactgatggtgataggaacactgtccaggtgatttttttccaacctgcagggctgacttttctaggaggagtttactcttcaactccagagctgacttggttggcaccagagtgtctcattgtgggagagggggttaagccctgggcrggagaaccccagagggtcaactctccagatctctcaggacagagtggcccagggtggaggggaagtagaccagaacaggaggccccagaaagttcaaggcacaggatctgtctctgtggaaggcttccctggggtcctctggtttcattgccactgccctttgtctggggctctttttgcccaacaaaggcttaatgaaataagctgccagttttttcaaattcccac

SEQ ID NO: 136023 - DNA, 366 bp, Homo sapiens
attgtctgacggcattggcaatattggtcaagaccacagtgacttaccactacacaactattaagatggcaaaaccaacaaacaaggacaataycaaatctttgccatgatgaagagcaccagaaatctcattcattactggtggaaatgcaaaattataccaccactttggaaaaacagcttgttatataattaaacacacacttaccataataaccaagcaatcctactcctaggtatacaccaaagtaaattgaaaagctatactcacacaaaacctgtacatgaatgtttatagcagctttttcataagagccccaaactgtaagtaagcaagatgctctttaacctgtaatggataaacaa

SEQ ID NO: 136024 - DNA, 507 bp, Homo sapiens
taatcctttgtcaaacgtggtttgcaaatattttctctcagtgtgcagcttgtctttacatccttttcacatggggsttgacagagcaaaatattccacttaaataaggtctgattgattgatttttccttttgcagatagtgttattatgtcaagtctgagaactcaacctagtgacagatcccaaagatcttatgctgtattgttttctaaaacttttatggatttacattttaaatttaagtctgtggttcatttgagtgaatttttatataagatatgaagtttaggttgaggttccttttttgcctgtgggtgtcccattgatccaggaccattggttgaaaggctatacttccttcattgaattgcttttgtacctttgtcaaaaatcaactaagtatacataggtattatgtgtcaattataaataaaataaaacttttaaaaaaccaatcaaggccaggcacagtgggatgcatctgtaatctcagcactttgggagac

SEQ ID NO: 136025 - DNA, 555 bp, Homo sapiens
aaccgggatgtttttaaaatggaaaaggtaatacaaacaccaaggcctgccaaaggatgagccctcttaagctcaagtgagagagatttactaggcactatttttatcctatgagcaagagaaactacatttgaaccgaagtataatcacattcactgcttggtattttacatatgtttttatctctctccaattagctatgttacctaacctcttgttcctatgtgaaaatagacagcgaattagagacgcctctcggaattggtggtaactattcttgacagatgccgaacagcgaaccagctgctaagcacaagtgaaatatagaagtccctgctgctggrctaatttaatctaattggtatatttgtctttattcatgattttatgaggaaaaaaaagatcattgacaacagcatttcagataaattcttttcattccttgcggccttggaaagtttttcttaatctgttgcacttgcattggcaagcacctgcacccctctgcccacacttggtggggttcggtgttatttgactaaaaggagaaagtat

SEQ ID NO: 136026 - DNA, 555 bp, Homo sapiens
ttgtcatgtccagcacagacttaatcattcagtcagtggcctggctttcattgttttaatctacttatgaggactaatttttacttgatttctttaactatgagaattctccaagatggaagaagaagaagtagctctaaatttaatcctaaacaataagaaataaagccatgttaaaaaatattttgacataatatgtaatttgcatttttaaatgtctggaaaaattgcagtcatgatatctcaagtccacagttagatttctgaaaaccaactgtggcatttaatatagaaagttgtgggctttggtatatttggtttgtaatttcatctaaggttgaagactaaaacaacaggaaaacaggggaatcagttcttccctcatttatttatttgtttttcttttcttttttttttttttttttttgagacrgagtttcactcctgttgcccaggctggagcgcaatggcacaatcttggttcaccgcaacctacgcctcctgggtccaagtgattctcctgcctcagcctcctgagtagctgggattacaggc

SEQ ID NO: 136027 - DNA, 555 bp, Homo sapiens
ttgtcatgtccagcacagacttaatcattcagtcagtggcctggctttcattgttttaatctacttatgaggactaatttttacttgatttctttaactatgagaattctccaagatggaagaagaagaagtagctctaaatttaatcctaaacaataagaaataaagccatgttaaaaaatattttgacataatatgtaatttgcatttttaaatgtctggaaaaattgcagtcatgatatctcaagtccacagttagatttctgaaaaccaactgtggcatttaatatagaaagttgtgggctttggtatatttggtttgtaatttcatctaaggttgaagactaaaacaacaggaaaacaggggaatcagttcttccctcatttatttatttgtttttcttttcttttttttttttttttttttgagacagagtttcactcctgttgcccaggctggagcgcaatggcacaatcttggttcaccrcaacctacgcctcctgggtccaagtgattctcctgcctcagcctcctgagtagctgggattacaggc

SEQ ID NO: 136028 - DNA, 489 bp, Homo sapiens
agaaattttttcccagatcagtatcctggagagtttccccaatgttttcctgtggtagtttcatagtttgaggctttaagttttcaatccattttgatttaatttttgcatatggtgagaaatagggatctggtttcattcttctgcatgtgagtgttcagttttcccagcaccatttactgaagagactgcctttctccagtgtatgttcttggcatctttgtaaaaaatgagttccctgtaggtgtgtgggtttatttstgggttctatattctattctatttgtctgtttttatgccagtactatgctgttttgcttactctacctccatagtataatttgaagtcaggtaatgtgatttctccaattttgttctttttgcttaggatagctttggctattttgggtctcttatgattccatataaattttaggaatttttttctatttccgtgaatactgtcattggtatttcaattgagattgc

SEQ ID NO: 136029 - DNA, 596 bp, Homo sapiens
agagcactttagctcacagtgatgaggcttgtacaaactgaagttacaaccactgagatcarcaactcccctttgactagggctaatttaaatgctacctccttgggcaggcaacagctgagtttggtccagttttactttctgctgtaataaggcagcactgagttcaatgcctcacaattgctgtgctctccctctctcacaaccacacaaaaatgctctctgcatcatgccgctgcggctgggggatgggagggagtgacattggtgattcaagattgttttttctacttcttcagtgcatcttttagcagtataaagttaaaaacaggtactgtgagtgctcacctgatttttggttcttatgaagttacgtttttgtacagatagttaaattcgtgtttttgcagggaggacaattggtggagccttctattccactgtcttgctctgccccttcctcttcttgtttatttttatttgttagcaggcaataggtaaatatgagctcaaatcattaattagaaaaaaaaagtcaatctatgtatttatatcagaaattctgactttgtgacaattatgttctaacaaagtac

SEQ ID NO: 136030 - DNA, 596 bp, Homo sapiens
agagcactttagctcacagtgatgaggcttgtacaaactgaagttacaaccactgagatcaacaactcccctttgactagggctaatttaaatgctacctccttgggcaggcaacagctgagtttggtccagttttactttctgctgtaataaggcagcactgagttcaatgcctcacaattgctgtgctctccctctctcacaaccacacaaaaatgctctctgcatcatgccrctgcggctgggggatgggagggagtgacattggtgattcaagattgttttttctacttcttcagtgcatcttttagcagtataaagttaaaaacaggtactgtgagtgctcacctgatttttggttcttatgaagttacgtttttgtacagatagttaaattcgtgtttttgcagggaggacaattggtggagccttctattccactgtcttgctctgccccttcctcttcttgtttatttttatttgttagcaggcaataggtaaatatgagctcaaatcattaattagaaaaaaaaagtcaatctatgtatttatatcagaaattctgactttgtgacaattatgttctaacaaagtac

SEQ ID NO: 136031 - DNA, 494 bp, Homo sapiens
ttgcccaggctggttttaaactcctgggatcaagcaatcctcctgtcctggcctcccaaagtgctaggataacaggtggaagccaccatgcctggcttcaaattcccatctttgaaaaccgatcttgcccactaccctgaaaagtctcactttccacaaggcctatcaaggggagactttgatcsatgctgggtatctgctgtctctggattacctaaaacagtgagaggctaggccagttaaactatgataggagatggaactaaaagacagcatatatactgggatggagttgttcctttccaaaacaaactaaaattcagtcaagatgagcagagtaaatagaaaaagcctgtctgcgcgaggaacaggagaagacaacagaccagcaacgtggaaaagacatctccaccagagatggaaggaagagcttgtttttcacttttctgtccagtcttaggtacagcttgggttttttgtaatattgcctttta

SEQ ID NO: 136032 - DNA, 606 bp, Homo sapiens
tagacctggggcagctcatgggaagacaagcttaaaatgaaatctcactcatccctggtcatcagaacaactgtgcacagacctaaggctgtgctctgccgtgtgtcactggagacgtagcctcagaacgtgtctctggatgatcactgaggtagsagaagacaaaaactgtaaatttcccaagcagagaaagcagcctccaagctgcacttattaccaacagcaatgggtgaaaatgtaatggattaaggggagttaagcgcaacttttgaccaaaatgtagtcaatgcacactccaagtatgacccttagaaagtcaggctaaaaatacaagtgtgatggtgcatggctgtgtcccagctactcaggaggctgaggcaggggaattgcttgaatcaggcaggtagaggttgcagtgagcagagattctgccactgcactataacttgggtgacagagtaagactctgtgctaagaaaagaaaaaaaaagccaggctaaaaataaagagaaaatcctgagcaatgacatcagatttgctgcatactgtgcagacatcaaagagttagtccaaccaaatcagtaaacacagtgattgaacaacaaa

SEQ ID NO: 136033 - DNA, 606 bp, Homo sapiens
tagacctggggcagctcatgggaagacaagcttaaaatgaaatctcactcatccctggtcatcagaacaactgtgcacagacctaaggctgtgctctgccgtgtgtcactggagacgtagcctcagaacgtgtctctggatgatcactgaggtaggagaagacaaaaactgtaaatttcccaagcagagaaagcagcctccaagctgcacttattaccaacagcaatgggtgaaaatgtaatggattaaggggagttaagcgcaacttttgaccaaaatgtagtcaatgcacactccaagtatgacccttagaaagtcaggctaaaaayacaagtgtgatggtgcatggctgtgtcccagctactcaggaggctgaggcaggggaattgcttgaatcaggcaggtagaggttgcagtgagcagagattctgccactgcactataacttgggtgacagagtaagactctgtgctaagaaaagaaaaaaaaagccaggctaaaaataaagagaaaatcctgagcaatgacatcagatttgctgcatactgtgcagacatcaaagagttagtccaaccaaatcagtaaacacagtgattgaacaacaaa

SEQ ID NO: 136034 - DNA, 590 bp, Homo sapiens
aggactgcccttgcctctgtgtggccgctgcagtgccactacacagccaccctcccaggtagtcggctacacacactccgacccccaccttcaggccaagcccaagtaccatcctctcctctgttcagtcttggattctgtaaggctgatttagacgtctcctcctgttctctactgcacttcccacgagatacatttctttctatattatcatgttttgcatgtctcttttcctagggagattctggggttcctaaggtcaacaaacgtattttttcatttacatgtrcccagcagcatgtctgttgtatacgggcactcactgacagctggagaaatgaataacaaacctacagccgaacaaagatttcttgacaaagttctccttgatgtcttctgcagagcaggaatgctgttattttgactcttcacgcttctgctgaactagagtaaacaaagatcttgttcattccaataaactacttaattaagaagagttgttgaaatgtcaataaatattcaaaagagaggctttctggagataatttgaaattcaaattatctggctgtgataaacgagagctgatggt

SEQ ID NO: 136035 - DNA, 590 bp, Homo sapiens
aggactgcccttgcctctgtgtggccgctgcagtgccactacacagccaccctcccaggtagtcggctacacacactccgacccccaccttcaggccaagcccaagtaccatcctctcctctgttcagtcttggattctgtaaggctgatttagacgtctcctcctgttctctactgcacttcccacgagatacatttctttctatattatcatgttttgcatgtctcttttcctagggagattctggggttcctaaggtcaacaaacgtattttttcatttacatgtacccagcagcatgtctgttgtatacgggcactcactgacagctggagaaatgaataacaaacctacagccgaacaaagatttcttgacaaagttctccttgatgtcttctgcagagcaggaatgctgttattttgactcttcacgcttctgctgaactagagtaaacaaagatcttgttcattccaataaactacttaattaagaagagttgytgaaatgtcaataaatattcaaaagagaggctttctggagataatttgaaattcaaattatctggctgtgataaacgagagctgatggt

SEQ ID NO: 136036 - DNA, 600 bp, Homo sapiens
aactagagtaaacaaagatcttgttcattccaataaactacttaattaagaagagttgttgaaatgtcaataaatattcaaaagagaggctttctggagataatttgaaattcaaattatctggctgtgataaacgagagctgatggtagagatattattagtcattcatctgcatgtgcttattagtcccatggcagtacttagcgccatgtagagagaggaaagcgtggatagaaaggctcttgtgaagctcattcagccaatgggcaggagaggaaggaartctgactgctgcgcttctaacgcagtctattcaccacaagcttccagaaaccgattagaagatgtgcgtgcactcaggacttggcaaaatgatgtgaaatgaaacatcctgtgatggatagggccaacactctaggatcagtgtcagctgaaagcccacgttgatcattgcatcttacatcagctgttgtcttcaaccaaattgtaacctaaataccaatttgggaactaattatggaaaaaataaatgtcagtggcctgtataattgggccttcccatttttccactgccccatgctttatagtatactgatgat

SEQ ID NO: 136037 - DNA, 595 bp, Homo sapiens
atccaatgaaatcaacataaaaacacatcataatttagactttggctcatttttaattcaattgttttcttattgttgaattttgaggatattttgtttattctggatacaagacctttgtcagatatgtgattagcaaacacattctcctagtgtgtgccttgtcttcttattctcttaacagtatctttggcagtggaaacttttttyttttttttttaacttttaggttcggggtacatgtgcaggtttgttatataggtaaatttgtgtcatgggggtttgttatacagattatttcgtcacccaggtactaagcctagtactcattagttatttttttccgctcctttccctcttcccatcctccaccctcaccactagaccccagtgtctgtgttctcttgtgtccatgtgttctcatcatttagctcccacttataagtgagaacatgtggtatttgcttttctgttcctgccttagtttgctgagaataatgacctccagctccatccatgttcctgcaaaatatatgatcttgttcttttttatgacggcatagtattatatggtgtatatgtaccaaattttctt

SEQ ID NO: 136038 - DNA, 595 bp, Homo sapiens
atccaatgaaatcaacataaaaacacatcataatttagactttggctcatttttaattcaattgttttcttattgttgaattttgaggatattttgtttattctggatacaagacctttgtcagatatgtgattagcaaacacattctcctagtgtgtgccttgtcttcttattctcttaacagtatctttggcagtggaaacttttttcttttttttttaacttttaggttcggggtacatgtgcaggtttgttatataggtaaattygtgtcatgggggtttgttatacagattatttcgtcacccaggtactaagcctagtactcattagttatttttttccgctcctttccctcttcccatcctccaccctcaccactagaccccagtgtctgtgttctcttgtgtccatgtgttctcatcatttagctcccacttataagtgagaacatgtggtatttgcttttctgttcctgccttagtttgctgagaataatgacctccagctccatccatgttcctgcaaaatatatgatcttgttcttttttatgacggcatagtattatatggtgtatatgtaccaaattttctt

SEQ ID NO: 136039 - DNA, 452 bp, Homo sapiens
aactttcttcctttctttaaacattgtgttggttattcaattcatcaagagatgtgggctactcargttatctatttccatgtgagtctggtagtttgcatctttaaggaagtggtccttttatctaaattgtcattatgggatgagagttgttaatagcttttattattattttaattattattcttttaataattggaatcagtagtaattggtaattcatgccttctgtattttacttcttgattagtctgggtaaagaactgtcaattttattgatcttttcaaacaaccatcttttggtttcatggaatttcttgattccttttgttttcaagtttattgatttttaactctaatatttattatttagttccttctgcttgttttaggtttaatttgatcttttttgtctcttattactaaggtagaagcttggattatttatttta

SEQ ID NO: 136040 - DNA, 614 bp, Homo sapiens
tcctctcctttccatctctaagccaccttgttcttaagtagaccccacaggaagcatctcacaggagccaagatgtgagacmctcaccctaactctcactctaaccttaggggaatacagcccaagcatttggcttttctcatccacagaagagaagtagaaaacagcatttcaaaatgaaatgtattcaattaaagagagccagctattttcattgaaatgtattcaattaaagagtcaagtagatgcagatgaaaagttaagtctgaagcagacagccaaaggtgaaaaagcagagcctgggttgaaaagcagctgtgagaatcagagcctcctgaggacgcgttccaaatgcagaagtgaaatgatatgcagcccaaaaagcgtgaagaaaacgggggaagagacggcaggactgagtactagaaaaatagggtaaaaatagcactcaacatggaaagaaaagccgcttagaagctgcctgccttttactctcagaggaaaaactcatagaaatatgaaaaaaaaatcccacctgttctttaaagagtccttccatctcaaaatcgactttgaaatgcaactttctatttagatttcattgtgtcatacac

SEQ ID NO: 136041 - DNA, 239 bp, Homo sapiens
gaattcaagaccagcctgggtaacacagtgagacctattgtgtacaaaaaagttaaaaaaattagcctggtatggtggcacacacctatagtgctggctactcgggaggctgaggacagaggatcacttgagcctgggaggtcaaggctgtggtgagctgtgattatgccactgcactccagccctgtscctccctccggaaaaaatcactatgaccactcagtctacggtgtccctga

SEQ ID NO: 136042 - DNA, 355 bp, Homo sapiens
caacctcccaaagtgctgggattataggtgtaagccacagtgcccagtcgaaaaaaatttttaatggagaataggcttttgaaaattgagatacttcaaaaattgaaatgctatcctatgaaaaattgtcatagaaatagaaactccagtacaaccaagaggagacaactcagtttcaactttaaagygcaaagatgtactgccagttttatgtaaagaaatttatatataaaatgggaattgcacagcattattaggctctaaagacatgtaagctaattttagagtaatgcatatgcatgttaaagcagcaaaacataatacaaaaagaggaaagccgatgctggtgatgttg

SEQ ID NO: 136043 - DNA, 608 bp, Homo sapiens
aaggtttttgtgtcctctgcctcgccttttgacatcagagggccaaaaattccaccatcagatcatcctaacaccgccatgttttgtacatgggacccatgaatgaggcatgaagctcaattgcacatgtgcacatttctcctttcataaatattcatgactcctcctctgtcttatatatgttayatatattaagccattccccttagcataacttcctgcttcctttgctcctccctcgaggtgtctgtccagcttcttactgaaggctatgcttcccagcctgtcagaatggcccccctgcaggttgcaacgctttatgagaaataaagctctccttttcaaatttatgactcttattcttcagctgacaaagtggcaaaaatgtaaaacaaggcaactcctctcacaaatttgtatttggacaaatatagttagatttcacagaaatgggttaactatattaacacaaaatgagttttttattattaagatgaatgcatgtgtaactttttaaatttctcaattttaatttcaatattataaatatcaatagatataactcacatcaacaaaagcagagagactcaattgtttgtaagagtgga

SEQ ID NO: 136044 - DNA, 643 bp, Homo sapiens
tgttcttttcaaataacaagcaaggagtactgattcattggtaaattttacttcctttcacagtgtgttaattttccttacctcagagacagtggatcagcaaacatgaaatacctaaatacaaatccttaaagttaaaataccaaccagcaatcccarattaccccagaaatacaaataatgtgtttgtgtgctgtacaaagtaaatagattctggatttccctgtcattttacaagccagaaagaggaatttagacaaagtgattttggaaagtctagcctaagccttttcccctttttcttcacctcacatctgtagtgagaatgtatggaaaactactcaaggttctgaaatcactgagcaatctgaactttcatccatccctgacatatttcagctagtcacctagttagggaaagcatttcacagcaataggaactcacacatgggaacttggctcctcaacaccatttgccactaatctgacattctctgcaggtttagctcctcaaaactttcctattcttttctgtatgcatttgtgtgtgcgtgtgtgtgtcctctttgttctacttgggataacttaaattttctcacaaagcactctcctgcatctatttctttgacttagtcgtaaaatg

SEQ ID NO: 136045 - DNA, 611 bp, Homo sapiens
tcaagcaattctcctgcctcagcctcccgagtaggtgggactacaggcaccgtgcccagctgtgttttctttcccagatgttgtcctccccttcagctcaaacttccttgccactgaaaataacattttaaaaatgttatactagagtttaaataaaatgattaagtttaaaaatcttgataaaatatacaacaagaaaagtaattttctcattgaaatactgctgaatttgctaaaaaacgaaaattttcaaagtggagtattttcttaatcctggcccaaatgctcataagcctggttataatccatttcaggtaaaaggtaagagctgtttttatgttataattataagactctctttggggatcaatagtcacgtatttgaatgttcattttatggcatggcaaatgaatggcaaatattaagagcttatgtcttctcttttaacatcaaaagtatgacactgaaactaatcctggattgtagcctgctrtaaattgtgcttagtctcaggaagctgggtgaagaggagacactcaacttcagacattggttctaaggaggaactgtagaagagcttatggaagactacatagtaattctagatgac

SEQ ID NO: 136046 - DNA, 576 bp, Homo sapiens
attaatttattctttaatggatcataccataggtgttacacctaaaaattattttgttaaaaaaattattttttgtagagatgggatctcattatgttgcccaggttggtctcaactcctggcctcaagcatgagctactgtgcccagcctaaataatctttgtctaatctaagatcacaaagtttttctcctatgttttcttttagaagttttatagttttaggtttatacatataggtccatgacccrtttcaagtccatttttgtatataagaagagatatgaagttcaattgtttttgtatatggatatccagttattttggcaccatttgtaaaagactatcacttttcactaaattgcttttgcatctttgttttaatgatacatatcactgcacacacacacacacacacacacacacacgcagtgttgttaactgggtccctatgtgaaatgtatttcttactgtggactgcagtcagaaaagtttgaaaggcagtgctatgatggctacctgaattacttttttctctctctctggtctcctaatcattcttgtctatcacttccat

SEQ ID NO: 136047 - DNA, 499 bp, Homo sapiens
tgtggattatgggatgcccagcacaggcttctttctttccatcgtccacgcatgaagcagtgctaggatgggggaagagtgtgtgcaagtgcctcagcctgaatgtgaatcagaatacattccaaagacaaacacaaacgcttttggattatccatggctttgttttcctcatacccttcccttgrtgtattaaagggctccaggagtggagcacatgcatttattcacacatgtgtctttctgcaaaactcaaacctcattatgtctcaatgagaaatcaagcacccgacatttcctttggaagcaaattcataaagaattcaagttagaaaacagtatactatgaaaagcataaatttaagagcaataccttgatatgaaagccactccccagtcttgatttgttgataaaattatactgtggtattctccaaccaatttcactgacgtactcatgtttatattttgctggcaagcttctatttgaggcaggcctcc

SEQ ID NO: 136048 - DNA, 499 bp, Homo sapiens
tgtggattatgggatgcccagcacaggcttctttctttccatcgtccacgcatgaagcagtgctaggatgggggaagagtgtgtgcaagtgcctcagcctgaatgtgaatcagaatacattccaaagacaaacacaaacgcttttggattatccatggctttgttttcctcatacccttcccttgatgtattaaagggctccaggagtggagcacatgcatttattcacacatgtgtctttctgcaaaactcaaacctcattatgtctcaatgagaaatcaagcacccgacatttcctttggaagcaaattcataaagaattcaagttagaaaacagtawactatgaaaagcataaatttaagagcaataccttgatatgaaagccactccccagtcttgatttgttgataaaattatactgtggtattctccaaccaatttcactgacgtactcatgtttatattttgctggcaagcttctatttgaggcaggcctcc

SEQ ID NO: 136049 - DNA, 499 bp, Homo sapiens
tgtggattatgggatgcccagcacaggcttctttctttccatcgtccacgcatgaagcagtgctaggatgggggaagagtgtgtgcaagtgcctcagcctgaatgtgaatcagaatacattccaaagacaaacacaaacgcttttggattatccatggctttgttttcctcatacccttcccttgatgtattaaagggctccaggagtggagcacatgcatttattcacacatgtgtctttctgcaaaactcaaacctcattatgtctcaatgagaaatcaagcacccgacatttcctttggaagcaaattcataaagaattcaagttagaaaacagtatactatgaaaagcataaatttaagagcaataccttgatatgaaagccactcyccagtcttgatttgttgataaaattatactgtggtattctccaaccaatttcactgacgtactcatgtttatattttgctggcaagcttctatttgaggcaggcctcc

SEQ ID NO: 136050 - DNA, 499 bp, Homo sapiens
tgtggattatgggatgcccagcacaggcttctttctttccatcgtccacgcatgaagcagtgctaggatgggggaagagtgtgtgcaagtgcctcagcctgaatgtgaatcagaatacattccaaagacaaacacaaacgcttttggattatccatggctttgttttcctcatacccttcccttgatgtattaaagggctccaggagtggagcacatgcatttattcacacatgtgtctttctgcaaaactcaaacctcattatgtctcaatgagaaatcaagcacccgacatttcctttggaagcaaattcataaagaattcaagttagaaaacagtatactatgaaaagcataaatttaagagcaataccttgatatgaaagccactccccagtcttgatttgttgataaaattatactgtggtattctccaaccaatttcacygacgtactcatgtttatattttgctggcaagcttctatttgaggcaggcctcc

SEQ ID NO: 136051 - DNA, 595 bp, Homo sapiens
acggccactctgtgagtgtctktcttatgcggttgagataaggactgagatacgccctggtctcctgcagtaccctcagcttactaggatggggaaaaaactccgccctggtaaatttgtggtcaaaccggggggggggtcttgaaccctgttttctattgtttaagatgtttatcaagacaatacatgcaccactgaacagagacccttatcagtagttctgcttttgccctttgccttgtgatctttgttggacccttatcagtagcagtagttctgcttttgccctttggcctgttccctcagaagcatgtgatctttgttctgctttttgccctttgaagcatgtgatctttgtacctactctgttcttacaccccctccccttctgaaacccttaataaaaaacttgctggtttgaggctcaggtgggcatcacggtcctaccgatatgtgatgtcacccctggcgacccagctgtaaaattcttctgtttatactctttctctttatttcttagccagctgacacttatggaaaaatagaaagaacctacgttgaaatattgggggcaggttcccctgataatccccct

SEQ ID NO: 136052 - DNA, 609 bp, Homo sapiens
aacggccactctgtgagtgtctgtcttatgcggttgagataaggactgagatacgccctggtctcctgcagtaccctcagcttactaggatggggaaaaaactccgccctggtaaatttgtggtcaaaccggggggggggtcttgaaccctgttttctattgtttaagatgtttatcaagacaatacatgcaccrctgaacagagacccttatcagtagttctgcttttgccctttgccttgtgatctttgttggacccttatcagtagcagtagttctgcttttgccctttggcctgttccctcagaagcatgtgatctttgttctgctttttgccctttgaagcatgtgatctttgtacctactctgttcttacaccccctccccttctgaaacccttaataaaaaacttgctggtttgaggctcaggtgggcatcacggtcctaccgatatgtgatgtcacccctggcgacccagctgtaaaattcttctgtttatactctttctctttatttcttagccagctgacacttatggaaaaatagaaagaacctacgttgaaatattgggggcaggttcccctgataatccccctagtgctgtctcgt

SEQ ID NO: 136053 - DNA, 609 bp, Homo sapiens
aacggccactctgtgagtgtctgtcttatgcggttgagataaggactgagatacgccctggtctcctgcagtaccctcagcttactaggatggggaaaaaactccgccctggtaaatttgtggtcaaaccggggggggggtcttgaaccctgttttctattgtttaagatgtttatcaagacaatacatgcaccactgaacagagacccttatcagtagttctgcttttgccctttgccttgtgatctttgttggacccttatcagtagcagtagttctgcttttgccctttggcctgttccctcagaagcatgtgatctttgttctgctttttgccctttgaagcatgtgatctttgtacctactctgttcttacaccccctccccttctgaaacccttaataaaaaacttgctggtttgaggctcaggtgggcatcacggtcctaccgatatgtgatgtcacccctggcgacccagctgtaaaattcttctktttatactctttctctttatttcttagccagctgacacttatggaaaaatagaaagaacctacgttgaaatattgggggcaggttcccctgataatccccctagtgctgtctcgt

SEQ ID NO: 136054 - DNA, 414 bp, Homo sapiens
ctataacaagacagaagactgagtggcttaagcaacagacatttttctcaaagttctgaaggctggaagtccaagagcatggtgccatctgggttggattctggtggcggccctcttactgggtttggagacagccaccttcttgctcttgtcctcagatggtctttcctgtgtgtatacggtctggtgtctcttcctcttcttggaagaacacccagtcctactggattaggggcccatccttatgaccccatttaaccttaactacctcctcaaatgccctacctccaaatacagtcagcacactatgggttagracttgaacatgtgaattttagggagatacaagtcagttcataacaggactcaatcctaagtatatgaaaggccatatctgaaaaggataccaattgg

SEQ ID NO: 136055 - DNA, 596 bp, Homo sapiens
taaataacttttccaaagatatatagatcctagattcacacccgagcagtccaaatctagaactcgtggcattgcggatgactcccaggaatctggcttgaacaaccaggtgcatgtattgagaatggggagactagagaagaaacagtatcaagagcctacaytggggcttccaagtgatgccccaaggactcactaaaacatcagaaagaacatttttaaaaaggaatccattacaggggtgctagaaaataagaaaagatgccatctatacagcaaaagtttcaagaaattccaagaagataaatttttgcttagaatctcaactttaaggccgagaactgttctctaaagcaaggttccccttgagcaaggattcttaacctcaggtccgtggggaagcaattgccaatcaagagaattctggaagttcatgaagctggggagggggtgatttacatatttatttgcatttacctttagatgaaatttagcatgttttcaaatacaaatgtaagcaacaaaccagagtattggtagcaataaccataacttgtcatcaatagaaattcatcattttcatatcatctaacagt

SEQ ID NO: 136056 - DNA, 413 bp, Homo sapiens
cactgcactccagcccgagcaacagagcgagattccatctccacaaaaacaaaaaacaaaaaaatgggtcccaaaaggtccaccctttctgcaagcaggtgaatgtagccaggctaatataatggactttgatttctttagatgaaagagaaattatgatgcaaagtacaaagcactttatagttatgatacataaattccaggtgtracccattttcagtgaacttctggactcaagtacaagacagaaaaaaacgtttttgttatactttagtaactcactcactctgtagatggacatggtgggtcccatttttataaaccacatttcttaaaaacctaaaattatcttccaggtgaaaggaaagcaaaataatctcagcaaacattttagatgtagaaataaattattc

SEQ ID NO: 136057 - DNA, 413 bp, Homo sapiens
cactgcactccagcccgagcaacagagcgagattccatctccacaaaaacaaaaaacaaaaaaatgggtcccaaaaggtccaccctttctgcaagcaggtgaatgtagccaggctaatataatggactttgatttctttagatgaaagagaaattatgatgcaaagtacaaagcactttatagttatgatacataaattccaggtgtaacccattttcagtgaacttctggactcaagtacaagacagaaaaaaaygtttttgttatactttagtaactcactcactctgtagatggacatggtgggtcccatttttataaaccacatttcttaaaaacctaaaattatcttccaggtgaaaggaaagcaaaataatctcagcaaacattttagatgtagaaataaattattc

SEQ ID NO: 136058 - DNA, 479 bp, Homo sapiens
aaaagcagcccagggaatggggaaaattccctgtctccaaaacaggagatgaagccactgtgaagccaatagcaaaaaagtgatcaggccagaaatcctgctgactcaggaaattctattctgccgttagacgaagctaaatatcagagcacctactctgccgtatattcttaatagggttcctgtacttagctatgtaacagcctatggggtttaactcattcgctaaagaaacatattgaatgaggaccctgggccaaagcaccacatatagtcgtccatcggtaaagtggggcataagtggrgattggtcatagatttggggattcaaaggtgctcaaatctcttatacaaagtgatgtaatgagtaagaaggaactaagcgcacacattctctgagcacctgccacgcgcaaacacagtgctaaatgcttccacatgtattatctttttaaaatgacttttttttttagataaga

SEQ ID NO: 136059 - DNA, 479 bp, Homo sapiens
aaaagcagcccagggaatggggaaaattccctgtctccaaaacaggagatgaagccactgtgaagccaatagcaaaaaagtgatcaggccagaaatcctgctgactcaggaaattctattctgccgttagacgaagctaaatatcagagcacctactctgccgtatattcttaatagggttcctgtacttagctatgtaacagcctatggggtttaactcattcgctaaagaaacatattgaatgaggaccctgggccaaagcaccacatatagtcgtccatcggtaaagtggggcataagtggggattggtcatagatttggggattcaaaggtgctcaaatctcttatacaaagtgrtgtaatgagtaagaaggaactaagcgcacacattctctgagcacctgccacgcgcaaacacagtgctaaatgcttccacatgtattatctttttaaaatgacttttttttttagataaga

SEQ ID NO: 136060 - DNA, 479 bp, Homo sapiens
aaaagcagcccagggaatggggaaaattccctgtctccaaaacaggagatgaagccactgtgaagccaatagcaaaaaagtgatcaggccagaaatcctgctgactcaggaaattctattctgccgttagacgaagctaaatatcagagcacctactctgccgtatattcttaatagggttcctgtacttagctatgtaacagcctatggggtttaactcattcgctaaagaaacatattgaatgaggaccctgggccaaagcaccacatatagtcgtccatcggtaaagtggggcataagtggggattggtcatagatttggggattcaaaggtgctcaaatctcttatacaaagtgatgtaatgagtaagaaggaactaagcgcacacattctctgagcacctgccrcgcgcaaacacagtgctaaatgcttccacatgtattatctttttaaaatgacttttttttttagataaga

SEQ ID NO: 136061 - DNA, 613 bp, Homo sapiens
cacagcctaagcctttatctacttctatcagaagtctctgccagaagggaaagagctgggtgaggaaatccatagtaacacattactcttatcttttatgtcctagattgccatttgcaagagagctattaatgaaagtcacacacctgaagctctaaaagcagcccagggaatggggaaaattccctgtctccaaaacaggagatgaagccactgtgaagccaatagcaaaaaagtgatcaggccagaaatcctgctgactcaggaaattctattctgccgttagacgaagctaaatatcagagcacctactctgccgtatattcttaatagggttcctgtacttagctatgtaacagcctatggggtttaactcattcgctaaagaaacatattgaatgaggaccctgggccaaagcaccacatatagtcgtccatcggtaaagtggggcataagtggggattggtcatagatttggggattcaaaggtgctcaaatctcttatacaaagtgatgtaatgagtaagaaggaactaagcgcacacattctctgagcacctgccacrcgcaaacacagtgctaaatgcttccacatgtattatctttttaaaa

SEQ ID NO: 136062 - DNA, 556 bp, Homo sapiens
atctgtccccatgattcaatcacctcccaccaggccacacctctgacattgggaatcacatttcaacatgagatttggaggggacaaacatccaaaccatattaagtggggtcctctattccagttcctcagtcctatgtacccastggaacatttcttcctgctgagccttgccctctctcacccaccctactgggtggaccccaagaagatagactccatgccaactctattgcatgtggcccacatctcttccacaagagacactcacacatgccccttgcctcagcaactctgggagtgtgggctgatcccatccacatagcaagggcttccctagtccctatcccaaagcggttggtcaaccctctcactctaggtttcgtgggaagaagcaacctccattggttttctggagcatgagcgaggccaccatcttcagtgttttccaggaaccatttgggatttctccaacaggtctctttgaactccttttactaggcttggggctggagagtagcacccagctctcttccagtggagagtagagccaggc

SEQ ID NO: 136063 - DNA, 546 bp, Homo sapiens
ttcctatttctcacagctatgctgtctaattccatagctagtagactacgtggccagccaaatttaaatggattgaaagaaaattaaacttaaaattcatttctcagtctcactagccgtatttcaagtgttcagtagccataggtagttagtggctactgaatatagccactatttatttatttatttatttatttatttatttatttatttattatttctttagagacagggtcttgctctgtcacccaggctgtagggctgtggtgcagtcatagatcactgcagccttgacctcctgtggactcaagcaatcctcccacctcagcctcctgagtagctggagactacagacatgcattaccgcaccccactgaatattattttaatttttttgtagataaaggttctcactatgttgcccaggctggtctggaactcccggcctcaagtgatcctccagtctcagcctcctaaagagttaggattccaggcatgagccactgagaatggctactrtatttagacattgcagctctagaacgt

SEQ ID NO: 136064 - DNA, 527 bp, Homo sapiens
taagccatatgtttgaatgagctccctgtgcttctaagaccttcatgtgcctttacaatctatgagaaaggatgatgtgccaggcacagtggcccacacctgcaatctcagtgctctgggaggccacggcaggagaaatgcttgaggccagaagttcaggaccagcccagacaacatagcaagaccctacctctgcaaaatttttaaaaaattagccagacatagtggtgcaaacctgtagtccaagctacttgggaggccaaggcaggaggatcacttgagcccaggagtttgaggctgctgkgagccacgattgctccactgcagtctaacctgggtgacagactaagaccctgtctcaaaaaaaaaaaaaaaaaaaaaaaaaagacaatagtgaagatgtctctattttctcctctaatgaaaaggtaaaaacataggttattttctctcctcggcctcctgagcctgcattgattagtgagacacagagcagcatggcaaattcgagtctgaagccagattcc

SEQ ID NO: 136065 - DNA, 561 bp, Homo sapiens
ttctatattctgttccattggtctgtgtatctgtttttatgacagtactatgctatttggttactatggttttgcagtatattttggagtccggtagtgtgatgtctcaagctttgttcttcttgctttggctatccagggtattgtgtggttctaggcaaattttaggactgttttttctatttcygtgatgaatgacactggtactttgatagggaatgcactgaatgagtatactgctttttgtagtatggccatttttaccatattaattctcccaattcatgaaaatgcaatgtgtttttatttttgcatatgcctgctgcaatttcttacatcagtgttttatagttttccttgcagagacatttcatttccttggttaaatttttccctaggtattttactttttgtagctactgtacctgcaattgctttcttactttctttttctgctatttgaatgttggtatatagaaacaccactgatttttctaagttgattttgtatcctgcaactttactgaattagacggtcagttcagaggtttttattttttg

SEQ ID NO: 136066 - DNA, 561 bp, Homo sapiens
ttctatattctgttccattggtctgtgtatctgtttttatgacagtactatgctatttggttactatggttttgcagtatattttggagtccggtagtgtgatgtctcaagctttgttcttcttgctttggctatccagggtattgtgtggttctaggcaaattttaggactgttttttctatttctgtgatgaatgacactggtactttgatagggaatgcactgaatgagtatactgctttttgtagtatggccatttttaccatattaattctcccaattcatgaaaatgcaatgtgtttttatttttgcataygcctgctgcaatttcttacatcagtgttttatagttttccttgcagagacatttcatttccttggttaaatttttccctaggtattttactttttgtagctactgtacctgcaattgctttcttactttctttttctgctatttgaatgttggtatatagaaacaccactgatttttctaagttgattttgtatcctgcaactttactgaattagacggtcagttcagaggtttttattttttg

SEQ ID NO: 136067 - DNA, 548 bp, Homo sapiens
gaattctctcagtttttgtttgtctgggaaatactttatttctccctcatctctaaaggatagctttgctgggcatagtattcctggctggcagtatttctctttcagctctttgactatgtatcagcccattctctcctagcctgtaaggtttctgcagagaaatgtgctattagtctaatggagagtcccttagatgtgatttgactctcctctttttctgtttttagaatttcctctttgtccttgacttgtgycaatttgacataaatgtgcctcaggcaaaaaagaaaaaagaaaaaaaaagacctttttgggtggaatttatttggagacttttgagattcctggctctagatgtccatatctctccccaaacttgggaagttttcagttattatttcattaaatatgctttctatgcttttttctttctgttttccttctgcaaatcccataacacaaatatttatttacttaatggtgtcccacaagtcttataggctttcttcacttcagagattcttacgcttgatcaagtcttctat

SEQ ID NO: 136068 - DNA, 372 bp, Homo sapiens
aacaaaccaaaatatgctgtagctctgtgccttagtacaagcttcccctcagaaaaatcctttccacttagttacctcaaactacttaccttttaggtatgtcctccatcctggggccttccctacattacactctcactccccagtggttgcttgttccatccttaagtctstgtactcttttcctgcccctcctttagatttgccattttataatacaaatatttgttcatatttatctattcctttggtctatgagatccttaaaagcagagatctggtcttgtttgactttataacttcatatcctagcatagtaccttcataaagtagctattcaatagtagtaataataatgtcaatgatgatgat

SEQ ID NO: 136069 - DNA, 566 bp, Homo sapiens
cagcctacaccttttcctgctggggttccctcttgcaaataagaaataagtattaattgttatttcattatgcaaagagtacttgtattgctagttccattctattctggaagtgcattgtgagcataaagtaacagcctcttagggtacctgtgttatggagacaccgaatatagtaattgagtaattctacactggactcaaggaatctacagtgtaattgaggacmcaggctgcacaggtttgcagcacataaaaagcagtacaaggcagggcctgatcaaatggttgagcgaatgatccagttagtcagtgctgtgggaatatagaagagtgaagagatgagtgtgagtccaggcagtcataaaagtctccaagaaggtggagcttgggtacaaccttaaagaatgggtagaatctggttaggtgaaggatgatggagaggacgtctttcagtgggagtggatttgccatggtatgggagtaaatggaagcaagaagcagaacttagcagagcctagcaaggcataggttgggtcaaaaccttgacctcagtctgaaaatta

SEQ ID NO: 136070 - DNA, 566 bp, Homo sapiens
cagcctacaccttttcctgctggggttccctcttgcaaataagaaataagtattaattgttatttcattatgcaaagagtacttgtattgctagttccattctattctggaagtgcattgtgagcataaagtaacagcctcttagggtacctgtgttatggagacaccgaatatagtaattgagtaattctacactggactcaaggaatctacagtgtaattgaggacacaggctgcacaggtttgcagcacataaaaagcagtacaaggcagggcctgatcaaatggttgagcgaatgatccagttagtcagtgctgtgggaatatagaagagtgaagagatgagtgtgagtccaggcagtcataaaagtctccaagaaggtggagcttgggtacaaccttaaagaatgggtagaatctggttaggtgaaggatgatggagaggrcgtctttcagtgggagtggatttgccatggtatgggagtaaatggaagcaagaagcagaacttagcagagcctagcaaggcataggttgggtcaaaaccttgacctcagtctgaaaatta

SEQ ID NO: 136071 - DNA, 527 bp, Homo sapiens
agctcagatctttcctgtttcatgtttggacaatcataataacctgactccagactttgctcaaagtcgtgttttgcatgctrttaaaaacttaacctgctcaaaggatgactttgattttgccactgcctagttcaagaatcttctgtaggttctacttcttaatgaatttagacaccttagaacatgcattagcaaactatgatctgtgggccaaatatggcctgccctgtattgtaaataaagttttgttggaactcagctgtgctcattggtttacatgttatcaatggctgtttttatgttacaactacaaagttaaacagttgtaacagagaccttatagcctgcagagcttcaattatttaccatctgaccctttatgcttcaaagtttaccactgatgtctcaaaataagaataacttctctttagccaaccactctgctagtggctttacatacattttagcttatccttgaaataatcttatacagtaagtactgttactttttctgttcacagatg

SEQ ID NO: 136072 - DNA, 522 bp, Homo sapiens
aagaattcttactggataagagactaaggctctacttcatgagacagagaaagagaaagagagagagagagagaaaaaaaaaactccccatgagacaattattaacatgatttggatatttgtcctttccaaatttcatgttgaaatgtaatcccaggccaagcatggtggcttatgcctgtaatcccaatattttgtgaggctaaggtaggtgkactgcttgagctcaggagtttgagaccaacctgggcaacatggcaaaaccccatctctaccaaaaacagaacaaattagctgggtgtggtggcacacacctgtggttccagctattcaagaggctgaggtgggaagagcacttgagacttgagcctgggagggagagattgcagtcaacaccactgcacaccaacctgggtgacagagtgagacccccgtctcaaaacaataaataaataaaacagaaaaaaataaaaaagaactgtactccccattgttggaggtgaggcctcatgggaagtgttt

SEQ ID NO: 136073 - DNA, 557 bp, Homo sapiens
ccactgaaggccttaggagaaaagactgaggtttcctgaagaagaaattctcttaagactgcaacatagaaaccctgccagagttgctgggcacagtggcgcaggcctgtaatcccagcactttgggaggccaaggtgggtggatcacctgaggtcaggagtttgagaccagcctggccaacatggtgaaaccccatctgtattaaaaataaaaaattatccaggcgtggtggcaggcccctgtaatcccagctactcgggagactgaggcaggagaattgcttgaattagggtggtggaggttgcagtgagccaagatcatgccactgcactccagcctgggtgacagagtgagactctgtctcccccmccccccccaaaaaaaaaaaaaaaaaaaaaaaatgaaaccctgccagagttcttagcctgcccggtctgcccagtctgccctatagactttggactcaagccctgcaagcctcacctcttacctgaattttcagtctgctgacctgctctgcaaattttagacttgccagctcccagaattacatgag

SEQ ID NO: 136074 - DNA, 557 bp, Homo sapiens
ccactgaaggccttaggagaaaagactgaggtttcctgaagaagaaattctcttaagactgcaacatagaaaccctgccagagttgctgggcacagtggcgcaggcctgtaatcccagcactttgggaggccaaggtgggtggatcacctgaggtcaggagtttgagaccagcctggccaacatggtgaaaccccatctgtattaaaaataaaaaattatccaggcgtggtggcaggcccctgtaatcccagctactcgggagactgaggcaggagaattgcttgaattagggtggtggaggttgcagtgagccaagatcatgccactgcactccagcctgggtgacagagtgagactctgtctcccccccccccmccaaaaaaaaaaaaaaaaaaaaaaaatgaaaccctgccagagttcttagcctgcccggtctgcccagtctgccctatagactttggactcaagccctgcaagcctcacctcttacctgaattttcagtctgctgacctgctctgcaaattttagacttgccagctcccagaattacatgag

SEQ ID NO: 136075 - DNA, 355 bp, Homo sapiens
gcgtggagggcggccgggcccaggcggcagcgctgggtgccccggtctctagcgtctaagggtagcagctttaagagcggcccttcagggaagggatccgagtccggagccatcgcacacagatgaaccargcagacgaaaccagattaggaaacccacccggcccacaaaaagcggaacaccgagctcgcaggccggaagcagattgcgcgcatgcgctagggaagactgcgttgctagcagctgagtgaaggccgaaagggccaatggaaacgttagacgacgctcgggcctctgggtagagcgttggtgtccgctttcgtgaaatcgagttgcctaacccagagctttcccg

SEQ ID NO: 136076 - DNA, 355 bp, Homo sapiens
gcgtggagggcggccgggcccaggcggcagcgctgggtgccccggtctctagcgtctaagggtagcagctttaagagcggcccttcagggaagggatccgagtccggagccatcgcacacagatgaaccaggcagacgaaaccagattaggaaacccacccrgcccacaaaaagcggaacaccgagctcgcaggccggaagcagattgcgcgcatgcgctagggaagactgcgttgctagcagctgagtgaaggccgaaagggccaatggaaacgttagacgacgctcgggcctctgggtagagcgttggtgtccgctttcgtgaaatcgagttgcctaacccagagctttcccg

SEQ ID NO: 136077 - DNA, 637 bp, Homo sapiens
gttcagtatcagcatccactgagagtctggaacatatcccctgaggatgaaggggcactatgtacttagaaaaaaatggtacacaccaggtgagatggctcatgcctgtaatcccagcactttgggaggccaaggcaggtggatcacctgaggtcaggagttcgagaccagcctggccaacatggtgaaaccccgtttctactaaaaatacaaaaattcgtcaggcatggtggcatgcacctgtaatcccagctacccaggaggctgaggcaggagaattgctggaacccgggaggcagaggctgcagtgagccgagatcacgccactgcactccagtctgggtgacagagcaagactccatctcaaaaaaaaaaaaagtgatacagaggcagtaactgattctgagaatattccatgaaccgtacggaaagtaaacaggatgaagtcattctgttcttttagaaaaggaatttggtcccgagcttaactcataccataaaacgagatgccatgtttcccctgccaaatttgattgggagtggcaaaactaattcattatttatttctgtctttaaacccagaagctattttgattttwaaatttttttctataaaagatcaaatggtaactgattt

SEQ ID NO: 136078 - DNA, 466 bp, Homo sapiens
aagctagagttccagactgcgcctaagcttcatgagacctctcctcgtctgcacagacgagtggccaacwctggagcccaggctattgcttcccagtctggtggtgaatcgtccatagtctggtaagtgtaaatatcttttcccttcttcccttcccattgcaatttgcttattctatcaatctgcttattaactgtttattattatatcatttgcttatatctgcattgccatttacatgggataaaggttgtttacccttaaaggtattgtgtgtgtgtcttttcttctcccttcatgtgtttcccacacagaagagtcaggtactttatatggtattaaaaaattatgctaacctctgttatttctggaagtgacacagcaggtaaatgtgggtcaaatttgtgtgtggggggtgaggggaggagacataattcacataaaattcatccttttaaatggcacc

SEQ ID NO: 136079 - DNA, 597 bp, Homo sapiens
ttcctcctggcactgttgattggtccagagacaggcacaatccctgaaatgatcaagaggagtccttagaacagttttagaaatggaaactcagaaatggaagtttctatcttttaatatgccaggaatgtacctataaagataggagtgctgggagcaattaggatcatgttttctaccctgagaatgagagaaggtaggagtcttcactagtctgatatttaagtcaaactagtcataaaatatattcaaggtccagtaaatgtcatttaaatctaataagaaacataaaaaagaaatatgaaatgyaattaggtggtgaaaaaagttagctaaaccctcagatagcagaattcatttattgaaatacaatgaaaatattaagtaaaggggtgtcttgagccctgttgtcagtagcaggagaggtatcaatctgcatgacccttctttcaggtctctcatccttgccccaaatcacacaagtcaataagcacttttaacatactgagattgtaatactatttccttcttcagttaaaaaaattgactttttggggaggtttagaattaaatatagaaatagttaagtatataaaa

SEQ ID NO: 136080 - DNA, 597 bp, Homo sapiens
ttcctcctggcactgttgattggtccagagacaggcacaatccctgaaatgatcaagaggagtccttagaacagttttagaaatggaaactcagaaatggaagtttctatcttttaatatgccaggaatgtacctataaagataggagtgctgggagcaattaggatcatgttttctaccctgagaatgagagaaggtaggagtcttcactagtctgatatttaagtcaaactagtcataaaatatattcaaggtccagtaaatgtcatttaaatctaataagaaacataaaaaagaaatatgaaatgcaattaggtggtgaaaaaagttagctaaaccctcagatagcagaattcatttattgaaatacaatgaaaatattaagtaaaggggtgtcttgagcyctgttgtcagtagcaggagaggtatcaatctgcatgacccttctttcaggtctctcatccttgccccaaatcacacaagtcaataagcacttttaacatactgagattgtaatactatttccttcttcagttaaaaaaattgactttttggggaggtttagaattaaatatagaaatagttaagtatataaaa

SEQ ID NO: 136081 - DNA, 476 bp, Homo sapiens
ttgtcagtagcaggagaggtatcaatctgcatgacccttctttcaggtctctcatccttgccccaaatcacacaagtcaataagcacttttaacatactgagattgtaatactatttccttcttcagttaaaaaaattgactttttggggaggtttagaattaaatatagaaatagttaagtayataaaatctatagtattaaggctctggtattaaaataagagcaatatgttcatatttggttatatactatttataatgtttaatatctatctatattagttgtctattgttataaaacaaattatcccaaaatgtattgacttaaagtaacaaaactttattatttcatagtttctgtgggttaggaataaaggaaaagatttgttggatgcctctgccttaatgtctcttcaaggctgcagtcaaggtgttggctggggctgctgtttcatctgaagactcaactgggaaa

SEQ ID NO: 136082 - DNA, 471 bp, Homo sapiens
gcctggcctaacaggtcagaactgagctgacagacactagggtatgggaaaatatatatttgctcaaagagtgctgatttcagtctatattcaacttgtatttcttaaataaatcgccattcagacagggctaaaagtactgctcagctacagttatctcaaaattaagagtttaattttcaaaaaagaagtaatactcagtagtcagccacaccttgtgtcaaagcctcctccttcattttctagataagtgaccttgaccagattccccaaactccttaaacgtgttttgctcatctrtaaaattaccacaataataactacctcacagcttggttgtaaataataaacgcaattatatatgtatagtgcttaatgataatagcatttatataacatttgctatgtgccggtcactggtctaagcacttgacttgtatctaacttagtatagtcttcacaacaacttta

SEQ ID NO: 136083 - DNA, 471 bp, Homo sapiens
gcctggcctaacaggtcagaactgagctgacagacactagggtatgggaaaatatatatttgctcaaagagtgctgatttcagtctatattcaacttgtatttcttaaataaatcgccattcagacagggctaaaagtactgctcagctacagttatctcaaaattaagagtttaattttcaaaaaagaagtaatactcagtagtcagccacaccttgtgtcaaagcctcctccttcattttctagataagtgaccttgaccagattccccaaactccttaaacgtgttttgctcatctataaaatkaccacaataataactacctcacagcttggttgtaaataataaacgcaattatatatgtatagtgcttaatgataatagcatttatataacatttgctatgtgccggtcactggtctaagcacttgacttgtatctaacttagtatagtcttcacaacaacttta

SEQ ID NO: 136084 - DNA, 597 bp, Homo sapiens
ataagtcaggtacagaaagataaatattgcatgttcttagtcatatgtgaaagctaaaaaaaaaccttatagaagtagagagtagaattgtggttatcagaggctgggaagggtaaggggagatgtgtatagggagaggctggtttacggatacgaagaaacagctagattagaggataagttctagtgttttctagaacacatgtaaggtgaatatggttaacaataatttagtgtataggttctaaaagccagaagagaggattttgaatgtacacaacacaagcaatgataaacatttgagttaataaatatgctaataatcaaatatcctgattttgtcactatacattgtatacatgtattgatatatcactccgtacatatatatcactctgtatatatagatcacataaatatgcacagttattccatgtcaactaaaaagggaaaaaatccttccttacaaagatcactgtttggtaagcagtttaattcactgtaataaaagcatctcacaatgcgaaaaaaagtggggggcgtatttggaggtaatgagaagctaactgctstttgctatcataggagaaaatatga

SEQ ID NO: 136085 - DNA, 556 bp, Homo sapiens
cccggccagggggccctgggtgccgcctccgctgcctcctcgagagcagctaccttgaagctccaaaagacagtttggactgatacgtttccttctgacagcccaatagctgtaaaaccgaaagaaaggcaagactgctggagaaatccttttattgtagtcatttggcagcattaatgtaatcaaaattcctttatgtattcaaagrcagtgctgctgcagtaattattaaatgattgaaattgcagacaaaacttggaaaattaaagtaggttaagtaaggtactgttgacaaacaacttctcccagaaagctggagtccaatgacaatcaaatgtggcagtgtttttcgtttaaacatatcagaatacaagttcaaggagcatcatcacagaagtgctagatgcttttgaccatatgttttctccggctttttccccaatgagacagtactttaaaataataataatagtaatcataataaagtatacaatgttagaattgtagtagaaacatctctatcagcctttcctcaatgctttcctgtttccggcta

SEQ ID NO: 136086 - DNA, 567 bp, Homo sapiens
aagactgctggagaaatccttttattgtagtcatttggcagcattaatgtaatcaaaattcctttatgtattcaaagacagtgctgctgcagtaattattaaatgattgaaattgcagacaaaacttggaaaattaaagtaggttaagtaaggtactgttgacaaacaacttctcccagaaagctggagtccaatgacaatcaaatgtggcagtgtttttcgtttaaacatatcagaatacaagttcaaggagcatcatcacagaagtgctagatgcttttgaccatatgttttctccggctttttccccaatgagacagtactttaaaataataataatagtaatcwtaataaagtatacaatgttagaattgtagtagaaacatctctatcagcctttcctcaatgctttcctgtttccggctactcacttaaaatagaccaatctacttgtgaagtatcagggacaatattggcatacacaataaacagctttgattataaagctgttttttttttttttgtacatctattggagaacttgagagtgccccaataaacttacag

SEQ ID NO: 136087 - DNA, 571 bp, Homo sapiens
tttagttttttgcatgccaattaaaataccattgaagtaagatttgttatagataagctgaaatacaacggacttgattgactctaagttaaaagggagtttaaagaaggactcattttcccctttttaaactttttgtttctgtataaaggacaagaacaacaacagggagggattcagggaagtttatgattgagaattactatggggttgcctygagcttttccctctactataaaatacttacagagtaaagagggagtacatgaaaaaagatacaagcgtttgccttaaagatctctataaaaaaaagtaatcatttaaaagagtaagttttagtggaaactgctatttctatccattctggctttctgctcatcaagctgtgtttttgtgtgtgtctgtctgtatatgtgaagaactctcaaattactgttattttccttcattttgttttgtttttccttcaagttttgaatattttacagcaataacagaaaacagaattgttcagagtccaacattcctcattagtcattcaccacaacttgtaatgagacggataaagaca

SEQ ID NO: 136088 - DNA, 493 bp, Homo sapiens
agaatattcctttaagaatcctccagaaatgttcaggaatggtcctgaaatgttccagaaagggtgtctacagatctacccatgccatgctcccgtaggagttgccccagctgtgtctataatggtagatgagagggagaagaggtccccttctccatctccacgacscttcatgagtacaagggctgcctgactgttgggttaagagccacagactttcctcactaagcccagaactgtacctgtgcctctgctgaaagaaacttcccacaagtggaaagttcagggactcaaggcctgtggtcttgtttcttttgtcccatggggtgttccttaatgtggtgcactccccctccctctaagagtaggagtctctgagaacgagactactgtgaatgctgctgttctactgggtctagccacccagtggggctgccacacttcaggctggtactaggaagtgtctgcaagagattcagtgatgtgacatgtc

SEQ ID NO: 136089 - DNA, 385 bp, Homo sapiens
atcacaaaacaagcatggaaaaacctgcccccatgattcaattacctcccaccgggtccctgccaagacacatggggattattggagctacaattcaagatacgattcrgtggggacacagccaagtcaatcagtagttcttcaaacgtatgttagatgtgttagtttgtttttgcattgcaataaggacatacctgaggctgggtaatgtataaagaaaacagatttattggtcttactgttctgtatggcacctgcacctatcaggcttccagtgagacctcaggaagcttacaatcatagcagaaggcaaaaggggcataggtgcatcacatggctggagagggaatgagagatacagggagagagggaggagatgccagcc

SEQ ID NO: 136090 - DNA, 368 bp, Homo sapiens
tgtaggacttattcactatcacaaaacaagcatggaaaaacctgcccccatgattcaattacctcccaccgggtccctgccaagacacatggggattattggagctacaattcaagatacgattcagtggggacacagccaagtcaatcagtagttcttcaaacgtatgttagatgtgttagtttgtttttgcattgcaataaggacatacctgaggctgggtaatrtataaagaaaacagatttattggtcttactgttctgtatggcacctgcacctatcaggcttccagtgagacctcaggaagcttacaatcatagcagaaggcaaaaggggcataggtgcatcacatggctggagagggaatg

SEQ ID NO: 136091 - DNA, 574 bp, Homo sapiens
tctttcttaagagaaataaactgaaaagtaatagtatctgaaaacttcagggagatggggacattatttattgtggggtagttaaatcttttttcagctaaatgcctaaaagagaaaaaataatggcttattgagatcaaagcatgaaacaatctaaggcagaaaaaagcttatacactttgccttgaatagtttggcacaatacctattccarcatttcctcagtgaatttaaaaatattgtttattgttcttcaaagtatatttgaaaaaaattctttaaaaaaggagtttgatcttgtaaaacataaaggcaatataaatcaaattgttgctattcaatgccaagtagcattcaatggcctgaggaattattttcatgtagcattggctcacactcatgttggttgacttggctgggtttctagagttctttggattttacatggaggtgccacaaatctactaattgagctatatgcccttcaatgctacgcagcaaagtgttgtctgtggtcagttcagttagccgtgggctaagtctagtaaaaactccaccggaagagaaaacataa

SEQ ID NO: 136092 - DNA, 586 bp, Homo sapiens
gaaaaataaaataaaattattttccgtcgtgatcctcccaccacagttatatttatttaatcatgaacttccaatgactaccctattctataccttgtattttattttattttgttttttattttaagcttttattttaggttcaggggtatgtgtacatgtttgctatgtaggtaaatcgtgtgtcatggtggtctagtgtacaacttattttgtcacccaggtaataaacatggyacccgataggtagtttttcaaacttcaccctcctgccaccctccaccctcaagtaggcccccatgtctgttgttcccttctttgtgtctgtgtgtactcagtgtttagcttccacttacaagtgagaatatgaggtatttggttttctgttcctccatcagtttgcttaggataatggcctccagctccatccatgttgctgcaaagcacatgatctaattctttttttatggttacatggtattctatggtgtatgtacaacattttttatccagtctacctttgatggacatttaggttgttgcatgtctttgctattgtgaatagtgctgcaatgaacgtacatgt

SEQ ID NO: 136093 - DNA, 439 bp, Homo sapiens
tggtgcacaggaatacaagtgatttttgtacattggttttgtaacctgaaactttgctgaagttgtatatcacatcaaggtctaccttcattttaattaaattagaatgaaagaatatttataattggataartttagacaaaaattacgtttaaacctttctcttttttggggcactataatgttaagtttcactcaattcaattctgtaagatacagttggttcttatttgtagcttacaagggttgagcaacagtaaaaactatctacatacttgttaatagttcatgcttcttaatgaacatagatcagaattgataatctagttttcattactttttatattatttaacttccacattaagtgatctgtaatagttttcacatgctcctgaccacattctatgtgggaagcagggaatcttcaaataatatata

SEQ ID NO: 136094 - DNA, 439 bp, Homo sapiens
tggtgcacaggaatacaagtgatttttgtacattggttttgtaacctgaaactttgctgaagttgtatatcacatcaaggtctaccttcattttaattaaattagaatgaaagaatatttataattggataagtttagacaaaaattacrtttaaacctttctcttttttggggcactataatgttaagtttcactcaattcaattctgtaagatacagttggttcttatttgtagcttacaagggttgagcaacagtaaaaactatctacatacttgttaatagttcatgcttcttaatgaacatagatcagaattgataatctagttttcattactttttatattatttaacttccacattaagtgatctgtaatagttttcacatgctcctgaccacattctatgtgggaagcagggaatcttcaaataatatata

SEQ ID NO: 136095 - DNA, 599 bp, Homo sapiens
agtttagacaaaaattacgtttaaacctttctcttttttggggcactataatgttaagtttcactcaattcaattctgtaagatacagttggttcttatttgtagcttacaagggttgagcaacagtaaaaactatctacatacttgttaatagttcatgcttcttaatgaacatagatcagaattgataatctagttttcattactttttatattatttaacttccacattaagtgatctgtaatagttttcacatgctcctgaccacattctatgtgggaarcagggaatcttcaaataatatataaaatttctactcaaaaagcatattttcttctcttttcaggatgaaacaaaaacattgcttttaagtgctccttaaaattttctgactcaaaagtagtatcattttccaagccatgaaaagacacggaagaacatgaaaagcatattattaagtgaaaacagacagtttggaaaggctacataccatatgattccacgtttatacattttggaaaaggcaaaaccatggaggcagtaaaagaatacatggttgccagggtgtgggaaaaatagagagacatacaaataagca

SEQ ID NO: 136096 - DNA, 599 bp, Homo sapiens
agtttagacaaaaattacgtttaaacctttctcttttttggggcactataatgttaagtttcactcaattcaattctgtaagatacagttggttcttatttgtagcttacaagggttgagcaacagtaaaaactatctacatacttgttaatagttcatgcttcttaatgaacatagatcagaattgataatctagttttcattactttttatattatttaacttccacattaagtgatctgtaatagttttcacatgctcctgaccacattctatgtgggaagcagggaatcttcaaataatatataaaatttctactcaaaaagcatattttcttctcttttcaggatgaaacaaaaacattgcttttaagtgctccttaaaattttctgactcaaaagtagtatcattttccaagccatgaaaagacayggaagaacatgaaaagcatattattaagtgaaaacagacagtttggaaaggctacataccatatgattccacgtttatacattttggaaaaggcaaaaccatggaggcagtaaaagaatacatggttgccagggtgtgggaaaaatagagagacatacaaataagca

SEQ ID NO: 136097 - DNA, 599 bp, Homo sapiens
agtttagacaaaaattacgtttaaacctttctcttttttggggcactataatgttaagtttcactcaattcaattctgtaagatacagttggttcttatttgtagcttacaagggttgagcaacagtaaaaactatctacatacttgttaatagttcatgcttcttaatgaacatagatcagaattgataatctagttttcattactttttatattatttaacttccacattaagtgatctgtaatagttttcacatgctcctgaccacattctatgtgggaagcagggaatcttcaaataatatataaaatttctactcaaaaagcatattttcttctcttttcaggatgaaacaaaaacattgcttttaagtgctccttaaaattttctgactcaaaagtagtatcattttccaagccatgaaaagacacggaagaacatgaaaagcatattattaagtgaaaacagacagtttggaaargctacataccatatgattccacgtttatacattttggaaaaggcaaaaccatggaggcagtaaaagaatacatggttgccagggtgtgggaaaaatagagagacatacaaataagca

SEQ ID NO: 136098 - DNA, 599 bp, Homo sapiens
agtttagacaaaaattacgtttaaacctttctcttttttggggcactataatgttaagtttcactcaattcaattctgtaagatacagttggttcttatttgtagcttacaagggttgagcaacagtaaaaactatctacatacttgttaatagttcatgcttcttaatgaacatagatcagaattgataatctagttttcattactttttatattatttaacttccacattaagtgatctgtaatagttttcacatgctcctgaccacattctatgtgggaagcagggaatcttcaaataatatataaaatttctactcaaaaagcatattttcttctcttttcaggatgaaacaaaaacattgcttttaagtgctccttaaaattttctgactcaaaagtagtatcattttccaagccatgaaaagacacggaagaacatgaaaagcatattattaagtgaaaacagacagtttggaaaggctacataccatatgattccacgtttatacattttggaaaaggcaaaaccatggaggcagtaaaagaatacrtggttgccagggtgtgggaaaaatagagagacatacaaataagca

SEQ ID NO: 136099 - DNA, 582 bp, Homo sapiens
ttgtcttttgtaacacaatttgcaaaagcagacagaatggtcttcttaaaaaggaaatctgatcttatcactcctgcgtgtaaaagccccatggatggttgcccttgaaataaaatccaagctcacaacagtggcccatagctgcttttggtctagctcctgtgctggtgtcttgagtcatacctcaaactacattccctttgcttgccaggcccctttcaagcgtctcttttgtgagttataaaaaggcaggcattctcacctcatgctgtcaatgcatgtgatcaattaggtctaaagtatttttctaaggtctgtgcacctttcaccctaggcctccatggagacattatccttgaccactctatcaagtaaatgcctggccccacccctccttccagctccatgttctcactcmttttcatcgtatctctggtgacaaataatggctggggcctattgcatcttgcatttcagaaaagctgaagttaataatatttccatttggggtcatttttggaaataagtactatctccccattacttatccttaatacattttttttaaataacacatctgta

SEQ ID NO: 136100 - DNA, 624 bp, Homo sapiens
catggcatcagttcttatgcttacattccatttatagttatcactttgcctttttcgcctctaactacccatctctagctgtcatggaatcaggtctcactcctgtattccatatctctgtgagttgtggcastatatccccactttcccaagtcagagaccatggtgatattctcactcttccttcatcttttctttttcttactgatgattcttcttatcaagtctattctgactctgcagtatcttcagactgacaataaaagcaatagttttatggacagtttctactaacaaataaccttaaacttacccattatagtagaaataatagtactgtatgataattgtctgttcatttgtccctttcacttgaaaaagtataaactccttaatggtagaaagtatgtgatagtctttgttatattccaagctcctcaaacatttattggaagttagtgtgtaataaaacaatttcttcagttagacatttgagataaattttaattttgagtaatgtaataatttcaatatttttgagtttaatagtgttgagtacacagtggctgaaattatatattggggcaatatgttaaagttttaccttgattgaggaaatagttt

SEQ ID NO: 136101 - DNA, 624 bp, Homo sapiens
catggcatcagttcttatgcttacattccatttatagttatcactttgcctttttcgcctctaactacccatctctagctgtcatggaatcaggtctcactcctgtattccatatctctgtgagttgtggcactatatccccactttcccaagtcagagaccatggtgatattctcactcttccttcatcttttctttttcttactgatgattcttcttatcaagtctattctgactctgcagtatcttcagactgacaataaaagcaatagttttatggacagtttctactaacaaataaccttaaacttacccattatagtagaaataatagtactgtatgataattgtctgttcatttgtccctttcacttgaaaaagtataaactccttaatggtagaaagtatgtgatagtctttgttatattccaagctcctcaaacatttattggaagttagtgtgtaataaaacaatttcttcagtkagacatttgagataaattttaattttgagtaatgtaataatttcaatatttttgagtttaatagtgttgagtacacagtggctgaaattatatattggggcaatatgttaaagttttaccttgattgaggaaatagttt

SEQ ID NO: 136102 - DNA, 474 bp, Homo sapiens
gaattccctcaagggagtgcaccaaaccgtccagtgacagagctgctgggattccaaagaaagaagcactaaacaccagggtgttcatagatcatttattagggagacttctgcacagtggggcaccctcgtctccttgcccagtgtctccttgtggatctcaaggatgtgcttccacatagcagcatcttcttcagatggacaaggagacactgggtgttctacccgaagctttaacttaaaataaaaataaaaacaaaaataaacccctagagaatatgatctctcagtagagttgtttcttgggatacacaggcaattcgtttcagtaccccctacatgcaccaacacctgctcgtactccagccccgacattgtctctgctgggcctgcatataggaaaagtctgccgttcatatacacaagtcttgcatcccacaaatgctayagttttgacccccgtttggttgaaaa

SEQ ID NO: 136103 - DNA, 536 bp, Homo sapiens
ttaacaccctcgttgggagttcaaggattgtctgcatttggcctgtggcagttctaataacaggagtcaattaatcaacsaatataaaagtgtttatctgacactgaccttgtgctaggcactttgctagatattatgggataaacaaagccctttgaggtagttaataaattttaagtgatcatgaccctaaggcgtatcttctgtttgaaaactgaacactggctgtttgttcaccaaaatagatactgaaagatcaacccaagggaggcttcctttttattttcccaaccaagtgccatgccagagtaatcactaatccactaaatcctaatcaattttggtgatctgagattattactgcctaaggagataggcttctagagtaagttcagtgtcaatggaaaccttgaaggattcagaaaacagacttgaaaactttcaaatagtttttcttccaacatttattgagtgcaacacagcatactaggtgctggggttgtaaagatgaacaagacatgggtcttctatgggat

SEQ ID NO: 136104 - DNA, 633 bp, Homo sapiens
tcagactgtcagtttatcatttctaggcctttagcctgtagtggacaacagtgacctgaggcatggaattaattggccaaaattgcataacagttggtataacaacatcattttcagtactacaaattgygtaatgtgtatgaggccactgttgggaataacagaatatatagaatgggaaagggttatgcacacccaggacagggaaggctttaattaaatcaacaagaattttttgactacaaacacaactccattatattacatggaggtaaaagcttggtgattaagttcattttatcaacatgtagtatataaaataatgagtcaagaagaagataagaattgtatccatgtaaagatggagaagtagttttaaagtaggaaaagtctcttaagaaaacttgcattataaaatggaaattggaatacagtacctactgacgaaatggaggaagccagcggaaggttttgtggaagagtgggtattagaactcctagttcgtgacctatacttgcttggggtctcagaaatcatgctggctcttaaattagaaatacagtctctttgaaagcatacatgtagttgaaagcagtcatttaaaaatttgctttttcattccctacctcccc

SEQ ID NO: 136105 - DNA, 515 bp, Homo sapiens
tgaattaaaacgagcaaatatagtaaatattatttagttatagttttcaggaaaggaacttattctttaactttttaattaagattaatccaaaaccttttctattttaaagtatatttggtagcttattacatctgtctagattatgtgtctaccttccccttttggtaactatatcactgaatattgcttctatgatgtcagtataaatataaggcctctgaacgagtctcctraaagtcattgtctaggattgtatacatagtaaaatgtatatgatttacttgaatgtgtatttataataggtcatttaaacaacaaaaccttaatgccagtgagaagattggaatttaattattgtttttcttcttcactgtgctatccttcaaggcacacttgttacaaatattaatacaaattctgaacttaagaatgtcagccagaatacagttaattatggttttactgagtcaggagtatagactatggaattttcaaaaattgatactgaaatt

SEQ ID NO: 136106 - DNA, 547 bp, Homo sapiens
gtggtattcccaattatttaggtaacactggagaaatccagagtatttatgtattttttacttgacttatttagctttttgtttgtttttttgttttgagacagggtctcactctgctgcccaggctagattgcagtggcatgatcttggctcatacagcctcaacctcctgggctcaagcaatcctcctacctcagcctcccaagtagctgggactacaggcatgtaccaccatgctcagctaattaaaaaaaaaaaattgtatggtctgggtttcaccatgttgcctaggctagtctggaatgcctgggctcaagtgatctgcccacctcagactcccaaagtgatgggattacaggcrtgagccaacatgcctgggcttatttagctttcttaatatgtgtctagtagaagaagatctcatttttagctccaaattttcattgcatccttagtatcatatagccttatgatagcatttttcaaagtgtggttcactagaatcatggaggtgacttgttaaaagctctaattcctggccgtgatg

SEQ ID NO: 136107 - DNA, 515 bp, Homo sapiens
attatggtgttccacaaataagctatactcctgaagctcggtcaggttgtgcttattacttaaatagtaacttgggtgatatatttatgtggcataccctgacaccttcacagaacataaacttttttgtactttatgccttaacaaccccttccaaatcacttgattaataatgattaactttctcttctagccttgagaaacaattgtctttctctgctttttctggtaacagctaaattgttaagcttatcctttttactaaagagcaggactcggctgtgcacctggctcacgcctataatcacagcactttgggaggtcaagtcacttcagcctgggcaacagagcaagattctgttcaaaaacaaaacaaaaacaaacaaacaaacaaacaaacaaatacagtagggctggacggccragtgcagtggctcacacctgtaatcccaataatttgggaggctgaagtgggagaatcacttgagctcaggggttcaagactatcctgggca

SEQ ID NO: 136108 - DNA, 564 bp, Homo sapiens
ctgcaggctaaatctgctttctcttctcctccttatatatggctgctttcttaagaagatggtagaattgagtaattgcaacagagattgtgtgagtcacaaagcctataatatttactatctgttcctttacagaaaaaaaattgccatatggtctagaccatatggatctctttgttaggagactaaggagaacatacctagactcatggcatttcggctctgccttattttacatatactggcacatggtaccattttgtaagaaaactacacatctctcttgcttcttcattttctcctttgtgggctggttacttgtttttaattgttatttgttcatccattcatttattccacaagttcttatggtgtacatacctggggacaagtgactaataaaatgtagctttatccagttaacttgtatagayaaataactgaccattactatagggagaagtgctatcaaggattatgactagaacagaaaggaaaggtatttgactcagctgaaggggtttgtgaaggtgtctgggaaaagtagatacttgagctgaggag

SEQ ID NO: 136109 - DNA, 448 bp, Homo sapiens
caactgtactaaggaagtaggagcaaatattcatttagtctgttttaagaactttagaattagatagagcaggtgttaatgatcccagttagaggagaaagaaattgaagattagagagactacatgatttgccagtattcagttagttcaacagtgtattttattttttggagcatatagtaattactgtgaattagattaggcatttaggcattaaggatgaaagattaaaaattgttgccaagaatgtgcaaccttatagtaggtgacattatttcaaaaattgatattttcaattagtgagagaagtgcyggtagaggtatgcattggaaactacagagaaaatactagtttgaaccacttgaaattgtcaatagtcaactatttttgacctacaaaaatggcacttttatgtaattcattctgatacacctaaatcagaatgg

SEQ ID NO: 136110 - DNA, 558 bp, Homo sapiens
tgtattcggggatgaatcactgcttgaagggtctaatctgtctccttattgtcctgtctggaagggtcacattatttgagtgtaactcctgagagcctggcgggtcttttcacacagatgttgatggatgctttgcagtccctcccatcccagcagatttctttgtgcctctttttacataggcacttaacctatgttgagggagcctcttttattaccagaaagaagacgttaaaggagtttaatcctcactgttggtaatagtttgttcttccccagtttgcatactcgggttttagttrgatatcgagctgcctcttttttaccatatcggtcttcattctattatttgtgttcttaaatgtcttgtgggaacattagaaaggtacctatgatggttgaatatctttagttttactatcattttctatagaattttaaaatctagttttaagaacacaagttggcaagctctggagtattttttgttaattatataaattatatatttatggcggtggattttttttccctacgtaactttggattgtacttgag

SEQ ID NO: 136111 - DNA, 529 bp, Homo sapiens
tcctctgtgccttggtctgtgttgccctctttgttggaaatggcccacttccctgattccagctcagcctggggttrccgagcctggctctgccctcgtccttgccacctggctgacgccaggccagtctcaggccttgcttggccctgctcccgacaaggcagctatgccttctgcatttcctccttttcacgtccggccccacttcccttcccagctaccaagtgactccatgtatgtgccctggaacccaaattcttatagttgccaatgcagtgtacacgagtaaatccacactcttatccatgaatgttcctgtgaggatgactttgtttggcaagggattactgcaaatggaaacagctctttgttaaacagtcattgattgagcactcacaaaaggccagacactgcccagctccaccgccctgcacaaaggcttgtcagcaccctatgcagcatagctcatttaatctccacgggtgaggagaagtgctggtatcacagtctgcacatgtggagattaggc

SEQ ID NO: 136112 - DNA, 353 bp, Homo sapiens
gtctgtggtgtctacttgttatggcacaggcattaacctggaccaatasaccaagctggcattccctgtgctgctatctctccctcctcctcctccaagaagcttttctgcactacggcagctgctggagcttctatagctcagaatgtctgacccctccagatgctcattcataccttgttcattctttctgcaaacatttactgtgcttcatctgcctgggcccatggggaagatcagacactgcccttgtgccagtaagtccgaaagacagctatggatacagaattgtaggaattggtgataggggttgtaattgagcaggaaggccagggcactgtgggaactcaaga

SEQ ID NO: 136113 - DNA, 601 bp, Homo sapiens
ttgccttttcaggtgccatttctactgcctaatacagtgccatttgccttgtgaagacccataaacattcattgtgttgaatgtaagatagagactctccctagtcttactgatctcagtaccccacaaatgattaagaatgatatgaaaaccagcagctgaggaacatcttattatttagttgtagcatattcataacaagtgtccttcaaggataaacatatattctctatttgtatttagcaagtaaaacttgtgttgacctttagtgcattatattcagcttttaacagtattatgtatgtactggaaagcaaagaaatcttagagtcttggacattgtttatttgtgcaacaactagaaaggagcaatgaagtttatttcagttgtatttttccctaagcacaatctgcaatagtttatgtatgacagagataattcaaaaaggaaaactatatataaaagttgtatataaagtttgtctctgaaatatttctttgaagtttttaaaaaatygactcatgtttaaaaacaaaaacacatattcagagcattggacttttttaacttgttttcatctgtttatcatgacttttttat

SEQ ID NO: 136114 - DNA, 524 bp, Homo sapiens
tatggcatggctggctctaaatccagccatggaaatgaggcatcgtatttgtctaagcaatatcaactggatgaagcacacagaactcagagtttattcttccccactacttcctgatgttccaagtctccattcccttatgttttttaccttcctgtttttttttaaaaaaaaaaaaaattattaaacattcatgcagttaaaatgtccatattgtgtctggtttaattttcttttcctccatcaggcttgaggctcagcaactgaagatttcctcatccctcactttgaagctggtctgccccctttgattttctcactggggccttggcttcataacagggatgggacagggaattggttgcgcgaacatgacaaagctctctaggctagtaagttaccattgaaatcctttctgttgattgtttctgcttctcttggctaacgcaraactgttttctttgctttctgtacaacggctagtcatgctctaattctcccactgggcacatgtgagaattcct

SEQ ID NO: 136115 - DNA, 370 bp, Homo sapiens
gaaaaaaaagacagtgcaaacttgggatacttctatagaaagaaagctcatacttggaagatattatgttctgtgcttcatacttaaaagaaatatctataaaaactgatgccaactttaaaacattatttyggaggtgaagtaagtaatttctctgaaggagtttatcccagtaaatagaagactggaaggaaattgatcagtcttcaaattttaagaactattagattttatatggacttgaaggaatttgacctgaaatagtttagtgcaaaaaatttttacaagctgagacctgtactatcatcactcgaaatattgaactgtaagatgatgtatagacagaataatagccctaaaatatgcccac

SEQ ID NO: 136116 - DNA, 430 bp, Homo sapiens
gagggctaccacgtggtcaataaatgttaagaacttagccataagctaggagaaagtaaagccaaataaatctaactaaaaagaaaaactatagttttgcatgttgggctcggcaatttgatagttacctccttcgaattttctgattttaggacactcttaagtaatggaaccaatggcctcacatatttgttcagattaattatgccaaataatataccctagagctcagcactagcacgaaatatgtactggctagaacacgtgacttgttttgttaatgggttgattttttctatggtaatagccactcycctactaaatgtacaagattaacatgggagctttcacgtaacacaacattatctcacccaatgcctacagttgatttgttctggtacaaacacctgggtcaacctagacaaagaaa

SEQ ID NO: 136117 - DNA, 518 bp, Homo sapiens
aggcactgggacttgaagcctagctcacttgtgcctgtctcccacccttcccaggagggtttttctgccacaggctccccaacaccctagagscacgtgttctgttcccagactgaaccgagggtgggacttcttattctggtgacccaaaaatgagatgcagatgaactgggaaagaagagagtttatttctgtaacccggtacagggagaagaccaggaaaatatcactagaccaactcaaagttacaaagtttttcagagctcatatagcttttaagctgtatatctatgtgtaagtgtgtgttcatctaaagatgtaagtgattaacttcttatctataactaaggtctgagtcctgaagaccttccaatggagtcttcgtaaattgacttaatctagatgggtccaggtgccaggggtgattacctttatcttgtgtcctgctaaattatggaggtttggggagttcctttagatccccaataaaaattgtggagatctggggagtttctcca

SEQ ID NO: 136118 - DNA, 586 bp, Homo sapiens
gatatagaatataaccctttacttcccttaatgatctacatgagaaaatgagattgaaaaacaactcaccatattttctatttatgtatttgtgtatatgacgtcaaacataggtgaaatgtatgataaagataacacaatcacatttaactacactttgtggagtgattcaactctctattcaagccatttaaacaactaatctctagacmaggaagaaaaccaactgattaatgacatacacttttaaaagtgttttctttttcaaatacttggctagaagagaaaagtaagtcataaaagagaccaagtgagggaacaagatattagagaagtggaacaacttaggaaagacattaataataaataatgttaattgaattcagggtttattctatccaagcagcaaaaaaatatgaggtataaccaggattcccttgtgtcacatatgaataaactgagctttccagatattaagtaaaattggctactgtaattcaatcaagcagcagtttaatcttcacactccaagctattgccttcaaactaaatgctagtactataatggaaataaatgaatttgtat

SEQ ID NO: 136119 - DNA, 642 bp, Homo sapiens
ttcagaggaaggggtgaaaaggagcaagaagaatggggaagaaaatgattatttgarctcattttaggccctgaggaccagtttagagctatgtttcaaattgtgtagatatttattcagagcacagttctatttgaatcaaggacagtgttctgagacttaaaataaaggtacatgttgttccctatactttagactcaatatagaaacaatttttcacaggatacataatatgattctcacaaagctcattagagaatatctagaaagagaaaacattaggaaaatctaatcataatcatatttttgttttataatgtgttctttatataaactttatgtattgataaatcactacttatatatagtttggagtttgaataagtgactacataacataaactgttttcttcttttaatggtaaggataaaaatatcagcattaaaaaataaatttttcttgaacaataactgaaaaaaggagcattaaaagttgcacaaattagcaggtctggattatcagtttgtctttaatattgactcttaagaacagcaattcacagataattctaatatagggatgattaaattactttgtacttgttattttcacttgaaaagtataagtaaataagacattca

SEQ ID NO: 136120 - DNA, 562 bp, Homo sapiens
tgcaaaattggttatttccaaaaatgaaaatgactgaactctgagaaatgttccgctagttactcattcacagacagaggtaattaaaatatctcattcacaaatggatatttcagcccatctattcattaatgataaaattggatcagtctacagcctgtcctgccagttgcctggccgtcaatgtttaaatagtccaaatgagctattaagacacagtttcttaataaagattaaatatgttgtcaggaggtttagaaacatgttaaatggaataaatctgctttaagagtgaaaacataatggtttatttaaatagtgcctttatcactgcaccatataaaacatttttgctatctaccaaatagaatattaaacaatatattggttttgacatatgtcaaatgtaaattcagatgatcaaggattttaaggatctagctatgacagatatttaaacttctattagagaaacataactatcattgcttrattttaaaaactataacatagttttaaaactacatacgtttatgaaatttgagggagtaccacagctttc

SEQ ID NO: 136121 - DNA, 563 bp, Homo sapiens
tagtatatgcctttctagaaatttgtccgtttcctttttgttatctaatgtattagtatataattgagcagaatctctccttataatccttataatccctattatcactgtaagatcaatagtgatgtctccctttttatgtttgatttaataaatttagttatttctkattttcatggctagtctagctaaaaaaatacattttgttgatcctttcaaagaaccaatttcatcttgttgattttctctattggtttatattatttattccatttatttcatcttcatcacttctattttctgttttctggttgctttatgtttagtttggtgtgctggttctagtttctgcaggtgaaaaaataggtgatttatttgagatatttctctccttcttttaaaatatagacatttagagatataattttccctctaagaactgcttttgctgcatctcataagttttgatatattgtgtcttcatttcaatatatctaaaaatactttatgataagttttgtgatttgctctttgatctatttgttgttaagagtgtgttgttc

SEQ ID NO: 136122 - DNA, 543 bp, Homo sapiens
ctccaaaggtaaaaagtagtttttcattatttagacttggaacagaaaagagtcgtggagacaatctagcaaaacagactcatttcatacacaaggcaactaaatcccagagacttggtcatgtgtatagagtagtacacatgcagtgtgaacaaaaaaatcacaatcactaacttatacataatgcatactatgctccaggaagcgttccaataccttactatatgttaacatatttaattttcacatctactatatgaggcaaatactcatattccccacagaaacctggaacggmtgcctggagtaatgtacataaggtcacatagcgggcagttgacagatctgggatttagcagtctccaaaatccatgccattaattggtgaagtatacgtccttcctaaaaatagtttctgaagatatcatgatttccacatgaaaatactctccatgacatttttacatactgtatacatcatatgattgtccccacaatattattagtgaaaatctatatattcctacatgttttaataatttt

SEQ ID NO: 136123 - DNA, 543 bp, Homo sapiens
ctccaaaggtaaaaagtagtttttcattatttagacttggaacagaaaagagtcgtggagacaatctagcaaaacagactcatttcatacacaaggcaactaaatcccagagacttggtcatgtgtatagagtagtacacatgcagtgtgaacaaaaaaatcacaatcactaacttatacataatgcatactatgctccaggaagcgttccaataccttactatatgttaacatatttaattttcacatctactatatgaggcaaatactcatattccccacagaaacctggaacggatgcctggagyaatgtacataaggtcacatagcgggcagttgacagatctgggatttagcagtctccaaaatccatgccattaattggtgaagtatacgtccttcctaaaaatagtttctgaagatatcatgatttccacatgaaaatactctccatgacatttttacatactgtatacatcatatgattgtccccacaatattattagtgaaaatctatatattcctacatgttttaataatttt

SEQ ID NO: 136124 - DNA, 409 bp, Homo sapiens
atgtgtaagcacaggaaaaactaccatttataaaaccatccgatcttgtaagaattcactccctatcatgagaacagcatgggggaaaccacctggattatccaatcacttccaaccaggtctctttctaaacacctgtgggttacaattcaagaaaaaatttggtgggggggacacaaagtataaccatatcattycacccctggcccctcctagatcttatatcctcacatttcaaaaccaatcatgccttccccaacggtccccccaaaatcttaaatcatttcagcattcacacaaactccatagtcaaaagtcccatctgagacaagacaagttttcaaaactaaccatgccttcccaacaattccctgaagtgttaactcattccagtattaactgaagagtt

SEQ ID NO: 136125 - DNA, 565 bp, Homo sapiens
gactatttctgagtagagttgtaaaaatataatttgaactggcatttgaagttcaccagataaagaggaaggcatactatgtaaaggggacaggattgcaaaagctgaaacttatgaaggaacatgacccaattagcaatctcttcatggttgaacattttgaactttacraggataaaagtgaaaaaagatagaagacagtaatggggacattggcacatgtcatattgaaaaagtcagttgtgtcattctgggaaatttagactctatttaatatgtgagaggaaaccagaaatagttatgttattagtggaggatgtccaggttcttggcatcttgaacaaagaattggacaaatagcacaaacaaagtgaggaaggaatgaagagatttattgaaaatgaaagtacactccacagtgtgggagcaggtctgagcataggggccaaaaggccccgttacataatttgtgggggtttaaatattctctaggggtttccattggttacttggtgtacaccctatataaatgaagaagatgaagtaaactttcaaagttatttac

SEQ ID NO: 136126 - DNA, 490 bp, Homo sapiens
ctcaagtaaatacacaccacattccaaagtaagatgtgaaactgccatacaggacttgcaaaagaagcatgacaaaataatttctactactttcaatgcccacccagactaaggatacacatgtaaaggaattttagagaatgtttasagcgatcatttcacatatgtgtcccctgctctcccccaaggaagaagcaggtccacctctagcacaggcggagaagcatcatggctttatctggagaaggtgatatatgtcccctaggacttgggagacactgtgaacagtttttgactcagcctgagagatttaaaaggttttgacacattggtctggctttcctcaaagagtttagcagacaaaggatactatgtttaccctggatctgtcttccatttaagtgggctgccattaggggtaaagtaactcctacaggggtggatccttggattcccaggggcatgaaaccagccttcagccaccagcagc

SEQ ID NO: 136127 - DNA, 648 bp, Homo sapiens
ttcatatacatgtcaactagtctttcaaggaaatgtaattgaaatctctttttctggatgaaacttgtacaaatagtacaagtaagcactatgcttttatcttataataatatattacagttgcttatgatttcacgtaagatctggcaattcataaacaaaaattaaatctgcaaacacttcttcctgactgatacacacacacacacacacacacacacacaccctacacacaacttattttttagaagcatatttttagaagcatatgataatatatgtttctaagttctatcttgttctctaatttcaagttatctactgttttattcttaatgacagcatattctatatttacttcttctcaacccttacctccatactctagccttcttttatttatttttcatgaataatgagttcaytggttatgcaaaaagatgcctaatgaggacgtcgcatccagtaaattcacaggctgtatgttctgaaataaaatcccacaggcaacctagctatgccttaagttacaaaaagatgtattttctttgaatttctaaatttgcaaaagataatggaaagccagtatggtgaagtaaatttcagaaacagggagttgaaaaaatagtagaaaatgaaagctaaaat

SEQ ID NO: 136128 - DNA, 556 bp, Homo sapiens
atgcctaatgaggacgtcgcatccagtaaattcacaggctgtatgttctgaaataraatcccacaggcaacctagctatgccttaagttacaaaaagatgtattttctttgaatttctaaatttgcaaaagataatggaaagccagtatggtgaagtaaatttcagaaacagggagttgaaaaaatagtagaaaatgaaagctaaaatcagaatttcccttagagacaactggcactgcctgaaagctgaagctctggggactaatggctggaaacaggaaaaggaacatcaggccattggagttacaagtactgtatccttgagcctcttgaaaattttgtcctgccccctcgactttatattatctcgaggtttgtactcatctctaggacttagcaggtacaatacaaactttctctagaagaatgcttccttaacccttaatcctggttccttaggcttctcacattttaattatgatctaaacaaacaatcaaaaaggctatcagaaaatgggctacctcgagtgaaatttaacagaaacaattattcaca

SEQ ID NO: 136129 - DNA, 556 bp, Homo sapiens
atgcctaatgaggacgtcgcatccagtaaattcacaggctgtatgttctgaaataaaatcccacaggcaacctagctatgccttaagttacaaaaagatgtattttctttgaatttctaaatttgcaaaagataatggaaagccagtatggtgaagtaaatttcagaaacagggagttgaaaaaatagtagaaaatgaaagctaaaatcagaatttcccttagagacaactggcactrcctgaaagctgaagctctggggactaatggctggaaacaggaaaaggaacatcaggccattggagttacaagtactgtatccttgagcctcttgaaaattttgtcctgccccctcgactttatattatctcgaggtttgtactcatctctaggacttagcaggtacaatacaaactttctctagaagaatgcttccttaacccttaatcctggttccttaggcttctcacattttaattatgatctaaacaaacaatcaaaaaggctatcagaaaatgggctacctcgagtgaaatttaacagaaacaattattcaca

SEQ ID NO: 136130 - DNA, 556 bp, Homo sapiens
atgcctaatgaggacgtcgcatccagtaaattcacaggctgtatgttctgaaataaaatcccacaggcaacctagctatgccttaagttacaaaaagatgtattttctttgaatttctaaatttgcaaaagataatggaaagccagtatggtgaagtaaatttcagaaacagggagttgaaaaaatagtagaaaatgaaagctaaaatcagaatttcccttagagacaactggcactgcctgaaagctgaagctctggggactaatggctggaaacaggaaaaggaacatcaggccattggagttacaagtactgtatccttgagcctctygaaaattttgtcctgccccctcgactttatattatctcgaggtttgtactcatctctaggacttagcaggtacaatacaaactttctctagaagaatgcttccttaacccttaatcctggttccttaggcttctcacattttaattatgatctaaacaaacaatcaaaaaggctatcagaaaatgggctacctcgagtgaaatttaacagaaacaattattcaca

SEQ ID NO: 136131 - DNA, 556 bp, Homo sapiens
atgcctaatgaggacgtcgcatccagtaaattcacaggctgtatgttctgaaataaaatcccacaggcaacctagctatgccttaagttacaaaaagatgtattttctttgaatttctaaatttgcaaaagataatggaaagccagtatggtgaagtaaatttcagaaacagggagttgaaaaaatagtagaaaatgaaagctaaaatcagaatttcccttagagacaactggcactgcctgaaagctgaagctctggggactaatggctggaaacaggaaaaggaacatcaggccattggagttacaagtactgtatccttgagcctcttgaaaattttgtcctgccccctcgactttatattatctcgaggtttgtactcatctctaggacttagcaggtrcaatacaaactttctctagaagaatgcttccttaacccttaatcctggttccttaggcttctcacattttaattatgatctaaacaaacaatcaaaaaggctatcagaaaatgggctacctcgagtgaaatttaacagaaacaattattcaca

SEQ ID NO: 136132 - DNA, 603 bp, Homo sapiens
tagtcctgcacctcagctgggctgttagagtcattctactcaaagagtaatctgcagaccagctttgttggcatgacctggaagctcgtttgaaatgcagaatcttaggcttcaactcaggtcttcatttagaaatatcttcagatgatttgtatgtacattattgatttgtaagcactgggttggagtaatcttcttagttgtgtcttgtgctatttggtctgacatattcttaatgtttgcccaccacacatgatatacttactcttttgatttagctagacatacttacattgcttctggctcaaaatcttgccatcttgcaaggaggctmaggggcttggtttatcttccattagtgtagaaaaatgtcagaagtttgaaatcgctccagtcatttgaaaaagtaatctcaggaatattccccccaccccacatttatttagttgaggaagaaaagggtaagacttgctagagatcttcaaagtaatgactatagaagttgaaaatagattatctctaatatttctcctgcagtattgccttctcagatatagctaaggtataaccacaattaacaaaatgcttcaaagtatgcgaaat

SEQ ID NO: 136133 - DNA, 623 bp, Homo sapiens
tactataactgtgttgtacttatttgagtttatatccaattgtttatattttgtaattccattattatttgtaattatagaaacatatttgtcataaatattatatctctggtttttctcatctgtttctatagaaattaagttacagcatacatgcacataaagtcaactaaatatgtggccctaatgtttccagatatttaaaacccctcataatccaagcagattttaggagaaaaaaaaagattttttttcaactagtacaaatgtaattatcataaatgaaaatatatctgtggaaaataatctcaaaggcaattttttctcttaagctctccatttctttatcctccttcwagttagagatttattggaaaacatatccaacttatttgataaagattaatttcttatttaaatatgatgtcctttaaaaagtttagaatacagagtcttcttattctttttacagtaccaattcccaccaagataaaagaaaaccagtttaatagaggcttagttccctacttactttctagttttcatcattcatgatactcatataacatgaactgtgtatcatatacaaatacgcatctgggatactctctacacacgcacat

SEQ ID NO: 136134 - DNA, 623 bp, Homo sapiens
tactataactgtgttgtacttatttgagtttatatccaattgtttatattttgtaattccattattatttgtaattatagaaacatatttgtcataaatattatatctctggtttttctcatctgtttctatagaaattaagttacagcatacatgcacataaagtcaactaaatatgtggccctaatgtttccagatatttaaaacccctcataatccaagcagattttaggagaaaaaaaaagattttttttcaactagtacaaatgtaattatcataaatgaaaatatatctgtggaaaataatctcaaaggcaattttttctcttaagctctccatttctttatcctccttctagttagagatttattggaaaacatatccaacttatttgataaagattaatttcttatttaaatatgatgtcctttaaaaagtttagaatacagagtcttcttattctttttacagtaccaattcccaccaagataaaagaaaaccagtttaatagaggcttagttccctacttactttctagttttcatcattcatgatactcatataacatgaactgtgtatcatatamaaatacgcatctgggatactctctacacacgcacat

SEQ ID NO: 136135 - DNA, 560 bp, Homo sapiens
cagaaaggtggaataaacattaattttgtgcagtctttggtaatttttttgtttcttataactacaaagctttgctacaaatttatgcatttcactcaaatcagtgatctatgtttgtgtgatttcctaaacataattgtggtttataaaaaatgtaacatcataattgcattcctaactagaattagtatgtctgtttttgtatcttttttttatttttattatactttaagttttagggtacatgtgcacaatgtgcaggttagcaccttgtattacttaggttattttgctttggttaaaaatggctcaaggagtaaagcagtcccattcatattaagacactatacaaaactgtaaataaaatgtgtacrgtgaattgtcttttaggcaactagatttgtccttttattcctccatctttatagaagggatttgtacttcttattgcaagacagtctctgtattatgtcttcttttgtggtgtcttccatgtgaacatttttaaaataagggaaatatggtggtaatagaaaattcggaaaaaccagtagtagcaa

SEQ ID NO: 136136 - DNA, 560 bp, Homo sapiens
cagaaaggtggaataaacattaattttgtgcagtctttggtaatttttttgtttcttataactacaaagctttgctacaaatttatgcatttcactcaaatcagtgatctatgtttgtgtgatttcctaaacataattgtggtttataaaaaatgtaacatcataattgcattcctaactagaattagtatgtctgtttttgtatcttttttttatttttattatactttaagttttagggtacatgtgcacaatgtgcaggttagcaccttgtattacttaggttattttgctttggttaaaaatggctcaaggagtaaagcagtcccattcatattaagacactatacaaaactgtaaataaaatgtgtacagtgaattgtcttttagrcaactagatttgtccttttattcctccatctttatagaagggatttgtacttcttattgcaagacagtctctgtattatgtcttcttttgtggtgtcttccatgtgaacatttttaaaataagggaaatatggtggtaatagaaaattcggaaaaaccagtagtagcaa

SEQ ID NO: 136137 - DNA, 518 bp, Homo sapiens
agtggtttctatgtctccacacttaatactttgagatatgggatttgttagtgtacgagaaacaaatagctcacaggttctctatcaatatcagtaaagagtggagagaggcttatactgcaaccttcaggggtttgtattacttacatatgaaattcctaccattgctgacaattttatgtaaaaaaggagacatcctatgattagaatacaacattcgctgtaggaaacacatatgtttttggttttgtataataatgtatgtgtatctaaaagaaagatttattatcaggataaattattactaataggaactatttatttagcatttgaggcttagttttatgctaatgcagtcaatgtattttkttttttttctctacagtcctcaaattggcttcccatattaaagcttatgcacaagtcttttagttttctataatgaatcctttgcttccttgcatggtattctatctatgggataccaaagtgctctgctaattccttgaagtgacttt

SEQ ID NO: 136138 - DNA, 595 bp, Homo sapiens
tcttctgttcaatagacatctctttattatctttccatgtgtaggactaaakgcctgtacaaccacaaagtaattttaaataagaaaattctgtatgtcagagtgaaatactggctaaatttaaagagagcaacagcatggcattaatagaggttaaacatacacaaccacacacagaaatcaaaattattctacccagcattttttttctctcagcttcactgaatcttccaaagtgccttttagattttctaatagatttccttaccttagaactacacgaactttggaattttatcataaaattgttgactatatgaaaatccgtgaaaagattgaaatgtttaacagaatttttaaaattaaaaacatcatttctgctttcattattgaaatgtttgtgttcttccttaacctaagagttaagcactttgataactttctaccaaactcacttaataatgaacaaactaaggctaagagaaattgtggctggctttatagaagtaaatagtaaatgacattcatggacaagtgaatcataatgtgagaggtgcttataaaatacatttttctctttattttaaatatttat

SEQ ID NO: 136139 - DNA, 595 bp, Homo sapiens
tcttctgttcaatagacatctctttattatctttccatgtgtaggactaaaggcctgtacaaccacaaagtaattttaaataagaaaattctgtatgtcagagtgaaatactggctaaatttaaagagagcaacagcatggcattaatagaggttaaacatacacaaccacacacagaaatcaaaattattctacccagcattttttttctctcagcttcactgaatcttccaaagtgccttttagattttctaatagatttccttaccttagaactacacgaactttggaattttatcataaaattgttgactatatgaaaatccgtgaaaagattgaaatgtktaacagaatttttaaaattaaaaacatcatttctgctttcattattgaaatgtttgtgttcttccttaacctaagagttaagcactttgataactttctaccaaactcacttaataatgaacaaactaaggctaagagaaattgtggctggctttatagaagtaaatagtaaatgacattcatggacaagtgaatcataatgtgagaggtgcttataaaatacatttttctctttattttaaatatttat

SEQ ID NO: 136140 - DNA, 595 bp, Homo sapiens
tcttctgttcaatagacatctctttattatctttccatgtgtaggactaaaggcctgtacaaccacaaagtaattttaaataagaaaattctgtatgtcagagtgaaatactggctaaatttaaagagagcaacagcatggcattaatagaggttaaacatacacaaccacacacagaaatcaaaattattctacccagcattttttttctctcagcttcactgaatcttccaaagtgccttttagattttctaatagatttccttaccttagaactacacgaactttggaattttatcataaaattgttgactatatgaaaatccgtgaaaagattgaaatgtttaacagaatttttaaaattaaaaacatcatttctgctttcattattgaaatgtttgtgttcttccttaacctaagagttaagcactttgataactttctaccaaactcacttaataatgaacaaactaaggctaagagaaattgtggctggctttatagaagtaaatagtaaatgacattsatggacaagtgaatcataatgtgagaggtgcttataaaatacatttttctctttattttaaatatttat

SEQ ID NO: 136141 - DNA, 594 bp, Homo sapiens
ggttttaagctattaagttttgggcaaaggttttttgttttgtttttcagcaaaagctaactgaatccatcattacatataacttttagaaaattaaactatttccataaccatcatgacaacaaaagtagtttacaaatctcaccaygattaaagcaaaatattaaattcaataacattatagatggacataaagtacttaatcaaaaatagtattttatatatttcctgctagaagctatgtagctgtccataatactcattaattttgaaataacataagagattaggtgcttgattaactatttagccaatttcacattattccaaataaaatgtaaagcactgggaaatattgtaatttctctgtaaaatcattctactagattggattattttccagtttatctctttgataaactctgttacctggcatgagcaggagtattttgattctacttccctggtttaatttttgatgaccaaaagaggaccaccaacatggcaaaaacaatatgcctgaaacaagacatgacaagctgatggcaaatcacagatacatgaggaaggcaacaatgacactgtgtcatatag

SEQ ID NO: 136142 - DNA, 590 bp, Homo sapiens
tctttgtgctccacaagtactagaggataaaaagcagacagaaaatgatactttatagcagcttgtttaaataattcacttcacaaatagttctcagcaagaaatgaaatagcagtcactaattatacctaagttaaattgaaggagaatatttgcactaatttgcatttcaagaaatgggaaagagaaaatgmatttaacaaatattttatcagaaaaagagcaagtactgctataataactttaacttaagtgatcataacaagagcatctgtgggaataaagtaatgaatatcagacacatgaaaaaataggacatttaattgacttttcctcttattgttaccttccttattttccagtcattcaaatttcaaaattaatacttttgtaatttggttcaagactagaccatgtaattcagtttcagagtggtgccagggtcaaagaaacagttcagctacacaaagtaaatttcaatagttcaaaacttctatttgcatatctgaaaaatgatgaaaagaatataaatgcataattcctttcccgtccatattcacttttccaggatctggcaaataactacagta

SEQ ID NO: 136143 - DNA, 590 bp, Homo sapiens
tctttgtgctccacaagtactagaggataaaaagcagacagaaaatgatactttatagcagcttgtttaaataattcacttcacaaatagttctcagcaagaaatgaaatagcagtcactaattatacctaagttaaattgaaggagaatatttgcactaatttgcatttcaagaaatgggaaagagaaaatgaatttaacaaatattttatcagaaaaagagcaagtactgctataataactttaacttaagtgatcataacaagagcatctgtgggaataaagtaatgaatatcagacacatgaaaaaataggacatttaattgacttttcctcttattgttaccttccttattttccagtcattcaaatttcaaaattaatacttttgtaatttggttcaagactagaccatgtaattcagtttcagagtggtgccagggtcaaagaaacagttcagctacacaaagtaaatttcamtagttcaaaacttctatttgcatatctgaaaaatgatgaaaagaatataaatgcataattcctttcccgtccatattcacttttccaggatctggcaaataactacagta

SEQ ID NO: 136144 - DNA, 588 bp, Homo sapiens
catctactcatattccattgaccaaaagaagtcttggccaagcccagagtcaatgggatgggaaagcatggcaaaggcagaaaggaaacaataattgtgagcaaatatttaatctacatagaagaccatggatgtacagaaggctttggaaggtactcaagtgaaacagcctgaagtatgctttctcccatggaggcatggtcgtgggccccatggctccaagctgagcctccacatgctgcaaatctatggatatctcccctgttaccaggaatctaattattactctgctttctgctcaattattaaagacaaggcagtgaagagccatggaagaggagaaaagtctgttttgcagcaatgacaaaccatatttcatatgcatmaaggggagaaataaaagagcattgcttttactcttataattgcaatttcctgctcgtttccttttcaagttagtggatctaattgtttggtaataaaatatctgcataatatattagaggcagagaacagacgggcttaagggacagttgccaagaacaggagggagagaaaagattgaacagaatcagagtgttcaaagct

SEQ ID NO: 136145 - DNA, 572 bp, Homo sapiens
aatatctgcataatatattagaggcagagaacagacgggcttaagggacagttgccaagaacaggagggagagaaaagattgaacagaatcagagtgttcaaagcttgtggggttttcgtaaaatgtataccaggttattcctgccactctccctgcctgactcttaatggaagcaaatgaatggtccagacaaatcagtaatcttgacctagcttaaaattcatgtcggtaccaggttcagaacagaaaaggagacagaaagtgcaagagacagagtgcamaagagagagagttcagtaggaaaaaatgactgtggtggagaacaacagttttgagatcatgcttggattggataccagctccaccacccattggctgtgccaccttgagaagatcattaacctgcctgagcctccattcgttcatttgtgaagtaggaataaaaagatactccatctcaagagttggtgctccataaagagtagctattcatattattagaaaattagaataggtggttgaagccctgcagaggggatgtgatgggctgcaggggtcacctttggcaaaa

SEQ ID NO: 136146 - DNA, 594 bp, Homo sapiens
acttattgttatcaagtattacattctgtacaaaactgtgctagacttttacacaattggcagcacagtgggtttctttacaccagcatcaccacaaatacatgagtaatgcttcatggccctgtgacaagataaaaaaaaaatattaatcatccaaaccttttcaagaggtcatgacctagcaggagaagcaagagaaatgtaagtattaaaattatttttaaatgaaattttcagctccattatactcttataggaccaccatcacatatgcggtccatcattgactgaaacatcttataagtcacaaaattgtactcatttttagatttttaattgacttataaattttcaatattggacctcaaattatatcttcagattcaatatatataaaatagagtaagctttcttaaatcagattttattaaggcctcasaaaaccactatcacaaccacacattttacaaaattaaaatgaaatatggagccatgcagtagcttatattatgccaattttgagagaaagaatttgagatttagaaagaacaatgattttgttaaggtggcacagtcccctgaaaaagaaggcca

SEQ ID NO: 136147 - DNA, 553 bp, Homo sapiens
cagcttgattcattaaagcccccaagccaagaaggcaagagaaagagtgctgcatgatgaacatcagartcatttataactgtgatggttaatactgagtgtcaacttgattggattgaaggatgcaaagtattgttcctggatgtgtctgtgagggtgttgcaaaaggagattaacagttgagtcagtgaactgggaaaccagacccaccctcagtctgggtgtacacaatctaatcagctgtcagcacggccagaataaaagcaggcagaagaacgtggaaaggcacacacccaggaacaatactttgcagccttcaatcaagttgataatattacccatcatgataacctaacctcagaagtgacaacccaccacctttgtggtattccattcactagaagcatatcgctaggtccagcccatacagggcatgaacactgggaggcagggaccactggaagctgtgagctgtgtgcaaagcaaccaaacacaggggcactgagcatacccaaatccttcaagatcacacagtggatttggggtcagagcc

SEQ ID NO: 136148 - DNA, 402 bp, Homo sapiens
acaaaattccaggacccaatcactccacactgaagcccatcagtcaacaaagtctaacagtaacgatagaattccagtcagcaacgtggttcttcattytgaaatacaaacagatagccaagcaccagctgacacttaagaagagctctaacaaaaaaaaaaaaaaaagaacaaaaattggaaatagggccttgtaagaaacaaaagtaaagcaagcagaaaagaaattctttaaaaaaaaaaaactgtaaatatcttcagaaaaaaaaaagataggtatccatgcaataagaacagaaagttattataaaataattagaaaaatttaaaaaagaatatgtgggaattaaatatggaatacccataatacaaaaataaatagattccagatgataaatataa

SEQ ID NO: 136149 - DNA, 552 bp, Homo sapiens
gctcagactgtagggttaaaagatatgtttgcaatcaactagcccacttgccagatcacaaagcaagtgatctgcacaaggtcacccagatggtttgtgacagagctggaaacagaattgaggtctcctaactcagaccagagttcttgccattctactggggctccttcatccccatgaaacatccttatctaacrccctcctagcctcactacccgtactatcagcagacagatctatccctctagagttgggtagttatctccatgggaaatacgcatgtgctaatgaaaatgtaaggcatagagaagctacacactctgcatgagtctcttcttcctggatgtggaagacacctgctcactgcagcatggagaatggaggccagattccatggtgagcccaccatgaggaagggtcagctttcttcaggaattcaggtactggtcctgtcctcttttcctccatatctttcctagtatcttgagacaccagctactctattccaaacatgaggcatgaatcagaactaaaattctgtttcctaaattc

SEQ ID NO: 136150 - DNA, 552 bp, Homo sapiens
gctcagactgtagggttaaaagatatgtttgcaatcaactagcccacttgccagatcacaaagcaagtgatctgcacaaggtcacccagatggtttgtgacagagctggaaacagaattgaggtctcctaactcagaccagagttcttgccattctactggggctccttcatccccatgaaacatccttatctaacaccctcctagcctcactacccstactatcagcagacagatctatccctctagagttgggtagttatctccatgggaaatacgcatgtgctaatgaaaatgtaaggcatagagaagctacacactctgcatgagtctcttcttcctggatgtggaagacacctgctcactgcagcatggagaatggaggccagattccatggtgagcccaccatgaggaagggtcagctttcttcaggaattcaggtactggtcctgtcctcttttcctccatatctttcctagtatcttgagacaccagctactctattccaaacatgaggcatgaatcagaactaaaattctgtttcctaaattc

SEQ ID NO: 136151 - DNA, 429 bp, Homo sapiens
ggaattcctgagtcatacagtcaatgctggccaatggccttagcaaagccccgggatctctttactggaaatggtttcacaattttcccatacagatggtgtcctgaagggacaactgagtgtgagtgtatcattcgctgcatttttcatatgtaggggataggggaggggagagagagagaaaatatcaggaaatgtgtatatttatcctagcctggccttaagaaaacacagctaccaatccatcaaaaatgaatttgagtttggataacattagtgtttaaggtgatgctcttctcttgtattgattctctgtgggttgaaatggaaacaattttagaaatgtagtcttaggtttccttaatctgcrtggctcagggaggaaaagcctgttgtcactcgtgctaataaccacaagaaacacagttc

SEQ ID NO: 136152 - DNA, 431 bp, Homo sapiens
gctggccaatggccttagcaaagccccgggatctctttactggaaatggtttcacaattttcccatacagatggtgtcctgaagggacaactgagtgtgagtgtatcattcgctgcatttttcatatgtaggggataggggaggggagagagagagaaaatatcaggaaatgtgtatatttatcctagcctggccttaagaaaacacagctaccaatccatcaaaaatgaatttgagtttggataacattagtgtttaaggtgatgctcttctcttgtattgattctctgtgggttgaaatggaaacaattttagaaatgtagtcttaggtttccttaatctgcatggctcagggaggaaaagcctgttgtcactcgtgctaataaccacaagaaacacagttytaaagtgcttagctggaaaatgaattc

SEQ ID NO: 136153 - DNA, 544 bp, Homo sapiens
aacaccttccttttcatcctaagtaatttgcctctgacatctccttcagcaacctgcattgggcacagcctgtgtgcatgactcagctctacaggatgtatcaaagagacgtatacctaggaacatgcagaggcctggcctccttgaacctttgccaggaggccagagctgtaaggaatgggcctctcctgtacattgttcagactctttaaggtgaaattgcagatgctcagttgacatcaagagtttgagtttataccaagtgaggccacaacaggcacaggcaggacctcctagaaacaggaaatcaggaggacagggccatgccagggctgtgatggagttggggcctgagaggctttcagaatccagcccaactctagtgcccaggatatcttggwgccctcttagaagcagaagctcacagtctcctattctttccattaaagacaagctgcctcctactattcttacctgacttaaaaatttctgtttacttgtagcttctgctcatttgggcaaatctaagtctaaaagcctttgc

SEQ ID NO: 136154 - DNA, 582 bp, Homo sapiens
tacttcaatttgacatcatctttgaggctttaastggtgcaatatggccaggaaaagaaattaaaattgcaagaattagaaaagaagacacacactgtgtcattatttgcagacaatatgtttgggtatgtagaaaataaaagtgactctacaagcaaattattagaatttagaagtatatttagcaaggatgctgaatacaagaataattagcaaacaccaattgcattactatatactaacaagcacattagaaattaacgtaagctattacttataacccatcctaaacttgcaaatagatccagtgaagcaagactgcctcacaacaagctataaggtattacttgtaataccttacttaagtaaatggcaggctatactgtattaatggatttgatgattcaattgtatatagaggccaatggtccccccaaattatttatagattcaacaccatccaaattataatatcagcaagtagtttttatagttattatctagctgattctaaaatttgtatgtgtataaagtgtcaagaatagccaaggaaatattgaaaaataataaagttggaaagct

SEQ ID NO: 136155 - DNA, 538 bp, Homo sapiens
tggctaaatcaagctcattaacatatgtagcttatatatttatcttttccttttgtggkgagaacacttaaaattactctcaaccattttcaaaaaatataatttttattaactatagtcaccataatgtacagtagatctcttaaaccttactaaaaatttgttatcttttgactgtctccgcaatccccccagccctcggaatttttgcaattcacatttttcattactactttttcttttcctatgcaataaagtgattacagatttttagagaatcatgcacgtgtgcatttggctctagttcttacagaactaaaaaaatcagaatctctgaggatagaaccgaagatggatggatagatagatagatgatagatggatagatagatagatagatagataggcagtatgctcattaagtgagtgacttgccttaaagtctgggaaggaagagagggaattcatgtgttgaaaagactcttggagtccctgaggtggaatttaaaattaatttcctacacagatacttttcctc

SEQ ID NO: 136156 - DNA, 192 bp, Homo sapiens
tctgcctcatattttatacagctgaaactagcagagctctttccagccttcctcagggactctgaaattctcargcacggaacttgtgagcttgatgaaaagacaaactctgctggaaataaacaccatgttgtattcagaatagcagctcctccagccacctgaagtttgtgatagagctgagctcacagc

SEQ ID NO: 136157 - DNA, 570 bp, Homo sapiens
tttgagaaactcttagattaaggcccgcattaaaacattcgtgcatgcagcctgctccttgcctactctatgtggagctccaccattcccacttagcttycaaaaggtgagggcatcttgaagatgagaggcacctccaggccccattttatcactcagctgcaaagatggcaggacaaacttcagtacccaaatgacaacccaagaaagaagttgcccttgaccatttctatttacaatctctttcctctgtgcactaaaaataccaccacctgccacatcagctacattatatatcctttttaaatactaatgttatgtattttggaacagataatatataagcatgattcaaaagtactgattttagaggaaattttctctgaccacagtaaaattaaggtagaaatcactaatttcaaaaaaaacctgagtttctttataattggaaattaagtaatacaatagttatattttgaattcccccaaaagcagatctggagataagagcatagtatagagagtctatttggaaggtgctctctggaagcagcaatgagagaatgggaa

SEQ ID NO: 136158 - DNA, 570 bp, Homo sapiens
tttgagaaactcttagattaaggcccgcattaaaacattcgtgcatgcagcctgctccttgcctactctatgtggagctccaccattcccacttagctttcaaaaggtgagggcatcttgaagatgagaggcacctccaggccccattttatcactcagctgcaaagatggcaggacaaacttcagtacccaaatgacaacccaagaaagaagttgcccttgaccatttctatttacaatctctttcctctgtscactaaaaataccaccacctgccacatcagctacattatatatcctttttaaatactaatgttatgtattttggaacagataatatataagcatgattcaaaagtactgattttagaggaaattttctctgaccacagtaaaattaaggtagaaatcactaatttcaaaaaaaacctgagtttctttataattggaaattaagtaatacaatagttatattttgaattcccccaaaagcagatctggagataagagcatagtatagagagtctatttggaaggtgctctctggaagcagcaatgagagaatgggaa

SEQ ID NO: 136159 - DNA, 571 bp, Homo sapiens
caccattttaggagactgaagatttaatgggcaaggcgcatgcacacggaagatttccaaacatatacgctgttgttcagccctctctctcccacatggccaccctgggctgacggcttgtgtgtgttcttttgtscacaaagactgagcactcttgactgagggaaggggtatgctctggaggcctactttgcatcgctcaccacaaagaactgatgtagtcctaggaggaggtcccaacaggatagcagaaagagcccccactgctgagtgtctccaaatgctcttcaggctataatcagaaacaactgagaagctcattgcagatgcgaattcctaggatctcatccttgactaactggatgcaactctccagggctgtgcttggggtgactgtcggttgcacataagtttgcaaaccactgagctctgtgtggatgttgcactcagcttcctatctaacccactatttgacattgtgctgcagttgcgtctccagtcaaacaaggatgataatgtatattccagctactggttaaaataacaggaaattcctttttaaatttgaaaa

SEQ ID NO: 136160 - DNA, 561 bp, Homo sapiens
aagcaggatggtgtatgaatttccatatgtacattctaaacatggcatggttctatttgtactgccaccatggaaaaattagawatttttttcaaatgaaaactggaaatgaagaaaaagatgtcagagaaagatctacttcttctactctgttagtcatactatcaaagtcttgggctataagatgttaaatgcttaaaatacatgatctaatatcaacaggggtacctaaaatacagacagtcacataaacatttcataattaattacgctgataggtgtcatatgttattatgtctaaatgagacagctttcaaatctcaaaacaaaaaatctgttaccatcaatgatgatgttaagggctaaaaagtttataaagtaaaaatatatataagagataagtatgaattctacataaaaatcaattacatctaaaaagcacttgaaaatgctctttatataatcatgtgcatagcttctcacctcagtactgattgcacttcagtcctctgaaacttacctgtgtgccagagaatcaatctttgttcctgtaaaatataa

SEQ ID NO: 136161 - DNA, 612 bp, Homo sapiens
agaacactaagttacagttgtttcagatagttgattagagagcacaatatatattcatgaatattggaaaacatattaacaagaaacaatgttttgttatgcaaatttgaactatcctctggtagtatggtattccatttgaaatgtttgaaaataacagcatggtacacttgacaaatggtattatttggagtcagaagacatgaatttcaggactagatgcacatgtgttgactggttaagcttggataagtcatctcttttttgtgccagtttccttcctgggcaaaatggcttcacactactgaccttacagaattacaagaattaaatgagaaaatcgttttagtggcttataaccccacaacamcatttgaatttattaactttttaattacacaaagctgtatacaaaatgtacagttagcaatgttagataaaatacagactgtattagaatcaaaatattgcaaaaaagatcattcaagattgcaatcaacttgcctttaaaagcatgttcaagaagtatttccgtgtgatccaaggagaaaacttcacagaaaaccttggaaaatttaataacaaaaaagatcaatggaatttactcattta

SEQ ID NO: 136162 - DNA, 547 bp, Homo sapiens
atgtttcaccatgttgtccagcctggtctcgaactcctgaactcaagtgagtcgcccaccttagcatacatacttttggacaatcttatttaaaataattttcttgagggaacagaaacatttagctataaattaaaatatccattcagcagaatcatttgggttgcctttcacaccactttacttttaagacataagcartatcttatgtgtgccatgctaattttcccactttgagcattggctgagcgatacagtatttttttttttttttggagagattttctcagggttctaataatcagtgctaaactgttgataaatttaaaacaaagattacttagggtctgccttttaaaacagaagtatgcaataaaaaaggaattccatctcataatagccaggagaacagtaaaggctgcacagaaactacatgaagtgaggcgtgaagagaagctatttcaggccttttgacttgagggcaaatacacatgcattcaaactaaaagatttcttcaggtgtagagatttttaacaataggagctg

SEQ ID NO: 136163 - DNA, 615 bp, Homo sapiens
aattgccttgaagaaatgagggggattctacataatatgatgcaggagattgttcacatatttagaccatcaacacgataatggtactactttattttccacctgataatacttgaaataaagatagcatgtgggcattaatgggatcccttctctctgtatttgccaataatttcagcctgacatttatcagacattagtgtatgtgtgtgatttgcttgtttgaagtgctactctccagcttcctatgttccccattttytatacactacatcgtcccccttgcctctcactggtatgtgattcttagtggcactgaataatataatgagaatcttttgaaaggttttatatctttctcctctctcttttttcagcctccatgtctcattagttagcaagtcccatcaatttttcctttgggactctcatgtccccctctgcattccattcccagcctggttttcattagttaccccagcctagttagtctctccgaaattctttgttcaaagtcacttcaactttacacactgctctcacactaagcttccatcaatgctgccactcacttcctttgggcaagtactgcattgcaccactttagggtggcat

SEQ ID NO: 136164 - DNA, 558 bp, Homo sapiens
acgctttggtaaagatacactactttcattatggagctgattttgtggtagcacagtgactgtaaaagttcaaactgaatattaaaactaaatgtaccccaaatgaaagatacacaccaactttgttttaaaagaaacagtatttattaagaaattatatgttgaattctcctacrgtctgtgaagatggtttcttccatttccacagcacaagacaacagctaagattatctggaaaacactggcaatgcttgggaatggagagttcctaggaacaggaggtgaaatgacatgatgtatgcactaatttaaacttttggatccaagggcaagacagtcttttccttggcaatctagtccttacttgtccatggaatctcatacccagactgaagtaataattggatcatttagttcagtagagcggagcatgctcaacttaatcacagatcaaaccaacagttctttaactattatatcacatctgaaatatctgcattctttattaataaaaagggtgcttatacagggcagaaatataactttttcaagtatttt

SEQ ID NO: 136165 - DNA, 558 bp, Homo sapiens
acgctttggtaaagatacactactttcattatggagctgattttgtggtagcacagtgactgtaaaagttcaaactgaatattaaaactaaatgtaccccaaatgaaagatacacaccaactttgttttaaaagaaacagtatttattaagaaattatatgttgaattctcctacggtctgtgaagatggtttcttccatttccacagcacaagacaacagctaagattatctggaaaacactggcaatgcttgggaatggagagttcctaggaacaggaggtgaaatgacatgatgtatgcactaatttaaacttttggatccaagggcaagacagtcttttccttggcaatctagtccttacttgtccatggaatctcatayccagactgaagtaataattggatcatttagttcagtagagcggagcatgctcaacttaatcacagatcaaaccaacagttctttaactattatatcacatctgaaatatctgcattctttattaataaaaagggtgcttatacagggcagaaatataactttttcaagtatttt

SEQ ID NO: 136166 - DNA, 558 bp, Homo sapiens
ggttttccttacactgagctaaaatgtattttgctttcacttggttcagttatcactyttatgttctctgaaaagaaacttaatgtctaattctttgtgatacaacagtcaattaagaatttaaagggagtggccggccgcggtggctcacacctgtaatcctagcactttgggaggctgaggcaagtggatcacttgaggttaggagttcgagaccagcctggccaacatggtgaaaccctgtctctacgaaaaatacaaaaattagccggatgtggtggcacatgcctgtaatcccagctactcaggagtctgaggcaggagaattgcttgaacccaggaggtggaagttgcagtgaactgagatcacgccactgcacttcaacctgggcgacagcgagattccatctcaaaacaaataaatatatatatatatatatacacatatacgcacacacatatatatttaaagggagctatagtattctcacccctccaaaacctttgaacagagagttgatatcattggcctatgggtattcatcttaactgcattca

SEQ ID NO: 136167 - DNA, 558 bp, Homo sapiens
ggttttccttacactgagctaaaatgtattttgctttcacttggttcagttatcactcttatgttctctgaaaagaaacttaatgtctaattctttgtgatacaacagtcaattaagaatttaaagggagtggccggccgcggtggctcacacctgtaatcctagcactttgggaggctgaggcaagtggatcacttgaggttaggagttcgagaccagcctggccaacatggtgaaaccctgtctctacgaaaaatacaaaaattagccggatgtggtggcacatgcctgtaatcccagctactcaggagtctgaggcaggagaattgcttgaacccaggaggtggaagttgcagtgaactgagatcacgccactgcacttcaacctgggcgacagcgagattccatctcaaaacaaataaatawatatatatatatatacacatatacgcacacacatatatatttaaagggagctatagtattctcacccctccaaaacctttgaacagagagttgatatcattggcctatgggtattcatcttaactgcattca

SEQ ID NO: 136168 - DNA, 556 bp, Homo sapiens
tgagaacaaactaatacagtatatagtacatagacatagttactctattttttgtattaacatacaatatacatgtgattctgacgatgtatttcaaaggcagtggtatattaatacagttcattgcaaaaaatcctatatattattctcatcatccaatcattaacttgaaagctaaatgcttggaagtcattatctgagttgagggaaaaaaaagctttaattataatggtattgaktcacaggagtttaacaaatacaatcagcctgtgtgttagtaataggtagtcaacatagcttttgtcatcatctcaatgggaaatattataatcactaaacaatgataggttccatgaataaaatcacacatgaaagcacatcttctttattaaactgttggttcacagtttaataggcagttttgattcagtaattacattgctgaagtagagataaagcaacttgttctttttttatgaataattatctaattttacttttcttggagatgagtaacgtttagttcgttctttatacaattctctttatttgcata

SEQ ID NO: 136169 - DNA, 603 bp, Homo sapiens
actttgtatttttaaaaaccctggattatycaaatttgttaaaaaagcacttcttatttgataagaaagacttcaggaaacaaatgtaatattctgagaagaattatgatttgatttcagtttgttaaatttttatttgattgtatagctctcagcacattcaattcaaaacaatttatttttaaattccattcttatggctttcttttttttaataaagataacactaacagtatcctgtgatgatatagggcttttgcttcagtttttgctatagatttgttctctgactcatgtgatctggccatgaatttagtaacagatggtaacttgtggttttatgaaaaccgagtatgtgagaagccttacatatcacattttctttagtcacccagacacttattcattaaaataacaaccgaaagaatttttaattaaataatggaaactcagtaatgtgccagatattgttggttgcttaagattcaaagaataagacctactggtttctggtttcacagagctctcactgggtagaagagaagatgttgcaaccagaacaaataagtaaaacagtatgataggtaaaaatgtcacataagt

SEQ ID NO: 136170 - DNA, 603 bp, Homo sapiens
actttgtatttttaaaaaccctggattatccaaatttgttaaaaaagcacttcttatttgataagaaagacttcaggaaacaaatgtaatattctgagaagaattatgatttgatttcagyttgttaaatttttatttgattgtatagctctcagcacattcaattcaaaacaatttatttttaaattccattcttatggctttcttttttttaataaagataacactaacagtatcctgtgatgatatagggcttttgcttcagtttttgctatagatttgttctctgactcatgtgatctggccatgaatttagtaacagatggtaacttgtggttttatgaaaaccgagtatgtgagaagccttacatatcacattttctttagtcacccagacacttattcattaaaataacaaccgaaagaatttttaattaaataatggaaactcagtaatgtgccagatattgttggttgcttaagattcaaagaataagacctactggtttctggtttcacagagctctcactgggtagaagagaagatgttgcaaccagaacaaataagtaaaacagtatgataggtaaaaatgtcacataagt

SEQ ID NO: 136171 - DNA, 603 bp, Homo sapiens
actttgtatttttaaaaaccctggattatccaaatttgttaaaaaagcacttcttatttgataagaaagacttcaggaaacaaatgtaatattctgagaagaattatgatttgatttcagtttgttaaatttttatttgattgtatagctctcrgcacattcaattcaaaacaatttatttttaaattccattcttatggctttcttttttttaataaagataacactaacagtatcctgtgatgatatagggcttttgcttcagtttttgctatagatttgttctctgactcatgtgatctggccatgaatttagtaacagatggtaacttgtggttttatgaaaaccgagtatgtgagaagccttacatatcacattttctttagtcacccagacacttattcattaaaataacaaccgaaagaatttttaattaaataatggaaactcagtaatgtgccagatattgttggttgcttaagattcaaagaataagacctactggtttctggtttcacagagctctcactgggtagaagagaagatgttgcaaccagaacaaataagtaaaacagtatgataggtaaaaatgtcacataagt

SEQ ID NO: 136172 - DNA, 459 bp, Homo sapiens
gtgcatctttcataaacaccaatgacaggggccacaagccataaaaattaaatcagagtttcagaaggtggagcccagaccaaaagtctaaagatgttttactgtgcagccaaggctgagaaccactgggatagagcacatggtacatgaagaagaaagggcaaatagacacttcacaaaagaggtaaacrcatgaaaactcactcaaaatcatcagtcttcaagaaagtacaaattaaaaccacaataaggtaacactgcacaccctcactcagactgaccaaaattggctgctataactaaatgctggcaaggaagtggagcactagtgtatcattgcaattaaacagacagaggttgcctgaagggtaagggtgagggtcagggattgactttcctgaaatgtcattccgtacctgatcctggtgaacacccacttttatttcactactcggtttt

SEQ ID NO: 136173 - DNA, 632 bp, Homo sapiens
tattgaatagattaatagacttttctgggaaaaggtaattaactgtaaatgctgacctctcactgccttttccagaggttgttgaacttctgtggcctaagtattttatctgccaaatagctagaaattcttttcmagtttattttttaatgctccaaatacaaatataattgattcatttcccagtgtttcacaggcacaggactttaatgatttttttctagctattttttaaaatattgagtatgatgagctgtaaaaactctaaaaacagaataaaaataaatgaatagacaaaagacaatgttcatttgataaataccagggcaagaaatttgtacttgaacaagctaagaaagtcattaacagcagtatttctggaaactaatggtatacctgctcaagctacactgaatctaataatctgtgacaaaagaaatggcaacaggtatgaacacatttcatttaatctgaaattgaaagaaaagaaagtggggcacttttcttccccaacttttttcatacctcaacagacaaaatcacaatggaaaagagatttattgccaaaatgttgctgaccttttacaattcttgccccatattctggaagttaattgattaaaaaaaaaaaa

SEQ ID NO: 136174 - DNA, 632 bp, Homo sapiens
tattgaatagattaatagacttttctgggaaaaggtaattaactgtaaatgctgacctctcactgccttttccagaggttgttgaacttctgtggcctaagtattttatctgccaaatagctagaaattcttttcaagtttattttttaatgctccaaatacaaatataattgattcatttcccagtgtttcacaggcacaggactttaatgatttttttctagctattttttaaaatattgagtatgatgagctgtaaaaactctaaaaacagaataaaaataaatgaatagacaaaagayaatgttcatttgataaataccagggcaagaaatttgtacttgaacaagctaagaaagtcattaacagcagtatttctggaaactaatggtatacctgctcaagctacactgaatctaataatctgtgacaaaagaaatggcaacaggtatgaacacatttcatttaatctgaaattgaaagaaaagaaagtggggcacttttcttccccaacttttttcatacctcaacagacaaaatcacaatggaaaagagatttattgccaaaatgttgctgaccttttacaattcttgccccatattctggaagttaattgattaaaaaaaaaaaa

SEQ ID NO: 136175 - DNA, 564 bp, Homo sapiens
cagcccttagcactatataataactggcacatcgtaggggctcgacacatgtttgctaaattgaatgaatgaatgaatcaatcaatcaagacatccatcccagacatgctggcattggggtaggatttaaagacctcatcagctaactgatcaacactaatacaataagagacaactgacttcttatatgtgatatataagttgtgtatcaatttgttcttagaataaataaagtgtttgtcttaagtcctaaaagaatcactgcaggtatacaggctctggtataatgaaataagagacatgatagagaaaatgcaactctccccttggcaaatactctaatatacaattatcctttgaacttactgccttcattcacattatgttgyctcattctggtgtggtgccttatttcttattttaatatgtgtctttatgccctattgacatgaaattcaaacagcacaatttccccatcagctgtccaaacataccaaactgacacggatttaaattttctgggattctggaattactgactattttcagaataaaacatttaag

SEQ ID NO: 136176 - DNA, 543 bp, Homo sapiens
catatatttaagtatcaactggcttttgcttgcaggagtaagacatgatatccaaatgtcaattttactctccaaatcatgtcatttttatgaggagatgattctttcccctcattttaggagtttagggatttgtttcaagatttaacttaaaaataatgtcaataattgattatgagaaaaattattaacagttgcagctctttgtgagaattttacaaaaatcttttgtgtatagttgactattattcaataatggcaaaaatagaaattattttcccgagaggtttatgactaattttataacagttcctggctcactttcctgtatttcagtaacctcttctataaaataaaaatatttggatggataattttcaagattaattttgctactaaaatatctttctaatgtttatatggtttaaatagacaatatgtatttatttatattcttccttaacctactggcctactttaagtggcawctgaagcaagatttctcttcaacatttatgatgtttcataatctcttcttcctgt

SEQ ID NO: 136177 - DNA, 622 bp, Homo sapiens
tgattttgatttgcttttcttttactaattttttttcctgttccatggtttccatggtgaattcctataatacaggtagactaatcctatcttcctttgagtcaaacagttccagaggtgatgtatcacagtgggccctatgaaatccaatcaaascagggagaggctagtttctagtttcagaaaagaaatttactctcagacaatatataagcttccaataattagaaaggaaaatcagtttaaaagatttaacgagtttttatcttcataattagtcacatcattttgttaaaagggaaaaaaacaggcttcaatgagccttctgtaccataataacagatttgcatggtgtgttgcagtttacaaagctttcttacatctaattgcattctaatttatatggtgtctgtttacttttctatcagattttagaactctgttgtgatcactcataatctgaaacttgaagctataaagatggctaagcaatagcagataaattgtcttgaataaaatataacagagaatgataatgacagccccggaagatgcttgttaatatatgattccacctctagcatgatctcagagccggggcttcagagataacattgatgtg

SEQ ID NO: 136178 - DNA, 563 bp, Homo sapiens
attaggcaatttcattgctgtgcgaacatcacagaatatacttctaccaatctggatgctgtagcctacacatacagcctattgctcctagtctacaaacctaggcagcatgttactacattgaatattataggcaattatatcacaatggtaagtatatgtgtatctgaacatatctaaacattgaaaagatacggtaaagttacagtattataatcttatgagaccatccttgtatatgcagtctgtgattgactgagatgttgttatgcaacaaatgactgtaccataatgttggatataggtcattatacatttatccaaacccataaaatgtacaacaccaagggtgaaccctaatgtaaactatggacttygggtgataatgatgtgtcaatgtaggttcattaactgtaatggatgtagcattctagaggggaatgttgatcatgggggaggctatacatgtctcagggcaggggacatatgggaaatctctatatcttccactcaatttttctgtgatctgaaatctgctctaaaaaataaagatattatctgta

SEQ ID NO: 136179 - DNA, 438 bp, Homo sapiens
gagacctcagttgtcttcctctaaaacagaaaaagaagcagagatgtaaatgagcagggaagaccctagagttctggttcttctcagagggccaaggccacttttctatcctaaatagcaattagcaatgtctgagatttccatgagrccttcagagatccatttcctttttctctttactctgccttatctttaattccctgtcagctgcgataacccaaaatctgaagaagcccaaccagcacaagcatatttgaatcaacaggctgtaacaattttcctttcctttttgtcatttcaaagttttcctggcttttttcagtaatatttttccctttatgcagaaaaatcagtacatattttgaaataacagtgcccagcaaatcaacattttaatccattcatgttaccttcatgtatatatttagtttttataat

SEQ ID NO: 136180 - DNA, 436 bp, Homo sapiens
tgagaactctctcactatcacaagaacagcaagagggaacttcgcccccatgattcagtcacctcccactaggctcccctttcaacatgtggggattacagtttaagaygagatttgggtggggacacagagccaaaccacgtcactagcaaatcaaattcaatgacacattgaaaaaatcataatcaccaagtgggatttatccaggcatgcaagtatggttcaacatatgcaaatcaataaatttgatatatcaaccgaatgaaagacaaaaaccgtaaaatcatttcaattggtgctgaaaaagcgtttgataaaattaagatcccttcatgttaaaaatcctcaaagaactaggtatagaaagaacatacatcagcacaatataagccatatatgacagacccacagttagtatcattctgaatagggaaaa

SEQ ID NO: 136181 - DNA, 437 bp, Homo sapiens
tgagagctgtctcccaagtcctgtgccaatagtctttgactgaggatactatatatattagtattactgtgttttatatatattaagatatagttatgaactatagatatgcatacataagctaatgtgtgtatatatggacatacacatgttgttataagctatatgtgagtatctgtatggcaacaacatggaaaacatgttttgaataatattgtcttttcacccacactcaaagaagcctctctagcattcatactcacatatcccaactttatattatttaatattttaaaattctttaattttaattttataatttgatgayggtatctcagtttttattataaagtataattctatgtgactctaaatcttggaaggattcttagcttttcacaggtgaaattcgaggcccaagtactagtaattctatc

SEQ ID NO: 136182 - DNA, 634 bp, Homo sapiens
gctttcaatttctttggatatataaacccagaggtaggattgctgtatcaaacaatagttttatttttagttttttgaggaagctccatactattgtattttctgaagagactacatcaatttatgtaactactaaccatgtacaaagattcccttttctttacattctaaccagtttttatcttttgttattatagccaacagatgtgaagtgatatatcataaagatttttatttgcatytccataatgattagtgatgttgagcacctttttcatatacctgttggccatgccttcttttaagcaatgtctatttagattatttgcccattgttaaagtcatgctatttttccttgctatttagtgatagaagtttcttatatattttagatattaactcataattagatacatagtttgcaaacattttctcccattctgcaggttgccttttcattttgctgactgtatccttcactatgcagaagtattttagtttgtcaaaatgcgaattgtttatttttgcttctgttgcctgtgctcttagtatcataaccaagaatcattgccattccagtgtttagaaactatttcactatgatttgaattggatttcattgaacctgtagcc

SEQ ID NO: 136183 - DNA, 454 bp, Homo sapiens
atgtatcattcccagtaaattaccttatgtggcagaagaaagaccaccatgacagatagaaaaacttgtattttaaygatagctatatgcgtgactttagcatggtctttaacactgtcttagtttaattaaatattgggaatacaattaacaactttacagaagagttatgagggttaaacatgatgtacataagccatttggcacattttaaatcatccaacaaatttattggacacctacaatatgtcagtcattgttctaaaaactgagggcccagcaatcaaaaatatagacaaaatctctgtctacttgagcttatgttctcatacacaattaaagagctatagctctttttattgacaccattattgtactacttccatgaatctttttctttctccacaattagtcatcaaattccatcctttctgtttccttccctctgccacct

SEQ ID NO: 136184 - DNA, 529 bp, Homo sapiens
agaatatattcactgaggatacatagatacatagaatcgataggtacaaaaatacaaagaaatatgtagatatatagattagaaagagattggtccacctttcctaaataaataaaagcaaaatttatttcatcagaattttataatttctgactagcatgaggggagaaaaaaggtccctatgttcttcttcttcattggtgctttccagtctagcccacaaacacccaattgaacagttgtgggacccctccaatgcaagcaaggccagcctgggactcaggacatttcttattaagggcaattctcaccttaagggagatgaataaagcaggctggatattatttggacaatacactgaatagtraacaaaggatttgtgaagccccttgacccttgtctggcagtggtatcctgatattctaattttgatacagttaaaagaatctgagaacagtcatgaccaaagcaaggagacagccataagtttggcagatactgttttagtgatgctaatgcagtgatgaa

SEQ ID NO: 136185 - DNA, 530 bp, Homo sapiens
tgcctgtaatcccagctactcggaagcctgaggcaggagaatcgttttaacctgagaggtggaggccgcagtgcacccagatcatgccattgcactccagcctggacaacagagtgagactctgtttcaaaaaaaacaaacaartgaacttcaaattttttaattagaaatctatttctctgtttgatttcaaagagtagtatttagaaatcaagaagcattcacatatatcaaatagccattgctgataatatggctaggaaggatctatgtcaccttgagaactaaaattaatctctttaaacatattggttgatgaacttcactattctttctgcttaaatagaaaagcttttcctaactaagaatataagagctactctaggtaaaggaaagagtttaacatatttcaaagaaaaggctggtatttttttcagaaggagcttaatataacttactgcatggtataatatataaaaagtatatttagactataaagtcataataaatctagcaacataggattgatg

SEQ ID NO: 136186 - DNA, 530 bp, Homo sapiens
tgcctgtaatcccagctactcggaagcctgaggcaggagaatcgttttaacctgagaggtggaggccgcagtgcacccagatcatgccattgcactccagcctggacaacagagtgagactctgtttcaaaaaaaacaaacaaatgaacttcaaattttttaattagaaatctatttctctgtttgatttcaaagagtagtatttagaaatcaagaagcattcacatatatcaaatagccattgctgataatatggctaggaaggatctatgtcaccttgagaactaaaattaatctctttaaacatattggttgatgaacttcactattctttctgcttaaatagaaaagcttttcctaactaagaatataagagctactstaggtaaaggaaagagtttaacatatttcaaagaaaaggctggtatttttttcagaaggagcttaatataacttactgcatggtataatatataaaaagtatatttagactataaagtcataataaatctagcaacataggattgatg

SEQ ID NO: 136187 - DNA, 491 bp, Homo sapiens
atataaatacaccaagaacatgactagccagggaggcctgagtccttgactctaacttccttcagagactacagtgcactggctgtgcaccaagtctggtgtagggaggatacaccaggtaccatacaggtaaagcctttgtaattgcctatggtcaggcctgaaaaatcacacataggtttttaaccaggagtcaractcctcaggaacctcatatccttttgcacagaacacagaacatcccgatatgattagccaacttcctttgctgtattatcacattgtgcatattcttcctcccattaaaacagagctggtccttctacctgttctgtggtctttggtcccatttactttccttaacttatgacctattaaaagaaattctaaacattgacatttaaacactgttaagtatcttttatcttaaaaacaacaacaacagcacagcagtcatctatccactattggctctgctaatgcaatttacc

SEQ ID NO: 136188 - DNA, 491 bp, Homo sapiens
atataaatacaccaagaacatgactagccagggaggcctgagtccttgactctaacttccttcagagactacagtgcactggctgtgcaccaagtctggtgtagggaggatacaccaggtaccatacaggtaaagcctttgtaattgcctatggtcaggcctgaaaaatcacacataggtttttaaccaggagtcaaactcctcaggaacctcatatccttttgcacagaacacagaacatccmgatatgattagccaacttcctttgctgtattatcacattgtgcatattcttcctcccattaaaacagagctggtccttctacctgttctgtggtctttggtcccatttactttccttaacttatgacctattaaaagaaattctaaacattgacatttaaacactgttaagtatcttttatcttaaaaacaacaacaacagcacagcagtcatctatccactattggctctgctaatgcaatttacc

SEQ ID NO: 136189 - DNA, 592 bp, Homo sapiens
  misc_feature (1)...(592): n = A,T,C or G
ctgttattggaaattaaaatcataatatggccttcacctgccacacctttgttttatatttttcttatcattagtgggaaataagagtgtcatttaacagtcacccttaagaacaggattatctttaaaatttttaagaatacatttagttttatagaaaaattacaaagatagtacagagagttcccttatacccaaaacccatgtctctccattattaacatcttatattagcatggtccatgtgtcacagttaatgaatcaatattgatactttattaattaagtcagtactttactcattttttaatgaatgtcctttttctcttccatgatttcarccaacacagcacatcatgtttagtcatcatgcctctttaggcacctcttagctgtgacagtttgtcagaatttctcttaagacttgacagttttaaggagtacttgtcaggtattttatagaatatccattaattgggtctgtctgttaatttttattagactagggttttagatttttggaaggagcacctcaaagattaagtgccattcttaccacatgatatcaagnnnnnnnnnnnnnnnnnnnnnn

SEQ ID NO: 136190 - DNA, 596 bp, Homo sapiens
catgtaactcagcttttaatcatacttgaagtgattaccagattaggggaaagtaagaggaagggtcacagtttggaataagactcttatatatatgtaaaggaaaaaaagtcacaaatgtaaacaatgatgatgataataatcataattataatttattgaatatttaccatgtccataattaagtgattatttattaattcatctaatctttctagcaaccctttgaaaaagtgttatctctattttacatatgagacaagtaatgcttaactagtctaaggatacagagttaataaatgcatagtacaagattcaaactcaarcagtctaactccagaggcttccaggacccttaaccatgcaatacactgcctttcaccaaggagaacaaagtgttttcaatattagaatgaatgtactacatcaactacataacactgttattaagtccagcaagtaatgaggctcttgggcaattatttaagtacaactattaataagctcatactgagaatgtctagctcgtcctccacaagtctaaaggagcttctgatcaaacagtaaaacatgacataaatcccacagcctgcaat

SEQ ID NO: 136191 - DNA, 517 bp, Homo sapiens
gcatttctatttttttagactgagttccttagcacctctacaaagagtttcttaggctagtttggaatatcttagtaaaaactaatatatttatattcatttttaaaattatgccattattttactttcactccgctctgattgatttttttccctgtttggtcaacatttgtaaagttttttatttttagtttttgtatttcaataggtttttggggaacaggttgtgtttggctacatgaatacattmtttagtggtgagttctgagattttggtgcacccatcacctgagcaatgttcaccgtacccaatgtgtagtctcttattcctccccaccccctaccctttcccctgagtccccagagtccaatatatcatggcaaggttttatcatatttttgtgttgccataaaatgattgtcaagtagattgttaaatttgaccagtcttcaaagtgttacagagggaacgctttcatatacattatttcttgaaaaatcaaccccacttaaattc

SEQ ID NO: 136192 - DNA, 641 bp, Homo sapiens
taaaaaacccaggctcagccagaagagaggagaagcagctggacatcacagactatggctggacgttgaagaaaagtggcttaacttcagagagacaggttagaggcataacttcagagaagaatccggccagggacagccagacctcaggggaagattatcttcccaacatatctccgttaaagctcctcttcccactgagagccacctctatcggcaaaacagtctcccacatttaccatccttcgatttgyttgtgcaacctcatttctcctggatgccagacaagaattcgggaaccatgagtgcagatgcaaaaggctgtcacactgattctttgcccttgctggtggaaggcagctgcctcacgtgaaaatgtagagggtccactgagctgttaacacttaagctgtctgcaggcagccaagctacaagagcactgtaacatgccctctggggcttcaggggtcatctcctcccagatgctgccacagggccactatggaggtgtatccggccggcacctgaactcttgcacccactcacctgcatacttcctcccacaagtcatggagcacagcgggtccgagtaagtgaagttcacctctgctggtgctggagtggccagctcactccagcag

SEQ ID NO: 136193 - DNA, 530 bp, Homo sapiens
atcttcaaccacacaggcaaggacagtctcaggaatggccagttctgtgtcaaaactcctgaacctataaactcagctgttctgaagtcctattttttttttttcctttgggggcttttgtaaattcagygactctgtctgggaaagtatagcaattatatcctataaaaattactgtgatactggaaaggtataacactaataaccttgggaagctataacattaaacagtaacaattagaatgaagagaataaagacacaaatttaaattcatagtgtactgtattagcacttttatgactggttttagtagtgcaagtggctacagcttttcaggtggattatagcactggtgagaagagacctttcttgatcttattcttgtgttctcactcttgttctccttttcactgtaaaattcctgagagaattagccaaggatgcagaatatgatcagaaatctggggccataagaagctggagcagcaaaacacattcacagtgcagccagcccttggctcccagaatt

SEQ ID NO: 136194 - DNA, 610 bp, Homo sapiens
aaaccatagccattgaaacagggtataaagatgtaaatgcctggttagaatggattaaatattccgttcgcactttaaacaaatgcgactgttatgcttgtgcgcatggtaggccagaggcccaggttgtcctctttccactaggatggtcctcaggtcaagtggacatggagtacgtggtagctctttttcaagatttcaccrcctggaataacgaattgtgccaagctctttctctgctatttcccctgaaattcaacaccctgtgggtcagcccccaaggaccatccagcctccatcttccaagaccaattttacctcgtgtctccaatgacaaggggaaaaatttggcattccttggagacttaacaggatgcagtgaagtcaggcactttcaagagctgacccatcagtccgcccttattcatccctgagtggatgtaaggtggtattatggaggacctttactggacactctgccaaataattagagcagtacttatgctgtagttcaattggctatcccttttactctggcatttcatcaaccagaaaaagaagaaaaagaaaaaagaaaaaaaaatgtagcctcaattcttacctctttaac

SEQ ID NO: 136195 - DNA, 610 bp, Homo sapiens
aaaccatagccattgaaacagggtataaagatgtaaatgcctggttagaatggattaaatattccgttcgcactttaaacaaatgcgactgttatgcttgtgcgcatggtaggccagaggcccaggttgtcctctttccactaggatggtcctcaggtcaagtggacatggagtacgtggtagctctttttcaagatttcaccgcctggaataacgaattgtgccaagctctttctctgctatttcccctgaaattcaacaccctgtgggtcagcccccaaggaccatccagcctccatcttccaagaccaattttacctcgtgtctccaatgwcaaggggaaaaatttggcattccttggagacttaacaggatgcagtgaagtcaggcactttcaagagctgacccatcagtccgcccttattcatccctgagtggatgtaaggtggtattatggaggacctttactggacactctgccaaataattagagcagtacttatgctgtagttcaattggctatcccttttactctggcatttcatcaaccagaaaaagaagaaaaagaaaaaagaaaaaaaaatgtagcctcaattcttacctctttaac

SEQ ID NO: 136196 - DNA, 610 bp, Homo sapiens
aaaccatagccattgaaacagggtataaagatgtaaatgcctggttagaatggattaaatattccgttcgcactttaaacaaatgcgactgttatgcttgtgcgcatggtaggccagaggcccaggttgtcctctttccactaggatggtcctcaggtcaagtggacatggagtacgtggtagctctttttcaagatttcaccgcctggaataacgaattgtgccaagctctttctctgctatttcccctgaaattcaacaccctgtgggtcagcccccaaggaccatccagcctccatcttccaagaccaattttacctcgtgtctccaatgacaaggggaaaaatttggcattccttggagacttaacaggatgcagtgaagtcaggcactttcaagagctgacccatcagtccgcccttattcatccctgagtggatgtaaggtggtattatggaggacctttactggacactctgccaaataatkagagcagtacttatgctgtagttcaattggctatcccttttactctggcatttcatcaaccagaaaaagaagaaaaagaaaaaagaaaaaaaaatgtagcctcaattcttacctctttaac

SEQ ID NO: 136197 - DNA, 436 bp, Homo sapiens
aaagaaaataatgttatttgttatgcaggctaaacactgaccaactcactcaatatattctggaagtggcaaaataaaattggaaaagtagaacaagtaatttaacatactacacttatcttcatataaattactgcaatgaggcgccatcaccatcaccatcaaaaaaagaagaattcctacaatcaatatgtggaattttagctaaaaaagaaaagtctatttagaagtcwgtcacagccacatggttacctcaagccttacctcatcactgctccaccggtttgggaatgaggggcgtaacttcttgatgcacacaatctccctcatgtcctcataagaggggtcactgggcactaggtcatgataaggaagctggtattcttccactatacctaaaaatatgttgttactattattattattattattattt

SEQ ID NO: 136198 - DNA, 613 bp, Homo sapiens
gccattttcatatatactattttatagatttaagtctctcaactatcaaaaagtagagcgattttcaggagaaaaaagtcgtggggactgagttcaggacaccctgaaactatgcgaccagtaatttttttaaggtattttttcctacaagtaaggtatctgaaaagtcaacgttttgagggtggaatcaagacttttcacttctcctggcaaagagcaacaaggctcttgtctcgtgtccttctgtgtgtctctgtcaggatcacagcagctgtgctcttggtctgcttactcctctgtaatccacgtatgcagaagggagttaataaggtgatcaccatctccccagaattcaaaggtctttgcctctataaggtctgcccctatggggccaggaaaatataaacctatataaggacttgcaagagagcataaagaaggtagaaaaggtttacttgttgggttttcaagccttcaagttgaatgagtcttagcttttgctgggcagttgttctggacaartcatcagtttcatgtggagaactcagtgtaagcccaaggctaatgaatgagaggggtcccatggaaacacagctgaaatgaaatgggactt

SEQ ID NO: 136199 - DNA, 557 bp, Homo sapiens
gaccattcccccagacctcctaactaaccatagcaatcccaaaatatccaaacttctacttgttaaatggaactcttccccacttaatggactccacctgaacaccccgccaacaccaccactatttcctggatgtggaaagctgggtatctctatctccaatgcactaatcattctacctttttaacccactattgcattaatgacacaaaagtggaagcttcccttcagtgctctcatccaacttcagttgccaagttcccaaggctgcagcaaggtaaatgagattccacttgtcagcaaggagaccatgtgyggtgccttcttccggaccagaaaacacaagaaaaaaacagttgcctagtttggaaaggtgggagtactacaccttctagaaaacgaagattgtctgaccaccccattagaatgggagaaaaacatctctatagacccaacttggcagtaaagaataaacatcacaacctatagagcttttgtgtcccaactcggcatatttttgtttgtggcaataaatgggaagatgtcacagcctgtaa

SEQ ID NO: 136200 - DNA, 535 bp, Homo sapiens
gaattctgtaaggaacagggtaagagggaggtcagggatctagaggcaatgggaagcttgtctatagttttgtcaagctgagggcaatgttatgcctgcattggtcactagaataatactccttgacgtgcaatgaacgagccatcctggcacatatttgttttttgtttctcaggctgtgccatacttcatgtgaatctgttcattccatgatgtaatcatataatgtttctgaatggtaccaggaaaaataaatgtcataatttgggttaagatgatgtactgggcatgtatatctacatcctcccttggctccaatcattgacaattctgtggataaaaaaagacatactggtacttaccagtttttgaaccaacttcctcccctsttggtccccaacatgctccacaactgtccaatataaggaagtacaaatcaggagtatgtaaaattactaaaaatcaggaagcagatgtttctagattgaaggaaaaacaagattagtagaaatgaatacaatatatgagcattatt

SEQ ID NO: 136201 - DNA, 465 bp, Homo sapiens
tgtcacgttgaaaagagcacagatctcagatgatgggatgctaagcagataagaagaaaggttaggcagatcttcacaaaacattacagatccagtgggttgtactggaaacataacaggaaacaaagagtgaaagagaaaagaaaaaaaaataggakatttaaaaatgggtgatgggaaacattgtttactcttctatatcgcctaattttgctctatgctgtggtgctttggagaagacaattgaaaagtaatggggtgtggaagagctgaagcacccactaactaagggagaaagtcgtagcctaatgaagtaaatgggttggcaaagagcttgttagaagagggtgaaaatggaacaattttaaaagcatttttaattagaaactaaagttataacatgtatggataaagagaaaatcctgaaaataaatttaaaaatgtaaatccatacacatttgctct

SEQ ID NO: 136202 - DNA, 346 bp, Homo sapiens
ctgcctggaaatctcagtcttctttawgcccaggaaggacaggaagcaggtgtagggaagctctggaggtccgttccactgcaagtgatgcaaaggcagctttaaagagatgtcacggatttaacacccacactaaaggaaataggatggatattctccacgattctttcttaaatgagaacggttgtcacgtttggtatacctaatgcagtgtacatcatactagatgatgacttgtcagattttgaggagacgcagatatgctggagtaggtaaggaaaaaaatgaatattagagtcagcaatgctctgctgattatatgtccaacctgcatgactgctattaa

SEQ ID NO: 136203 - DNA, 616 bp, Homo sapiens
gctactaatacatggaaactatgaggtaaacctacaattgctgggggatttgtaagtggcagaagtactaagtgctactttggcctcctaggctctttaaatctgaatagagtagctggcattccattcttttcatggtattagcatactattgtcttgagttgtctaggtaggaatatgtagcctttaatctagctctaagttttatgacccttatagagaagactgaaggcagaggaaagagtccttgactctcatttgcctacagcccccagatgtggagctgagtgttagaagatgatggtatctttacctgtgcattttcctagagactcaggatgagaagaattattaaagcaaaattcattaggttttcttcctccatgagttgtcataacactgcatagaatataaaggacaccaatatttctgaagggattctacatacctctttctatccagatatgattgtttggggaattataacaataacacaataattactggacmataacaattcatccaaatcctagggttctttcccatctatttctaatacctgtattagttggataggactgccatgatgaaatatcacagtctggacagcttaaac

SEQ ID NO: 136204 - DNA, 454 bp, Homo sapiens
ctgtaccaaattgagttccartctgggttgaggagaagctttgaaaagcatccagaatcaatgttttacatttaactagaatataacatttttttcaataagtgaagcattaaaattttaaattaaaaatgtaagaaacttaattgaaatataaaaacggttcctatatttgaaccccagaagccattaaatctgatgagagtttttcaaaggttaatttagaatgagtcaataaatatcatggaaggcaacaatggggaaaaaagccattactcatgtgtatcacaaatatagaaaattttaaattaaactgattactaatgagaataatttgtattaggtatgatggatggtttttacttatatatgaccatgatgatcagttaaatttattctaaccaacagtacattgagttgttctagttgcatatattttccaaccagaacaactcag

SEQ ID NO: 136205 - DNA, 454 bp, Homo sapiens
ctgtaccaaattgagttccaatctgggttgaggagaagctttgaaaagcatccagaatcaatgttttacatttaactagaatataacatttttttcaataagtgaagcattaaaattttaaattaaaaatgtaagaaacttaattgaaatataaaaacggttcytatatttgaaccccagaagccattaaatctgatgagagtttttcaaaggttaatttagaatgagtcaataaatatcatggaaggcaacaatggggaaaaaagccattactcatgtgtatcacaaatatagaaaattttaaattaaactgattactaatgagaataatttgtattaggtatgatggatggtttttacttatatatgaccatgatgatcagttaaatttattctaaccaacagtacattgagttgttctagttgcatatattttccaaccagaacaactcag

SEQ ID NO: 136206 - DNA, 454 bp, Homo sapiens
ctgtaccaaattgagttccaatctgggttgaggagaagctttgaaaagcatccagaatcaatgttttacatttaactagaatataacatttttttcaataagtgaagcattaaaattttaaattaaaaatgtaagaaacttaattgaaatataaaaacggttcctatatttgaaccccagaagccattaaatctgatgagagtttttcaaaggttaatttagaatgagtcaataaatatcatggaaggcaacaatggggaaaaaagccattacycatgtgtatcacaaatatagaaaattttaaattaaactgattactaatgagaataatttgtattaggtatgatggatggtttttacttatatatgaccatgatgatcagttaaatttattctaaccaacagtacattgagttgttctagttgcatatattttccaaccagaacaactcag

SEQ ID NO: 136207 - DNA, 585 bp, Homo sapiens
cgtccatccagtaactcagacaagatcttagggtcatttaggtatttttatctcacataccagacatctaatccaaaagtaggggctggatgcagagcaagatggcagaatagaaagttccactaatcagcctcccatcaagcacaccaaattaatgactatctatggagaaaaaacaacttactaaaagccaaaaactagatgagcactcccactacctcagtacctggtttgatcttcattgttgaaagaggcactgaagagatagaaaamtcagtcttgaaccgccgatgccacctctttcccactcccagcaacagcagcatgttgcagggatcatctctggttgctaggcgaagtagaacacagcaattgtgaggctctgaattcaatgctgtcctgttaaagcggaaacataaaccagaccaaactcaacaggtgcttgcccacaacgggagcatttaaaccatccctagtcagagagcaattgctgatacaagtggtccagatttgagtgctcaaaccttgccacgaagggtcaaaataatctcagcctctaagtaaacctgaaatgcagtcgaggcc

SEQ ID NO: 136208 - DNA, 587 bp, Homo sapiens
attttaatccatcaaagccaaaaagggggactctgtcttctcaagaagtgtttagttcctccttcaataattttgatttaagttagaccctaccaggatcacttcccttttgattaacacaaaaccgatgatttgagaccttaattacaccttcaaaactccatcatctttccatgtactattggttatagtaagatcacttgtcctgcccacactcaaggggaagggattaaacagatgtgaataccaggaggaggcaattatgggcagtcaactttgagtgtgctcamcttaaaaagatggccattatattctttctgtccaactatataatcttatttggttacagtggtgaaaagtgtggcatctattagtttctagatttctctaatcatttctcaatattgtgaaattattttgttaaagattgtccaataaatatctttaaatttcttcatttatttctaagaatttctctcctatatgctacttactgttttgcataataaaattatgtgttttttttttaattttcaatgagttgtatttttttcaagaaataattttaaccttgtgtttatttatat

SEQ ID NO: 136209 - DNA, 587 bp, Homo sapiens
attttaatccatcaaagccaaaaagggggactctgtcttctcaagaagtgtttagttcctccttcaataattttgatttaagttagaccctaccaggatcacttcccttttgattaacacaaaaccgatgatttgagaccttaattacaccttcaaaactccatcatctttccatgtactattggttatagtaagatcacttgtcctgcccacactcaaggggaagggattaaacagatgtgaataccaggaggaggcaattatgggcagtcaactttgagtgtgctcaccttaaaaagatggccattatattctttctgtccaactatataatcttatttggttacagtggtgaaaagtgtggcatctattagtttctagatttctctaatcatttctcaatattgtgaaattattttgttaaagattgtccaataaatatctttaaatttcttcatttatttctaagaatttctctcctatatgctacttactgttttgcrtaataaaattatgtgttttttttttaattttcaatgagttgtatttttttcaagaaataattttaaccttgtgtttatttatat

SEQ ID NO: 136210 - DNA, 617 bp, Homo sapiens
attcaccacattttagtgtacaatttcatgattttaaaatatgtaaacgttaactccaattaaatttagaacatttccaacaccttaccaattttccttgtgatcctttacagataaacttcctttgacgctgaccctcaacaacattcgatctacttattcttatcattgtttggtctgtatagattttcatataaacagactcattttttttgtagtctattgtgattaatttcatttacaaaatgcttttgagtttcattcatcttggtgyatgtattgtattttctccttcttcattgctgtgtaatattcaactcaaagtaattcagtttgcttatacatttaccagtcaatgtgtattactttttgaccctattttttagctattacgaataatgctcctatgaacatgtacatgcgagtctttttatagacatgtgtttccgctattcttgggctaattacttagatagattgctggatcatatggtaagtttatacaaaatttagttttagtctgtaagaaattgccaaaccgttttataagtggttacatcattttaacttcctccagcaatttatgagaattccagtcattccacatgaacacaaaa

SEQ ID NO: 136211 - DNA, 655 bp, Homo sapiens
ctacaataaattgccacctgatatatttgaattcttactcaaactaaccttgatgcaaaattagctgatcatcaataggcagctttctatacyttgctcataaagcttaacacataaccaaacaatttagagttcagaaagaagccaattagtttcaaacaatttcatggacagactgccttctcaagtgggtccctgacccgtgagtagcctaaatgggaggcaacccccagaaggggcagactgacagctcacatggccgggtacccctttgagacgaagcttccagaggaatgatcaggcagcaacatttgctgtttagcactattcactgttcttcagtctccgctgctgatacccaggcaaacagggtctggagtggacctccagcaaactccaacagacctgcagctgagggtcctgactgttagaaggaaaactaataaactgaaaagacatccacaccaaaaccccatctgtacatcaccatcgtcaaagaccaaaggtagataaaaccacaaagatggggaaaaaacagagcagaaaagctgaaaattctaaaaatctgagcgcttctccccctccaaaggaacgcagctccttgccagcaatggaacaaagctggatggagaatgattttgatgagttgagagaa

SEQ ID NO: 136212 - DNA, 655 bp, Homo sapiens
ctacaataaattgccacctgatatatttgaattcttactcaaactaaccttgatgcaaaattagctgatcatcaataggcagctttctatactttgctcataaagcttaacacataaccaaacaatttagagttcagaaagaagccaattagtttcaaacaatttcatggacagactgccttctcaagtgggtccctgacccgtgagtagcctaaatgggaggcaacccccagaaggggcagactgacagctcacatggccgggtacccctttgagacgaagcttccagaggaatgatcaggcagcaacatttgctgtttagcactattcactgttcttcagtctccgctgctgatacccaggcaaacagggtctggagtggacctccagcaaactccaacagacctgcagctgagggtcctgactgttagaaggaaaactaataaactgaaaagacatccacaccaaaaccccatctgtacatcaccatcgtcaaagaccaaaggtagataaaaccacaaagatggggaaaaaacagagcagaaaagctgaaaattctaaaaatctgagygcttctccccctccaaaggaacgcagctccttgccagcaatggaacaaagctggatggagaatgattttgatgagttgagagaa

SEQ ID NO: 136213 - DNA, 513 bp, Homo sapiens
ttctgtgcttggcttatttcacttgacataatatgctctagattcatctgtgttgtcccaaatgacagaatttcattcttcttgaaggctgaatattttattgtgtatatatactacattttctttacccattcatctgttgattgacacttaggttgattccatatcttggctattgttaataatgctacagtgaacatggaagggcagatatctcttcaaaatactgatttggatacwtttcaatgtatctcctcaagtgggattgctggattatataactatttttagttttttgaggaagctccataccattttccataatggctgtactaattaatattcttaccaatagtgtatcagtgttcccttttctccacatcctccccaactcttgttaactttcatctttgcaataagagccattctaatagatgtgagatatctcgttgtggttttaatttgtatttccttaatgattagtatttctgagcattttttcatgaacctgtt

SEQ ID NO: 136214 - DNA, 534 bp, Homo sapiens
aaatgtacaatttattagagataattataactgggatcaagccagaggaaagggcaaaggcagtgtctcaaaattggagtacctaagggattagcccttggaggttttccattctctgtctggacccatttacttggtggtttcctctggtcccatgactttaaatattatcttaagctaaagactgacataytaattcttctattccctctcctgaaatcaagatcactgtatccaatggcctatttaacatttccacttgggtttttaatagacattttaacttgtacaattgaactcctaatacctccactcccatgccacaccttctaaacctgtaccacctgcactcttgcctaacccaagtaatggccacctcagtccttggatatactcagtccaaaaccttggagtcattcttgactactctcgattttcttacattctacatcaaatcattaaattctattgggtctcccttcaagttatatatagaattgcacctcttttcaccattgctgctactgcccttgt

SEQ ID NO: 136215 - DNA, 579 bp, Homo sapiens
gtgccaccacacccggctaatttagtatttttagtaaagaagggctttcactatgttggccaggctgatctggaactcccggcctcaggtgatccacccgcctcggcctcccaaagttctgggattacaggcaggagccacmgcacccggcctcacagatctattctaaactagtttatagtctcagttgtttaccactccattcctctcctttattattacacaaataatcacggccatatcaccaatgttacgatagccatagaacatgttgtcttagcaactcaccctccagggaataaagctgtggtctggaagtcacagcctgctgttgaccccacatcccacttggcttctctttcctgagatggtgcagccatgtcttcaggcaagtgacatagtcaggctcctttctttgcccagatgtcaagcatacatccgtggagtaattattcattaattttcagaaaagagcattcaactctcaggtattttccagaaagttaatcttaaactctttatcacaacctaattttcaattataatactgtaggaggcttgcctaaaggatgagctgtc

SEQ ID NO: 136216 - DNA, 572 bp, Homo sapiens
  misc_feature (1)...(572): n = A,T,C or G
ctctcccctttatgggtatttgcccccctgccttttttgaaatttacccagttatgacacattatattaattaataatgaatctactgagtattttgtaaatgatttactcataaatgaatttctattgaaattagagggagaactgtattttaaggtattgtattaatgatacagtcaggacgcagggawataacgggtagaaaagggcagttgcctggcaaagtacccaccctcaagcctggaaacccacagccctacatgggaacaggcattcctattttcacaccaaaacgttgcatttggcctgccatgcccccctatcctgtacccatataaatcccaaaccccaggctccatgagcagaagagcagaggtgtagaagagtggcacagcagagagagagagaagagaaggagtgtctggatgtcgagaggagtttggctggggatggtcagagaggagatcggctgtgggatggccaaactctaggggaagatcatcttcccactccatcccctttccagttccccatccatccctttgaagccacctctatcccagcaataaaan

SEQ ID NO: 136217 - DNA, 310 bp, Homo sapiens
atatgctatagactgggccaaaattaactttaaaaaatgttcatttttatctagggagtttcaagcaagagagaattgaaagcatgatgtatggtaatatgattgaagcacttagctacaaactagccttttattgactgaatcttacaaatatatttatttgtttttttaaacatttrtgtggatctctaatcaatggggagaagaaggagtaagtttcattaaacaatatcgatattgggatgataagatagtttactgggaaaaaataaagtttaatccatagctcacatagtatattgtgaaaaac

SEQ ID NO: 136218 - DNA, 637 bp, Homo sapiens
ttctcactatgtatatgacagagctggacctagaattgggggcggctttgtcttcccaatccactgtaatgatctcttgctttgccagattccaatctcatgtagttctctttactccaccccctacttatcccctcccaagcaatagtttcattttagttgaaggaatgtaaactagatttaaaaatcagtgtattaactgyttaagttatagtgcctcagacttattttccttgtctatgaaataaggtgtttgtactagcttactttatcagttaactttcaatggtattataattccatcagtctctctctgtccctgcccactctcaaccacttatcacttctcctacactatcttaatagaactgctcaaggcagaaagacagggtaacatcgtgtttggtaagctgattgcttttttcttcaacatcttcttctctgatttcagatatgagtacctttatactgtcctgcccaatacactgtggcatccatatttcaaatatgttgatgtagaagcatccaaatacttattaactgttacccacagtaagatatatagcatttatctttcaattcagtgcacatgcctgcaaactgaaagaaaattttcttgaggtcatacttactcttc

SEQ ID NO: 136219 - DNA, 639 bp, Homo sapiens
tatatatatatatacrtgccacattttctttatccattaattcctcaggtgacatttgtcttgaatccttaacatggctattgtaaataatgcttcagtgaacatagggtgcaaatatcttttaaaatcatgctttagtccctttgaatatatacccagaagtgatactgctatatgataaatgaaaatacatcccattttcatggattagactgcttaatattgttaaaatattcatacttcaaaaatcaatctacagattttatataattcttgtcaaaattcaaatgacatttttcacagaaatagaaaacaatcttaaaagttgtatggagctatggaacacattgaataaccaaagcagttttgattaaaacaataacaaagctgtagacatcacgatttctggtttcaaaatatatcacaaagttacagtaattaaaagagtattgcattgacaattactaacagacatagaaaacagacataaaagacatatgaaatggacaatggaatagaatagaaacccagaaacatacccacagatacatggtcaactgatcttcaacaaggattccaagaataaacaatggggaaaagacagtctcttcagtaaatggcattaggaaaacagaatat

SEQ ID NO: 136220 - DNA, 460 bp, Homo sapiens
ctgagtctcttccgctaaatctgcctgatcttatttgagtgacaattaagacagttgtcagtaaaagcataaaagcttcatcactactcttttatgaaaacaatgaggttcaggagaaagagcaaatggctaactagatgtgcctggtgctcatcctccctraaaaacaaaaaaaacacaaaccaaaattatgaatgaataactataatttgactggggtgtttgaaggaaagtgctgcactgtagcaagggagtgatgaaatctctgcagaacacgacaacccaggatgacagcacagacaggggagcaaaggaccctgcctctgctttcctattttccctaccagaactgacttggagccaggagggacttctctttgcagggaaaaagtaagctggagacaaccagcaggctccattgtcaccatggacacctgtagttctcatttcaggagaattc

SEQ ID NO: 136221 - DNA, 449 bp, Homo sapiens
taaattccacagacttcacctgagtctcttccgctaaatctgcctgatcttatttgagtgacaattaagacagttgtcagtaaaagcataaaagcttcatcactactcttttatgaaaacaatgaggttcaggagaaagagcaaatggctaactagatgtgcctggtgctcatcctccctgaaaaacaaaaaaaacacaaaccaaaattatgaatgaataactataatttgactggggtgtttgaaggaaagtgctgcastgtagcaagggagtgatgaaatctctgcagaacacgacaacccaggatgacagcacagacaggggagcaaaggaccctgcctctgctttcctattttccctaccagaactgacttggagccaggagggacttctctttgcagggaaaaagtaagctggagacaaccagcaggctccattgtcaccatgg

SEQ ID NO: 136222 - DNA, 543 bp, Homo sapiens
agtccctgtgataagtgctgagataggtgaattgcatgaacataaattatgcagcctattagtaaagttttaagaccaatcttctgttaccaaacagctacaaatacacaaacacrcatacacatacacacacctgaaaatacttattttaatgtattaaagtaatgaactctcactaatgtgtcttgagaaggtttgttttgaaacctcatactgatatctttcttttgttttataattctaaggtatttctttaaaatgttaatagttctcttaattttctgtgaaccaccttgtctctcttctgttaacattacctccttcttccagagagtagagattcccaggctttaattgaccttacatctcatctgtgaacattctaaactctgtattttcaataacttgccactgaaaagtttcaaaaatacatttgtctctgtttatttggttgtctttttgttctcaacccattgcacaaataagtttcctttcatgacatcaatgtgtccttctaatttgtcctttcttctctccctaaaa

SEQ ID NO: 136223 - DNA, 543 bp, Homo sapiens
agacatcaaccatcgccatttctagcacagttctcctcctgacatagagaaaattgtccgaagtagaaagtctatcttcctgacctataacatgattatgtgtcggtatgtagttattaatttattatgtcctaaataacttcagacttaggcataaatcccttcaagtctaatttggctgtttggtatccttaaacaaatataaatctcctatgtgaatgtcataccaagaagcaattttaattctaaattatttgtgttaggatatgatggttttawaaggttttagcttaataaaacatatactcctatacatatatattcaactccttactcttgttttcacttctttcttatgtatcttgatactggttcttcttctcgtatagcattagagatagataaaaatctttgcttttaagaactattgcaataaaatctaatacaccctagtttttcccgtctttagtcttgaaggaattaaatttgctagagttttgtgagacttttattcttgaaatatataacttgttcagtggacca

SEQ ID NO: 136224 - DNA, 543 bp, Homo sapiens
agacatcaaccatcgccatttctagcacagttctcctcctgacatagagaaaattgtccgaagtagaaagtctatcttcctgacctataacatgattatgtgtcggtatgtagttattaatttattatgtcctaaataacttcagacttaggcataaatcccttcaagtctaatttggctgtttggtatccttaaacaaatataaatctcctatgtgaatgtcataccaagaagcaattttaattctaaattatttgtgttaggatatgatggttttataaggttttagcttaataaaacatatactcctatacatatatattcaactccttactcttgttttcacttctttcttatgtatcttgatactggttcttcttctcgtatagcattagagatagatmaaaatctttgcttttaagaactattgcaataaaatctaatacaccctagtttttcccgtctttagtcttgaaggaattaaatttgctagagttttgtgagacttttattcttgaaatatataacttgttcagtggacca

SEQ ID NO: 136225 - DNA, 510 bp, Homo sapiens
ctatcctgcacccatataaaccatgaatcctagactccagaagcagaccagcaagtcagcagatcagcagatggacagacatggacggactgcagaatgaagccgcagaaaaagagagaaggaacagtcgaatgcctagaggagtttggctgggggtggttggagaggaatccacaactgggcagcctgactccaggggaagatcacctccccactccatccctacattctggctccccatccaccccgctgaaagtcacctccatcactcaaaccttgcattcaaccttcaagcctgtgagtgacccaatttttcttggaagtggggcaagaactcaggatacagaaagmtgttacactggccctctgcccttgcagaaaggcagagggtccattgatctgagtcacactcaagcattctgtggacagcaaagctgaaagagttttgtaacactaggtttacaggcacccacaccttaaacactgctgtaggattggagcccaaagcac

SEQ ID NO: 136226 - DNA, 366 bp, Homo sapiens
caatgggacacctctagaggatatttaaatcccagaaaattctgtaaccagggctcttgaccctcttgctctagcccttttccactctgtggagtgtacttttattttaataaatctttgctttcattgcttcattctttccttgatttttgtgttctgtccagttctttgttcaaaatgccaagaacctggacaactgatagtcatgacrttccaccagtaacacttgggtaggagttacagacattatggctcagtgcagagaaaactttcttacaggacgaatgggtacacctggatttatcactgtggcaagctgaaagaaagcctctgaagtgccaagctccagtttgggctgcctgagag

SEQ ID NO: 136227 - DNA, 543 bp, Homo sapiens
ttgtgtagccagggtgaatcaaaaggaccctgttttttaaacatcaggattaaggatccccatctattgctgatggctgcttctgatcayagaggtgtagacaaagagcagccattagtttttacctccacccattcttcctagcttctcacctgcagttgaagtgaatgccatggaattcaaagttctggcatccttctcccctcctttatttatctgtttttcctttttggaagtcagatattaaagactaagacattaaaaaactccatatatgaggaaatttagaaaataatcattgaagtgcatggaaaggctcaagaaaaacctgagatgactttaattttacacctcaggccgatccttggcacagagtcagcatacaaaatcaaacaaaaaaaacaatctccagaacaaaaatcatcaaacctcaggaaaaggggagaatctgatttccagagttaccacattattagattcaaatgtctagttttcaacaaaaaattacaagacatacaaagaatcaggaaagtaaggctcatt

SEQ ID NO: 136228 - DNA, 411 bp, Homo sapiens
accaccagggcaagtatgtcatctataagctacacataaaggctgaaaattctaagrctgaaacagagaatgaagtcattgatatattttcattcccaaaaccagttaaacatataagcatcaatgttaaatgtgaattagcagaaataaacactaaaacattttataatatgaaaaagcacttcatctcgtaatagataatcctataaatctgcaaatacacagtagcaacaataaaaagatatttgtgttgacacatagatatatagtgatattcatcatcattacaatattatattcaaagtaatttggaattactttggaattatttttgaattgaaattctttttgccagtaattacttccaaagaaacattagaacaattttgcttaaaataatcaactattata

SEQ ID NO: 136229 - DNA, 621 bp, Homo sapiens
ttatatttatttgtaataaggaagagaggagatatattagcttcaggaggaaatgggattaagggagatatttcattatttttatgttttggaatgataggtaagggaaggacctgagagagtaaatgttgatggaagggattcactacacagaagcagttctttggaatgtctcctgagttcaaattacactgtgataatttgactgtataagaaaaattctgtctctcattatgttttccaaaatcagaggtaaacctgcctatttaaatgagatctctctttttggagaaggaacagattttgggaaaagagaactgtgcttatttgtcaaattgaaattaggagtgaaatccatgtgtttctttatacccyttaaatcgacttttatatgttctgtaattcattcagcaacagtcataaaagtttgtgcagaattccacaaagtgctggaaatctcagccatcagttccataaacaaaaatagacattctactttactctctaggtgtgtgttttaatttcttccagaaagaaaaaaatgaattaaaaaaatttaatgttattatgaaatttccttagtatttttttagaaaagagaatttacttcataaagtaaca

SEQ ID NO: 136230 - DNA, 552 bp, Homo sapiens
tcacaaatggtttttaacacataaacaaaaatagataagcacaaaagattaaatggggaacatggtagtttgtagattgcaaaatagtcatgatactttgcagtatctctcatcaataagtaaggtctctttccctgctccttgaatctgggctgacctggggatcatttacctgatagagtatggargaagtgacactgtgtgagttctcagcataggcctcagaaagccctgcagtttctcctttcccttggaaatctgctgctatttgtagcccagcctgctctgtagaatgaagaaaacacatggctcagttatttctatcacctgcaccaacattctgccaacttcccaatatgtgagctaggcacttgtggatcctccagccaatatctgacttgccagatgcacggcagagtccagcagaaattagccagggtagcaaacttaaataaatataacataaataactagttgttctaagccgataaaatgtggagttgtttgttacctagcaaaagcttactgatgcagggaatgtttcaagatagc

SEQ ID NO: 136231 - DNA, 641 bp, Homo sapiens
ttctttaatgtaatatgctggagttggaatagatcatctccaaatcccttcctgttctcaaactctgtgtcttatgatagtatttttagatttctactgtttcaaggaaaaccaaggctagatgtttaatcaaactttgtttattttccgcaaggaatagatatgtagtctaagtcattttgcttcaaccaccagttttcaacacacagaattaagatattatttgacctcaagttgtcacaaagtgtgaaaatgcagtatgcaattttatatgctttcttatgtcttctgcgcattctgtaagtttttcctatttcccttcttcccatggttatagacttcaagcatctgaattttattttaagtcaattggaaacattaggttgatgtggattatacacaggggatctgaatgggaaacttgtttatttcatccatatgggtttattgtaacttcaccagaaaagcctacaaaagagcaactcagtgagagagaaaatagcattatttttattttcaactccaaaagggaaaactaaaatttcttcccagggagcattccatctaaccagatcactcttatgttaacagaatccaagccacgtggcrctgccttgcactgctgaacttaaaactactta

SEQ ID NO: 136232 - DNA, 429 bp, Homo sapiens
ttgctttaggtcacacccagcacaatcgttgtggtagtgaccacagggttgctttgttactcgacctccagctccacattacttagatgagagagagagagagactccacttctgcacttgtttgggtgaaagtaagggaagaacaagaatttgtctttactaagccagataattcttccagatcttgcataagactgtcatggyggtactactatgagtctgtaagaaccacaaaattccttgacctgttgtgcaccctaaaacagatgcagcatagatgacaacacccaagtctgtctgaatatctggaaaaccttttcaagaaggttgggtacagacaagcccagactgcaaaaactgcaataaatacctaactcttcaatgaccagacacagatgaacatccgagtatcaagaccatccaggaaa

SEQ ID NO: 136233 - DNA, 581 bp, Homo sapiens
gttgtacacatgtaacattttaccatcaaatttgaaaacttaggtaaaaatatacaaataacttgaaaaagacaatttatcaaaactgatataacaagaaatagaaaaatctaagtatacatatcaattacaaacattttaattaccaaraaccttctcattaagaaaactctaggcccagatcatttcactctaaatttaacgtgtaaagaagttaaaatgcaaatcttatataaactctcacataataccttcttatcttatgagaccaatatgacatcaaaactaaaaattttttgaaaattgcaatataaattaattatcatgaacttacatgcaaaatacttaataaaattctagcagattgaatctggcaatttataaaaggataaactccactggggtctattccaagaatgttagtttgcttaaatactcaaaaactgattgctacaattgatattcttgtagaaataatgatttcttagttttgatattttaccatgattaggtaagttactaacattagggaaatttgagtgaagagcatagaagttgtcattggactatctttgaaactc

SEQ ID NO: 136234 - DNA, 485 bp, Homo sapiens
tcagtcataagagagttcctgtatcagtcagagacagaaatcataccagatatttgaagaaggataattagtgtaaagaattttttttttttgagacagagtttcactcttgttgcccagactggagtccaatggcgcgatcttggctcaccgcaacctctgcctcctgggttcaagcgattctcctgcctcagcctcccsagtggcttggattacaggcatgtgccaccatgcctggctaatttcttgtatttttagtagagacaaggtttcttcatgttggtcaggctggtctccaactcccgacttcagctgatctgcccaccctggcctcccaaagttttgggattacaggcgtgagccactgcgccaggccagtgtaaagaatttttaatttaaaaggttacaagttactaaaataattaaaaaatataatttcaagggcagaaggtaattactacctctctgctgaagaaaagtgagca

SEQ ID NO: 136235 - DNA, 623 bp, Homo sapiens
gcttcactggccttttcaaggtaggtttgtgttttttctatcccaagtcaaacatataaggagagagaagttttccttttcaccttcattgccatttcttgacaatcacacctttttcctacaaaatatttgctccttatgaagctgctaacttcttcactgctggtctcatacctcacttaaggtgatacttcacttaaggtaacggatacattttggctctgtgtccccacccaaatctcatcttgcagttcccatgattcccrtgtgttatgggagggacccagtgggagatgactgaatcatgagggtgggtctttctagtgctgttcttttgatagtgaatgggtctcacaagatctgatggttttaaaaatgggagtttctttgcacaagccctctctttgccggcttccatccacataagatgtgactttctcctccttgcctttcgccatgattgtgaggcctccctagccatgtggacttgtaagtctaataaacctctttcttttgtaaattgctcagtctcgggtatgtctttatcagcagcatgaaaataaactaatacagtggctaattgttccagtttgcccaaaactgcaggggttttcaggaaaagg

SEQ ID NO: 136236 - DNA, 553 bp, Homo sapiens
tatgaatatgtgaaaatggatttattacatatatgaagcataatctttcagcaaatgcaatctaagtgatcagtaagcaatcatttaaaatcaataggctaatawtgcttagagtattacaaaaggttttttatgtatacttgctggtttctagacacatagcttttaaaaattcatatataatttacaaagacaattttctatttgcagatacaatatgcttatattatagataaatgtagacctatataatctacatttataaatactacagtactcatgtgttttaaagtaaaataaccttaaaggcaaacaataaacttcaatattatgaggttcagcatgttagtcagagacattgttgcattactagactcgatttttacaagtcccacagtcctcaactccaggaaagccattatgggtaataagtcagggactatgtctgttttgcttatcattacagctccaggaactgttatctagaacatattatttccataacaagtatttattgactacttgattcatttctatacataaaaatactact

SEQ ID NO: 136237 - DNA, 553 bp, Homo sapiens
tatgaatatgtgaaaatggatttattacatatatgaagcataatctttcagcaaatgcaatctaagtgatcagtaagcaatcatttaaaatcaataggctaatattgcttagagtattacaaaaggttttttatgtatacttgctggtttctagacacatagcttttaaaaattcatatataatttacaaagacaattttctatttgcagatacaatatgcttatattatagataaatgtagacctatataatctacatttataaatactacagtactcatgtgttttaaagtaaaataaccttaaaggcaaacaataaacttcaatattatgaggttcagcatgttagtcagagacattgttgcattactagactcgatttttacaagtcccacagtcctcaactccaggaaasccattatgggtaataagtcagggactatgtctgttttgcttatcattacagctccaggaactgttatctagaacatattatttccataacaagtatttattgactacttgattcatttctatacataaaaatactact

SEQ ID NO: 136238 - DNA, 473 bp, Homo sapiens
acctgtatgacactttgggtacttatggacattttaacaatattaagtcctctgatgcatgaacatgggtgtcttccatttatttatgtctgttttgatttatttcatcaatactttgtagttttcattgcaaaagtctttcacctccctgaaatacttaagtatgttattccttttgatgctattgtatatgaatttttaaaatttcattttcatatcatttattatgtatgtatagaaatacagctgaattttgtatgttggttttgtatcctgcaactttactgaatttatttgttctaagagtttttttaatggwgtctttaggattgtctacataaaagataatgtcatctgcaaacagaggtaattttacttcttttccaattcaaatgccttttatttatttttcttgcctaattgctctttccaggacttccagtactgtgttgaatagactttgtgagtgtgaa

SEQ ID NO: 136239 - DNA, 473 bp, Homo sapiens
acctgtatgacactttgggtacttatggacattttaacaatattaagtcctctgatgcatgaacatgggtgtcttccatttatttatgtctgttttgatttatttcatcaatactttgtagttttcattgcaaaagtctttcacctccctgaaatacttaagtatgttattccttttgatgctattgtatatgaatttttaaaatttcattttcatatcatttattatgtatgtatagaaatacagctgaattttgtatgttggttttgtatcctgcaactttactgaatttatttgttctaagagtttttttaatggtgtctttaggattgtctacataaaagataatgtcatctgcaaacagaggtaattttacttcttttccaaytcaaatgccttttatttatttttcttgcctaattgctctttccaggacttccagtactgtgttgaatagactttgtgagtgtgaa

SEQ ID NO: 136240 - DNA, 510 bp, Homo sapiens
tcaaacactagtgctagaaatactggttattctagttggctatgaaacattccatattgttttctatagcagctgcatccgtttatattccaaacaatagtgtacaatagctctaatggcttcacattcttattacttgttatctttgtagatagatagatagatagatagatagatagatagatagacataataaccaccttcacaagtgagagatgatatctaattgcagttttgattttcatttccctaacatttagtaatgttgagcatcttctcatagaaatggtagccatttctatgtcttctttggagaaatgtctatctaaaccctctgcccacttwtaaatcaagtgatttcttttctgtgattgggttttaggaattcttggcatattttggataccgatcccctataagatatagtttgcaaatatgtcctctaaatccataggtcgccattttactccgttaattgttcatttgctgtgtagaagtttttagtttgat

SEQ ID NO: 136241 - DNA, 597 bp, Homo sapiens
tgatattgctttttaatctcaattctgttttttgttgttaaaagttaaaagtctattcattttatatactgacctcttatccagaagcattgttaaattaatgctttgaataattttaatttatttaataacatatgtttcattaataatatttacataatttcttttggattttttaatgtacaaaataattcattttcaaataatgtcagttttmctcgtgcttttcattctttataacttttttcctttcctgctattttctcctggataggaaagccaatataagattgagtaaaaattataagaatgaatattttgtgtcctttgaattaagatgaaaagtgttgaatattttacctttaagtatgatgttgacacttttttattgtagatgaattttaacagattttgtaagttccctttactgagagactgtattttaaagaaatattgaattttaacaagtgccttttcctcatttgttgaaagaatgaaaaaatttctttaaaaacacagctattaaaacatttttcttagaatttgtcaattttatattaattggtatacagacatacggtttcttaaacatcttat

SEQ ID NO: 136242 - DNA, 517 bp, Homo sapiens
tcttgtacacaagtagttctatgaatttttaatatcattcctataagcagtctagtatgtttaagaagactcctttagaacttaaatttgttctattatatttttttaaagtttaacatgaaagttaaaatagtaaaatgtaggtttataaaagccaatataattcttaatttatttaaaggcttggatataaggatactaataaagagttctctgtcctaagagtctgtcaataacagggaaccaaaaataactgaaataaaaatgaatcttatatctcctttaaacaaatataaaagattcaaggattggatctatttcaaaaacatccacatagcaggaaaagagagttctattcttgtttctatcattaagttcrcttgctttccccagtagatatggttacataaagttttcactacatttttgtagaaataaaagttctaaaagactctactcaagatattaaatagtatagaaagatgttttattataaaggcaagtaaggagttgattc

SEQ ID NO: 136243 - DNA, 565 bp, Homo sapiens
tgacagttttccagtaccccttttataagatgccatttacaactatgcaaatatataggtataaatgcatatgaaagatgttagccaagtccattatgtggcaacatattcaatcagggaaaaatgttgttttgtaacaccaccaaatctgtctgtatccaaatgttatttaccccccaaaacttttgtaataaaatacagaggataagcagttcatagaatttccatgatttcagtataatctaatcatgtttattgatgaagcaaatattaaaatgataactctcttcaatatcttcaagtattacataggaataaattattgacagaaacttggaaggtaaawtatccatagctggttacctggtgtgtaaaacacaaagtgtcctatagtgaataaaattctcaataattaaaaaaaaattaaacttgcctctcaaccattttcttcaattaagtttaattgtattaacaaaataaatagtagtagcacatatgtgcaacaattaaaatgatataatttaattaaatatgtttcaattaagtgataactgaattagccata

SEQ ID NO: 136244 - DNA, 510 bp, Homo sapiens
gcagtattaatgtcagaagacttttattaaactatcccaatggtgtgcttaagtcaaaatactacatttaaaggttcagaaatgtaattttacattattttcctccttaaatgttttgcagttcagaaaaaaatttgtataataatgtaatgtgagtcttagaagtagatttatagattaaatcaatgtaatcaacattcattcatttattaacccagcaactatttcttgagtcagtgttaatggcaatagtatctgtgccaagcctgtggyttggggctagggaaataaacaagagtgagtaatattcctgtcttcaagaggtgcagagcctattggaggaggcagatataaaaacaaaatgtaaacagacaaggaaagaatgaaaatagaagtatgtacactttatgataaagtatttttccagtcatgacctgaagtatgtggttgaggctgatgtcatgaagaagactttatgaaaaagattctacctatgatacatcaaaggat

SEQ ID NO: 136245 - DNA, 580 bp, Homo sapiens
gagattgtttatattgtcttagtaaaggtgtcagtctatattttagtgggggtgatgtcctctccaagttttgaggttgattctagttgacttaaacaaactgtgtccattttatagcaattggttcaagaatggatatrtaactttgactcatccaattaaaataaaccttcctctgacaggaatgtagaaacaaactgttagtctaaagatacaaggcttagaatactgcagccaagcaaggtgagtcagagctattgtgggaccacagtatagagatagtgaatgagaatgtggttaatccagaaggattggagcccagcaacgaattaggtttgagtccctgaaccaggctgtttgtgatgttatacctacttctctactcatcaattcgttagacatcaattccactttttgtttaagtttaatttgggttttcttgtatttgggcctttaaaaatctgcaaacaatactggtgccataaaaaaaagactataaggacagaaaataggtcttttgaaagaaaaatcactgtgagtgaagaataattctagaatggttggtcaggctttgcttcag

SEQ ID NO: 136246 - DNA, 376 bp, Homo sapiens
gtttgagtccctgaaccaggctgtttgtgatgttatacctacttctctactcatcaattcgttagacatcaattccactttttgtttaagtttaatttgggttttcttgtatttgggcctttaaaaatctgcaaacaatactggtgccataaaaaaaagactataaggacagaaaataggtcttttgaaagaaaaatcactgtgagtgaagaataattctagaatggttggtcaggctttgcttcagagcatgcttggaatgaatagatactaacagagcctgagtgagatccgtgatgacaatccttatgcctgtgcactcctgaggaaagatgatcatggtaaaaatsaatgtactctttctaaaatattgcac

SEQ ID NO: 136247 - DNA, 415 bp, Homo sapiens
tcattcaacaaacacattgaggttcctaccagctagaatgcatccattggctaacaagtaagctcacctgttatcttaaaggcagaatgccccactgacccttcctacctcagtaataragctcactggtgtattcagtgtgcattacagttccttctgctaaacaggacacagtcatcccaggaccctattgtctcgaggaaatgatgagaaaaccacaaaggtatggtttcagactttgttgaactttcagcctcatacagaagatagttatgatgtaaaacacagtatgtactatcttatgggatatagctgatagtatccaagcagaaaaaactgtgttaaagtctgaaagacagatgaaatgaagagttaacttttcaggaatgcagaagttggagtggacacctggaga

SEQ ID NO: 136248 - DNA, 615 bp, Homo sapiens
acgtataagctagtctggaaactacagggaaaagaagaaaaaacaaaatgcctttaaacaattacctctgggcttggctgcaggagacataattgaagtctcatgctatgtctctctgggtctgataaattctgcatgcctcacatagctcagactgctttgagttatttttttgtttttcatgactagtctggattctcaccctttagctgttattgcccacaaccagctctcccagggcttcaaagaatcatttgaattgcgaatgattttgaggaaagatcctcaaagcagcttaaatcaggatagttaatctcacgtgtggaccaaaaattcatggaaaaataatgtagagtaagccagccacagtcactcaaagaaagcatcttttcatctcctcaatgtagtaaatacattcagctatctaccaggaggtatgtgctccttgtatgttagaaaattcaatattattaatttaacaatgaagtcactattatgtgacttcaaatccagaaaccacaggaaaacaattcagaggctggcactttcattataggaatacttttcctccactgccatggatttaggaccygtaataaacaaaccagaggcttg

SEQ ID NO: 136249 - DNA, 455 bp, Homo sapiens
ctatttctttagttccatcaactaagctttgactccacaaatttaggcattgtcaatagagagaaatttcatcatctcctcctaacctctctaccataaactatattttctcttttatacctgatagaaaattatctgactttatgtatatcagtgattatatatatatatatatatatatatatatatatatatatatatatatatwtttatactggtccttgagaagttaaggtaattctgggaaacaataggtttatttatgcttgaggtttacatgtgattataatttcccagtgaaggttataagaaaggcattaactgaaacaactttttttaagagatgctttttttggtatgcttgtatatttttgacaaattcttttttgtttttagatatgtggagatttgatactcatcttctggagtaaatcaatggatcatttatttttgta

SEQ ID NO: 136250 - DNA, 551 bp, Homo sapiens
atcccttaaaatcaacaccctgatcaagaaatagaacggaaacttccctaaagttaagccagaaacggccctcaaagggtaactattatattatatttaattttgaaattattctttgtccttttttgtaagttgtatgactgaaatcatattgtatgtactcaatgggcttagcttagcctgtcatatattgcatttttgagttctatctatgtttttgtatgtagtagtaactcactatttctcattatttaatttagttcattggataatgtaccacaattaatttatcaattttactatgaaagaacatttggrttctttccagtttttcttatttttaattattattacaaataatgctcctgcaaacatttctgtacatgacatttgatatttgtgatatttgatagcaacatgtacaaatttatgttggataaatttctggatcatgttgtatgtgcatattcagctttagaaggtactgccaaacacttttcagaagtacaagttcacatgtccactcacagtgtatgagattttaatacctt

SEQ ID NO: 136251 - DNA, 488 bp, Homo sapiens
actttcttcatttctttttgacagaaaagttttctaggatttcaatgcaaaattcccttgataacgatttagagtgaatggactcttaagggccgtttaatatattgagttatgtgttcatttctggcttattatcagcctttcatggcacaattcaatattcaaatgagagatcagatccaatatttattccaccattgtttgctcatttggatatcatgagatgtcaataagcacaaggttgtgattttactcttggtggattacatcatttttaaattctcttccagagctgcaatctcrtaataaataagtggctccatcccatagaattttaaaatctgagactagtaagggtcttcctactattcccaaccatgagaccctctccacaacatgcagtttgttgatttctgtcttctctcacccctagtttttctctttaaaggaattacctgattagattagaccaatcactttcaagggga

SEQ ID NO: 136252 - DNA, 622 bp, Homo sapiens
aattatctccatgattaggggaaaaaattaaacatgtgccatatttgccgagtcagcagcataatttgaatgaaggcagagagggaagctcaaagaggaggacaaaggtttatctgtttttagctttcccaagtgaaataattgatttttgttctgctttacctgaataaatctttttttccttccagcatgtttctatatctagattagctattctttattttttataataaacttttaattttagaatggtttgagttttatagaaaaaatacaaagagaatatgaagctctgtataccatacacctggtttctcccactgttgacatcttaaataacaatagaacatttrtcacaagtgatgaaacaacattggtacgttattaactaaatttcttactttatttatgcattttcttaatttttacccctcgtctttttttctccctcaggatcctatctaagtttccatattacatttagttgtcatgtctatcctagctcctcccgactgtaaccatttctcaaaacttcctagttttttatgacttagtcattctttcttgactgaataattaagtagtcaagagggaaaaccaagagaataaattgattggaaaa

SEQ ID NO: 136253 - DNA, 542 bp, Homo sapiens
actaggctctcaataaacatttgctgaatgaacaaatgaatgtatgaatgagtggagtagttataraaattaaatgagataatgtgcctttgaaaatatatgattttttgtatataaattgaataaaccagcacattatgacatttaaagtacttgtgagatagtcaggctttgccaattctccccttgatagtttgggatggtagaagaattcactatggggtaggggaaaatgaaagcaaaaagcatgcaattatatcatccagattcaagcaaagcagtatatttatcttttatatactgagttccaccttgagttcagacaaagaggagaagtcaatagctaaacatacataaatacacaatgaggatgatgataataactaaacaaaagccagaaaaacaaactcagaggaattgaacaccattgtgataagaaataaatagggttatgatctggactgagatcagactagaagcctgtcatcaaagcagaagtcaatgccaactcctaaagtggtccaaagtagggttcaggtact

SEQ ID NO: 136254 - DNA, 507 bp, Homo sapiens
ttgtattcttacaacatatcagaaagaacaagaaagtctgagaaggttccagattaaaaatacacctaaagctatttaaacagtgatgtgctacaggtgaattcagattggattttgaactaagtaaatattcataaaagatgttaggacaattcacaaaatgtaaatatggaatgggttagctaatagtagtatatattaatattaacttctctaattttgagaattttaccaggttgtataatagaatatcctttttctgaaataccagtgatacattcaggattaaagagataatatgtctgcaacttcctctcaaatgggaaagagaaaaacaaagaaaagagagcacacaaatggggcaaaataaaaataagttttgagtcttagaaaaggacatattagttccatttattatgcytacacaattttgtaaccttgaaataacattaaaatgaaattatttttaaaatattctgggaatgcttcttgaacaaagagaagtta

SEQ ID NO: 136255 - DNA, 545 bp, Homo sapiens
cattgaaaatcagttgataaatgcatgtgtttgtttctggactgtcaattctattcgattgatctatatgtctatccttatgccagtaacacaaagttttcattactataagctgttagtaaccttcaacatcagaaagtgtaagtcctcccattttttttttttagatagagtctcactttgtcatcaaggctggagtgcagtggcatgatctcggctcaccacaacctcccccttccgggttcaagcgattttcctgcctcagcctcctgagtagctgggattacaggcacacaccaccatgcccggctgatttttgtatttttagtagagattgggtttcaccatgttkgtcaggctagtctcaaactcctgacctcatgatccacctgcctcggcctcccaaagtgctgggattacagatgtgagccactgcgcctggcccaatgtgttctttttcaagattgttctgaatattctggattatggacactttacatttccatgtggatttcaggatcagcttgtcaatctcagcaaaactg

SEQ ID NO: 136256 - DNA, 534 bp, Homo sapiens
gggaaccagagaaactgcacgggcagctgtgtggatagccaagatgaaagacaagggagccaaagggaaggagacagtgaaggggcccattaaggtggtctgtggacaaatgtggcatgagtggcagggacacctacccatgcaaatagatgagcaacctaatgctgttctggttagactgggatgaaagctcaagccacaacaacagttcactcaggaacctcagattcagcccactgtccctcccacagagggatggcagacaccaacccctttaacttagctggtatgaaggtcaaggcctcagaatcccaataagagtaatggtggccaaggtgtccagggactggaggtcacatgtagagctaactatatattggtcacctaataataaacagactgtgtttgccctagtggatactggagctraatgcaccctggtgtatggcaacactcattggttccaagtgcctataacagcaatagatagctatggagtgggagctgtgaaagtcaggcaggttgaactagcat

SEQ ID NO: 136257 - DNA, 614 bp, Homo sapiens
  misc_feature (1)...(614): n = A,T,C or G
aatttcaagtgccatagcaaagccaggagaacggtntgtaggggagaaaggccactaaattagggtttgtccaactgcagatcccaatctattagaggattgtaaaattagggttataactaacatttttttcttgaaaaatttcaaggttttatggaagtgtagtcttgtggaaaataagttaacataaacaacaaagtgcattgcatggagggagggtgaggatttattcataaaaacttggtgtgtgtggtctgctggggcaccaaaaaaacatatttcttagtatggattatgaaaacttccttaaataatatcacataagggtgtgcctattctatctatacataaaacaggccttgggccttgatatggtttggctctgtgtccccatccaaatctcaccttgaattgtaacaatccccacatgtcaagggcaggactgggtagaggtaattggatcatgggggcagtttctgccatgccrttcttgtgatagtgagtgagtctcaagagatctgatggttttataagcatgtggcatttcccctgcttgcactcattctctttcctgctgccctgtgaagaggtatcttctgccatgattggaagtt

SEQ ID NO: 136258 - DNA, 498 bp, Homo sapiens
agttccactccctgtgaaatattttggaaagttgtagaatttatcttcagttttgtcatttacctattgaaacattattttcagttacattttttaaatttctattttatattgcaatttatattttatattttttgtgtgattatgtggctagttaggttatattacctgcaaatttcattttagaatggtaaaggggtatctcaaaatatgtgttacataaagggaggctttgggcctgagaaggcagagaaccgctgcactaaatcgttattcccagaataattgagarttgacactgatttttctttaaaatgtgggacacaagcatttctcaagtctaaaaagagaagtcattgttagtggcatataactgtattagtttcttaaaataaattaaacatatttctaaacagttaatgatggggcggggtaagcaccagggagaagaaaggaaatgcaaattcatttgtaaggagatatccctgccttttcact

SEQ ID NO: 136259 - DNA, 606 bp, Homo sapiens
atatatatgcagtttggcagagtgacctagaaaaacacacagtggtaggagattaaatgattggtgatcagatttgtaaaaggcgatgagtagaatacaaaacatcatttgaagaggagagaaaaataagcagaagatgatggggtggctatttcaaagggcaatgatgagaaaaacrttgaacatacaaatgaaaagaaaaagtatataaaaatattgaatccataggatatagcagtgaaatacaaatcacagagctctagtttggaggttattgccaactaaaatactgaacatgggaagaaaaacaatatgctgatagagataatcattgattttttatttcttattaaattacattaacatgtatatgtgttaggaaattctacttcttgaaacctagatgagaaatacaattatattaagcaaagtcacttaaattaagaatgccagtatttcaattttagcactttctgtgaaaatacataagaagatggtgcggagttttggatagactgacatgaattgtgaacatataaacaacaactagagttgaaggttttactaattggaaaacagatgacctgagtgaattaatatttactt

SEQ ID NO: 136260 - DNA, 580 bp, Homo sapiens
ctggtgaggatgtggagactaaagaattmtggtagactgctggtgggaatgtaaattagtacaacaactatggagaacagtttggaggttcctcaaaaaactaaaaatagagctaccatataatccagtatttctactgatgggtgtatgcaaaaaagaaaaaaaagaatatattgaagagatatctgcacttccatgtttattgcagctctgttcaccatagccaagatctgggagcaacctaagtgtccatcaacagatgaatcgataaagaaactgtggtacttatacataatggaatactattcagccataaaaaagaatgagattcagtcatttgcaacaacatggatgaaactgaagacccttatgttaagtgaaataagccaggcacaaaaagacaagcactgcatattctcatttatttctggaatattaaatcaaaacaattgaaatcatggagatagagtagaagcatggttaccagaggctaggaagggtagtgaggaatgagggggacatagggatggttaatgggtatgaaaagtagttcgaatgaatgaataaggcccagtatttg

SEQ ID NO: 136261 - DNA, 658 bp, Homo sapiens
attgctaaattcagtgagatttctaacatgcacatatacctaaatatttatcatggcattaaaagattattcatggtattatgacagttttcttcccaactgactattactaaatattttattttacactgcaaacataatattttcaattttctatagactgtatttgtattcatttcataattttggcccatttgttttagaatctccctcatgcttcatatgtgacagaactcatgcttgtcatcacattgtttaccaaagctgagtgaagagcatttatcaattgttttcatgtgttctcatcaaaatttcattctagtagtactcacactatactgtaatcactttattttcaaacttcrtgtccagaaagttaatggatataggatttatttctattttatgttgactaatttattacaagtacccatcagaatgcatagcaggtgcttattaaatgtttactgaaataacacatgttaaattaagtcacaactaaatataaaaagtgtaacgctatatagaagtacaattcagcagatataaatctaaagtttaaaaatatacctaatccattatgactttatgtttatatttaaacactactcatcataaatttgagatagaacattcaaattttgtgtaattgaaaaag

SEQ ID NO: 136262 - DNA, 625 bp, Homo sapiens
tggccctatgtggttttttcatcaacattttcattctatttcaaccctaacttgcttaagatatattttttattcccatctttaaaaaatgttgttaaaatccaatgaaacacaataagagaacagtaaaattatttatatttttgtactatcatcaatctttagaaattttatgacaagtaaatctatagatattaaaccaagcatatataagatgtaaggtacctttgaaaagctcatgtgaaaaggacaatattttaatctagattttcatagtataaattttccgcgcatgattgaaaatcaactcgtttatttatttatcttttactgccacatcaggaagtgattcaagaaaatgtcaacmaagtaccagctcacaaataagatgaactatattttaaaattcctgtaaatatctgttatagaattttattaatattaaacctcaagaaagaggctgcttttgtgtccaatttaagtttaatctttagctcctatacctataaaatttgcctttttaaatgaataaattgagccaaagccatctaggaaatgtatacttcatattcatgtatttattcttcttatagcataataaaaacatgaactacaagaatgaaat

SEQ ID NO: 136263 - DNA, 601 bp, Homo sapiens
atatctgaagaatgtgttacaggaatgctaaaattgtattcttctctggatatagtgtgacaatttttattaaaaataataataataattttggaaaattggttttcattgatttggttattagagagacagctaaaatataaaaatattatatgccttttaggaattatattttatcaagctaattataaattcaggaaaagcaatggttgagttttctttgagattaatcttcataattctaaatatctaaaataaaaacatattggttgttttgtgtatattttatatctatttcttacatttatttcaaagatttctttctattttmtaccaccaaaataacatccctagagacttgtatttgtcaatccctgcaggacctattgaacaaatctgccttataatagattgcttcccacagagcatgaacttgaggaaacaaaaagtaataaaaatgtattttaaagttgtcccaaaagtgaacatctaagtaagaaaagctcatctctacccatccagccaaatttgtcacatgacataataaatggcatgataaattgccaaagtaacaacttgctattttatttaaagaacagta

SEQ ID NO: 136264 - DNA, 583 bp, Homo sapiens
ttggagataattagctgagctatataataattaggtaagtgcagggtgataatcaaggtgagaaagagggtagcttaaacaaaagcrcgctatattaaaatggcactaaagtataaaaaatctttataccttaaggtatatcagaggtcagggaagcagtcagagagccatgatgtagctgattgcttgatgtctttaaatttcatgttataaggtatggatttttttcttataggcaatagaaaattattaaataatcattgaaataaatgtatggatgcaatccatgcattagaaggatgttcagtgagaaaatatctgtatttctcttttctcctattttctgaactcctgtgaatgctttggatagataccactttaaagacatacagggaaacacacacacacacacacacacacacacacacacacacacacacacaaacctgtgtgattctgtccacagaactagtatcctgggctatgaggcaggtcacagatggtgctgagaagagattgggggacaactgaagaatagcctatatgatcatcagctcaagcccactccctgtgaggagctggg

SEQ ID NO: 136265 - DNA, 588 bp, Homo sapiens
gttgcttctaaccaatagaataaagcaaaggtgatggatggatggaaaggctattctcatgattaggctgcataagtctgttacttctgttttgactcttccctttgctgagttcagtaaagcaaactgcatgttggagaggcccaaatggcaagaaactataggtaattacagtcaaagcaagaaaaagaggtcctcagtcaaacctcctgtgaatacttttccgtggaagtcaatccctccttagttgagccttcagatgaaatgcaggcctggctgacacattaatcacaatcttgtgaaagaacctgaagcagaagatccacccatgayataccctgaggtatgaccctcaaaaactatgtgatgataaacacgggttcctttgccacccagtttgtggtaatttgttatgcaatgacaaataattaatgcagggaccaaacacaaactgatggggtttggagacaaaagggagggagggacttgtgatttcagtaaaggatgtagagagctagaaaggacatcacacccactcttacaatgcaaagttcaagacaggcttcaagtttatgacatgctgaatgt

SEQ ID NO: 136266 - DNA, 588 bp, Homo sapiens
gttgcttctaaccaatagaataaagcaaaggtgatggatggatggaaaggctattctcatgattaggctgcataagtctgttacttctgttttgactcttccctttgctgagttcagtaaagcaaactgcatgttggagaggcccaaatggcaagaaactataggtaattacagtcaaagcaagaaaaagaggtcctcagtcaaacctcctgtgaatacttttccgtggaagtcaatccctccttagttgagccttcagatgaaatgcaggcctggctgacacattaatcacaatcttgtgaaagaacctgaagcagaagatccacccatgatataccctgaggtatgaccctcaaaaactatgtgatgataaacacgggttcctttgccacccagtttgtggtaatttgttatgcaatgacaaataattaatgcagggaccaaacacaaactgatggggtttggagacaaaagggagggagggacttgtgatttcagtaaaggatgtagagagctagaaaggacatcacacccactcttacaatgmaaagttcaagacaggcttcaagtttatgacatgctgaatgt

SEQ ID NO: 136267 - DNA, 573 bp, Homo sapiens
agatctccttgcactatcttcttacagtatctccttagattgtaatttgcccttaaactatcaattaacctatamacaattctgcaattatgctatctacttataagtagtggaactgaggcacaagtaaaaatgtactttgtattcatttctcgtagggcttagtctaaagataatggaatgcagctaacattcaaggctctggaatatgatgacaagcattcttaggactgtcagttcagtggagcaactatatcaactctaccaggactgttttcatgattgtatttttcttttcttagtcttattatcatatggtctcaatatagatcctatatctttgttgcaatgcctgcatttcatcagggagaaagaagaggagaaaggtgtttgactatataagaaaaattttaaaaatatcccaggatgagtatatcagaaatcatatcagccagaatctagctacttggtcatctcttgctggaatcctataagaaagaacctaaaaatagattggatcaggcctaacagtgtctgacacactatacttgtacaaggtatgtaaatttgtat

SEQ ID NO: 136268 - DNA, 573 bp, Homo sapiens
agatctccttgcactatcttcttacagtatctccttagattgtaatttgcccttaaactatcaattaacctatacacaattctgcaattatgctatctacttataastagtggaactgaggcacaagtaaaaatgtactttgtattcatttctcgtagggcttagtctaaagataatggaatgcagctaacattcaaggctctggaatatgatgacaagcattcttaggactgtcagttcagtggagcaactatatcaactctaccaggactgttttcatgattgtatttttcttttcttagtcttattatcatatggtctcaatatagatcctatatctttgttgcaatgcctgcatttcatcagggagaaagaagaggagaaaggtgtttgactatataagaaaaattttaaaaatatcccaggatgagtatatcagaaatcatatcagccagaatctagctacttggtcatctcttgctggaatcctataagaaagaacctaaaaatagattggatcaggcctaacagtgtctgacacactatacttgtacaaggtatgtaaatttgtat

SEQ ID NO: 136269 - DNA, 634 bp, Homo sapiens
cgatctcagctcactgcaacctccatctcctggactcaagtgattctcctgcatcagcctccccaataggtgggataacaggtgcctgccaccacacctggctagttttgttttttaatagagacggggtttcaccatgttgtccaggcaggtgcaataaactgtttttatgactttgcattgttatggtagtttttagtaatggtaaaaaagatatttgtatatattcaaacccatcaaatcatacttccaaaacatcatgtttgcttacaaaatatgctttaatgtaagaccaaggttattctgcatagcatgacagcatacccactaaaatattctcccttctctaattctcactaaaacaacaaaatattttatacaaattttamatcttgacattttcaatattaaacatgtaaacttttattaaatctttatatactagtgccatagtatatagtatattttaataccttttttcttactatgcagatgtaatttttactacatattattattatgtagtatgggtgcaccttagtctgctagcctatgttctatcttctgggtcagcagcttacttttcacttgtattcattctatctaggatttatcataacaagtattgtttctg

SEQ ID NO: 136270 - DNA, 634 bp, Homo sapiens
cgatctcagctcactgcaacctccatctcctggactcaagtgattctcctgcatcagcctccccaataggtgggataacaggtgcctgccaccacacctggctagttttgttttttaatagagacggggtttcaccatgttgtccaggcaggtgcaataaactgtttttatgactttgcattgttatggtagtttttagtaatggtaaaaaagatatttgtatatattcaaacccatcaaatcatacttccaaaacatcatgtttgcttacaaaatatgctttaatgtaagaccaaggttattctgcatagcatgacagcatacccactaaaatattctcccttctctaattctcactaaaacaacaaaatattttatacaaattttaaatcttgacattttcaatattaaacatgtaaacttttattaaatctttatatactagtgccrtagtatatagtatattttaataccttttttcttactatgcagatgtaatttttactacatattattattatgtagtatgggtgcaccttagtctgctagcctatgttctatcttctgggtcagcagcttacttttcacttgtattcattctatctaggatttatcataacaagtattgtttctg

SEQ ID NO: 136271 - DNA, 460 bp, Homo sapiens
tttcaattatatatacatacatttatacctatgtgtatgtatttctgtatatgtctgtctgtgtatataaaatcacttatccttaatacactatgtgcctaatatttttgtagtactaattatagtaattagggagataataattttgattacttcttttattatgtaatgttgtattgtgtgcaacattcatgtgttaaaaatgtttcactatctcatgtaatatttataattagttaaatgtcacttatttttaattgtgataaaaagcataacatgaggtctaccttcttaacaaacttttaagtgmattgtacagtattgttaattataagcactagttacacagcagatctctagaaatgttttatactgtataactgcttgtatatatttttgtataaaaccattgtacagcaaccccctcttttcctctcctcttatcctgtagaaaccagca

SEQ ID NO: 136272 - DNA, 609 bp, Homo sapiens
aggatgattgataaatgggtggaagaataagcaggcataacatattttttctagatcaattaaatttaagttgaggtcgtgcagtcatgattccctcttgccctaaagttttctaggtctctgctgggaagatcagctctgtaccctacagcggcttcctacttacacctgtttagaatcacaattttaatttcctcttttttttcttcatgtgtctctcttttttccttctttgtttcttcaagaagatcaatagttagctagaatactttgaaaagtataatataaccacaaaatttaggaaattaatattcctcataatactactcatctaatctataaatcccattmatgttttacccactattccgataaagaactcagctaaaacatccaggactacacctaatatttatttgtcatgtcttcttagtcaccttcaatctgcaacaattcctcagtcttatctttgatgatcatagtatttttaaagactttaagcttccattttgttgagtatctttatggttatctgatacatctcttcttcctcccctgcttagattgtagttaaacattaaggacaaaaatatcacagaagtgatacta

SEQ ID NO: 136273 - DNA, 521 bp, Homo sapiens
agtagccaagagagtaattttatagtcaaatattcttagaattgtgattttttaaaagagaagaggaaaaaaatcaccttaaatttacatcycccttaccactcttgtctcaggatgctggtataagcaagaagtagagaaaatatatatattttttaaattagaaatttaaaaacaaagagactaataaaatttccggagtgctggatactagtaaactacttttgatatcagtggaagggccacagcagtaattcagccacaatatagacaggttcaatttatctcaacattacatttaattacaaattagccataaattatttttcttcctggataatttggatagctcatatttgtttctggattgacagggcaagaaattataaccatatagggtattagcaccccaaatatacagaaaatattaagttattattaaatgactagaggaataacatatttggatgtgaaatcttctacattaccttatttgcgttatggatgatacactactgcgg

SEQ ID NO: 136274 - DNA, 521 bp, Homo sapiens
agtagccaagagagtaattttatagtcaaatattcttagaattgtgattttttaaaagagaagaggaaaaaaatcaccttaaatttacatctcccttaccactcttgtctcaggatgctggtataagcaagaagtagagaaaatatatatattttttaaattagaaatttaaaaacaaagagactaataaaatttccggagtgctggatactagtaaactacttttgatatcagtggaagggccacagcagtaattcagccacaatatagacaggttcaatttatctcaacrttacatttaattacaaattagccataaattatttttcttcctggataatttggatagctcatatttgtttctggattgacagggcaagaaattataaccatatagggtattagcaccccaaatatacagaaaatattaagttattattaaatgactagaggaataacatatttggatgtgaaatcttctacattaccttatttgcgttatggatgatacactactgcgg

SEQ ID NO: 136275 - DNA, 521 bp, Homo sapiens
agtagccaagagagtaattttatagtcaaatattcttagaattgtgattttttaaaagagaagaggaaaaaaatcaccttaaatttacatctcccttaccactcttgtctcaggatgctggtataagcaagaagtagagaaaatatatatattttttaaattagaaatttaaaaacaaagagactaataaaatttccggagtgctggatactagtaaactacttttgatatcagtggaagggccacagcagtaattcagccacaatatagacaggttcaatttatctcaacattacatttaattacaaattagccataaattatttttcttcctggataatttggatagctcatattkgtttctggattgacagggcaagaaattataaccatatagggtattagcaccccaaatatacagaaaatattaagttattattaaatgactagaggaataacatatttggatgtgaaatcttctacattaccttatttgcgttatggatgatacactactgcgg

SEQ ID NO: 136276 - DNA, 392 bp, Homo sapiens
tccacactcatgtctaatggagctttacttagtatttacccacccacctttacaagtatactcaacacatggcaagctaccagggaggccaataataatatttagatagctgtgcatgttcattaatcgtaagataatttaagaccaaactaaagtttccaatatacttgattttcatgatcaatataagaaagtgcattttatacataatgatttactgtgaatattgttattagcttattcagcacttcctatgttgccagcactgggatgacttacatacacctttttcctcttcattktcaaaactacctcaggaggtaagtactaccattaactgccccatttgagaaatgaggtcgccaagtgatggattctcccaagctccctat

SEQ ID NO: 136277 - DNA, 392 bp, Homo sapiens
tccacactcatgtctaatggagctttacttagtatttacccacccacctttacaagtatactcaacacatggcaagctaccagggaggccaataataatatttagatagctgtgcatgttcattaatcgtaagataatttaagaccaaactaaagtttccaatatacttgattttcatgatcaatataagaaagtgcattttatacataatgatttactgtgaatattgttattagcttattcagcacttcctatgttgccagcactgggatgacttacatacacctttttcctcttcattttcaaaactacctcaggaggtaagtactaccattaactgccccatttgagaaatgaggtcrccaagtgatggattctcccaagctccctat

SEQ ID NO: 136278 - DNA, 634 bp, Homo sapiens
taggcctatcctagctgttgacacgaaatagctaagcttagctatttctagcttttgatttaaagtgagagacatacgactattccttcaacttgaacatttagaggccattgaggggttactaattagcctaatttcaatattgttgtattgcagggaacagggacacccaaggagagggagagaaaaggaacaatcagtaagcagagcagtgaaaacacacacacaacattcactgattaagctctctgtcttatatggctgcagtttgtggtgctccataacaatcacgatagtcacatcaaacattactgatcacagatcatcacaacagatgtaacaataatgaaatattatgagatttcccaaaacgtgacacagagacaagaagtgagcacatgctgggggaaaaatggtgccgatagactagctcagcacagggttgccacaaatcttcaatttttaaaaaatgtgttatctttgatgtgcaaaaaataaagaacaataaaacaaagtatgyctgtaaccaatagaatttttatcttattttttcttttctcttattttttcaaaaccatattatttttttcagggttttaatatcattattttgacagtctttaaaaggagaggc

SEQ ID NO: 136279 - DNA, 546 bp, Homo sapiens
gctaactcttttttaatgatatttattttactgctgagccctgatgggcctcagaatccttttcaacaaattctggaagcagctaatactaaacaatttgatctgtcacattgagttgaaatctatgtgctgttctgacccagcctctagccgagagctagccaaaggctgggaatgcatttctacttgcaagagctagtttcatctctggaaaaacatgctgtctcatttcactttttaattcccccaaaatatatgcataaatgcttaataaagatttttataatgaatgaataaataaataactaaaggaaagatttacagaagtgtttcataacttgcctcagatctcctggaaaatgtgttggttcatcagacatttactgagaacctattatgtyaagtaccatttatgtgaggtgatcaggaaagtctgcaatgatatgactttttaagttatggtgaaatatacgtaacataaaattgaccagtttaaccatttgaaaggtacagttcagtggcattaagtacaatctcactgttatg

SEQ ID NO: 136280 - DNA, 552 bp, Homo sapiens
gcaatattgatttctctatatatatggataaaagaagtcaatttaaatatgttgacccatgtggtccagtttatatgacattcaaataaacacaactttgaacaccaagactaattggaaaataattcaaatatttaccagggactcttgaagaatgtcagaagaatatctagcagacatcctaacaattatttctgcatctttctttctatttcccatcactctgaagttttttttcaaagacttgctcaactcacaaaatctctttctcatccctgcattgcactcagggttctggtctttttcctccctctctcccaacaaaacacaaaaataaataaatttgtctctttatmagattgaaaaaaaaaatcccagtctgtatcttatcttccagttatcagatctttctacccattggcctgattagcttcacagagtcctggagacaagctagcagtcacagagagggaagattgtgaacccttatacattcatgcttatggtcccagttgcacaataattttaaatacaattcatacaacaggctat

SEQ ID NO: 136281 - DNA, 480 bp, Homo sapiens
ataaggcttttgagatggagattttatatcaatatcatttgtgtttttactagcactagtaattactatttatagcactctgtgcctgtccctgctctagtacattttttttttacattatttaacttactttagtcatctcagcaatcctatgaagtagatattactttcattttgtaattatcgggaaaatgatgcttacagaacttaactcacctgcccataagcacacagaattggtaacagtcagaattgaaaactagatctgtctgatatcaatatgctcacacatccatttgatttttgtttgkttatttatttatttattttgagacagggtctcattctgtcacccaggctggaacgcagtggtacaatcttggctcactgaaggctcacagcaacttccgccgcccaggttcaagcaattctcccacctctgccttccaagtagctaggattacaggtgcatgccactca

SEQ ID NO: 136282 - DNA, 630 bp, Homo sapiens
ttggggtcctatgtattgtaacctgttggaagtagagtaattagtagtactggkggaaatcttaaaaacatcaatataaataggcaaaatttcttttctgattatcaagatcaaaaaagggaagctaaggtctaggtgatgaggttctctatgtgaagtcagttaattttcaatgagcagatcagcgttcttatctcttctcacaataatgattagcagttctttgcaaaggaagtttcagtgagtgcttgaaaaatatgggtcactgaggtctgtcatgcgaaactaagtgttggcctggcatctctggaactcaaatgatggccaagcaggcttgacttcagtgaaacagggttttaatgattaaatggaaatggatgaagttggtgaacaaatatagtgacttcaaagcctttaacttggattactggagaatcaagtgaaatatttcaccactgtgttatcactaaagagaatcagttctgtgtgtggtattggttctctaaacattatgttctacactaaggacccgaactgtcattcccagttagatagtgtttgaatgggaagtaatgttgaattgtttattcttaaaatttttttttagttccttaattatggttatttaga

SEQ ID NO: 136283 - DNA, 630 bp, Homo sapiens
ttggggtcctatgtattgtaacctgttggaagtagagtaattagtagtactgggggaaatcttaaaaacatcaatataaataggcaaaatttcttttctgattatcaagatcaaaaaagggaagctaaggtctaggtgatgaggttctctatgtgaagtcagttaattttcaatgagcagatcagcgttcttatctcttctcacaataatgattagcagttctttgcaaaggaagtttcagtgagtgcttgaaaaatatgggtcactgaggtctgtcatgcgaaactaagtgttggcctggcatctctggaactcaaatgatggccaagcaggcttgacttcagtgaaacagggttttaatgattaaatggaaatggatgaagttggtgaacaaatatagtgacttcaaagcctttaacttggattactggagaatcaagtgaaatatttcaccactgtgttatcactaaagagaatcagttctgtgtgtggtattggttctytaaacattatgttctacactaaggacccgaactgtcattcccagttagatagtgtttgaatgggaagtaatgttgaattgtttattcttaaaatttttttttagttccttaattatggttatttaga

SEQ ID NO: 136284 - DNA, 646 bp, Homo sapiens
attcaatgtttttagttctataagtcaccattcccctcaaacactgtaggtaaccaagaagttaagactcttaacacatgaagagtgaactctttcccatccagacccagtagactggttttttttacatttttgtactctattgacaaagttccaaaaagctacccttgaaaatgacaaagaagtgttagcacacaaaatgagcattaaaatctgcttgatgttcattaaagaaaaagctaaaaaaagaagggagagtctatcccccccccaaaaaaacttgtctttatatattttataaacatttcagaagactaatttctaaaattaacttgcatggtgttccttgcactaaacatctgtattactttcctaatgctgctgtaacaaaataatacaaacttagcaacttaaaacagcacaaatttattgtcttacagttttagaggtcagaagtcataaaagtccwaaggtcagagaaagagaaattatgtatgatctcacttatatgcgaaatctaaaaaagtcaaactcacagaaacaaatagtagaatgatggttaccaggggctgggtgggaaggagaggtgtggaattaggaagatgttggtcaaaggatacaaaatttcacacagacaagaaaagta

SEQ ID NO: 136285 - DNA, 409 bp, Homo sapiens
gaattctttcaagttctcccctttcagtattatgttagctgtgaatctgtcatagatggcttttattattttgaggtatgtttcatctataactagtttgttgagaatttttatcataaagggataccagattttatcaaatrctttttctgcacctattgagaaagaaaaagtcggaataaaacccacttcatcatgaatttttttttttgttctggttcattccatttctagtattttgttgaggatttttgcatctatatacaacagggatattggtctgtagttttcttattttgctaggttctttcttggctttggtatcaggatgatactgactgggtcgaatgaggtagggaggtttccctccttctcaatcttgtggaatagttcagtagaattgattcca

SEQ ID NO: 136286 - DNA, 409 bp, Homo sapiens
gaattctttcaagttctcccctttcagtattatgttagctgtgaatctgtcatagatggcttttattattttgaggtatgtttcatctataactagtttgttgagaatttttatcataaagggataccagattttatcaaatactttttctgcacctattgagaaagaaaaagtcggaataaaacccacttcatcatgaatttttttttttgttctrgttcattccatttctagtattttgttgaggatttttgcatctatatacaacagggatattggtctgtagttttcttattttgctaggttctttcttggctttggtatcaggatgatactgactgggtcgaatgaggtagggaggtttccctccttctcaatcttgtggaatagttcagtagaattgattcca

SEQ ID NO: 136287 - DNA, 458 bp, Homo sapiens
tgtttgcttactacaaggtcatggttgagaaaattagctgtgacagaaattatatgacctataaaacctgcagaatttactctctggcccttgataaaaagtttgccaacctctcatctagaccattcttgccttcattaatacctgctaytccaacaatgttccagacacaaagcccctctgtgaggcctaaaccccagaaagtggggcaacagtagcttttattttgagattttcctcaacttaaggaagtttccatcaccactgagactcattctaaaagaaaaatgagagcagcaactacagcaacagccatgttttagctcttcctctctcttcaaatcacttccaccagggtagaaagagttttctatctcctgtctgtgtacttctgttcaaactactcctgcctctcagccctttggtgaaaacaaagaactttttctgccaccaggaaa

SEQ ID NO: 136288 - DNA, 458 bp, Homo sapiens
tgtttgcttactacaaggtcatggttgagaaaattagctgtgacagaaattatatgacctataaaacctgcagaatttactctctggcccttgataaaaagtttgccaacctctcatctagaccattcttgccttcattaatacctgctattccaacaatgttccagacacraagcccctctgtgaggcctaaaccccagaaagtggggcaacagtagcttttattttgagattttcctcaacttaaggaagtttccatcaccactgagactcattctaaaagaaaaatgagagcagcaactacagcaacagccatgttttagctcttcctctctcttcaaatcacttccaccagggtagaaagagttttctatctcctgtctgtgtacttctgttcaaactactcctgcctctcagccctttggtgaaaacaaagaactttttctgccaccaggaaa

SEQ ID NO: 136289 - DNA, 460 bp, Homo sapiens
catcttgaggttagcacataagatacatttcagattccgaaccctagagtgtcaagataatacatttgtgctgttttgggtcactaggcttgtgataatgtgttacaacaggaaacaaatayatatatatacagctcatcaaaatcacaaccagtccctcaaatcttaatatcctccctcctcaaaaaggtcctcataaataaaaatggagtatggcaatgaggtcaagggtcagaagcatgatcttgtgtagttagagaaaatttcttgtaaatgtaacataaatctttacttgaacctgtcttacctcttttctcttgccttttcctttacctacctcaaatatttatatgccatgggagagagaaggctccatgataaaactaaaaattgtaactacaagtcccagatcttccttaagaaacctctgaaaaactagaccctaaatcactaaagatgt

SEQ ID NO: 136290 - DNA, 610 bp, Homo sapiens
cctaatgatgtctaaagaaaacgtggaacttccttagttattgcaaggacaatgttataataaaataaaaaagaaaaggtacaggccctccacctccatttggtttaagtagtcttcattttccacaaaatagatcttctagatatgtcttagagacctcaaagcactgaaaaggaagctgacagtcaaaggtaatttatcttaaaatactttgatactattttttttttttgtscatttgaaatacatttttgctataccaaattatcccatggagcataacctctgctcacgtaaacttctgggatcaagaacttctagaatcaagaaaatatgtttaaatgtattcccattatacttgtggaacacacctaatacaaatgtgaaaagatatatctcatactcaccttgctgctgattgcattgtctggagtctctcctttccttttaactctacctgcctccctgcctacctcattccctacaatagccctccagcttgggctggcttgttgattagatgtgaaggtttcaggtcacagccagtgggggctactgctgggtgtgtaagggtaatacatctgcacccctggtttcttttcttaaatca

SEQ ID NO: 136291 - DNA, 610 bp, Homo sapiens
cctaatgatgtctaaagaaaacgtggaacttccttagttattgcaaggacaatgttataataaaataaaaaagaaaaggtacaggccctccacctccatttggtttaagtagtcttcattttccacaaaatagatcttctagatatgtcttagagacctcaaagcactgaaaaggaagctgacagtcaaaggtaatttatcttaaaatactttgatactattttttttttttgtccatttgaaatacatttttgctataccaaattatcccatggagcataacctctgctcacgtaaacttctgggatcaagaacttctagaatcaagaaaatatgtttaaatgtattcccattatacttgtggaacacacctaatacaaatgtgaaaagatatatctcatactcaccttgctgctgattgcattgtctggagtctctcctttccttttaactcyacctgcctccctgcctacctcattccctacaatagccctccagcttgggctggcttgttgattagatgtgaaggtttcaggtcacagccagtgggggctactgctgggtgtgtaagggtaatacatctgcacccctggtttcttttcttaaatca

SEQ ID NO: 136292 - DNA, 606 bp, Homo sapiens
tttagaaactttatgaaaaataagaagtagaagtgtgttgatgttattgctcttttttaagttaaagagaaaattcaggtgccatggtaagaggcactgctgaggtttacagtcagtttgctgtgtgatatttttattttaaacaaatatgcaaactattggtaagtgagccagagcttctgagtttgatcctagagctgtcattaatttcctctgctgtaataaatatgtcatctgagccctgtctgccttcatcttatcagtaataccagaataagactgttgtgcttaccgacctcagagggataacataacaagtatcgtaattgaagaaatatacatttaaaatgtctggaaaattacctagctttttaaaaaaatatactagataaatgtattgtgtatattcattttttaaaaagttctcttgtgattatcacaaaagacaagccatgtatttgtragctaaaaatgaactaaaacattttattttagaattttttggtttccaatacaaagtcttaggaaagcaattggactcctactctgttgaacaatcctgatatttgtgagattttcattgcattaaaaaaattgctgctgtca

SEQ ID NO: 136293 - DNA, 525 bp, Homo sapiens
acttacatgcagatttttttcaataaataaagttggtcctctgtatccagggttctgcatctacatccacatatagaaagttcagtattcatgggatgtgaaacccgcataggaaaggcatacttttctataggcaggttctgcagatccagctgcaggacttgaatattcatggagttggtacacatgggggtcctggaaccaataccctgagtatatrgagtaactactctacagtcattgttactgagttggttattgtttttaggccctttagattagatatatgaagataaaatacctcctgactttacacttggcatccaattaaaattctcaactacaggattttactttctttcttctatattacatgtgtttattttcttccacattgagaatctggttctcaggtacagaagatataatataatttgattatcctaaaatgactcagtttcttcatcatttatttaatgactgcatatgacaaatacacaacacacaaacttcagagtctctaaa

SEQ ID NO: 136294 - DNA, 352 bp, Homo sapiens
taaaatactacattaagaattgaaaaaaaaggatttaacaccagattaggcacagcaaaagaacagttaactggaagacagttcaatagagaatatccraattgaagtcgagaggagaaaaataaattttaaaagagaaaattttaaagtagtaagagcctaagtgacactttaaggcattctcaaaaagtctaccatatgaacaattgaaatccatttttgaatgggactgaaacaatattttaagtaataatgcccaagagtgtcaaataacaggcattattgcatcaaataatgtccatgagtgtcaaaacccgatgatgacattacagtacaaatcatagaagctcta

SEQ ID NO: 136295 - DNA, 352 bp, Homo sapiens
taaaatactacattaagaattgaaaaaaaaggatttaacaccagattaggcacagcaaaagaacagttaactggaagacagttcaatagagaatatccaaattgaagtcgagaggagaaaaataaattttaaaagagaaaattttaaagtastaagagcctaagtgacactttaaggcattctcaaaaagtctaccatatgaacaattgaaatccatttttgaatgggactgaaacaatattttaagtaataatgcccaagagtgtcaaataacaggcattattgcatcaaataatgtccatgagtgtcaaaacccgatgatgacattacagtacaaatcatagaagctcta

SEQ ID NO: 136296 - DNA, 352 bp, Homo sapiens
taaaatactacattaagaattgaaaaaaaaggatttaacaccagattaggcacagcaaaagaacagttaactggaagacagttcaatagagaatatccaaattgaagtcgagaggagaaaaataaattttaaaagagaaaattttaaagtagtaagagcctaagtgacactttaaggcattctcaaaaagtctaccatatgaacaattgaaatccatttttgaatgggactgaaacaatattttaagtaataatgcccaagagtgtcaaataacaggcattattgcatcaaataatgtccatgagtgtcaaaamccgatgatgacattacagtacaaatcatagaagctcta

SEQ ID NO: 136297 - DNA, 535 bp, Homo sapiens
gcattgcctcatttctaggacaccagctacagttataggttaattgctgattctgccgctgattaaaggagcaacagaggtctcctctaccatccccatagggcaaaaattgcaaatgctacaaggcccttttaggaaaggatggtcaataaaacaacatctactctgccctgtgtgatggcatatagaaaaggctttctatgactttatattaaggctggatatcctattgacctggattactaaacagctgctctcctgatataattcaaggccaatctgaatggttaaataaaaaagaagaaaagaaaaagaaatttgcagtggaataaaaggtgtaacataatwtctaagaaaaaccaatggaggtgaaaaagtgaaacagcaatgactagtcgtttaccaatgaccagcttaagatggaggccatgctcgtcaacagcggtgtgtatatgttgaggagtctagacagaatgtgtgcatgtatttcaacttaaaaataccattaaaatcctaatacaaaagttcagtgtag

SEQ ID NO: 136298 - DNA, 577 bp, Homo sapiens
agtagaggaggtggggataaattctgagtgagggatacctgttgccttgttttgggtggagagtggggtggttgcgtcttctttcatggagtaagcggtaaagtttatcaaagagtgggccacttctaccaattcagagacctcagagtaatayggtgattaaatatttttagggctgtctatgcttgtgcccccattctatgcctcagggtcccattctttctcaaatagagccccttattgatgagactgtcttttccccagcgtatgttctgggaacctttgtcaaaaatgagtttactgcaggtgtgtggatttgtttctgggttctctattctgttcccttggtctatgtgtctgtttttatttcaatacgatgctttctggatgctttagctgtagtataatttgaagttagataatgtggttcttatagttttgttcttttgctcaggatagctttttgctcaggctattctggatgttttgtgattctatacaaattttagaattttttttttctatttctgtgaagaatgccattggtattttgatagtgattgcattgaatttgtag

SEQ ID NO: 136299 - DNA, 577 bp, Homo sapiens
agtagaggaggtggggataaattctgagtgagggatacctgttgccttgttttgggtggagagtggggtggttgcgtcttctttcatggagtaagcggtaaagtttatcaaagagtgggccacttctaccaattcagagacctcagagtaatacggtgattaaatatttttagggctgtctatgcttgtgcccccattctatgcctcagggtcccattctttctcaaatagagccccttattgatgagactgtcttttccccagcgtatgttctgggaacctttgtcaaaaatgagtttactgcaggtgtgtggatttgtttctgggttctctattctgttcccttggtctatgtgtctgtttttatttcaatacgatgctttctggatgctttagctgtagtataatttgaagttagataatgtggttcttatagttttgttcttttgctcaggatagctttttgctcaggctattctggatgttttgtgattctatacaaattttagawttttttttttctatttctgtgaagaatgccattggtattttgatagtgattgcattgaatttgtag

SEQ ID NO: 136300 - DNA, 571 bp, Homo sapiens
gacttggtatcacttttcttatttagcctaaaacaaaactttatttgagacacttaattataagtgaggctgatttgctttccttcggggcaccagggactctgagtccaagtgggatgagaggggtccccagctgaggacagagaaggggtgcctgccctagtagatatgggggtgatggttattcacagggtgcatcatttagcaaaatagtcctccaagctcccatctgcatacacgttaactggagctttaaagaatgtattctcatctcattaggaatctcggcatgccatgaagggttacttgaatgctattgaacagtcgtgggaagctaaagctacttcccactcaggtacttccagaaccacgctgaacttcaacaggaagaggagagggctcaaygggaagaatggggtgccacactgagctagctatctcccttctctcctcagctttgtgaagtcctgtgttctgacctcatgagttcagtgaacatgcccccctaagacaaggcactgctccgagaagccacctgttggtcagggccctgctgcctgtggacagatct

SEQ ID NO: 136301 - DNA, 571 bp, Homo sapiens
cacatgtgttttgagaaattcatctcagagaacaattgcacacttggaatgttttctttaatgaggagaagcaacagaagtgtttctgggagaaccagacccaggtttcaaagccatcttaaccttgctctgagtcttcaaatgccacggaaggagaggcttcctgctttgtactcaaaagctatgagatgggctgcacacaggctcggactggtggtcttttaactcaaattctctctctgggaccttttcccttcatacacatttcactttttggccatccaattggctggggcaagttaggttagctaaactaatttcaaccccggctatttggagtgggttgaggcaggtaaaaaatatgcaattttcaatcaccaataagactgaatttcaccttattttagtgggtcatgtggaaaaacttcgtgatttatactgagtactattatgccaaccagactttaagtaacactcattcccagagttcagtgttgagatgaactgtctacaawgtcacaatattatgattaatagtaataactctctagtcagaaagacttggattcaa

SEQ ID NO: 136302 - DNA, 583 bp, Homo sapiens
ctagattctgggactataccttatctatgctgtgcaaaggaataagaaactagtgctgtctcgggaaccagcaacacagatgttcccaggagcaatgtttgcaggtgagtgaggtcagggagggctacagagttaggactccgaagtcagaaaaaaagcctgttggttctgccgttcatatctgtgagatatcaggctggtttcttaaccataacctccrtgattcagtttcttcatttgcaaaataatttaaaataagataatatgttgaaaactcttagcacccaataagccttcaaaattataattgttttgtatgttttggcaagaaaatagaataatattattattggagtctctggaaaacctaggtttccaaacctttcaccttaagtagatttttataaaatgagacttcacgtggaatctcaacatacaaaattggcataagtgggggataaggcagcaggtgacagtggttgcgtgctcctgggcaccgcctgcccagcccctgcactgattgtcttacccacaggggcagtttaaatcttcatgcttttaccaccttatactgagtaagaag

SEQ ID NO: 136303 - DNA, 536 bp, Homo sapiens
tcaatgaataaaaagaggtacctgccagccccttctggactggggttggggagaggcataacgtttattgccaggttcaacagagggcctcaacacagggaaagggkttttctgtaagttggtttgtttattttcttgagaacctagattttctatgtatatcttcgttttctagcttagtatttattcaatggctttctcctcgcctgctttgcctggtcttgtgctttctgctaagaaagcaatcagagctgccctgcacacaacctggtcctgaccacaggtatcctccccgcatccttgctggcccatcagctgttatcccttttaccatcctgcttgctcactcttacctggtttcctcttccatcatgcaagattcacacagacgtttttctgatcattccagtggctacaaaatctcaccagcacacagagccgcgtacatcacagaataccaacatagttccttccttcaaagaacttggacttacagtgaaggagcaacaagctgagaagagcacattagaggggtg

SEQ ID NO: 136304 - DNA, 537 bp, Homo sapiens
tcaatgaataaaaagaggtacctgccagccccttctggactggggttggggagaggcataacgtttattgccaggttcaacagagggcctcaacacagggaaagggtttttctgtaagttggtttgtttattttcttgagaacctagawtttctatgtatatcttcgttttctagcttagtatttattcaatggctttctcctcgcctgctttgcctggtcttgtgctttctgctaagaaagcaatcagagctgccctgcacacaacctggtcctgaccacaggtatcctccccgcatccttgctggcccatcagctgttatcccttttaccatcctgcttgctcactcttacctggtttcctcttccatcatgcaagattcacacagacgtttttctgatcattccagtggctacaaaatctcaccagcacacagagccgcgtacatcacagaataccaacatagttccttccttcaaagaacttggacttacagtgaaggagcaacaagctgagaagagcacattagaggggtgc

SEQ ID NO: 136305 - DNA, 536 bp, Homo sapiens
tcaatgaataaaaagaggtacctgccagccccttctggactggggttggggagaggcataacgtttattgccaggttcaacagagggcctcaacacagggaaagggtttttctgtaagttggtttgtttattttcttgagaacctagattttctatgtatatcttygttttctagcttagtatttattcaatggctttctcctcgcctgctttgcctggtcttgtgctttctgctaagaaagcaatcagagctgccctgcacacaacctggtcctgaccacaggtatcctccccgcatccttgctggcccatcagctgttatcccttttaccatcctgcttgctcactcttacctggtttcctcttccatcatgcaagattcacacagacgtttttctgatcattccagtggctacaaaatctcaccagcacacagagccgcgtacatcacagaataccaacatagttccttccttcaaagaacttggacttacagtgaaggagcaacaagctgagaagagcacattagaggggtg

SEQ ID NO: 136306 - DNA, 533 bp, Homo sapiens
gagaaaatggatttctcagtcgaagaagagagaaagatttcttcctttgtccacctttctgtgctatgcaggctttacatggattgattgatgcccacctgcattgagggtggaccttctttactcagtatactgaaacaaatactaatttmttctggaaacgccctcatagacacatgcaaaaataatgttttaccagctatctgggcattccttaacctggttgagttgatacataaaatgaatcatcataaaaaagtttgtaggaaaaaaaatacatgaaggtacgtcaaagtaccagaaatcagattttttgcttgcaatattagaagctgaaaaaacaaaaataaatgccttcaaaattttaaacctatgattttatgtctaatacgtaaactatttccaacttataattttatatccagccaaaatatcaatgaattgtgaggttagaataaaggcattttcagatatgcaaatttgctaaagtattcttctctatacataatttctcaggggctgctggacattag

SEQ ID NO: 136307 - DNA, 591 bp, Homo sapiens
gcttcagggcctgtattagtttattgctgcctaacaaataaccacaaacataatggcttaaaacacagatttattatctcccagtttctgtgagtcaggaatccagcatgttttagccgggttctctcacagaccaaaaccaaagtgacaactgttgtcttcttatgtggagtttggactagggaaagatctgcctccaagttccctcaagttgttggcagaatttacttctttccttgtagttctatgactgagtggcatgtttgctttttaactgtctgatgaggaccactattaaacactggagggttactctcagatccttgccaaagagtcctctctrtagacggccctctcacactttaaatctgccttctagaaagacctaattcctttaaagacatcagagctggtgcatttctacttctgctgcatgctcgtagccaaagcaggtcacaaggccagcaaaaatcaggggatgaggaaagagattctacttcttaccaggagaaactgcaaagtcaatgcaaagagcatgaacataggtaagaatgaaaaactgggaccatttttaaattactctagccacaa

SEQ ID NO: 136308 - DNA, 542 bp, Homo sapiens
gaattcttggcatcacaaattacacaatgtgtctcaggctctaaagaggccttaacagggtgcagggctcatcatgtctagttgttacaatatagcaaaataaatattatggtaagacattaggccagagatagtaatgctcaccaaacacggtgtttgttacccttaatttctcagcaaacttaatgagttaggaacatatcaacaattctggcaactgttctatggtyataactgatttctgggtcaaagcacagaagtgcagtttgcaaaactctaatcaaccatgcatttaacaccatgagagttattggtaaactcgatgaaaatagttttaggaatagaaaggaactggagaaattgcagacatacagacaattctttgaaggagttttttattgtgaaggggagcagagaaacgaacagtagcaattttggaaagagagatcaaaagattattattttttaactacaagggaagtatcatgttatattctggtggaaattattcagtagagaaggtcaaataaagaaaactagta

SEQ ID NO: 136309 - DNA, 595 bp, Homo sapiens
cagtggttttaacctcaagtcagaagctgcattaraccctaaaaagagaatcagcctgtcctttgaagcttggaaaccaggcattgacttctcctctctagctattaaagtcctagatgtcatcttcttccaatcaaaagctgttttgtttacaatgaaaatctattgttcaatgcagccatcttcatgaattatcttagctagatcttctgttctgaacttgctgcagcttctccatcagcccttgctacttcattttgcactttcatagtatggagacaacttgtttccttaaatttaatgagctaacctccgccaacttaaaacttctcttctgtagctcccttacctctctcagccttcagacaactgaagagagttaaagcctttttctggattacagtttggcttaagggaatattgtggctggcttgatctttccaggccattcaaactttctccatatcagaaataaggctgtttggctttcttatcattcatgtgttcgctggagtagcacttttaatttccttcaagaacttttcttttgcattcacaaattggctatgtgttcagcacaaaagactgagctttc

SEQ ID NO: 136310 - DNA, 612 bp, Homo sapiens
aaagacctgaagtgagctcatgctattggagaaatggtttcaatagagttggtagtcacagggttgccacaaatcttcaatctgtaaaacacacaatatatgtaaacctcggtaaagtaaagcacaataaaatgaagagtgcttttaaatatatgtatacacatttagatatatttgtttttagcaactgcctagaactattactaagcaggtcacacaagatacatacagtgttgtttgttactcattttcatyacagtttatgctttgatggttctatcttgaatgcatatccatattaagactaaagacgcaaacaggtaatcatgtttttcacaaatcaagaaattatcaccagttaaaaaactgggtcatcatcaaaaacaacactttaacatctttcctggatattttagaaagttcattaattaatttcagaaattaatttaaaggtaagatgtcatttattttgagaaaattaaacactaagcaaaatgaaaaaatgtctagaaacaaacattgttctgttcctgaaaatggcagaaaagataacattatccaaatgtaagggaaaaagtctgcaaaaagcaggttttttccatatctaaactt

SEQ ID NO: 136311 - DNA, 622 bp, Homo sapiens
aggtaaattactttgttctcttttcttatactgtttatactcaaaagcaatagggtggtagtgctttgctttggacatagggcatatctcccctggaaaaatccttcaaatgcttaaaatataatytctcttattattacagacatgctttaatgtgtttttgtataatctgggccagacattttaatctttgatcaatacttacacaggtggtgaaatttaaaatggaaaattattctggttatttgtttaacctaaaatatcttaaacctgtgatagaaatgtgtatgtaaatttaaggctttactttcctatattttcattggcaggacatgctgttgtttttctcttccaagattaattccttagtgatctgcttcaaaatcaatctagtttcaacagtcttactagatcccatcaggtgactgaatatcaccattatcctttactgtttgtttctctacccactgaaatgaaaaaatgaaccatagcaaatcaacaagactgcttttatgaagtttttctgaaatccaacgttaatattattgctaatatcaacttagactcaattttattctggtctattgtacacagcaatcaaaatagcccaatatacgttcct

SEQ ID NO: 136312 - DNA, 385 bp, Homo sapiens
gaattctttttgttgcttttatgtaaaattgatttagagtcagttgaagagaatagttaaagtagcagctgaactgttggtctcaaactttgtatcycaaatctggacttggcggctttaattttctttgcaagcccattgctgagaagagtaagactttcatccatttttaaaatccttataaaatttaatatttccacttaatgaaaacatttgattgtatagtcttggaatttgtagtacaaattgttaaaataatatgtattcttgatgcagaaactgttttgatgctgttaccagggctggaatgtcctgggaaccactaaagtaggcgacaatagaactgggggcagtggatcacttccagtaaaatggaggttctgga

SEQ ID NO: 136313 - DNA, 479 bp, Homo sapiens
cacaggctcagcaacctaattttcttatatgtgtttaccccaaggatttccacaaagccatcattcaattgactaattcagtaaccaaaccaatgacatcatcaggatctagtaaagcagcatggggcagagtgatacaaacatctgtatgtggyttgaaaaccaagtcatggaagtgaactcaagacatctttccttcttccatgaagctcttcaagtagtcttctatgtgaaatgttccacagttttccaaattcacaaaagtttctgccttaactaaacccaaattctaaaatgctcaatgctctgggcgccatctgttctatgctttgaccataacccccgtgccacaaaaataaaagacaccaacctgtgccatgattttacaaagccacttgggttccacaaagtacaagtcacttaactgcagtgctgggtcttgaaaatgaagaaggactcctgtagtaaaaagtcatcaa

SEQ ID NO: 136314 - DNA, 479 bp, Homo sapiens
cacaggctcagcaacctaattttcttatatgtgtttaccccaaggatttccacaaagccatcattcaattgactaattcagtaaccaaaccaatgacatcatcaggatctagtaaagcagcatggggcagagtgatacaaacatctgtatgtggcttgaaaaccaagtcatggaagtgaactcaagacatctttccttcttccatgaagctcttcaagtagtcttctatgtgaaatgttccacagttttccaaattcacaaaagtttctgccttaactaaacccaaaytctaaaatgctcaatgctctgggcgccatctgttctatgctttgaccataacccccgtgccacaaaaataaaagacaccaacctgtgccatgattttacaaagccacttgggttccacaaagtacaagtcacttaactgcagtgctgggtcttgaaaatgaagaaggactcctgtagtaaaaagtcatcaa

SEQ ID NO: 136315 - DNA, 545 bp, Homo sapiens
ggtacaattccatcccagagcgattatccatggtgagtcgctgttggaaaccagtgctgccaagatatgctgaacaactgtcagatggggccatggctgatactcagggggtgcacctactgcatacatgcccctgcctaactgtaggttctgggaattgagggagtgaggcatcagtgaaaacagtttaatgaagggaaggaatagaagatgagaatcaatatagaatgaattaaataactgaaggattgttcgtgagcaacacatatctctcactgcaacctccacctccctggttcaagtgattcttctgcctcagcctccygggtagctgggattacaggcacctgccaccacacctggctaatttttatatttttagtagaaatggggtttcaccctgttggccaggctggtctcgaactcctaacctcgggtgatccacctgccttggcctcccaaagtgttgggattatggatgggcatgagccactgcacctagccacaacacacatcttaataataaatctcaaaaaccttcaaaa

SEQ ID NO: 136316 - DNA, 545 bp, Homo sapiens
ggtacaattccatcccagagcgattatccatggtgagtcgctgttggaaaccagtgctgccaagatatgctgaacaactgtcagatggggccatggctgatactcagggggtgcacctactgcatacatgcccctgcctaactgtaggttctgggaattgagggagtgaggcatcagtgaaaacagtttaatgaagggaaggaatagaagatgagaatcaatatagaatgaattaaataactgaaggattgttcgtgagcaacacatatctctcactgcaacctccacctccctggttcaagtgattcttctgcctcagcctcctgggtagctgggattacaggcacctgccaccacacctggctaatttttatatttttagtagaaatggggtttcaccctgttggccaggctggtctcgaactcctaacctcgggtgatccacctgccttggcctcccaaagtgttgggattatggatgggcatgagccactgcacctrgccacaacacacatcttaataataaatctcaaaaaccttcaaaa

SEQ ID NO: 136317 - DNA, 611 bp, Homo sapiens
ggcattgctcagtactgctgtagaatggggataaaaacatcagagggcacaccaggtaggtgatcaggtctgtctcataattctatcttcaggatggataaccactgacctcagatgtgagttcagaagagtcaaaaggaaaacagagtctatcacattgtgaacagaggtttattttgtgaaaaaatgcaagcatcacattgtgatttttatcattgtattttgtaggaaaaaaacaattgatgtaatttttcagggcaaaaactgaataaaaagaagagaatgtttgatatcaagttatatgttttaaagttagatttgtagattctttagatactctagaggtcataaaaagtaacagcaaaaactttagtctaggtaytgttggcacttgtgaggcaaatcaaattcaggtccacaaattctttttcataattctgaaacccaaagaactctgaaaatcccaagattttttaaaaaatgactaatttggtgtcaaaacctaagcaagctgacttgttgcttattacaatctttatttctcatgctcagtgtgaatatgcatacattttgctgcagaaatatatacatgtttgagtacagggggctgg

SEQ ID NO: 136318 - DNA, 559 bp, Homo sapiens
gagcatgagcgatgtgctgggcttgtgcttagctctatccatgagttaagtatctcaatccttaggaccctctgacatatgtgytattattatttctagtctatagatacagagactaaagtttagagaatataaaaaaacatttacaaggtcctatgggacaaaaactgtaggacaaaatgcaaacccaagcagcctgagagcagagctcctggtccagcactgtgatagctggggacgcagagacagaaacaatgcaattattgacagggaccatggtgctgtgtctgtccacattttgaagataattatggtttggatattttcacctttaaataacttggagagtttcaacattaactcagtcagatggatacatttatatcatatcctgctgggagtgacagttaattctgggtcctatggcaattgcacttttgactgagatgaatgctgactgatggctttaacatttaactaatgcgatagtatttaacacacccatataaatactatagtcttcgggtaaataaaatgttaccggctggacatacatgaa

SEQ ID NO: 136319 - DNA, 559 bp, Homo sapiens
gagcatgagcgatgtgctgggcttgtgcttagctctatccatgagttaagtatctcaatccttaggaccctctgacatatgtgctattattatttctagtctatagatacagagactaaagtttagagaatataaaaaaacatttacaaggtcctatgggacaaaaactgtaggacaaaatgcaaacccaagcagcctgagagcagagctcctggtccagcactgtgatagctggggacgcagagacagaaacaatgcaattattgacagggaccatggtgctgtgtctgtccacattttgaarataattatggtttggatattttcacctttaaataacttggagagtttcaacattaactcagtcagatggatacatttatatcatatcctgctgggagtgacagttaattctgggtcctatggcaattgcacttttgactgagatgaatgctgactgatggctttaacatttaactaatgcgatagtatttaacacacccatataaatactatagtcttcgggtaaataaaatgttaccggctggacatacatgaa

SEQ ID NO: 136320 - DNA, 572 bp, Homo sapiens
cagaataagctacgcctcttataaaaarcaaatgtgcacaaaccatctgtgaggacataaggattaaatgcttgcttactttgagtattaaaataaaaagtagaagctttattatatgagtaaaagtgtttccaaagtctatttgaaatgcaggtacagaatgaaaatctgttattttattaaatcgttatttgggtctctttttattccataaaaaaaaaatcttttccacatctcttagtggagatcaagttaacaaaattagctttaattttgtgacaagtaaatttacataaatataggattatggagataatatttttctttgcaatgtctggaccttttataaacattgagaggaaatataaccattcttacttatttagtatgctagcatgatgttttttaatgttttagatccagttaaagaatatggttgtgccccatggcctatggttgagaaattaattaaacagtgtttgaaagaaaatcctcaagaaaggcctacttctgcccaggtattcttaaagttttgttaatattttgtacagaacatcatttgcatatatgca

SEQ ID NO: 136321 - DNA, 572 bp, Homo sapiens
cagaataagctacgcctcttataaaaaacaaatgtgcacaaaccatctgtgaggacataaggattaaatgcttgcttactttgagtattaaaataaaaagtagaagctttattatatgagtaaaagtgtttccaaagtctatttgaaatgcaggtacagaatgaaaatctgttattttattaaatcgttatttgggtctctttttattccataaaaaaaaaatcttttccacatctcttagtggagatcaagttaacaaaattagctttaattttgtgayaagtaaatttacataaatataggattatggagataatatttttctttgcaatgtctggaccttttataaacattgagaggaaatataaccattcttacttatttagtatgctagcatgatgttttttaatgttttagatccagttaaagaatatggttgtgccccatggcctatggttgagaaattaattaaacagtgtttgaaagaaaatcctcaagaaaggcctacttctgcccaggtattcttaaagttttgttaatattttgtacagaacatcatttgcatatatgca

SEQ ID NO: 136322 - DNA, 547 bp, Homo sapiens
actgaattgtgtgcataattgttattgcatcagcaaagattgttcatttttagcctattttcattggtttgcatatattaaagggaattgtggaaggtcacagagatatttgttgtttttctgaatacagatctagctgagacatttataaaataagtcaaccatttattcaggcctaccagccctgctcctggtattacctcaactgtggctctatctctttacttctcctcagatcaatgaatctttgtagggcctcttcaaggataaattctcattcattcattctttgaaaaaaaaaawatatatatatatatatatatgaaacccattgtgtgccaggcttaaacataccagttatctaactaccaaattaagaaaaaaattaaataaatgaattaataaattcttaataggtgaaaatgacttagctcttatcaattgcagggttcttgtcccaaagaaatatatctacatagcaaaatttcaggtgtgagttgtaggttggtgactgtaatatttggggcaggatgatttccaggaggca

SEQ ID NO: 136323 - DNA, 580 bp, Homo sapiens
caattaaatcagaccagttaagcctgggatggggatcagattttttttttcaggttctcaagtgattctaaagtatatttgaggttaagatatactgcggagtgcagtgtattataagttcccatgaatgaggatttttatttctgtctttacatatttatttactagtatgtggttaacatttggatcaactcattctcattctgtaatacccacattttaaaaaatgaatgtaaaaatgtcttttattatttttatttttcaaatttaattttagattccaggaatacatgtgcaggtttgttacaaaagtatagtgcrtgatgctgaggtttggaatacaactgaactcacaacccagaaagtgggcatagtgcttgataggtagtttttcatctttgctccccttcctgtaatttccacttttaacccaattatacaagcctgaaaacctttaaaaagaaagggcctccagtttatttttttatttcatagcacattttatgggattatggatatcagttaactctttaaagttccatataagatttggagcatagatgctttactagagagcatc

SEQ ID NO: 136324 - DNA, 580 bp, Homo sapiens
caattaaatcagaccagttaagcctgggatggggatcagattttttttttcaggttctcaagtgattctaaagtatatttgaggttaagatatactgcggagtgcagtgtattataagttcccatgaatgaggatttttatttctgtctttacatatttatttactagtatgtggttaacatttggatcaactcattctcattctgtaatacccacattttaaaaaatgaatgtaaaaatgtcttttattatttttatttttcaaatttaattttagattccaggaatacatgtgcaggtttgttacaaaagtatagtgcgtgatgctgaggtttggaatacaactgaactcacaacccagaaagtgggcatagtgcttgataggtagtttttcrtctttgctccccttcctgtaatttccacttttaacccaattatacaagcctgaaaacctttaaaaagaaagggcctccagtttatttttttatttcatagcacattttatgggattatggatatcagttaactctttaaagttccatataagatttggagcatagatgctttactagagagcatc

SEQ ID NO: 136325 - DNA, 387 bp, Homo sapiens
gtgaattctctttgttgctgttgcaaacagtgcatcttacacaacttcactcaattcaaaagaaaactccattaaaagtactaatgaaaaaacatgacatactgtcaaagtcctcatatctaggaaagacacagaaactctctttgtcacagaaactctctgtgtctttcctagacataatagagttgtttttcaactctatstttgaatgtggataccctgaattttgtataattagtgtaaatacagtgttcagtccttcaagtgatatttttatttttttattcataccactagctacttgttttctaatctgcttcattctaatgcttatattcatcttttccctaaatttgtgatgctgcagatcctacatcattcagatag

SEQ ID NO: 136326 - DNA, 575 bp, Homo sapiens
ggtgaccgcacccacctttaaacacagggcttataacttagctcacacctgaccaatcaggtagtaaagagggctcaccaattagtctaagagcaggaggtaaagaaatagtgaaatcatctattgcctgagagcacaaggggagggacaatgatcgggatataaacccagggcattcgagccggcagtggcaaccccctttgggtcccctcccattgtatgagagctctgttgtcactccgttacatcttgcaactgcacactcttctgatccatgtttgttccagctcaagctgagcttttgctcaccatcaaccactgctgaatgccactgttgcagacccactgttgactccacccctccagatttggcagggtgtctgctgtgcttctgatccagtgaggcaccattgtgactcctgatcatactagaggcttaccattgttcctgtgcagctaagtgcccgggtccatcctaattgagccraacattccacggttctcttccatgacccacagcttctaattgagctataacactcaccgcatgcccaaggttccattccttggaattc

SEQ ID NO: 136327 - DNA, 570 bp, Homo sapiens
agtatctcttctgaacacaacagaatgaaactagagatcaatcacaaggggaactttagaaactgtacaaacacataaaaattaaacaacttgcttctgaacaaccaatgagtcaatgaagaaattaaaaatgaagtttaaaagctctctgaaacaactgaaaatagaaaaacacaacataccaaatactatgggatacagctaaagcaatattaagacggaagtttatagcaataaatgtctacatagaaaaagtagaaagataaacaacctaacaatgcacctcaacgaatcaggaaaaagcaagaacgaaccaaaccccaaattagtagaagaaaagaaataatgaagatcagagcagaaataaacaaaattgagactaaaaaaatacaaagaatcaggccaggcacggtggctyatgtctataatcccagcactttgggaggccgaggcggacagatcacaaggtcaagagattgagaccatcctggctaacacggtgaaaccccgtctctactaaaaacacaaaaaaattagccaggcgtggtggcaggtacctgtagtcccagc

SEQ ID NO: 136328 - DNA, 573 bp, Homo sapiens
gcttctaaataaggcagccattccagataaggagtaagattcatttattctttacactgggtcttcattaaatctcatctgatctttcgctttgatgttttagactttatttcacatttcacgaagattttttcctgggttgggcgaagtagtaggtcatctgtgttttctgaacaaaatgtcattctgaatagaaaacaggaagcaaacacagcattaagttttaggtggagcttattgaagtgtttcattctttatcaaatttcactcaatttgtgtaaggcatgtgatgtctttttttaagttagattcttatgttcgcaaatatttttgtaacttcagagaaaaacaaaacccaagtcagtgaaagccatcagtgtaagacttcctggagttctwcactggggtgatttcagttctgtaagaaggaaagtcctggggcagccctcctttgttctcccctatgacagctcatcgaagatttgagggtgactattgtttccttgaccacatttgccttgacttcagggcaaacatttctagttcctcaacccttcctcctaaggcaagctt

SEQ ID NO: 136329 - DNA, 395 bp, Homo sapiens
ttgatacttttgaagattacagggcagttattttgcatgggaatgtccttcaatttgggttcctctggtgtttctttgtgatcaaattcaggtcacacatctttggtaagaatatcacagatgctgtgttctcgctgcatcctatcaagtaacacgtgatttttatttcattactgctgatgttaacttgatcactggattaaggtgttatctgccaaattttaccatgattcttgtttctcttttgtagacaatgaaaattttgtagggacctaatttggaagtatgtaaatatcctgttcttcatcaaactttcaaygtattcatttatttattccctcatggtttcctattttttataaatatataatcaattactgacattattgtgtttt

SEQ ID NO: 136330 - DNA, 429 bp, Homo sapiens
cacgctgtaaaaccttatttatataaagttttttaaaaacccaaattaagttatcatggaaaaacaaagagtagtgattgccctgataggtagtgggtggagatataccagaaaggayataaggaacctttccagggtgatgatcatgttctgtatcttgataaagatttcgatggtgcagaaaagtgtggttgtaagaactcatccaatggtactcttaatacttgtgcatttcattgtaaattttatcttaaaaaaagaatgcatgcagaagtatttgagggggaagggtactgatgtctgcaaccctgaaatgtttcaaacttgaccatgagttattgagcggataaaaaaatgtatatatggatagtgacatggtttgtctgtgtccctactcaaatctcatcctgaattgtagctcccttattc

SEQ ID NO: 136331 - DNA, 429 bp, Homo sapiens
cacgctgtaaaaccttatttatataaagttttttaaaaacccaaattaagttatcatggaaaaacaaagagtagtgattgccctgataggtagtgggtggagatataccagaaaggatataaggaacctttccagggtgatgatcatgttctgtatcttgataaagatttcgatggtgcagaaaagtgtggttgtaagaactcatccaatggtactcttaatacttgtgcatttcattgtaaattttrtcttaaaaaaagaatgcatgcagaagtatttgagggggaagggtactgatgtctgcaaccctgaaatgtttcaaacttgaccatgagttattgagcggataaaaaaatgtatatatggatagtgacatggtttgtctgtgtccctactcaaatctcatcctgaattgtagctcccttattc

SEQ ID NO: 136332 - DNA, 429 bp, Homo sapiens
cacgctgtaaaaccttatttatataaagttttttaaaaacccaaattaagttatcatggaaaaacaaagagtagtgattgccctgataggtagtgggtggagatataccagaaaggatataaggaacctttccagggtgatgatcatgttctgtatcttgataaagatttcgatggtgcagaaaagtgtggttgtaagaactcatccaatggtactcttaatacttgtgcatttcattgtaaattttatcttaaaaaaagaatgcatgcagaagtatttgagggggaagggtactgatgtctgcaaccctgaaatgtttcaaacttgaccatgagttattgagyggataaaaaaatgtatatatggatagtgacatggtttgtctgtgtccctactcaaatctcatcctgaattgtagctcccttattc

SEQ ID NO: 136333 - DNA, 622 bp, Homo sapiens
tataccttaaggtgatgaatttgttttatatatagctctataaagcagataagaaaaatgaaaatgtggaacatttacataaagaaaatcctattgttggtgcccttatcaaagattacttgaacatacattcatgagtttatttccgggttccctattctattccattggtttatgtgtgtttttatgccagcactgttttgattactcttgctttgtaatatagtttaaaatcatacggtgtgatgcctccaggtttgttccttkttttcaagattacttttagtatttgggtctttatggttctatacaaattttaggattcctttttcctatttctgtgaaaaatgtcattgaaattttgatagagatttcattgactatccagatcactttggatggtatgaacattttaacaatattcttccagtttatgaacaggatatgtctttccatttatttgcatctttttcaatttctttcatcagtgtcatagttgtcagtgtgcaaatatttcacctctggttaaatttgttcccattttattctttttgttgctattgtaaatgggattattttcttaatttctttttggatagttcattgttagtgtgtagaaaca

SEQ ID NO: 136334 - DNA, 437 bp, Homo sapiens
ctgagaattcaaatcagccagtatatcagataatgtaaaggcctggatctcaggttcccagtggaatatgaagcttagtggctagctatgtgtgagctgttttagaagtctgtgaatgtcttgaatgcatatttctacctgaagtgcataaggatgacatttttctctttcccctcctcaggttctcattcacacccagtcttsgaaaaaccatcaccttgtcctgaatctacactgcacttaacctatttgtttgttgcgttcttaagtgaaggaaaaatcactttcacagataaaaagcaggtctgcacagtccctctggtagaaccaaagaggtggcatcaacataaaagattttcctggtcagctcctcctgtaaaatacgtttgcctctggagatcttcctccccaatggcaccatcttgacaaaggtaaat

SEQ ID NO: 136335 - DNA, 428 bp, Homo sapiens
tgtaaaggcctggatctcaggttcccagtggaatatgaagcttagtggctagctatgtgtgagctgttttagaagtctgtgaatgtcttgaatgcatatttctacctgaagtgcataaggatgacatttttctctttcccctcctcaggttctcattcacacccagtcttcgaaaaaccatcaccttgtcctgaatctacactgcacttaacctatttgtttgttgcgttcttaagtgaaggaaaaatcactttcacagataaaaagcaggtctgcacagtccctctggtagaaccaaagaggtggcatcaacataaaagattttcctggtcagctcctcctgtaaaatacgtttgcytctggagatcttcctccccaatggcaccatcttgacaaaggtaaataatttcccattgagaaagaattct

SEQ ID NO: 136336 - DNA, 623 bp, Homo sapiens
cagggagaagccaatctctagctgaactttgtaacaatttgaacagggtgagacgcctcctggacagaactcttgtgagggcgcaaatccggtgtgcagactccacaggtggggaagaaccaagcctttttcttctgcagctgggaggcagatagcctggggcaggttttcaagcctggaaatggtctgggggctgttggggcggggcatggtgggagtgagtctggccctttggtttgcatgggagctgggtgagacctgtgactgccagctttcccccatttccctgacaacctgcatgactcagcagaggcagccataatcctcccaggtacacaactccagtgacatgggaatctcacccccatcccccacagcagctgcagcaagacatgtccaacgagagtcttagctcagacatgcctagcccctcccccacctgacggctcttccttatccaccctggcagctgaagacaaagggcatataaccttaggaattctagggcyggcccatcaccggttcctccccataataccacagctgatgctctctggaaagtgccacctcctggcaagaggccaaccagcacaaaaatagaacattaaaccaccaaaggaccc

SEQ ID NO: 136337 - DNA, 623 bp, Homo sapiens
cagggagaagccaatctctagctgaactttgtaacaatttgaacagggtgagacgcctcctggacagaactcttgtgagggcgcaaatccggtgtgcagactccacaggtggggaagaaccaagcctttttcttctgcagctgggaggcagatagcctggggcaggttttcaagcctggaaatggtctgggggctgttggggcggggcatggtgggagtgagtctggccctttggtttgcatgggagctgggtgagacctgtgactgccagctttcccccatttccctgacaacctgcatgactcagcagaggcagccataatcctcccaggtacacaactccagtgacatgggaatctcacccccatcccccacagcagctgcagcaagacatgtccaacgagagtcttagctcagacatgcctagcccctcccccacctgacggctcttccttatccaccctggcagctgaagacaaagggcatataaccttaggaattctagggctsgcccatcaccggttcctccccataataccacagctgatgctctctggaaagtgccacctcctggcaagaggccaaccagcacaaaaatagaacattaaaccaccaaaggaccc

SEQ ID NO: 136338 - DNA, 398 bp, Homo sapiens
ttgcttggtcaagtctgcatttttaagttaggacatatttgttgtcaaattgcctaaattgtctgtttatactcccattacatcatacagacaccctttccctccactttcaccaacactagaaataacaagatgtgtctatgatgacggccaaaggtgaagggtgatattccaccggtgtttccctttgaatttcttttcacttggcaggtgatcaaacatgctgtggtagcttgtattacggttctccagtgttccagtgccccacctcctcagaagtctacagccctgcctgtggactcaggaatgcccatgtgataacttagygaaagaaatgtggacccaagttagagagccactttcaggccaaggctttaagagcccctttgtcttctttc

SEQ ID NO: 136339 - DNA, 513 bp, Homo sapiens
ttgtaagtcctcttggctcacaagaacactctgacatcctctccccacctccaccaatgtgcagttttctctccactgcatatatatgtgtttgtatggccatcaggcaggtagttccagaaacagactttgaccttctcagaggagaaaaaaaaagcttaaaatccataagcatggctgattttacagtcttgaacttcttctaaacaatggcctgaattcattcaacattttcttatgatgagtattatgaactactacttttctattcttgcttttaagattttgcccaagtttattcttaaaktagtcaatatgtgtttatatagcatatctacgtagaagccagaattagtttcatgcagaaataatgtgtttgcagttatagtaaataaaatattcataagaacttagaaattttgagataattcacattttatccttaaagcaatttattcttagagctttatgaaagctatatcttctctgaacatttgcccaaacctcccacac

SEQ ID NO: 136340 - DNA, 621 bp, Homo sapiens
gtggagtggccacacaggcctggattatgtacctccaggtttgttttacataagaaaaaaaaaacggctgggcactgtggctcacatctgtaatcccaacattttaggaggctgaagtgggaggatcactttagcccaagagtttaagaccagcctggacaacatagtgagaccctgttcctacaaaaaaaaatttatttttaattagccaggtatggtggcatgtgcctgtaagcccagctacttgkggggctgagtctggaggatcacttgaggctgggaggtcaaggctgcagtgagctgtgattgcaccaccgcactcaggtctaggtgacagagccagaccctgtcttaaagaaaaagaaaaaaaaatctatctctaacttttggaagccactgttattttgttgctgtatttttattatatgcagctgaatccacccttaattagtataatgggaaaagccaaacttcttcccttcacattaaccatggactatttctcagtttctaaaaacaagtatattcccaagacctgcctaactgctcatacacggtagagcacactgctaaaaacactggcctgggtttaaagttaaagacattaaaaggatttcactg

SEQ ID NO: 136341 - DNA, 621 bp, Homo sapiens
gtggagtggccacacaggcctggattatgtacctccaggtttgttttacataagaaaaaaaaaacggctgggcactgtggctcacatctgtaatcccaacattttaggaggctgaagtgggaggatcactttagcccaagagtttaagaccagcctggacaacatagtgagaccctgttcctacaaaaaaaaatttatttttaattagccaggtatggtggcatgtgcctgtaagcccagctacttggggggctgagtctggaggatcacttgaggctgggaggtcaaggctgcagtgagctgtgattgcaccaccgcactcaggtctaggtgacagagccagaccctgtcttaaagaaaaagaaaaaaaaatctatctctaacttttggaagccactgttattttgttgctgtatttttattatatgcagctgaatccacccttaattagtataatgggaaaagccaaacttcttcccttcacattaaccatggactatttctcagtttctaaaaacaagtatattcccaagacctgcctaactgctcatacacrgtagagcacactgctaaaaacactggcctgggtttaaagttaaagacattaaaaggatttcactg

SEQ ID NO: 136342 - DNA, 547 bp, Homo sapiens
tcacaaccaaacttctagaaatgagctacctaaactccctgtctctatttcttcgtttctccttttcctctgtcattttagagtccttcttcccctattactccctgaagtaccatcacctaaggtcaccaatgaacttctagcaatgtggtttgaagaccaaaagtaaaagctgaatatcattgacatacaagattgggagatcaatgtttgtaactataaaacattatcctttctttttaggaaagaaaagaaaaagatgtatctggtcaactccaaaaaggagacataagaaaaaaagcctcccargaggtaagatgagagtacaagaggaagctggaggctggaaacagctcatgcagggcttgtaggtcaagctgtggagggttgaattttattctaaatgcaatgggaagccattgaagagatttagtcagtgaagtgacacaatgtaagctcaattttgctacggtgtaaagaatgagttggagctgggaaagaatggaggcagggcagccattttggggcagatgccatgagagttctt

SEQ ID NO: 136343 - DNA, 613 bp, Homo sapiens
cacagtaagcactgttaacatgtttgctattagtattattatcatatctcataggactccccaatcacaccccgcttcaatcaccatcatgctgtatgccatattatccttgcatgtaaattttgaggaccacataactgggttttaaaaatctggttctaacagtagtttatgtcttagaaatcagggcaaagttaatcgaagatacctaatatcaaaccaggtaawgatgaagactttaaatgctttttgaggatgattataaagaacattatgataagaatgatgatgatatgatgatgatgatgatgatgatgatgatgaagaaaacatgaccaaatgcttctttgggttaatactctgcttataaaacgaagtgtccaggaaacatacagtattcctcctgaaattagtttttttttcccattaaatggaaacatgttatgcataagaacatatattgtgcagtatgcatgagatttatttttcagaaagcagagaaatggcaagaattttaagtgttctacatacttatttagatctcacatcaggagataaaacaaatgaaaactctgacttgttaataatttacgttttggtggaaaattcatac

SEQ ID NO: 136344 - DNA, 559 bp, Homo sapiens
tttaaacaattagtggaaatctgtatatgtttatgtaataaaatcacatacaataaacagaaataacaaggttaggctaaaaggaaaatgacagacaatgaacttgaaatctacaaaatatttcaaataatcctaaacgtctttttacaaatgttaaacacagcctcctgatgaaagaataattttttttaaagtcagattgggtagggctcagggatttaacaatggagaggcatagattgtcttgctgtctcagcaaataytgtcatgaagcaatcttgctttccaactttgtaaaaagagcatttgagcagtgtacacataccagaagaaattgttgtcggtcgaggagtaaagctggcacactgggcttttattcctttcctaccactacaggggactaatcacgtcgaggacacatctgcaaagctggtccaaggtattgacggagaaattgccatctttgtgatgaaatgcagaggacccttgcctcctccaagaaatctgcctcagtcaaccaaccatagaaagactctttgtcttagagataaatgaaact

SEQ ID NO: 136345 - DNA, 580 bp, Homo sapiens
ttgatttacagatttttcacatcaaaaattttttgtagattctattttgtaattaagatgtgtagactcctcaataattctttaccttgatgctgtgtatactcatttatctagattaaaatacttccttgccctgaatgttctaaaagtgtaccccttggggctctagaatttagaagtctcccttccccaactatttctagtctaccttttcaattgagttaatataatggctttagaaatacaatttccatgttsctataaaaatggggttaaaagtcataacaggcacaagaaacaggaggaaatgagaattgtgtactttcagtcacacccgggccatgtgctcgggccacatacagcatgcagccctccggagtgggctgtgtaacccggggcacacttgaggtcagggcacatagaggattaatttactgaaggtggtagacaatccctctgccacaaatgcaaacattttttcataagcgcctgaagcaattagttctcttcaataataaatttaatcttttcctccttcctttctttcctcttcgtttctcctctttcttctcttttcctc

SEQ ID NO: 136346 - DNA, 568 bp, Homo sapiens
catgaaggcaataaggagattttctcctcagacgccatccatggctccccatgggagtctcacatgggggagaccaactcatctggcatcccagaaactctctttyccatatgtcccacttttttgtctccattttttttaattaataaccaccattgctatcatagctcattcacggtgtctgtcttctctcccaaggtgctgtctgcaactgtagactaaaaaaaaaaaaagcataaacagacacaaaccaaaataatatttcagttgatgatccacctatggttttaattcactttaaaggattattgttaaaaaggccatcagtggctccagcaagaatatcatctccaagcaacaagctaggatgagcctgagatgctgcaaaaagttgttttttccgtttagcaggatctaatgttaaattatcttctcctggtaggtgatgtctaatcatctcccaatggtgttcagtggtattataagagctaggaggaaacaaaaatcagaagtattccaatcactttgcatttgaattctctgctccaagctcataatctgaccaccc

SEQ ID NO: 136347 - DNA, 568 bp, Homo sapiens
catgaaggcaataaggagattttctcctcagacgccatccatggctccccatgggagtctcacatgggggagaccaactcatctggcatcccagaaactctctttcccatatgtcccacttttttgtcyccattttttttaattaataaccaccattgctatcatagctcattcacggtgtctgtcttctctcccaaggtgctgtctgcaactgtagactaaaaaaaaaaaaagcataaacagacacaaaccaaaataatatttcagttgatgatccacctatggttttaattcactttaaaggattattgttaaaaaggccatcagtggctccagcaagaatatcatctccaagcaacaagctaggatgagcctgagatgctgcaaaaagttgttttttccgtttagcaggatctaatgttaaattatcttctcctggtaggtgatgtctaatcatctcccaatggtgttcagtggtattataagagctaggaggaaacaaaaatcagaagtattccaatcactttgcatttgaattctctgctccaagctcataatctgaccaccc

SEQ ID NO: 136348 - DNA, 583 bp, Homo sapiens
gaaactctggctcacacgtctaagggaactaggcctgacataaaaatgactttgacttttgcataatcaatgggctccataaaaagaatttcttctgtttgtggacattaacacagtgggatccagtggtttccgggcagtcactattttgttgttgttgttgttgttgttgtttgcttgtttgtttgtttgtttcttaattctgatttgtcttctattaagtatttcgtcccttgatttgtgctgctttaaagttgtgggccaaactttcattttagctgcgtatagattttatgacaagctgaacagcctccagtaatcatcacatcagctctgattgctactggaccaacattttggggaaaggtttctgattgatctcaagccaaattcccaagccaaggtgartcacacattctccaagacagcctgcagaataagcacattccttccccttcttagtttataaagaccctggaataagaggtgaataagcccctctcataatctgtgtttatcttaaagctatgcttgtttattaagccctgataactgcattagtaaccttgtccttaaaaggcct

SEQ ID NO: 136349 - DNA, 583 bp, Homo sapiens
gaaactctggctcacacgtctaagggaactaggcctgacataaaaatgactttgacttttgcataatcaatgggctccataaaaagaatttcttctgtttgtggacattaacacagtgggatccagtggtttccgggcagtcactattttgttgttgttgttgttgttgttgtttgcttgtttgtttgtttgtttcttaattctgatttgtcttctattaagtatttcgtcccttgatttgtgctgctttaaagttgtgggccaaactttcattttagctgcgtatagattttatgacaagctgaacagcctccagtaatcatcacatcagctctgattgctactggaccaacattttggggaaaggtttctgattgatctcaagccaaattcccaagccaaggtgaatcacacattctccaagacagcctgcagaataagcacattccttccccttcttagtttataaagaccctggaataagaggtgaataagcccctctcataatctgtgtttwtcttaaagctatgcttgtttattaagccctgataactgcattagtaaccttgtccttaaaaggcct

SEQ ID NO: 136350 - DNA, 583 bp, Homo sapiens
ggaattcttttcttaatttcattttcaatgttgattgcaagtgtacagaaacaaaattgatttgtttatatctgtcttgcatcctgcaacactgctgaacttataagttcaaatactcttttagttggttccttaggattttttatatacaagatcatgtcatttgccaataaatatagttttacttcatcctttccaatccatatgactttttaaagttacctaattgccttaacaagaacatccagtatcatgttaagcagaagtacagacatccttatattgttyatgatcttagggtatatgcttccagtctttcaccattaagctattgttagctgtgggttgttcacacatgccttgtatcaggttaaattcccttctattcagttttctgagtgttttttttttttaatcattaaagtgtgttggattttgtcaaatactttctttgcatctattgaaatgattgtgtaatttgttttgttttttattctattgatatatattccatcaattgattttcaggtgttgaaccaagcttgcacaattttgtcagcagcatcttatgttttattacttt

SEQ ID NO: 136351 - DNA, 583 bp, Homo sapiens
ggaattcttttcttaatttcattttcaatgttgattgcaagtgtacagaaacaaaattgatttgtttatatctgtcttgcatcctgcaacactgctgaacttataagttcaaatactcttttagttggttccttaggattttttatatacaagatcatgtcatttgccaataaatatagttttacttcatcctttccaatccatatgactttttaaagttacctaattgccttaacaagaacatccagtatcatgttaagcagaagtacagacatccttatattgtttatgatcttagggtatatgcttccagtctttcaccattaagctattgttrgctgtgggttgttcacacatgccttgtatcaggttaaattcccttctattcagttttctgagtgttttttttttttaatcattaaagtgtgttggattttgtcaaatactttctttgcatctattgaaatgattgtgtaatttgttttgttttttattctattgatatatattccatcaattgattttcaggtgttgaaccaagcttgcacaattttgtcagcagcatcttatgttttattacttt

SEQ ID NO: 136352 - DNA, 624 bp, Homo sapiens
aagctttgtgcagattttcacactccttgtgttatttttttactaagaagaaagataagacaaatagctaaaatgaactaatcaggctttagattaagtgctttatttctcctcctggaagtctgatgaaaaaaattatctrtcttgggggaggagaattagatgatgacaattctccgcctcaacttttggttgctcaatataaaacacaatttatacaaaccattttcccaataccagaaactctaacttgtattagatttatagtagcacacagatgagaaagatcctttccttaattgccaagcaagctataaacattcccctttgatatataaggtgaaaagtgccgcaggatagctaaaccaggaaaaaaagaaacaatctgaggaaatctgttaagccttaggaaaactgctactaagcaaggcaaatatctctctagaacaggaagaaagagactagacaaagtactctggccggctgctcctaaactatctctcctgaacaacagatgtgttttattttgtttttgttttcatttttaattgattatttgtaacccatagtaaaaatgattttttaaaaagttattcagttcttggatttgcagcaatatcaagt

SEQ ID NO: 136353 - DNA, 624 bp, Homo sapiens
aagctttgtgcagattttcacactccttgtgttatttttttactaagaagaaagataagacaaatagctaaaatgaactaatcaggctttagattaagtgctttatttctcctcctggaagtctgatgaaaaaaattatctgtcttgggggaggagaattagatgatgacaattctcygcctcaacttttggttgctcaatataaaacacaatttatacaaaccattttcccaataccagaaactctaacttgtattagatttatagtagcacacagatgagaaagatcctttccttaattgccaagcaagctataaacattcccctttgatatataaggtgaaaagtgccgcaggatagctaaaccaggaaaaaaagaaacaatctgaggaaatctgttaagccttaggaaaactgctactaagcaaggcaaatatctctctagaacaggaagaaagagactagacaaagtactctggccggctgctcctaaactatctctcctgaacaacagatgtgttttattttgtttttgttttcatttttaattgattatttgtaacccatagtaaaaatgattttttaaaaagttattcagttcttggatttgcagcaatatcaagt

SEQ ID NO: 136354 - DNA, 624 bp, Homo sapiens
aagctttgtgcagattttcacactccttgtgttatttttttactaagaagaaagataagacaaatagctaaaatgaactaatcaggctttagattaagtgctttatttctcctcctggaagtctgatgaaaaaaattatctgtcttgggggaggagaattagatgatgacaattctccgcctcaacttttggttgctcaatataaaacacaatttatacaaaccattttcccaataccagaaactctaacttgtattagatttatagtagcacacagatgagaaagatcctttccttaattgccaagcaagctataaacattcccctttgatatataaggtgaaaagtgccgcaggatagctaaaccaggaaaaaaagaaacaatctgaggaaatctgttaagccttaggaaaactgctactaagcaaggcaaatatctctctagaacaggaagaaagagactagacaaagtactctggccggctgctcctaaactatctctcctgaacaacagatgtgttttattttgtttttgttttcatttttaattgattawttgtaacccatagtaaaaatgattttttaaaaagttattcagttcttggatttgcagcaatatcaagt

SEQ ID NO: 136355 - DNA, 624 bp, Homo sapiens
aagctttgtgcagattttcacactccttgtgttatttttttactaagaagaaagataagacaaatagctaaaatgaactaatcaggctttagattaagtgctttatttctcctcctggaagtctgatgaaaaaaattatctgtcttgggggaggagaattagatgatgacaattctccgcctcaacttttggttgctcaatataaaacacaatttatacaaaccattttcccaataccagaaactctaacttgtattagatttatagtagcacacagatgagaaagatcctttccttaattgccaagcaagctataaacattcccctttgatatataaggtgaaaagtgccgcaggatagctaaaccaggaaaaaaagaaacaatctgaggaaatctgttaagccttaggaaaactgctactaagcaaggcaaatatctctctagaacaggaagaaagagactagacaaagtactctggccggctgctcctaaactatctctcctgaacaacagatgtgttttattttgtttttgttttcatttttaattgattatttgtaacccatagtaaaaatgatttttwaaaaagttattcagttcttggatttgcagcaatatcaagt

SEQ ID NO: 136356 - DNA, 580 bp, Homo sapiens
tagagcagtgcttctcagcttaaatatacatatggatcacctggggtattattagagtgcaggctctaatgacccagtaggtgtggatgggacttggtccatgctgtccatagaggacctygttgaacaccaggaaccagagaaacagtttaagagcaaggggcaagtgattatggcacagtttaggacagatgggcacaaactgagggcatcctgatatacttaagcaaaatggaagattagacaggagaaagaacaagaagataagaaaggggggaccaagagaggtaccattttattagtgctgggcagtaaagggagaggctaactgggtcatgtttgatgtaaatagaggctgattcactgggtgggactaggatgaactctggagtcataaatacctccaagttttgtggaacctgaagtttattgtttattgggggtggttcttttaaagaaaaaaatacaaagtttaaatatcaaactagaatgagaaaactaaatcctcgatgtatataaattttaaaagtaatacaatatcataattattacaatatcaagaaaaataacataatttgag

SEQ ID NO: 136357 - DNA, 580 bp, Homo sapiens
tagagcagtgcttctcagcttaaatatacatatggatcacctggggtattattagagtgcaggctctaatgacccagtaggtgtggatgggacttggtccatgctgtccatagaggacctcgttgaacaccaggaaccagagaaacagtttaagagcaaggggcaagtgattatggcacagtttaggacagatgggcacaaactgagggcatcctgatatactkaagcaaaatggaagattagacaggagaaagaacaagaagataagaaaggggggaccaagagaggtaccattttattagtgctgggcagtaaagggagaggctaactgggtcatgtttgatgtaaatagaggctgattcactgggtgggactaggatgaactctggagtcataaatacctccaagttttgtggaacctgaagtttattgtttattgggggtggttcttttaaagaaaaaaatacaaagtttaaatatcaaactagaatgagaaaactaaatcctcgatgtatataaattttaaaagtaatacaatatcataattattacaatatcaagaaaaataacataatttgag

SEQ ID NO: 136358 - DNA, 674 bp, Homo sapiens
ttcatatcaagtctggattaaaactccatatcacggagatatgaagttttaaataaatgtaattagcctgaggctggtaataagatggctgtgttcagccattcaatctctactccattagttcccacaaacaacatcatacctgaggaccattaacccacatgcatggaataaaaatgcacaaaggccaaattcgacttccatgtactggagaccgtacataaggatgaggcatcaatgaaatagcaccacgagtgcaaaaatgcacgggcataaataccacgcagctcacactgttagggctttttgataattaggatggcagagtccagagcaaagctctgaggaatggctggaaaagagagcaggatctagtagggacagaaccttggatgtcaggctaacaggctttattttacaaggcctcaaaaccaatcattgatggatatgaattgaaatatcgacttgtaaaatccatttggagaatgaattctwggggccagagatgagacaggaagatggctggcaccaggatagttcaccttgattccatttctgaatttctaatatcttctcaagtgtctaattaaatcaaaagtactgcctctcttgtcctttccacattcttctttgaggtttctatatttccagcagaagttctaagcccattaagg

SEQ ID NO: 136359 - DNA, 533 bp, Homo sapiens
ctgaactgaattcctggtcgactgacaagcaagagcaactgaaacaccaagtgtgcactatgggcagaaactgcagtgaaaaagcctgctatggaggccacataaaatgatgagaagagctttaggatgagtttcctaaagagactctctgaggcaacagagacgaagagccccagactgggggtamatctgttttaaaatagagtatcatctcagtagaaagatgatttgaatcaactaccaaatttctcactatggacattagttactttttaaaaaatatattatcttttacaaatatggcactagtagtaatttcatcaatactaaactagataatgtagatatcaagtcctgtaggcaataagaatatttatttttccttaccatgtattcaactttaccgggctttgccatcagaaagtgatgttgacaagacttcgctggtgttctttgttataacaatttacttctttccttcagaggagagttggaggtgtaccacatgaagcatgaactcctcttcccttcct

SEQ ID NO: 136360 - DNA, 495 bp, Homo sapiens
gctgctgctcacttttcaggtctgcactacctttatgagctgtaacactcacagtgagggtctgcggcttcattcctgaagtcagcgagaccacgaacccaccagaaggaagaaactccggacacatctgaacatgggaaagaacaaactcyggacacaccatctttaagagctgtaacactcaccatgaaggtctgcggcttcattcttgaagtcagcaagaccaagaacccactttgttgaagtcagcaagagcaggaacccactggaaggaaccaattccagacacaaaagctttgttttttccaacagggagaaaaagcaaagtttgctgcctcaagggctgtccaaccagtgctgagcaataagcttcctaataccaccaactagggaaatccaggccagggataccatcagaccctcagcactcaggctgctgctccttgggagacaggagcggttggagaagagtcagatcacttatttttaagggag

SEQ ID NO: 136361 - DNA, 421 bp, Homo sapiens
gaattctatttgtagctcctgggagagagtaaagtctcagtgtttcaaccctacaraattaattccccaattgcagggttgtccagtgtcaaaatatgtctcggaaatgcagcattcctcagtgaactgtgatctggtttccacctatcccctccactgtaatcacttttgtgtgaccccttacgtgttaaatccacttattctggctttcgtcctaccagcttctgggcagaattggcacttctagctctttactgcttatttttctgtgacaccatatttggattaatccttcaaagtcactttgctgtccttgtcttaatgccccatgctctacatatttgggtgcaacagagttctggacctgaattacaggatgccatctccctggatgattgagttgatacttcctgacacttcc

SEQ ID NO: 136362 - DNA, 638 bp, Homo sapiens
aatcatattatgaatcttcagattcgatcaatatttattacaaaaaaaaaccttgtttaacmatcttgttttggttattctgataaccaaaacatgggtatttagagagaagctgagagtttaaaagaatgcacagttccaaactgtgtgtgtatgtgtgtgtataggaacacaacttgattagaaggtcacactgataacatttttttttaaatggaaactcatattgagttgcaggtaaaatattaatattttctttatattcatgttaatatatttcatagactcaaattattaaagtaaaataacatttggatatttgcttatatataaatttgtttatatatgaagcctgtgtcccagaattattaaccctaaaaactaagaataattgattttgttgcttggattcccagctctttattatttcaaaattaaggtcttaattattaatattgaccagtcaaattgtgtgattaaatatgatgaataaataagtgacaaaatataataaggcctcccaattaaggtatttttgaacactgtgtgtgtgtggctgttgttattgttttctacttttctcttgcctgagtttcaagtgaattggtaataaggaaggatggggaaaaacatctaac

SEQ ID NO: 136363 - DNA, 638 bp, Homo sapiens
aatcatattatgaatcttcagattcgatcaatatttattacaaaaaaaaaccttgtttaacaatcttgttttggttattctgataaccaaaacatgggtatttagagagaagctgagagtttaaaagaatgcacagttccaaactgtgtgtgtatgtgtgtgtataggaacacaacttgattagaaggtcacactgataacatttttttttaaatggaaactcatattgagttgcaggtaaaatattaatattttctttatattcatgttaatatatttcatagactcaaattattaaagtaaaataacatttggatatttgcttatatataaatttgyttatatatgaagcctgtgtcccagaattattaaccctaaaaactaagaataattgattttgttgcttggattcccagctctttattatttcaaaattaaggtcttaattattaatattgaccagtcaaattgtgtgattaaatatgatgaataaataagtgacaaaatataataaggcctcccaattaaggtatttttgaacactgtgtgtgtgtggctgttgttattgttttctacttttctcttgcctgagtttcaagtgaattggtaataaggaaggatggggaaaaacatctaac

SEQ ID NO: 136364 - DNA, 542 bp, Homo sapiens
cagatattgattatgaggctgttaaaatatttttggctactgttgcctcaaatgtatttgaacgaactctaattccatagaatgttactaaatgttgcataggggaaaacagaagtgtctgtagtcatagggttttagtcagttcagagctaagtaaagcaaacagatttttatcactgcaagatatttaatcagctaatatttgtcaggcctctgagcacgaagctcagccattgtaacccctgcgacctgcacatatacatcccgatggcctgcaggagccaagaagtcrggagcagctgaaaaaccacaaaagaagtgaaacaaccggtttctgccttaactgattaacccaccttacaacattccaccactaggacttgtccctgccctaccctaactgatcaatccatccaatcaattctcctggacaatgagtctcatgatctctccaccatgcaccttgtgaccccctcccgtgctgacaacagataaccacctttaactctaactttccactgcctaccccagtcctataaagc

SEQ ID NO: 136365 - DNA, 395 bp, Homo sapiens
tatctttactatgacttaatagccaaattgtacagcaatataaccaaaatacggtcactgcagagtcaaaaatgtgtattatgattatatttcctagttggcaagctccatgttgacaattttctttggttgttgttgtagttgttgttcacccacgcatctccagattctgaaaacgtacctggtcaacaatcaatgtaaggaactgttgaataagtaaactttctttcagagcatttctgttttcctaaattgataatcacctcatgattttctctkcaatttaacattcatatatacattattttctttttccaaaatcaccctctgattattttatttctattgtacttcagtttgcctagacatagcatagacatatcacactcagaagc

SEQ ID NO: 136366 - DNA, 564 bp, Homo sapiens
atgcatggaatgatgtttttcccctatgtcttacaggaaataacatataatttgagatgtatattagagattttatgttcatagatatctttttatttcactgagcacattaacaaaaattatattcaaatgaaaaatggcttgatagctaattctctgtgatgaaattttatcatgtctttagtaaccccattattgctactttatccctcttaataggttgcttgtctaaagaaaggttgtagaaaccttactggttcacacacatacaactttaccacattgttttggtgttccattttggggtgatacattgacaagtgtggggaagtgatcaaagtatgtgtagtgtctcaagaaattgcwtcctaaagtttttaacactagaaaatagagatttgcatttggttgatatgccttcttttaaatacgtattcactaggggcagttatacctgatgaatttaaagatggagtaatacaagagttacagaatcacagaatttctgaaccagaaagggccttataaatgaaggactcttgaagtgaaagtcgtcattagaag

SEQ ID NO: 136367 - DNA, 541 bp, Homo sapiens
ttttctattaaaataaactcagatactgtggtgtggattgcaacgtttgtataataaactcagatattgtggcacggttgcaacatttggataactttgtaagggatttcaatgaaatctagaacttacagtggtrtgcttagagctacacctccagacccccaagagcagacatttattctctccagaggggtttgccagaggagaaaaacagaaaagatgacttgactgagaagaccagaagagacatctgtgtcatgtctcattcaaagacagctttgcacaagtatcagggaatcatggaagaatttgaaggagagaactgtcataagtagattgagaataatcactctggttttgatgcaattctaaaataataataataataaaagagatgttcgggtgtgatggctcacgcctgtaatcccagcactttgggaggtcaaggtgaaaggaacacttgagcccaggagtttgagattagcctggtcaacacagcgagaccccatctttacaacaaactaaaagaattagccaggca

SEQ ID NO: 136368 - DNA, 541 bp, Homo sapiens
ttttctattaaaataaactcagatactgtggtgtggattgcaacgtttgtataataaactcagatattgtggcacggttgcaacatttggataactttgtaagggatttcaatgaaatctagaacttacagtggtgtgcttagagctacacctccagacccccaagagcagacatttattctctccagaggggtttgccasaggagaaaaacagaaaagatgacttgactgagaagaccagaagagacatctgtgtcatgtctcattcaaagacagctttgcacaagtatcagggaatcatggaagaatttgaaggagagaactgtcataagtagattgagaataatcactctggttttgatgcaattctaaaataataataataataaaagagatgttcgggtgtgatggctcacgcctgtaatcccagcactttgggaggtcaaggtgaaaggaacacttgagcccaggagtttgagattagcctggtcaacacagcgagaccccatctttacaacaaactaaaagaattagccaggca

SEQ ID NO: 136369 - DNA, 541 bp, Homo sapiens
ttttctattaaaataaactcagatactgtggtgtggattgcaacgtttgtataataaactcagatattgtggcacggttgcaacatttggataactttgtaagggatttcaatgaaatctagaacttacagtggtgtgcttagagctacacctccagacccccaagagcagacatttattctctccagaggggtttgccagaggagaaaaacagaaaagatgacttgactgagaagaccagaagagacatctgtgtcatgtctcattcaaagacagctttgcacaagtatcagggaatcatggaagaatttgaaggagagaactgtcataagtagattgagaataatcactctggttttgatgcaattctaaaataataataataataaaagagatgttcgggtgtgatggctcacgcctgtaatcccagcactttgggaggtcaaggtgaaaggaacacttgagcccaggagtttgagattagcctggtcaacacrgcgagaccccatctttacaacaaactaaaagaattagccaggca

SEQ ID NO: 136370 - DNA, 632 bp, Homo sapiens
atagaaaatatattcaaactatagtaccaagtgtgcacatctgtgaaaaagaaarataacacagttgactaaaaaatgagtatggaatctactttatcagcatttttaaacatagctcttaaaataatatctaaatataggcttttcatgccaaactggagacagatgtgctttaatataatatcctgatgtttgtctatttcctgatgacccttagacttctagggtgggcttctattttctcctttgaaacagatgttggtaaatgtctgtcccagaacccaaaatcctgatccaaaaccagctttttcttccttctctcaaatttatgttagccagattccattctttgtcagcagctgtaactatagaccatactcagaaaataaaagtagaaatactatgataattcaagatgaaagctttaatttcaagcatttaaaaggcagcaacctaaccgtagtgccagagacaactcaagaaaagtgtaattttctcctttatcttccccaaactggatattcaataaatgcaattttatacagtcaaacaggtataataactgtgctaactaaatgttgcctagcaaaaagcccattaaagcattaatcaataagaatggcttgaagcta

SEQ ID NO: 136371 - DNA, 394 bp, Homo sapiens
taataacttctccctatttctatgaagaacagatgagcagcaatactagcccagggtcctgtgtactatgcaggagacagatacagctttttgcaaacacagtttatgaatgtcatatctacattttgatgtactcactgtaaagttgtaataccaataataacggtctttccattacagatatttaaataaattctttccatgtgaagcagaagtaattattatcaatatttgggtgaaccagaatgctggtgacagctccaacagctgcattcagccttggctcagtaacaaaacacagaaagttccccagtgagaaacaaggcagggtttgataaattccattcagctcttcagttacagattaytaaaagatgaattataaaattggcac

SEQ ID NO: 136372 - DNA, 441 bp, Homo sapiens
ggaggtataaaaacactttatttagctgcaaatccccttgcatgtatttagtacttttagctttgcaaagtccttgctgtatggtctcacttaagtctcccytgctgcagccagtgactgagtatgaagcaagatccccttacagccctcagttgtgtgtacagtacagttttcacagttctaaaacactggctaagtaatccatgtctctaccttgctgaataagaaagcaccattaatggaattgggcccctaagaaatgtaaagtcagcctcagtttgggaaagacatttggttaatgttacataatcactgattcttatttccttcttaaattttggatctcatttgagaccatttggaagctaaataagagctcctatattatggatttcctcatgtaataagtggtaggcatgtaactgtgttctagaggaattc

SEQ ID NO: 136373 - DNA, 441 bp, Homo sapiens
ggaggtataaaaacactttatttagctgcaaatccccttgcatgtatttagtacttttagctttgcaaagtccttgctgtatggtctcacttaagtctcccttgctgcagccagtgactgagtatgaagcaagatccccttacagccctcagttgtgtgtacagtacagttttcacagttctaaaacactggctaagtaatccatgtctctaccttgctgaataagaaagcaccattaatggaattgggcccctaagaaatgtaaagtcagcctcagtttgggaaagacatttggttaatgttacataatcactgattcttatttccttcttaaattttggatctcatttgagaccatttggaagctaamtaagagctcctatattatggatttcctcatgtaataagtggtaggcatgtaactgtgttctagaggaattc

SEQ ID NO: 136374 - DNA, 474 bp, Homo sapiens
aaatgatggataatccagagataggcacaaatcagcaagggtgaagaaaaggctgaagtggatgtgagtgccatcttcagagaggatttctgaagggctcccagttctaagtcagctatgaagagtacctagggaaggagacccaagacaggggtaattgtctaaagacctgagyaaataagggataactggtgttgggctaagccccagccctgctcatgcagagttgttgccatttgaagtcagaatacagagctctaagtaaattgggctgtcaacatggatggagctcaggcatctattatggggatggtattccagagtaggaccctgctcacctgggccctgggagccccaacctgcctgatcttccttaatcgtgcagtctaacgtgaaggctgtcattgaatacgtattgcatccaaaacacaaagcttataattggtcttcacattcaggaggcgatctattagt

SEQ ID NO: 136375 - DNA, 523 bp, Homo sapiens
cttatgatgttgcataataaatatgggtattgcatataaatgtgatgttgaaacggaaatcattgttattgtctgtcattctggaggttattagtgaagtgatcttaaccttgttcttagctattattttgaaaatcacagtggacaaaacattctttaaattcctgagtgaaaatccatggcatcgctttaaaaagtttttccgtaagggtgcttaagcacataatagatgatcagtatgtatttatttggtcagtggtttcctatgcctggcatgagctgagtgaacaagcatgttccgagtaagtcctcattctgtgatyatcatgtggatcagaatctagggattttgaattgccatgtcctacaagccttagatgaggtgcctctgccttcttccctgatgtcatctcttaccacccttcctgccattcactctgtgtatccacagagtaaacagtatctgggtactccaacacctctggtccttctgtgcacaccaccttcccccagtccttggcat

SEQ ID NO: 136376 - DNA, 615 bp, Homo sapiens
acttgaactgaagattttctttagcaagaagacaatatttactctgtctaaaacatattagtacatatgcactgctaccagataattactacttaacttctttaagcaatttaaaacacaaaaaaccamagcaacgtgtctgctcattatttcaacatttattgagtgcctatagcttgcaaggattgtcttctggtaatcctggataccagaagtagcatgtggtaacggagcaaggaatatagggtggtagcagacacacccagtatcctcagtggggctgataacatacaatctcccttgtaaaactgtgatacactttccttggaagtttttggattgtatagaaaatcaatacttaggttgctccaagcacatcaacactattattaaaaagctccagggtcaggcacagtggctcaagcttataatcccaacacttagggaggccaagatgagaggattgctttaggccaggagtttgagacaagcctgggcaacacagtgagaccccaccttttttaaaaaaatgagctgagtgtggtggtgcaggcctgtagtcctaggtactttggaagctgagtcaggaggatcacttgagcccaggagtttgag

SEQ ID NO: 136377 - DNA, 615 bp, Homo sapiens
acttgaactgaagattttctttagcaagaagacaatatttactctgtctaaaacatattagtacatatgcactgctaccagataattactacttaacttctttaagcaatttaaaacacaaaaaaccaaagcaacgtgtctgctcattatttcaacatttattgagtgcctatagcttgcaaggattgtcttctggtaatcctggataccagaagtagcatgtggtaacggagcaaggaatatagggtggtagcmgacacacccagtatcctcagtggggctgataacatacaatctcccttgtaaaactgtgatacactttccttggaagtttttggattgtatagaaaatcaatacttaggttgctccaagcacatcaacactattattaaaaagctccagggtcaggcacagtggctcaagcttataatcccaacacttagggaggccaagatgagaggattgctttaggccaggagtttgagacaagcctgggcaacacagtgagaccccaccttttttaaaaaaatgagctgagtgtggtggtgcaggcctgtagtcctaggtactttggaagctgagtcaggaggatcacttgagcccaggagtttgag

SEQ ID NO: 136378 - DNA, 492 bp, Homo sapiens
caaaaacagaaccccacgaaaaatggggtagaaaaaggtagaaatagtatttataacacaggtcaagcaataggagtagagggtggagaagagagtggacaaaaccaataacatgcatctgtttttgtaaaaatgtaaataatgcaaactaaaaatgttagcaaagataatggagattttttaaataccataagcaactttacttcaatacatttgaaaatctaaattaaatagacaactttcttgaaaaatgccaattagcataattgtcataasgaaaaatggaaataccaaaatgtaacaatcactttgaaggaaatggaaaattaataatggccatttttttttttttactgtctgtcaggtactattgataaagctttaaataaattatcttatataatccttatattgaccttataaggtaatgcaacagaattagagcttgcagataagaaattgaggcttaagaaaagttaagtaaacctccaa

SEQ ID NO: 136379 - DNA, 569 bp, Homo sapiens
tatacatgtatgaagtagtaaacagtttggtaggaaatgaaacataagacacattactaaaaatttacaaagaaacactaatgctctttaatgcttctgctgagacttcaaaaatgattaagacacttgttaaaagtctaaattcaacartctataaatttgttaaccaaacgcatacatacatgcatctcttagaaaaattgtgaaaacacaaaagggtaaatcttaccagagttaattttggcctgtaaccactttttcatacagtcttggtggacatactgcaaacttcctgtgcacttgcatggctctatcagcaaattagatgatgatgcagctgccatttgacaaattctacataagtcaccttcttcttcttctgagtcctctaaaaggaggctggaaaagaaggcacatttcccaaagctatcataactcatcctggttggttacttcagtcatacataatcacaagctttcttttttgttatttctactcacactgtctctgggtggaaaaaagcaaacagtaacaacaacaaaacaataacaattatattcatcagcaa

SEQ ID NO: 136380 - DNA, 576 bp, Homo sapiens
tgaattccaacctgaaggaataatatctactgtgatcatgacattgtcggtcaaattactcccaagtgctggrgggactgcaaaccggaataaggaaccaggaagaatccctgatattcctgtatttcttccaccttgagccgaatctgatgtagagccacctgttgtggcactgcttgatgctgcagatgcttgtggtctgttggcagcagctccaagaggatcattctgtgcttcaaggtgaaccacttcatttgattctcttctaaaaatatgagatctagatgatgtatcagaggtaggtatccttgaagattcatctcttccctctcgcctccttctagagaacaaaggtgtgcatctatttctaagtgaggaagataaccatggtcctgtatttctaccttcagattcttggttaaaattttctgaatctgactcagagctatgattgtggctaagagatgacaaaccccatcttcgcctaagaaatcgaaatccctgagaagcttcagatgccctattatcgggaacttcagaagctgatggtacattactacgggactgtgaagctgt

SEQ ID NO: 136381 - DNA, 559 bp, Homo sapiens
aaagctttcccacaaatgtagtcaaaattaatcctatgcaaacaaacaaaaaaagcgctgagttaaatatcctttaaaaactgaattaaaattcaattttgggccaggcatggtggcctgcgcctgtaatcccagcactttggaaggctgaggtgagcasattgcttgagcccaggaggtcaagaccagccttggcaacatagcgaaaccctgtcactatagaaaatacaaaagtcagccagtaatcccagctacttggaaggctgaggtgataggatctcttgagcccaggaggtcaaggctagagtaagcagtgatcgtgccactgtactccagcctggtcaacagaacaagaccctgtctcaaaaaaaaatttttttttgaaaagtacagaggtctcagcttcaaagataacaatattcaaactacaacaatcaaccacttccaccaacatgcttatgtgccatgctaaagttaagacttacataaatataagataaatattttaagtgtgttaccattcccataccattttatgatgatgtatagaaaaatatga

SEQ ID NO: 136382 - DNA, 526 bp, Homo sapiens
gcagctgtttgcacggtgtctggatggaatttggatatgtgggcagaagtggcttcatgcatactcttgagatccctcatcttgcaaggaggagctggttgtgggagctggtgatgggagcaggtgcaaggaggggcctgggctatgtgctttaaatcaggatcttccagcatctctacttcttcaacatgaagctacaaggaatcaaagaattttaatttaaatttgaaccttgcctttaggtatattttctaaggtaggaggatagaacccactcaattaaagatatttaggacggtttataattcagcatattgtatgtgggccactacttgtrctctttctagtcccataaatgttagggaagggcttgtatgtatacattgaatcaagagttcattttcctagcattactgctatataattttataagaggatggcaaaagttctctaaattttataaggtgagtttcagactgtgatttcatactgagtccacatcacattggattgctttccctaacat

SEQ ID NO: 136383 - DNA, 552 bp, Homo sapiens
taatttttgctatattatacctagacaatttttgctattaatcaaacttaacaattgcaaatatattatacctagattatttttgctattaattaaacttaacaattgcaaatggtaaagctttaactatctattayggttatacctcccaaatgagaagacaacttaagatgcacaatttccatatccaatcaaaaccaaattagatgatttttatcttcattacccttccacttttccaggattgaagaaaagtatataccatgatgctttacctccaacagctctttttttttctctcttttatcatccaaatttccctaaaatctgtccaccttgtcttgctatcattaatgagcaattcttcttaggtaatattttaaacacatgtcctttctaggcaataacttagcacaaagcactttctttattggtgggaatttgaagcagtgttgtaaactgctgaaggtactgtgtttggatagaccttgggtagaccttctggcatcttcaaatcatactctctacagctgtgtacactttccctggaca

SEQ ID NO: 136384 - DNA, 451 bp, Homo sapiens
ttgtaactgctactacagaggattaaaaatagtccccattaaaaaatattacatggttaaaatttagggatagaaaggatatattcagcactagaagcggataaaacatttatttaaaagtattgttctttttcttccaattcttctgtgctcttstaggaaaaagaaaagaaagagccaaagtatgggaactttttcaactgttacagggcttcaaggtatatttgttttctgtactttcacaaaactaagcatgggtagttattgtttaaccctatcgaaagctaataattatgtcaccttagccttggggaatgaaaaacaggaaacattttatcaaggtgcatagattcataagtaatattttaaaaggttgtgtgaagggtgttaaaagcattgtttttgaataggacagcatttaaaggaaataaaaacctatttttggtgaaag

SEQ ID NO: 136385 - DNA, 583 bp, Homo sapiens
aagaagtaagacatgggttttgggtattctcattgttactgggatatcatttcttctagttcctctcagaaaaaawgtttggaaatatgtgtgaatagtaactactatttacacacacacacggttaagtcacagctactttaactaatgaaatcctccaacacatacatatacacttacatacacaagtgtgcatttatttaaaaaaatatttaagtgtactacaggtgcaaacttaaatacatatggggttcagacgacaacctaataagtgagatgggaatggtaaaacaattgcccccttctgcctatcttttaatatatgtgtgtatatgtatatatgaaaagatagggagaatatatacatatatatgtgtgtgtgtgtatatatatccttctatatctattttaagccaaaaatgggttcatactgttgtctacaactctaatccagtattacatgaattattctagccttccctccttgctcatctgtaactccctactctaacagtgagaaacctggcttctaccatgtgccatctatttacttaattattccatttcaatatatttgtatagt

SEQ ID NO: 136386 - DNA, 583 bp, Homo sapiens
aagaagtaagacatgggttttgggtattctcattgttactgggatatcatttcttctagttcctctcagaaaaaatgtttggaaatatgtgtgaatagtaactactatttacacacacacacggttaagtcacagctactttaactaatgaaatcctccaacacatacatatacacttacatacacaagtgtgcatttatttaaaaaaatatttaagtgtactacaggtgcaaacttaaatacatatggggttcagacgacaacctaataagtgagatgggaatggtaaaacaattgcccccttctgcctatcttttaatatatgtgtgtatatgtatatatgaaaagatagggagaatatatacatatatakgtgtgtgtgtgtatatatatccttctatatctattttaagccaaaaatgggttcatactgttgtctacaactctaatccagtattacatgaattattctagccttccctccttgctcatctgtaactccctactctaacagtgagaaacctggcttctaccatgtgccatctatttacttaattattccatttcaatatatttgtatagt

SEQ ID NO: 136387 - DNA, 527 bp, Homo sapiens
ctgtcttcttggtcctcacctcctccccagcgtgttccttccatccaatgtgacctgagatgtgtgcctactactactgcagagagacgtttaataaggtagctaagctcttttaattgcccaacttratcaggagctgaattttctcactttaaatttctactaaattttaataacgacacattgcatatttctagacacataggaagtacaggaagcatacaacataatatatccacaagtgaaccatccagagtataacttgtgtgaatattttatcatattttcttcagtactcccccacttaaggaataaaatggttcagtacatctaaatgctgaccatgtgttccttacttgcagtatctttcctattacactttctgcagtgcgtgctgatgatcgattctctctttagaacatgcagcttctcctcaacgctgccatgtctcctgtattctctttctgtactttctagctgttacttttcatttgtgtttgtttgttcttccttcctcacttgctcct

SEQ ID NO: 136388 - DNA, 498 bp, Homo sapiens
aatgacttaaataaaaataaaaatggactgccattttgtggacgccgggtgagcgagagcatcgctgggtactgggccggaggaaagcgggaagacccatcggagcgtatggatttgagcctccgcattttttaccctagatgtcgaaatgcatcgtgattcctgtccattggactgtaaggtttatgtaggcaatcttggaaacaatggcaacaagaccgaactggaaygggcttttggctagtatggaccactccaaagcgtgtgggttgctagaaaccctcgcggctttgcttttgttgaatttgaagatccccgagatgcagctgatgtggtctgagaactagatggaagaacaccatgtggccgctgtgtaagagtggaactgtcgaatggtgataaaagaagtagaaatcgtagcccacctccctcttggggtcctcgtccttgagatgattatcataggaggagtcttccacctcgtcgcagatttccaag

SEQ ID NO: 136389 - DNA, 498 bp, Homo sapiens
aatgacttaaataaaaataaaaatggactgccattttgtggacgccgggtgagcgagagcatcgctgggtactgggccggaggaaagcgggaagacccatcggagcgtatggatttgagcctccgcattttttaccctagatgtcgaaatgcatcgtgattcctgtccattggactgtaaggtttatgtaggcaatcttggaaacaatggcaacaagaccgaactggaacgggcttttggctagtatggaccactccaaagygtgtgggttgctagaaaccctcgcggctttgcttttgttgaatttgaagatccccgagatgcagctgatgtggtctgagaactagatggaagaacaccatgtggccgctgtgtaagagtggaactgtcgaatggtgataaaagaagtagaaatcgtagcccacctccctcttggggtcctcgtccttgagatgattatcataggaggagtcttccacctcgtcgcagatttccaag

SEQ ID NO: 136390 - DNA, 649 bp, Homo sapiens
accttggcaaaataaacttctaaattgattgagacctgtctcagacacttttttggtgtatgcttgctttgtgaaatgaatttagaattccttctctttcaattttttggaggagtttgagaagaatcggagtgagttctttgaaaatttggtagaattcagcagagaaagtttttcttcatatgcatggggaaaaatctctcctcaaatcatgttttcctctactctcccatctcaacaatcatctacacagaagaaaacttctatgaccagatgtatggggatctttcccacaaccaagcagcagacaccagctgaatgttcttcaattccattctaacactatttacatggagagagtgccagatcccacaggttaaggactcagtccccaagcctattctctccttcccctmacccaccggtcccaagtccaggcctctggaacttctgactgattgccttcaagttggggttccacaacaccctctttggatttaattaatttgttaagtggctcccagaactcaaacgcttacatttactgttatactaagatgtatattttaaaggatgcagataaccagatgaagagatatataggatgagatctgcaagggtcccaaatgcaggagcttctgatcctgtg

SEQ ID NO: 136391 - DNA, 649 bp, Homo sapiens
accttggcaaaataaacttctaaattgattgagacctgtctcagacacttttttggtgtatgcttgctttgtgaaatgaatttagaattccttctctttcaattttttggaggagtttgagaagaatcggagtgagttctttgaaaatttggtagaattcagcagagaaagtttttcttcatatgcatggggaaaaatctctcctcaaatcatgttttcctctactctcccatctcaacaatcatctacacagaagaaaacttctatgaccagatgtatggggatctttcccacaaccaagcagcagacaccagctgaatgttcttcaattccattctaacactatttacatggagagagtgccagatcccacaggttaaggactcagtccccaagcctattctctccttcccctaacccaccggtcccaagtccaggcctctggaacttctgactgattgccttcaagttggggttccacaacaccctctttggatttaattaatttgttaagtggctcccagaactcaaacgcttacatttactgttatactaagawgtatattttaaaggatgcagataaccagatgaagagatatataggatgagatctgcaagggtcccaaatgcaggagcttctgatcctgtg

SEQ ID NO: 136392 - DNA, 637 bp, Homo sapiens
gctttgtgaaatgaatttggaattccctgtctttcaatttttgggaagagtttaagaagaattggagcgagctctttaaaagtttggtagaattcagcggtgaaactatctggccctgagcttttctttttgtgagacttttatttattactgatttaatttaattgcctattattggtctggtcatgctttttatttcttttggtataattctggtgggttatatgtgtctagaattatgtccatttattttaggtttgtcaatttcttggcatatagttcttcataatctctaatgattcattgtatttctgtggtatcagttgtaatgtctcccttttcacttctgatttatttatttgggttttctgtccttttttaaattagcctagctaatggttttgtaatttagtttatcttttcaaaaaaccaacttttctttttattgattttttttttttttttgagatggagtttcactcttgttgcccaggctggcacaatctcagctcaccacaacctttgcctcctgggttcaagcaattctyctgcctcagcctcccaagtagctgggattacaggcatgtaccaccatgcccagctaattttgtatttttagtagagatggggtttctcc

SEQ ID NO: 136393 - DNA, 600 bp, Homo sapiens
cttgagaatgatccatgtgctgaggagaaaaatgtgtattctgcagccattgggtgaaatgttctgtaaatatctattaggtccatttttctatagggcagattaagtttgatgtttctttgttgattttctgtctgggagatctgtccaatgctgaaagggggttgttgaagtcgccagctattattgtattgggggtctatctctctctttagctacaataatatttgcttcatatacctgggtgcttcttgggagcacttccagcatcactagtgccacttcatgtggatcccatggtgttattcaaggtttacagtacagcacgaaacaggacaaaaaatacatgtgaacagggagagggcactttttactgtgatgcgcaattcactggagatgacctgctyatgatggaatgttgagtatcacagaacgttttaagtggatacttgcaacacctgagctcattgcaacagcaacaggaggaggctatgaaattattaccgtactgtggtatgcactacggttaaatttatgcagttacaatttaatactgcatcttgatgtttgtatacacttctctcaactgagaatagcacc

SEQ ID NO: 136394 - DNA, 484 bp, Homo sapiens
tgaagttaaacatgattgagctgatttttagaatatagtctaagtgcttctcttccatcctctccagattctcacctgctacacacccctcagagggactggaggaatccagacaacgatgcgcaggggccctggtgctatactactgatccagaacagagatatgactactgcgacattcctgagtgtgaagggcaggagtggctctagaaaatgttttcatttctgcycttcacctgtaaaataatttgttgtaaagccccttcccacagggatattattaataattgcgtaacgtgttcacctctcggaaaggagcaaaactttgctcagatcccagaattaacctgatttttttttttctgagacagaattttgctctcattgcccaggctagagtgcaatggtgcgatctcggctcaccacaacctccgcctccgggttcaagcgattctcctacctcagcctcccaagtagctggaat

SEQ ID NO: 136395 - DNA, 484 bp, Homo sapiens
tgaagttaaacatgattgagctgatttttagaatatagtctaagtgcttctcttccatcctctccagattctcacctgctacacacccctcagagggactggaggaatccagacaacgatgcgcaggggccctggtgctatactactgatccagaacagagatatgactactgcgacattcctgagtgtgaagggcaggagtggctctagaaaatgttttcatttctgctcttcacctgtaaaataatttgttgtaaagccccttcccacagggatattattaataattgcgtaacgtgttcacctctcggaaaggagcaaaactttgctcagatcccagaattaacctgatttttttttttctgagacagaattttgctctcattgcccaggctagagtgcaatggtgcgatctcrgctcaccacaacctccgcctccgggttcaagcgattctcctacctcagcctcccaagtagctggaat

SEQ ID NO: 136396 - DNA, 654 bp, Homo sapiens
ttttggaaatataaaatatagtaacgaaactgtgaactttgttataattagttttgtatatatgtgtgtctgtgtttgtgcctgtattacaatatacagtcagcttaaggatgtagatgcattctgagagatgcatcagcaggcaattttgatgttgtgtgaacatagagtgtacttacacaaaccgagttggtagcgcctactacacacacaggctatacagtatagtctattgctcttaggctacaaacctgtgcaacatgttactgcactgaatactataggcaattgtaatacaatagctataatgtcactaagcaataggactttttcagcttcattatgattttatgagaatttatgtatttgtggttcatcattgatggtaacattattacctaatccatgactacatatgtaaaatatgttattgtctgtatctttctaaacactcacatatatcaaacaacatatataaaaacattgctgctattgcttgaactctttgggagagagagagagagagagagagagagwgtgtgtgtgtgtgtgtgtgtgtgtgtgtgaagttacttactgggtactatgtacattatttgggtaatgaaagcactgaaagtctaaacttcaccactatgcagtatacccaggtaa

SEQ ID NO: 136397 - DNA, 594 bp, Homo sapiens
actttgaacttgagatttctgctttacacctttagtagtttttaattaggggttttctttcttgaagaaagtgatggataagcatttaggtcaagacaaacaaacaaagtcacttagagaataacttattaaaaaatggttttgaaaaaagagcattatgaaatgtttatctccctgttagcctctatgtagaacatgttcaaaagctcacctttaatttaattaaatgtattaattactcctgacctttatgttcckgtgctgtaacttttaagagcacttaatgaaaatacatcatgttaatccaaattcaaaggcatcttctacgtagaggtaataaaatagattaaagttcaccttttgtcctgtggtattctgtaaaggtgatccagggtgatgttcctacagcaactttgactttcgattagtagagtcttttattggattgtttaacttttaggagagcagtcctggttcatagtgtacactctccattccagttgttcatccaggagacagacacttcaaaaatgtaaagatgactgacgaaggtggtatgtagtgtttgtctctgaaaaaaaaaaagatagtatt

SEQ ID NO: 136398 - DNA, 594 bp, Homo sapiens
actttgaacttgagatttctgctttacacctttagtagtttttaattaggggttttctttcttgaagaaagtgatggataagcatttaggtcaagacaaacaaacaaagtcacttagagaataacttattaaaaaatggttttgaaaaaagagcattatgaaatgtttatctccctgttagcctctatgtagaacatgttcaaaagctcacctttaatttaattaaatgtattaattactcctgacctttatgttccggtgctgtaacttttaagagcacttaatgaaaatacatcatgttaatccaaattcaaaggcatcttctacgtagaggtaataaaatagattaaagttcaccttttgycctgtggtattctgtaaaggtgatccagggtgatgttcctacagcaactttgactttcgattagtagagtcttttattggattgtttaacttttaggagagcagtcctggttcatagtgtacactctccattccagttgttcatccaggagacagacacttcaaaaatgtaaagatgactgacgaaggtggtatgtagtgtttgtctctgaaaaaaaaaaagatagtatt

SEQ ID NO: 136399 - DNA, 420 bp, Homo sapiens
gaattctggattgcatcatcccattaggaataaaatttaactctgatgaattttccaaaatctcacagttagaatgtaagtaaatgaaataatatctatacaaaactacctaggatgtgtttctattgtgtttatggcaaaatttatctggcttttaatctaatacaaagcaaagaagagggagtcttagggttgacataaaaagattttcctacataggaattttgagtacatttaaatgaaaagtttatatacaaaatcctggagacaaatacrtatttagcaatcactcccacctttgctgtagcttttaccctcagtgttaacaaataacaaaaataacaaatggcattatttgttttcttattctaagccctgctgaaatttttaaaatggcttttttttttcactgtgtgtgta

SEQ ID NO: 136400 - DNA, 476 bp, Homo sapiens
tgcgtgttatttacaatctgctgcgtaacaaattactacaaacttagtaccttaacacatatttatttcacagtttctgtgggtcaggagatcagaaatggttctatttcaaggtctctcacagggctgcaatcaagatgttggcatggctggggtctcatctgaaggctggactggagaatctacttccaaacttatgtggtagttggaagartttagttcctcaaggctgctaaactgatggcctgtgttccttgcctctgggatggtagcttgcttcaacaaagtgtgcaagcagagaagacagagagagtccactagcaagatagaagccacaatctcttgtaatctatcatttttgctgtattctactggttaaaaataactcattaggttagcctactggctctgaaggggaagagattatacaaaggcatgaatttctggaggagggaatgagggcaaagaactctgaa

SEQ ID NO: 136401 - DNA, 469 bp, Homo sapiens
tgcgtgttatttacaatctgctgcgtaacaaattactacaaacttagtaccttaacacatatttatttcacagtttctgtgggtcaggagatcagaaatggttctatttcaaggtctctcacagggctgcaatcaagatgttggcatggctggggtctcatctgaaggctggactggagaatctacttccaaacttatgtggtagttggaagagtttagttcctcaaggctgctaaactgatggcctgtgttccttgcctctgggatggtagcttgcttcaacaaagtgtgcaagcagagaagacagagagagtccrctagcaagatagaagccacaatctcttgtaatctatcatttttgctgtattctactggttaaaaataactcattaggttagcctactggctctgaaggggaagagattatacaaaggcatgaatttctggaggagggaatgagggcaaagaa

SEQ ID NO: 136402 - DNA, 596 bp, Homo sapiens
atttaggttagtattctggagcaactctttaccagatttgtgattgtgaattatttattaaactcaaagttcctcaattttctcaattcaaaataaaaataatagcacccgaattggtgaaagtaatactgacagttgtaacaaacatccccaaatgcaggatgtttcaaatcctatagaagagtatttctcagtaatataaattccaaacagaatgttactgagtgtcaggttagctctagtccaggtgctggcttcttccaccatgcgattcatcaactgaagctcatattgtttcccaggttgcactgggagttggtatccagccattagtcargacaagataagggaaaattgcaaaataatgaaaagcctttaggggccagtgtggaagtgatacatactagttttagccacgttcctctcaccagaatttaggtccagctatgattgccacacttaagtaaaagaggggaatgggtgggaaatatgttccatctctgtgtttaggaaagataggagatgaatttcattaatagctagtcagtctctgccatggcagttatttcatagcattgtgaagattattaaactat

SEQ ID NO: 136403 - DNA, 552 bp, Homo sapiens
cgaatttggctggctttgctatctgctgattgttagagcccagggccttgctgaatgtaggcattagccaggtagtggttacagtgggccttgggtgagaaccagtactatgctggctttaggtttaagccagtgcagtctcagtggtggtagccacaggggtgattgtgtcacccatcctccagctgtggacagctcagcacagagagagggactctattcaggagaaagtaagcaaagggaacaagagtctctacctggcaatccagatcattcttttgaatcttatccaagaccaccaaggtgatacccttacaagtcttcaagaaccacagctttacggggctttgggtactccctaatgcagatatggctctagtgaccaaaaacttggaccaaaacaccraagcctcttcaaatacctgaaaagccttctgaacaaggacaggtacaaaccaacccagactgtgaaaacgataataaatacctaactcttcaatgcccagacactgaagtatatccacaagcatcaggacaatccagaaaaacata

SEQ ID NO: 136404 - DNA, 584 bp, Homo sapiens
ttagaataataaaataaataataaagatcatagaagaaataaatgaaattgaaaggaaaaaaatacaaaagattaatgaaacaaaaagttggtttttgaaagataaacgaagttaacaaactttaaaccagactgtgaaaaaagagagaagacccaaataaataaaatcagggatgaaaaaagagttatttcaactaataccacagaaattaaaaggattattacaggatactatgarcaactatatgccaatacattcaaaaacttagaagaaatggataagttcctagatacatacaacctaccaagattaacccataaagaaatccaaaacctgaacagaccaatagtaagtaatgaggtcaaagccataataaaaactctcccagcaaagaaaagccaggaactgatggcttcactgctgaatgttaccaaacatttaaagaagacctaataccaatccctctaaaactatcccaagaaataggggaggagggaatttttccgaacccattatatgagtccactgttaaccatgatacctaaacgaaacaaagacacatcaaaaaaaaaaaaaaaaaaaa

SEQ ID NO: 136405 - DNA, 526 bp, Homo sapiens
acattttggagctctattttataaagaaatgttccactccttcaagagaaacttcactgaaataaaagtcataactagtatttcttaaaagagtaaacatacagatgaatgaatgtacacttttaatacttagtcaggtttcacactgctatgaagttactatctgagactgggtaakttataaacagaagaggtttaattgactcacaatttcacatggcgggggaggcttcagaaaacttacaatcatggcagaaggcaaaggggaagcaggcaccttcttcacatggtggcaggagagagagagcacaggggaaactgccacttttaaaccatcagatctcatgagaactcactatcacgagaatggcagcaggaaaaccacccccatggtacaatcacctcccactaggttcctcccttaaagcatggggattacaattgtagatgagatttgagtgggaacacagaaccaaaccatataatgtatgtttatttatgcatgcctttgtaggaaagggaatgc

SEQ ID NO: 136406 - DNA, 522 bp, Homo sapiens
actcactatcacgagaatggcagcaggaaaaccacccccatggtacaatcacctcccactaggttcctcccttaaagcatggggattacaattgtagatgagatttgagtgggaacacagaaccaaaccatataatgtatgtttatttatgcatgcctttgtaggaaagggaatgcttccttttcaccatctctgagggttcactggaatgaaccaacaatagatgagtagtaaaaaaagggcatacaaagtttattyatatatacatggacttggcagtcctgcaaatatgagacccaaggcagagccagatgtttgaggctcatatacactcttcataggggacaggaaagtgagagacttcaggaaacattacaggggaagtaaatgatttttaggagaaatgaatgagccaagaaaacaatgacctgagataaagttcctctgaggtcccagggaggtggcaggaaggtgaggggtggaactttactgtgaacaatggttgtcatattatgagataaa

SEQ ID NO: 136407 - DNA, 552 bp, Homo sapiens
tgagaactcactatcacgagaatggcagcaggaaaaccacccccatggtacaatcacctcccactaggttcctcccttaaagcatggggattacaattgtagatgagatttgagtgggaacacagaaccaaaccatataatgtatgtttatttatgcatgcctttgtaggaaagggaatgcttccttttcaccatctctgagggttcactggaatgaaccaacaatagatgagtagtaaaaaaagggcatacaaagtttattcatatatacatggacttggcagtcctgcaaatatgagaccyaaggcagagccagatgtttgaggctcatatacactcttcataggggacaggaaagtgagagacttcaggaaacattacaggggaagtaaatgatttttaggagaaatgaatgagccaagaaaacaatgacctgagataaagttcctctgaggtcccagggaggtggcaggaaggtgaggggtggaactttactgtgaacaatggttgtcatattatgagataaactctaccaggtaatatccaggagta

SEQ ID NO: 136408 - DNA, 548 bp, Homo sapiens
agatctcatgagaactcactatcacgagaatggcagcaggaaaaccacccccatggtacaatcacctcccactaggttcctcccttaaagcatggggattacaattgtagatgagatttgagtgggaacacagaaccaaaccatataatgtatgtttatttatgcatgcctttgtaggaaagggaatgcttccttttcaccatctctgagggttcactggaatgaaccaacaatagatgagtagtaaaaaaagggcatacaaagtttattcatatatacatggacttggcagtcctgcaaatatgagacccaaggcagagccagatgtttgaggctcatatacactcttcatagggkacaggaaagtgagagacttcaggaaacattacaggggaagtaaatgatttttaggagaaatgaatgagccaagaaaacaatgacctgagataaagttcctctgaggtcccagggaggtggcaggaaggtgaggggtggaactttactgtgaacaatggttgtcatattatgagataaactctaccaggtaa

SEQ ID NO: 136409 - DNA, 485 bp, Homo sapiens
ctaattaagatctttaaatctgttataactttgtctcttgatgtgacagagttctgctcaatgaggtataggctacaattttggggaagtacattctttcctgcatataaagtcagagatggcccagcgcagtggctcacgcctgtaatcccagcactttggaaggccgaggcggatggattacctgaggtcaggagttcaggaccagcctggccaacatggtgaaaccctgtctctactaaaaatacaaaaaaatagctgggagtggtggcgcatgcctataatcccagctacttgggaagctgaggcaggagaatcgcttgaacccaggaggcagaggttgcggtgagtcaagattacaccactgcactgcagcctgggcaacagactgaggctctgtctcaaaaaaaaagaaatyagagataaggacaaaactctttggccttttatttttgtcatttgtctctttcttttttttttccttt

SEQ ID NO: 136410 - DNA, 592 bp, Homo sapiens
gaggtgtatattatgcttctgttcttaatatagttatcacctttatgtgaaagggctaagcattaaaaataacagcatactgctttgagtagtttttttttttttttgtctaattccaaaagtaatamaggatcatcatagagaaaagtgttaaaaagaaaataaatatttctcacagtcctacaactcaatgaaaaccacattttctttgtaaaaccaaccttgcaagtattaattttagctttatacacatttacaaatgcccttataataatgtccgtacgtatagtagttacctgcttaatatttaatcaactaatgttaaggagggaaatttggaatggagaggatctttagacatatctgtattggggaaggcctggtttgaatgttgatggcagttaccttttaaacagcaactaccatatgtcaagtattgcaattgtacgtagcaattataatgctatgtatatttatgatgctgctttctcttcctcagtttatagaaatactacatcctctgtgtcgtttgtattcatagttaaattgaggccatataactgatctctggccagcgaaatgtgaatgaaag

SEQ ID NO: 136411 - DNA, 592 bp, Homo sapiens
gaggtgtatattatgcttctgttcttaatatagttatcacctttatgtgaaagggctaagcattaaaaataacagcatactgctttgagtagtttttttttttttttgtctaattccaaaagtaatacaggatcatcatagagaaaagtgttaaaaagaaaataaatatttctcacagtcctacaactcaatgaaaaccacattttctttgtaaaaccaacmttgcaagtattaattttagctttatacacatttacaaatgcccttataataatgtccgtacgtatagtagttacctgcttaatatttaatcaactaatgttaaggagggaaatttggaatggagaggatctttagacatatctgtattggggaaggcctggtttgaatgttgatggcagttaccttttaaacagcaactaccatatgtcaagtattgcaattgtacgtagcaattataatgctatgtatatttatgatgctgctttctcttcctcagtttatagaaatactacatcctctgtgtcgtttgtattcatagttaaattgaggccatataactgatctctggccagcgaaatgtgaatgaaag

SEQ ID NO: 136412 - DNA, 592 bp, Homo sapiens
gaggtgtatattatgcttctgttcttaatatagttatcacctttatgtgaaagggctaagcattaaaaataacagcatactgctttgagtagtttttttttttttttgtctaattccaaaagtaatacaggatcatcatagagaaaagtgttaaaaagaaaataaatatttctcacagtcctacaactcaatgaaaaccacattttctttgtaaaaccaaccttgcaagtattaattttagctttatacacatttacaaatgcccttataataatgtccgtacgtatagtagttacctgcttaatatttaatcaactaatgttaaggagggaaatttggaayggagaggatctttagacatatctgtattggggaaggcctggtttgaatgttgatggcagttaccttttaaacagcaactaccatatgtcaagtattgcaattgtacgtagcaattataatgctatgtatatttatgatgctgctttctcttcctcagtttatagaaatactacatcctctgtgtcgtttgtattcatagttaaattgaggccatataactgatctctggccagcgaaatgtgaatgaaag

SEQ ID NO: 136413 - DNA, 592 bp, Homo sapiens
gaggtgtatattatgcttctgttcttaatatagttatcacctttatgtgaaagggctaagcattaaaaataacagcatactgctttgagtagtttttttttttttttgtctaattccaaaagtaatacaggatcatcatagagaaaagtgttaaaaagaaaataaatatttctcacagtcctacaactcaatgaaaaccacattttctttgtaaaaccaaccttgcaagtattaattttagctttatacacatttacaaatgcccttataataatgtccgtacgtatagtagttacctgcttaatatttaatcaactaatgttaaggagggaaatttggaatggagaggatctttagacatatctgtattggggaaggcctggtttgaatgttgatggcagttaccttttaaacagcaactaccatatgtcaagtattgcaattgtacgtagcaattataatgctatgtrtatttatgatgctgctttctcttcctcagtttatagaaatactacatcctctgtgtcgtttgtattcatagttaaattgaggccatataactgatctctggccagcgaaatgtgaatgaaag

SEQ ID NO: 136414 - DNA, 364 bp, Homo sapiens
catagctcactgcagcctagaactcctgggctgaagcaattttcctgccttactctccatacgacctgggactacaggcacatactaccacatcaaactaattttttttttttttgagacagggtctcactttattgcccacgctggtctcaaactcctggcctcatgggatcctcccactttgaatcacccccttgttactctaaaaagtgtcccaattttartgataaattatatgggaactctacatttggagggttttaaatagaatggatgcactcattgaaaaaatctgtgaagtaagcagaagaattaagataagtttagagtccatcaaagaggttccaggaagcaagagatgagc

SEQ ID NO: 136415 - DNA, 509 bp, Homo sapiens
ttgtcctaactttgatgaagaaaataagaaaataccagtttccccagtagagagtttactgtgaaaagcattgcagatttgacattgcgtgaaagtttccaactataagcaaatgcagacttaatggcagtaaatgacattaaattttttaaatgacaaaacctgcatttgaaatgtaggtacataacttttagttatttgaaacttcaaggatagctaattggctaatacataaggggacagaaaatctgactagtattaactttgamccaaaaaaaaaaaaaaaagaagaagaaaagaaaagaaaaagaatctttgtgtagttgaatccttatcttggctgttacttacacattgcaaacctattttgtatgagtgcacatcaaattccctttgggattctcaatttcatttattttatcaataaaaagagcctccttgtggagaaaggaataagtcacatataaatgaagtagaagagattacaccagtacctgagcttttacttt

SEQ ID NO: 136416 - DNA, 509 bp, Homo sapiens
ttgtcctaactttgatgaagaaaataagaaaataccagtttccccagtagagagtttactgtgaaaagcattgcagatttgacattgcgtgaaagtttccaactataagcaaatgcagacttaatggcagtaaatgacattaaattttttaaatgacaaaacctgcatttgaaatgtaggtacataacttttagttatttgaaacttcaaggatagctaattggctaatacataaggggacagaaaatctgactagtattaactttgaaccaaaaaaaaaaaaaaaagaagaagaaaagaaaagaaaaagaatctttrtgtagttgaatccttatcttggctgttacttacacattgcaaacctattttgtatgagtgcacatcaaattccctttgggattctcaatttcatttattttatcaataaaaagagcctccttgtggagaaaggaataagtcacatataaatgaagtagaagagattacaccagtacctgagcttttacttt

SEQ ID NO: 136417 - DNA, 390 bp, Homo sapiens
agaagattctagaaaagtgaccttgatatttatcttgcacctcagtgcctttarcatgtactttttctgcttagaatataccccaaactcttttcttcatcctttttaatgtgtcttcagggctgagctttcaaatccacttattaaggatatctttccccaacccttaaattattatttaagataatttcccagataagtttttctgtttatatgtctttatcagaattatgatacatgggtttttttgtttgtttttatttttgagacaaggtctcactttgctgtgtagtcaggagtgtggtggtgtgatcttggctcactacagcctcaacctcccaacatcaagtgattcttccacctcagctccccaaaaagctgggaccacag

SEQ ID NO: 136418 - DNA, 346 bp, Homo sapiens
aaaagtgaccttgatatttatcttgcacctcagtgcctttaacatgtactttttctgcttagaatataccccaaactcttttcttcatcctttttaatgtgtcttcagggctgagctttcaaatccacttattaaggatatctttccccaacccttaaattattatttaagataatttcccagataagtttttctgtttatatgtctttatcagaattatgatacatgggtttttttgtttgtttttatttttgagacaaggtctcactttgytgtgtagtcaggagtgtggtggtgtgatcttggctcactacagcctcaacctcccaacatcaagtgattcttc

SEQ ID NO: 136419 - DNA, 609 bp, Homo sapiens
ttttgtttgtttttatttttgagacaaggtctcactttgctgtgtagtcaggagtgtggtggtgtgatcttggctcactacagcctcaacctcccaacatcaagtgattcttccacctcagctccccaaaaagctgggaccacagtcacacgctaccacacccaactaattaaaaaatcatattttttgttgagatgagatctcactatattgtgcaagctaatcccaaactcttgagttcaagtgatcctgctgtcttagcctcccaaaattctgggattataggcatgtgccaccactcccatccacataaggcattttttatgaatgcctgtgttctctactgggttgtgaacttagggagaggatgrggataccataatatccacttatgtatttccaacaccttatggcactgaaaaactattgtcatctgactaatggtctagttgccattttagggcctcatgatctcatttatgaatcatgacacaaactgccttattttccatgtgccaatctcaattccatattgtccaggcctgactgatttgtgatcttaaaacatggattttatcatgttacattctgcaaccacactgtcactat

SEQ ID NO: 136420 - DNA, 609 bp, Homo sapiens
ttttgtttgtttttatttttgagacaaggtctcactttgctgtgtagtcaggagtgtggtggtgtgatcttggctcactacagcctcaacctcccaacatcaagtgattcttccacctcagctccccaaaaagctgggaccacagtcacacgctaccacacccaactaattaaaaaatcatattttttgttgagatgagatctcactatattgtgcaagctaatcccaaactcttgagttcaagtgatcctgctgtcttagcctcccaaaattctgggattataggcatgtgccaccactcccatccacataaggcattttttatgaatgcctgtgttctctactgggttgtgaacttagggagaggatggggataccataatrtccacttatgtatttccaacaccttatggcactgaaaaactattgtcatctgactaatggtctagttgccattttagggcctcatgatctcatttatgaatcatgacacaaactgccttattttccatgtgccaatctcaattccatattgtccaggcctgactgatttgtgatcttaaaacatggattttatcatgttacattctgcaaccacactgtcactat

SEQ ID NO: 136421 - DNA, 180 bp, Homo sapiens
aaaaccttactaaagttgttttatctatcagttctagcagccttttgacagtcttcagattttcctataygtaggatcatatagtcagtgaagagagatactttgacttcttctttttctctttggatgctatatgtgtctgtttttatactgctataaagaactgcctgagactgggta

SEQ ID NO: 136422 - DNA, 180 bp, Homo sapiens
aaaaccttactaaagttgttttatctatcagttctagcagccttttgacagtcttcagattttcctatatrtaggatcatatagtcagtgaagagagatactttgacttcttctttttctctttggatgctatatgtgtctgtttttatactgctataaagaactgcctgagactgggta

SEQ ID NO: 136423 - DNA, 485 bp, Homo sapiens
ccttgtcttttgagagtttttattataaagggatgttggattttatcaaaagctttttatgaatccattgaggtgattgtgtgatttttattttaattctgtttaygtgttaaattatatttattgatttgcacatgttgaatcagccttgcattacaggaataaagcctactacatcatggtttgttaatgttttgatgtgctgctggattcagtttgctagtattttgttgggaatttttgtgtctatattcatcagggatactgacccaaagatcctttttttatttttgtttctctgccatgttttcatattaggctaatgctagcttcatggaatgagttagggagcagcacctggtcctcaatttttggaatagtacctgttcttctttctatatctgttagaattcagctgtaaatataacttatccatggctttttgggtttttttctgtattcaatttcagattttgatatttacc

SEQ ID NO: 136424 - DNA, 485 bp, Homo sapiens
ccttgtcttttgagagtttttattataaagggatgttggattttatcaaaagctttttatgaatccattgaggtgattgtgtgatttttattttaattctgtttatgtgttaaattatatttattgatttgcacatgttgaatcagccttgcattrcaggaataaagcctactacatcatggtttgttaatgttttgatgtgctgctggattcagtttgctagtattttgttgggaatttttgtgtctatattcatcagggatactgacccaaagatcctttttttatttttgtttctctgccatgttttcatattaggctaatgctagcttcatggaatgagttagggagcagcacctggtcctcaatttttggaatagtacctgttcttctttctatatctgttagaattcagctgtaaatataacttatccatggctttttgggtttttttctgtattcaatttcagattttgatatttacc

SEQ ID NO: 136425 - DNA, 485 bp, Homo sapiens
ccttgtcttttgagagtttttattataaagggatgttggattttatcaaaagctttttatgaatccattgaggtgattgtgtgatttttattttaattctgtttatgtgttaaattatatttattgatttgcacatgttgaatcagccttgcattacaggaataaagcctactacatcatggtttgttaatgttttgatgtgctgctggattcagtttgctagtattttgttgggaatttttgtgtctatrttcatcagggatactgacccaaagatcctttttttatttttgtttctctgccatgttttcatattaggctaatgctagcttcatggaatgagttagggagcagcacctggtcctcaatttttggaatagtacctgttcttctttctatatctgttagaattcagctgtaaatataacttatccatggctttttgggtttttttctgtattcaatttcagattttgatatttacc

SEQ ID NO: 136426 - DNA, 485 bp, Homo sapiens
ccttgtcttttgagagtttttattataaagggatgttggattttatcaaaagctttttatgaatccattgaggtgattgtgtgatttttattttaattctgtttatgtgttaaattatatttattgatttgcacatgttgaatcagccttgcattacaggaataaagcctactacatcatggtttgttaatgttttgatgtgctgctggattcagtttgctagtattttgttgggaatttttgtgtctatattcatcagggatactgacccaaagatcctttttttatttttgtttctctgccatgttttcatattaggctaatgctagcttcatggaatgagttagggagcagcmcctggtcctcaatttttggaatagtacctgttcttctttctatatctgttagaattcagctgtaaatataacttatccatggctttttgggtttttttctgtattcaatttcagattttgatatttacc

SEQ ID NO: 136427 - DNA, 394 bp, Homo sapiens
aaaaaagtctaaagaccaaaaaagatcacctaaaagatatagaagagtacctcagaagactaaatttaagaattattagtgttcatgagaaagttgaacaatagcaagtggcagaaagcttactaaaacaaaccagcatatttttccaaacttgtgtggagaaaacacatgcatgtaagttacatccaagcacacataggcgaacaacatcatacagatttgacaaacaagactacccaagacctatgataatcaaactctcaaaagtcaaggacmaagagtgaatcccaaaaacagaaaaagaaaagaaggaaaataaaaaggagttccagttcacctggaaacagacatctcaacagaaaccatacaagccaggaaagagtagaatgacatt

SEQ ID NO: 136428 - DNA, 622 bp, Homo sapiens
tagcatcttcaaatacttgtctctgtcccattttcccactgttctccttttaaactttaaatgtgttagaactcaatctgttcttcatgtattttaacttcctttttagatttttcatctctgcttctgctgattcttattcctgctttttctgcttcgtggtaccttgcctcttgcatgcttagttatattttagtgtgagcatctctttttccttgggaaattatccatgggaatatttgaggctagaatgaaggtgtattcattcyttcagaggatttacttttgctacctcccagagcactccctatatgagagtagtttatggaggttgaaggatgttttgtctgctcagttgatatgtattaatatttggacagctctgaaccaaagcagctttttctttttttcagcttccttgggttgtcaatgaagtaggtgcacatatttctgggtcgcatgtgccctctgaggatacagttatataattgagaatctcctccttgattttccatgttggctggaaactggattttactttatttctctcttaccaccccacagtcatcccaagcttcctgcccaggttatcagtctgtgatcatggaagcttgagctctcc

SEQ ID NO: 136429 - DNA, 577 bp, Homo sapiens
tatatcagacagattctgccagtacaattgttctctaggtgggaagacagattcctggtgcttcctactccaccatatttctataactattttctccataatgttttaactactgtaattttgtaatatcctttgaagtcaggaagtgcaggacctccagcttgttctttagattgtttgggctctttttggttctctgcggttgcatatgaattttagaattgctttttctatttcagaaaaaaaaaacagctatgggtattttgatatggatggtatttaacctgtggatagctttaagtagtatggacaacaatattaagtcatctaattcatgaatatatatgtctatttattaccatctttattttctttagaaatgtttgtagttttcagagaacaagtctttagtctcctgttaagtttatatttctatgtatttttgatgctattttaacccaatttttaaaaatttccgtttcagatttatgttagtatatgaaatcacaactgatatttgcatrttgattttgtgtcctgcaactttgctgaatacatttattaattctagtaagct

SEQ ID NO: 136430 - DNA, 628 bp, Homo sapiens
attggcctggtatacattagccatttagggggttcccgctcccagagatcccatattaacatgtttggaaaagtctggtatttgcatctttgtaatgcagtggctatagacaagcaaaagttaaagtctacagctacaaatccaaacctatggtacaccaaagatgtataagcaaaggccttgctcaattagtctaaagatttatctgggcatagatttttattttctgtcacctaggctggagtgcagtggtgtgatctcagctcactgcatgcaacctctgcctcctaggttcaagcaattctcctgcctcagccttccraatagctgggactacaggaggatgccaccacacctggctaatttttatttatttatttatttttttgagacggggttttaccacgttggccaggctggtcttgaactcctgacctcaggtgatccacctgcctcggcctcccaaagtgctaggattacatgcatgagccatcgtgcctggcccatagacttttttcttttttttaacacctattggattgctaaaattacttatgtttaaatattttaactcctctgtggaaggacactactttgatttgttatgttcactctgactgatatctga

SEQ ID NO: 136431 - DNA, 628 bp, Homo sapiens
attggcctggtatacattagccatttagggggttcccgctcccagagatcccatattaacatgtttggaaaagtctggtatttgcatctttgtaatgcagtggctatagacaagcaaaagttaaagtctacagctacaaatccaaacctatggtacaccaaagatgtataagcaaaggccttgctcaattagtctaaagatttatctgggcatagatttttattttctgtcacctaggctggagtgcagtggtgtgatctcagctcactgcatgcaacctctgcctcctaggttcaagcaattctcctgcctcagccttccgaatagctgggactacaggaggatgccaccacacctggctaatttttatttatttatttatttttttgagacggggttttrccacgttggccaggctggtcttgaactcctgacctcaggtgatccacctgcctcggcctcccaaagtgctaggattacatgcatgagccatcgtgcctggcccatagacttttttcttttttttaacacctattggattgctaaaattacttatgtttaaatattttaactcctctgtggaaggacactactttgatttgttatgttcactctgactgatatctga

SEQ ID NO: 136432 - DNA, 507 bp, Homo sapiens
cttacagggctatacaaagctaataaaatgtacatataagcactgtaagcatcagtgagtattattataagacttagygtggcaacaaaggagcagagcaaactgagatgcttagtttttgccaggaggagcctgaatgtcagccatcaaggagtcttatcaggtagcattatcttgacagtgacccaatggccctcagtcctttgcctctggaattgatcaaactatatttacagagcctaactacatctgtcagcttataaacaacattgaaataagaatttctaccgattaatgtaaagttgtctagggacaactgtgctgatgttccctatttattataacttattttcaaaatgaggatatttgggaatggcaagcaaagacatttgtttagtaaacaccaaagatcagagagcaaaaacatcagatttttgtggaaggtattctctttaggccttggtgagaacagactaacatcagtcctcagctaggcagtgaccaagt

SEQ ID NO: 136433 - DNA, 507 bp, Homo sapiens
cttacagggctatacaaagctaataaaatgtacatataagcactgtaagcatcagtgagtattattataagacttagcgtggcaacaaaggagcagagcaaactgagatgcttagtttttgccaggaggagcctgaatgtcagccatcaaggagtcttatcaggtagcattatcttgacagtgacccaatggccctcagtcctttgcctctggaattgatcaaactatatttacagagcctaactacatctgtcagcttataaacwacattgaaataagaatttctaccgattaatgtaaagttgtctagggacaactgtgctgatgttccctatttattataacttattttcaaaatgaggatatttgggaatggcaagcaaagacatttgtttagtaaacaccaaagatcagagagcaaaaacatcagatttttgtggaaggtattctctttaggccttggtgagaacagactaacatcagtcctcagctaggcagtgaccaagt

SEQ ID NO: 136434 - DNA, 457 bp, Homo sapiens
tgagaggatgctccttttgtaaattaaacaaaatgagcaactctttacgtgcagacactcttgctccaaattagagagaggaccagtgatttgattttcatttataaaatcatggtctgtttccacttatggttccttgcaattacctcaggtctctcagaaatatccagtggcctaaatcactcattcacagttgattaagctcgtccactttgcagattttagcagtttaaccatcagaggaatcccatttctaatataaaagacattgagtcaatctcactcattgtaacaccaactagggaaagactcagttaaggaagaaactgcagtggctrtggttgatggcaaagtttatgaaacatatcataagtattgtatagtgaataaagaagaagtttgggatcaaaatacaattatagggaaatcagtagcatatttttaccataagagcagc

SEQ ID NO: 136435 - DNA, 514 bp, Homo sapiens
actggactgagaggatgctccttttgtaaattaaacaaaatgagcaactctttacgtgcagacactcttgctccaaattagagagaggaccagtgatttgattttcatttataaaatcatggtctgtttccacttatggttccttgcaattacctcaggtctctcagaaatatccagtggcctaaatcactcattcacagttgattaagctcgtccactttgcagattttagcagtttaaccatcagaggaatcccatttctaatataaaagacattgagtcaatctcactcattgtaacaccaactagggaaagactcagttaaggaagaaactgcagtggctgtggttgatggcaaagtttatgaaacatatcataagtattgtatagtgaataaagaagaagtttgggatcaaaatacaattatagggaaatcagtagcatatttttaccataaragcagctgattttgtatcctgccctttgtgggataattggattgtcttgacttttt

SEQ ID NO: 136436 - DNA, 562 bp, Homo sapiens
taacagttcccaaacagggttttgagagtcaatcctattagtatatgaggattgaaggagtaatttaaaataatcaaaataccttcccactcttctccaactccactctctcaccctaaagaaacaatgatgttgaatcctggatttcaagcaaaatgttacagaaattcaamtgtccagattttcaactgtctggaataatcagtatgtgaataagccgagggttgagacattaaatctgatcacaaggaaaagtataaggctcagcagaacagagacccctcaaccacagactctccagggatcctcagtccaacatcatagatagtttctagaagggcaatgatttacctgggggtacactcctagtcagtgtcagaagcagaacagaaactcttgcttatctctttctccacttgctttattctacccaatctgacttcacatgccttttgttcaatccctaaatattcattctcctctcttatctcccatcttcctctacacactggggaaggctgcgaagaggataaaggggaagcaggcgaaagattctgggtgg

SEQ ID NO: 136437 - DNA, 562 bp, Homo sapiens
taacagttcccaaacagggttttgagagtcaatcctattagtatatgaggattgaaggagtaatttaaaataatcaaaataccttcccactcttctccaactccactctctcaccctaaagaaacaatgatgttgaatcctggatttcaagcaaaatgttacagaaattcaactgtccagattttcaactgtctggaataatcagtatgtgaataagccgagggttgagacattaaatctgatcacaaggaaaagtataaggctcagcagaacagagacccctcaaccacagactctccagggatcctcagtccaacatcatagatagtttctagaagggcaatgatttacctgggggtacactcctagtcagtgtcagaagcagaacagaaactcttgcttatctctttctccacttgctttattctacccaatctgacttcacatgccttttgttcaatccctaaatattcattctcctctcttatctcccatcttcctctacacactggggraggctgcgaagaggataaaggggaagcaggcgaaagattctgggtgg

SEQ ID NO: 136438 - DNA, 581 bp, Homo sapiens
taataaatctgtgttgtttttagcaaaatttgtggtaatttattacagcagcaacaggaaactaacacagcaatgaagctcctgtgatagttaatattgagtgtcaacttgattggattgaaggttgcaaagtattgttcctaggtgtgtctgtgagggtgatgccaaaggagattagcatttgagttactsaactgggagtcgcagacccatcctcaatctgggaaccatagctgccagcacgactaggataaaagcaggcagaggaacgtgagaggactagactggctaagtcttctggcctccatctttctcgcgtgctgagtgcttcctttcctctaacattggactccaagttcttcagctttttgactcttggacctacaccagtggtttgccaggggctctcgggcctttggccacagactgaaggctacactgtctgcttccctactttcaaggttttaggacttggactggcttccttgctcctcagcttgcagacagcctattgtgggacttctccttgtgattgtatgagtcaacactccttaataaaccccccttcctatatacatctg

SEQ ID NO: 136439 - DNA, 516 bp, Homo sapiens
atctagaccatcaattgaatcatgtatatggccagaagattggttcatcttacaggcacctcctgagactcaggatgaacttaggcaagtaggagaagaagactcttcagagactcatctaagcaaatccactaatactacaagaagctgttactaccatagtacagccaacaactttgtgcctgaaactctttgtactagggaaccccaagcccacttacaggacattagaaatgggcaagcttgccaggcatggatccgttttctctcttggcttatcatagcttattgccattatatattctgtgtgtcgggtctcctttcagagacacacagtgggtaggtcccayggaattatggtattttattaaccaactagaacaattgttaacctactctaagactggacagagatgtttgaccagtatctgctgctgtaacaggatgtaagctttcagctataatccactgttgtagtgccagtgtggtggcaagttttagggaagagggagtgtt

SEQ ID NO: 136440 - DNA, 452 bp, Homo sapiens
aaaggaacatagcacaataaggcagggacaacataattttgtgtgccttggaatcatctattttgcacatcaaggtgtcaaaagagaggcagctgtgatgtactaagaaagttgggcttgtgcactgttcagcttacccagcatagtgcctggtgtcagcatgttctcatttagacacttttatatrcgactctgggaagtgggcgttatggtctttataactggaaagtggcagagccagaccccaagagatctcaagactgactagagggccttagggaacaacgacagaagggcatatcttgagacctggctacagtagcctgagtaaagaaagaggtaatgtgaagcccacgtgtgagaccccgaaaggaagtcactcttctccttcaagagcaagggatcaaggcatgactaggaaggtgatcagcagattcagacttcaggttgtt

SEQ ID NO: 136441 - DNA, 438 bp, Homo sapiens
aacatagcacaataaggcagggacaacataattttgtgtgccttggaatcatctattttgcacatcaaggtgtcaaaagagaggcagctgtgatgtactaagaaagttgggcttgtgcactgttcagcttacccagcatagtgcctggtgtcagcatgttctcatttagacacttttatatacgactctgggaagtgggcrttatggtctttataactggaaagtggcagagccagaccccaagagatctcaagactgactagagggccttagggaacaacgacagaagggcatatcttgagacctggctacagtagcctgagtaaagaaagaggtaatgtgaagcccacgtgtgagaccccgaaaggaagtcactcttctccttcaagagcaagggatcaaggcatgactaggaaggtgatcagcagattcagactt

SEQ ID NO: 136442 - DNA, 440 bp, Homo sapiens
aaaggaacatagcacaataaggcagggacaacataattttgtgtgccttggaatcatctattttgcacatcaaggtgtcaaaagagaggcagctgtgatgtactaagaaagttgggcttgtgcactgttcagcttacccagcatagtgcctggtgtcagcatgttctcatttagacacttttatatacgactctgggaagtgggcgttatggtctttataactggaaagtggcagagccagaccccaagagatctcaagactgactagagggccttagggaacaacgacagaagggcatatcttgagacctggctacagtmgcctgagtaaagaaagaggtaatgtgaagcccacgtgtgagaccccgaaaggaagtcactcttctccttcaagagcaagggatcaaggcatgactaggaaggtgatcagcagattcaga

SEQ ID NO: 136443 - DNA, 432 bp, Homo sapiens
ttcttttcatgtctgtcattatatgcctcttcctatctttattaaaagcctgacactgaaagtgggatcctggatgcatagttgctggggagaaaaagaactcaggagaggtagaggaggtaccccaccatcactttccagraagagtgaagagttttatggatatgtgcattaccattgccagctgctgattctaaagattatcctttcaactaagtttcacaacagaagatgcaggtaggtgcagtggctcacacctgtaattccagcactttgagggggtgcacagcaggaagatcacttaagctgaggagtttgaggctgcagtgagctatgattgcaccactgcactccagcctgggcaacagagcgagactgtctcaaaaaaaaaaaaagtcatttattgaatttttactatgtgccaaccactgt

SEQ ID NO: 136444 - DNA, 449 bp, Homo sapiens
tgtaatcaagagataatttctacctaagkgtaatcttctacaacgaaggcactaccctagcttattgacacaaccccctaaccttggaagagtacacttagccaacaaaagaaaagtcaaccagcatttccaaattatcattttggactctattaagtcatttcagatgtccactaggaacaagccctccggccgtctggctgcatgcagttcttgaatttttgcagactactaggggatgcctgatagtcagacatggaaatgtttcctagggctttgcaattttcccagcagtcctccaacctaattggccttgaaagaaatcataaaaggtccacaggggcactccaagatggaccacacccacccccaaaaaaacatatccacgccggggctagcaaggagggtaagaggacagccagatgatgctgtcacagactgttaccacc

SEQ ID NO: 136445 - DNA, 589 bp, Homo sapiens
ttggagtagggcacaaataacagcagtgatgatggcaagaggaatctgtgctcaaatgtggccccatgctcataccaaattcccaggccccaaggcccttcttccctggataatttttcccagcagcttgttttatgcactcagaaatgttccttcccatgtacattctcattccccttctactcactttttactgtaaatgattgtttattgtatacaagccaagattgtgtgctctaggaatgtcttccaatactactatcaaagagaaataatacaatgtccagtgcccttgaatgaagtgcgggacaacaacgagcaatatctcagcaacatagatgtcttctactttccccctgggatgagaaatrtcatgcctaaaatccacaacctcaactaacaaaaaattcagtattttcatacacataaactacccaggttttaaaatgatttttttttaagtgtggaatcactcaacagacacttaaaatgtgatttgatttacagaaatttcattcaagaatttgtgaaaagaaggtacatttgtgccacaatatttccatgtacatacaagtctcccactaggtag

SEQ ID NO: 136446 - DNA, 529 bp, Homo sapiens
gccatactactgtagagcatgaaggtgagaaaatctagagaaaatgtcccatcaaacagcatctgcagagtcatgatgccatactactgtagagcatgaaggtgagaaaatctagagaaaatgtcccatcaaacagcatctgcagagtcatgatgccatactactgtagagcatgaaggtgagaaaatctagagaaaatgtcccatcaaacagcatctgcagagtcatgatgccatactactgtagagcatgaaggtgagaaaatctagagaaaatgtcccatcaaacagcatctggcatgttctggtcttggagctggaattgcctcttccaccttcaaagaggcagaaattagcaaggattaaaagcataggtccttgaatcagagacacatgggcttcaatccagtttggccttgtattaattgtgctgccttggacatgccaccaggcctcttagagcctcagcttcctcayctttcaaaaagaaagatgaaaataatatcggcaacttcctaagtttgagggga

SEQ ID NO: 136447 - DNA, 371 bp, Homo sapiens
aattgactggctgtttgacctcaggcaaaatggatggacccgctgtgcctaagggctctgtctctcatggctgcctcctcttcccaccctaatatgttcaatctcataaygagctccctgaatacctcagccaatcaatcaagtccttggcctgggggagctctggattccacgaagattctctctccgtgggtggtctcatattttactgccacatctgaggccccaggaagaagaatattataaaactggtgctgcctggggtgggaaatccctagttgagggaggtgggaagtgtgtatgagagagattgatgaggaatgggtacggggctcttttgtggctgcagcaggggcagaagaaggggaatt

SEQ ID NO: 136448 - DNA, 371 bp, Homo sapiens
aattgactggctgtttgacctcaggcaaaatggatggacccgctgtgcctaagggctctgtctctcatggctgcctcctcttcccaccctaatatgttcaatctcataacragctccctgaatacctcagccaatcaatcaagtccttggcctgggggagctctggattccacgaagattctctctccgtgggtggtctcatattttactgccacatctgaggccccaggaagaagaatattataaaactggtgctgcctggggtgggaaatccctagttgagggaggtgggaagtgtgtatgagagagattgatgaggaatgggtacggggctcttttgtggctgcagcaggggcagaagaaggggaatt

SEQ ID NO: 136449 - DNA, 428 bp, Homo sapiens
acatgtgtttgtgtgtctgtgtaagtgattgggaagggtggkgggtgggtgatcaaagggatgtggggctcactgggagcttatcaagggtccttccttttaggtatcaatcttcttctctgatcctctgcagtgaaagtggggaatgcagtaaaattatgaactattttgcaaccagtgtgaaatcccatgtaaaggtttttaggtggtctgctgtcctgggggacctcccatttttttttttcccccactaggatgcaaaactgcttacaggctacctgatcctcattgtccacagttggaaagtagggacattaacagccacaacagtagccaccttaccagcttgccatgaggacagagttaaagaacatgcacacgttgcttggcacctaagaggcattcgataaatggtagtggttgttatc

SEQ ID NO: 136450 - DNA, 432 bp, Homo sapiens
acctcctcccaccccacttcccttgttccctgtggcccctgggccagcgaatgcctcgggagaaccctgattgccaaacaggagagtacaaaatagcacacatttgaattacagaggagaaactggagcaaatacggacagattaatgcacaaaccaaataggtggatctggggttggccagcaattctactttggaaggactttgagaatctatttggagggcagaatgtaacttaattttagttcagtttagtgaagttttgtttttgtaaggaaaacactgatgtggcctcttcactgggccatctctgcctcagacttttggaaccatgactgtgatcttgtttggctkgtcttagtaggcaattcttgggttacacatgggtgataaggtgggatgggtacatgtgatagagtaggcactcctgatc

SEQ ID NO: 136451 - DNA, 577 bp, Homo sapiens
ataacaaccaatggaatggggggaatatttgcaaatcatatacctgataagggtctaatatctagtgtatataaagaacttctatagcccaacaacaaaaaccaagtaacccaattgaaaaacaggcaaaggacttgacagacatttctttaaagaagatatacaaatggtcaatacatacacgaaaagatactcaacctcacttgttatcagggaaatgcaaatcaaacccacgtttagatgctacttcacacygaggaagatggctattatcttaaaaaaatacacagaataagtgttagtgaggatgtgtggagaaattgaaacctttgtgccctgttggtgagaatataaaatggcatagctgctactggaaaacagtataggggtacctcaaaaaattaaaaatagaactaacttatatcaaccaggcacaatggctcatgcctataatcccagtgctttgaaaggccaagtggagaggatggcttgaggccaggaattcaagaccagcctgggtaacataagaataacccatctctacaaaaaaataaaaaaaaatttagccaggcatgtt

SEQ ID NO: 136452 - DNA, 455 bp, Homo sapiens
ggggcattttttttataaggagacactatggtatagaaagaagtattttcttaaataatggtgctctgttaattagatacctatctagtaattaaataattcttgattccatctcacttcatacacaaatatccattctggatagactgtagatctaaatttaaaacatcaaagaataaaacttatagaaaacaaattttttaaaatccttgtgaacctgtgataaacaaagawttcttaaataagacataaaaagcactaattataaattaaaagataaattagactatactaaaatagtaaaattctctacatccaaagataccattacaagagtaaaaaaaaatcaagcaacaaaatgtggtgagaaatttgcaattgtttatctatcagacaactcaaatccagaatttaaaagaatttctacaaatcaataacagcctactacaacaacc

SEQ ID NO: 136453 - DNA, 247 bp, Homo sapiens
atttcttcatagcaatgagagaatggcctaacacaccacataaaccttagaatcaatttgtctatatccacaaagtaacttgctggaactttgattggtacttcatcaaatttatagatcaaattgggaagacctgataccttgaccatattgtgtctttttattcatcataatgraatatctcttgatttattgaactcttgatttcattcattggaattttgcagttttccttgtatagatctta

SEQ ID NO: 136454 - DNA, 586 bp, Homo sapiens
cttttataggtgttctttatgaagtagaggaagattccctctatacctaatatgctgaaagttttaaatcagtaatgggtgttagagtaygttaaatgcttttttctgtgtctattgatataatcatgtgatttttcttctttagcctgttgattggattacattaattgattttcaaatgttgaaccagtcttctcacatacctgagataaatcccacttgatagtgatgtgcaatttttttttactttttttgattcaatttgctaatattttgttgaatattttgtttttatatttgcagaatatattggtttctagttttcttgtataatagttgtctggttttggtattgggttaatgctaaacttaggaattagggagtattccctctatttctatcttatggaagagattgtagaaaattggtataatttcttttttaagtgtttggcagaattcataagtgagcccacctgggcctagtgccttccattttagtaggttattaattatttatttaatttatttaataggtataaacctattcagattgtttatttctccttatgtaaagattacatac

SEQ ID NO: 136455 - DNA, 586 bp, Homo sapiens
cttttataggtgttctttatgaagtagaggaagattccctctatacctaatatgctgaaagttttaaatcagtaatgggtgttagagtacgttaaatgcttttttctgtgtctattgatataatcatgtgatttttcttctttagcctgttgattggattacattaattgattttcaaatrttgaaccagtcttctcacatacctgagataaatcccacttgatagtgatgtgcaatttttttttactttttttgattcaatttgctaatattttgttgaatattttgtttttatatttgcagaatatattggtttctagttttcttgtataatagttgtctggttttggtattgggttaatgctaaacttaggaattagggagtattccctctatttctatcttatggaagagattgtagaaaattggtataatttcttttttaagtgtttggcagaattcataagtgagcccacctgggcctagtgccttccattttagtaggttattaattatttatttaatttatttaataggtataaacctattcagattgtttatttctccttatgtaaagattacatac

SEQ ID NO: 136456 - DNA, 610 bp, Homo sapiens
tataattggattaatatctaccattttttttttactgttttctatctgttgcccttgttcttggccctatttttgtcctctactctttttctgccttttatggttttaattgagcatttaatatacttttctctcctttgttagcatatcaattatatttcttgttttattttctttatgggttgccctagagtttgcaatatacctttacaactaatttaagctaacttttaaataactctatacaacttcacaggtagtgaaagtgctttgtaataacaagataatcctaattccttcttcctgtcccttgcrttattgctgtcactcattttacttatacatgtagatttgaataagttgttgatactattttgaacaaaatgttatctgtcagatcaattgagaataagaaatataaaagtttctattttacctttacttttccttctctgatgctcttcccttcttttcatagacctgaatttctgaccaacattattttacttttctctaaataacttctcttaacatttctcacaaggcatgtccacaggcaataaagtccgtcaatatttgtttgcctgaaaaagactatttcttctttatt

SEQ ID NO: 136457 - DNA, 477 bp, Homo sapiens
atacatatgccaggtgcctacaaaatgtgggtcttgtttgtttatttttcaaattcactttcgttgtatattaaggaaatatgggggaggattaagaagcagaagcagtgaagcacaaagcargcaataaattcaggtgaggagaccatgtctggttgattctctccaagcctttctaaggagtgaactatgaactctaactccagcacacatttccaccccatacagatctttctggtgctccttgggagggctttgaatctctggtcattggagtgtctcagttaatctctaccaagttaaggatctggattctgcaactttccctatcaaattatctgatctagctctggtttgggttcctgttcttgaatttttcttttcatagactctcggtttctaattgcaataataaatggtatttctctgcccccagacatctgctgtatgagtcttgcttgtaaagtctcccaggtg

SEQ ID NO: 136458 - DNA, 376 bp, Homo sapiens
tagatgctatataaatagttgtcatgctatatgaatagttgtcatactattttttatttgtattatttttattgttgtattgctmtttgggtttttttaaacttttttgaatatttttcattggtggttgaatcttcgggttctggagggtcatctgtatgtatttgccagatgtggagggagggccatagtaattagtggtttattcaatcatagagggcataagtagaattaaaataggcttgtgcaaatattatatattcccaatataaaatattacatattcccaaaatataataataaggggtcctcagagctcctaattgatagttttagaagaaaaaaaattctcagtgcattgcaaacttacaaaata

SEQ ID NO: 136459 - DNA, 595 bp, Homo sapiens
tgtgagtgcttttgtttctgtttcatatgtgtgtgtatatatagttataaatacgaatgtaattttttttagagatggggtctcacagtgtttgcccaagctggactcaaactcctggagtcaagggatcctcccagcctagcctcttgagtagctgggacttcaggcacaaaccacatgcctggctgatttttacatttttaattcatatgtgtgcatttataaataatacatagtataattttgatttttttgagacacagtcttgctgtgttgcccaggctgaagtgcagtggtgtgctctcagctcactgcagcctccayctcccaagtagctgggactacaggcaggtgccccatgcccagctaatttttgtatttttagtgaggcatggtttcgccatgttgtccaggctggtcttgaactcctgacctcaggtgatccacctgccttggcctcccaaagtgctgggattacaggcatgagctggccaatacatagtataattttgtatgtgttttatttttaatataaatgggatcatattatagcatgtggcagccataacagtatacctctgggtctctgattatg

SEQ ID NO: 136460 - DNA, 594 bp, Homo sapiens
gaggggcagaatatttacatgtttgtccattcacaaagctagtaagtagctgagtcaggattcaaatacaagtatttctgactgcagtgaattagtatccactaccccatactcctctaacctggagtcttgagagtcaaagaagtgcggccgggcggggtggctcatgcctgtaatcccagaactttgggagcctgagacaggcggatcacgaggtcaggagatccagaccatcctggctaacacagtgaaaccccgtctctactaaaaatacaaaaacaaaattagccgggcgtggtggtgggcgcctatagtcccagctactcgggaggctgaggcrggagaatggtgtgaacccgggaggcggagcttgcagtcagccgagatcgtgccactgcactccagcctggtcaacagagcgagactccgtctcaaaaacaaaacaaaacaaaacaaacaaacaaaaaaacaaagaaagtgcacacattcttgtgtctctggcatggttttgggagaagcctgatgttctgacaaccagtggaaaaagaaattacatttttttgagcctattaaacagttcactcgggcagactg

SEQ ID NO: 136461 - DNA, 564 bp, Homo sapiens
tgctctttttgatgcaaatatcttcactctccttggtgcttctgtggttgtgcctatgaatttaggaccttatgcctcatagtgttgagtcagagcaaarcagtttacatcaaaggccacttatttaattttcctcagaaaactctgtgaggataatttctccttcttataaacggaatgcgaatgtgtacacaaatgtgtacattatcccaccgaagggtgatgctctttacttttataatctagattttaaaaaatttggtggcacttgatttcaggtcctcagactccagaatttatactcactgattagtaatgcattatgcaaataattcagtttacatatccaaatactgttttgcatcattcacacctcatgtcttgaaaaaaaaagtgaaatgtttcctcaaaataaacaaaacctgcagaagagtttattgtaagggtgaaaattaaagaggaacccatttgcctgggaacttttgaggaaaattttaatactcctgcataaataattttgcaattatttttgattcctacctaatcaatataccttgccacgca

SEQ ID NO: 136462 - DNA, 584 bp, Homo sapiens
agttgctctagttcagggttgcaggtgcccagagcctatcccagcagctcagggcacaagatgggagccaaatttggacagggaacactcatacacacttccacacccattcagactgggacaatttagacctgccaactaacctgatgtgcacatctttgggatgtgggaggaaaccagagtactcagagaaaacccacacagacatggggagaacatgcacacttcacacagaaagtagccctagccaggaatcgtgtttttcattgacgttrtaatgaacaacaatattcaagtacctcctgtactctataacctagcaaatctacctgcaaggacctaaggaatctattgctcatgagtgcagtgagacagcacaagatggtttattgcagcactgtttgaaattacagaaaaaaagttaaacaaacgtaaatgagaaacaaattgaataccattaatcccattgacagaaaaaagttcaaaaacatgtaaaacatgtttagggatacctatttacacccgctacccctcaaaagaaaagcacatgaggggtaaacatcaaggatagtagatacccataa

SEQ ID NO: 136463 - DNA, 487 bp, Homo sapiens
ggtaattattattcccttggtctgaaatagtatttttttgcagctgagtagctcttaggaagaggtagaattgtcaccattctttgaaaataacaaaaaacaaatgttctctgtttaacttgtagtgccacacttccatggaaacttagaatcaaagggcaagtgtattggtttaagatacatagaaataggagataaagataagcaatgattcctgaactcaatctcactctattgccatgtgtctaagtatgctgctctagtaaattggattaagtcccttttaatattcttcattaatatccagtcataaattactaagtttcacatatttgctacttccagtgttaaatggtattttcttcatatattttttcctatgaactactcgyatatgggacaaggttcagagttaatatgctggaaattagagtaatgctcaggctaagtaatactcaataaattttgatttctaagtagggcacct

SEQ ID NO: 136464 - DNA, 590 bp, Homo sapiens
tgagccacaagagacaggtggtgggttatgagtaatttaagtttttaaagcatttcccaattctggttgtgctagctactcaagatgaatatcaggatgcagcacagttatattacagtggggacaaccttgaaacccttctaatttaaatttttaaagtacatttatttgccagttctactgttggaaacgttacrgtggtgtccctatcatccgtgcgtttaagttatgcaaactcaaaatacattgctatagtgaaaatactgaaaaatttcatggtaatatatatccttttagagatatttacctatatatttatatgtatatatttatacttgcaattgtgtacagattgcatgtataaataatactgcatatttatgctgtgtgtgtactgtacttaatgggtaatttgaggaatttccaagggtaattttggctataactactttttgctttaagcaacatctgctctccccactcctgcccctcccattgtcaccaccaccacttcaaattgaaattccattgtgtttatgatatcttacttttgatacttctcatcagtggctgtaagatccacaaagtgc

SEQ ID NO: 136465 - DNA, 499 bp, Homo sapiens
aggatgctgttaactgataaaggaaagtgaacagcaaaacttacaaatgtaaacttcaaagttctcacccacaaaatctgatatcattaagagtctsgcctaatttctttccaacaccaggacaatggcatgagagatatttgtataactgatgattctgtttttagagctgatggttttattggatgtttttgcaatgtttcaaacaactgtcttttcagttgtttatgtttatctctccagagagaaatgacttcagataattagatccctaaggtttgatttctcccaggagacctaaggcagatagtgctctcctttctcataccacttctttattttacataaattccttcctttcaatgattctcctagaagctgtaggtccaaccacagaaagtttaaatttgctctttcttatcaactatcaggcacccagctgacattttataacgacctcaaatgctgccttatccactgtccttaattaggatatatt

SEQ ID NO: 136466 - DNA, 384 bp, Homo sapiens
tcacagttatcacctcatacggttgttacaarggtaatgagttaatatatgtaaagtgcttggaacaggctggtttgtagccagtggctgcttatcgtgactcagccttcaccaaccccaagaggtaagcattataaaactaattttatagactgggataaggatacactgctactctggggattgtgaagacattgatttcatttatattagtaacatattcccataggggttttaaaaaagatactacagcaatattcaggtttatttataaagctcaagcaaattattctctaagtataattaagcacttttgagagtccaataggaaacaattattcaccactaaatggtaatcttaataattcaagataattaaaaaaa

SEQ ID NO: 136467 - DNA, 518 bp, Homo sapiens
tattcattagtgaccacaagaagagaaatttgctgaaattttaagtgtctgtctctacattactggatcagaakgtcatttttattattctctttttactcttttgtatcttccaagtttttctagaatgaatttgcattactttgttagaaaaaaaaatcttttacaaatatgttcacttgggcaagctatagaaggagcaaaaaacccaattaatttgtggtacacctaaatgaacatttttgtattgttaagataatcttttataactaaaggtgagtgttttgagcgattttttgttcagcctgaatctaattgctaagttatttcttaacatttctcactcacgcctgtaatcccagcactttgggaggccgaagcaggtagatcacctgaggtcgggagtccgagaccagcctgaccaacatggagaaaccgcatctctactaaaaatacaaaattaactgggagtggtggcgcatgcctataatcccagctattggggacgctgaggcagg

SEQ ID NO: 136468 - DNA, 518 bp, Homo sapiens
tattcattagtgaccacaagaagagaaatttgctgaaattttaagtgtctgtctctacattactggatcagaatgtcatttttattattctctttttactcttttgtatcttccaagtttttctagaatgaatttgcattactttgttagaaaaaaaaatcttttacaaatatgttcacttgggcaagctatagaaggagcaaaaaacccaattaatttgtggtacacctaaatgaacatttttgtattgttaagataatcttttataactaaaggtgagtgttttgagcgattttttgttcagcctgaatctaattgctaagttatttcttaacatttctcactcacgcctgtaatcccagcactttgggaggccgaagcaggtrgatcacctgaggtcgggagtccgagaccagcctgaccaacatggagaaaccgcatctctactaaaaatacaaaattaactgggagtggtggcgcatgcctataatcccagctattggggacgctgaggcagg

SEQ ID NO: 136469 - DNA, 518 bp, Homo sapiens
tattcattagtgaccacaagaagagaaatttgctgaaattttaagtgtctgtctctacattactggatcagaatgtcatttttattattctctttttactcttttgtatcttccaagtttttctagaatgaatttgcattactttgttagaaaaaaaaatcttttacaaatatgttcacttgggcaagctatagaaggagcaaaaaacccaattaatttgtggtacacctaaatgaacatttttgtattgttaagataatcttttataactaaaggtgagtgttttgagcgattttttgttcagcctgaatctaattgctaagttatttcttaacatttctcactcacgcctgtaatcccagcactttgggaggccgaagcaggtagatcacctgaggtcgggagtccgagaccagcctgacmaacatggagaaaccgcatctctactaaaaatacaaaattaactgggagtggtggcgcatgcctataatcccagctattggggacgctgaggcagg

SEQ ID NO: 136470 - DNA, 551 bp, Homo sapiens
tccactcactgcaacctccgccccctgggttcaagcaattctcctacctcagcctcccaggtagctgggattacaggcatctgctaccacacccagctaatttttgtatttttattagagatgggggtttccatgttggccaggatggtctcaaactcctgacctcatgatcagcccatctyggcctcccaaagtgctgggattacaggcatgaaccactgcccccagacaaagcatgttgttttaagtggctaaattggtaatttgttatacagcatagaaaactaacgcatgtaacaattttcagaaaacgccttggggctcttgcagtttcacctcaccctcatctgtacctcttgctacttgactatgaacccatgttgcacaatcctcaggtaggaaggcccagaggccacaagacaaatagaaaattcattatattctgaagaagaaaccattgggaaagatattccagaaacaattatagaaacaagtgaaccaaaaacttttttgcctgagtctgagattaccaggaatttgaataacatgag

SEQ ID NO: 136471 - DNA, 327 bp, Homo sapiens
ttcctggccacggacattagttcaggaatagacatatgatctaggccaggccaatgagagtctgtcaagtgacttttctgcaaaatgcatgggkaaaatgcctgctgttctgatatggcaagtaggatgatgaactcattcacatctgcctggggttttcttggttttagcattgactgtccccccatctcaggaaacttctcaatcttaggatggttggtcactgatatggtttggctgtgtccccacccaaatctcctcttcaattttaactcccacaattcccatgtgtcctgggagggatccaataagaggtcattgaatcat

SEQ ID NO: 136472 - DNA, 601 bp, Homo sapiens
cctttgtctttcttgggaaataaaccttgctttcaagtttgaccgttggcaattaatgccaatctactcagttacttgctctgttgatatctctccaggctcattttgcytgagacctgcatcccatatatctgctagtattttctgctctaggaaaaatgtttaaatttgacaattctttctaggctagtgttctaaagctaatggagagataaattagagtagccaaccaaccttccttgccaagaactgagggattcttagggatataggactttctagtgctaaaactcagaaagcccaggtatactgagacaatgggtcacacttccgttgtttgtagcaaaaagaagaatttaaggtgaaagcaaacaagctcgagtttgtttatgactttcagtgcttgcttcaatagtgtttcttcagcgtttatgacttttaatgcttgcttccgtggtgactttcaccagcataatccttggtaactctgttaggctgaaaaataatggtccccaaaatatctacaccctaatcctggaacttgtgttaaccttatttggaaaaagggacttcccagatgtgaccaaattagggtcaaaaa

SEQ ID NO: 136473 - DNA, 565 bp, Homo sapiens
ttctgtttcaataatgtataaatcctaaaaggatctgggtgtggggagagtgggaaagtggaaaaagactaagtataaaatagcaaaaattgaattcagcaccatacttctcttcagcagtaaagcagtaaacattaatgtctcaagaacttatgtggtgagtattgtcatacaaaactagccccaaaggagtagagtacatctttgtaaaccattttgtttaaattgtctttgtgaccctagaaatatataggtgaaatgctatttcacagaattgctcaatcttccctggaaggaagaaggtgagggaagggcacagagtgtaatgctttcaactttttaaataaaatggycgttattttcctaataattccaatagcctgtttggtgtataagtgggggaagatgcttctttcttttgcatttttcaaacttgaaagcatggcttctgttgcctcaatgtttttagctcaaagtcttgagaattgctgtcttcacactcttcaatggcttcacactgctgcaatggctggagcaaagtccattgacctaatcgcaaccagtc

SEQ ID NO: 136474 - DNA, 558 bp, Homo sapiens
agctgatgagctaaaaaaaaaaacgaaccacaaaaaaatctcataatgttttaagaaagtttacaaatttgtgttgggacacattcaaagctgtcctgggctgcatgtagcccatgcgccgcaggttggacaagcttgatctagaatgtatattatatgcagttatagcaattgaatactgagcctaatggatcatagggcactctgtagaggcaagtcctatytactgcaagaccagatgaaaggagccagctcgagagtggattctgctgtttctaagttcatgttctgtagcttcatattggcagcataaaatcagccttgaaagaatttacactgtgcgaatcagcaaactctacaaataagtgttttatgttttcctcaaagggcctatttaccagtaccactggtaaatgaaggctgggctggataaaaactaagtgagaaatttgtttcttgagcatataagagagcacggttagggctgatgatagtcccatccgaactgcaatatgacagagggatgataaagtaagaagggtgctaactggagacttg

SEQ ID NO: 136475 - DNA, 328 bp, Homo sapiens
tgtgacaaggatgtccatggtcattactattactcarcatagtactggaagtcctagctagagcaatcagacaagagaaagatgtaaagggcatctaaattggaaaggaagaagtcaaattattcttgtttgcaggtgatattatcatttgacaaaacctaaagactccacaagaaaaatattagacctgataaacaaattcagtaaagttgcaggatacaaaatcaacatacaaaaatcagcagcatttatatatgccaacagtgaacaatctgaaaaagaaatttaaaaagtaatcccattcacaacagccaaaaataaaattaaa

SEQ ID NO: 136476 - DNA, 467 bp, Homo sapiens
aaagtttgttgggtgcggggtatcgggggatggtggtgraatgctatggtctgactgtgtccccaaaaatgtatatgttaaaacttaatcaccaatgtaatagtataaatatgtgggggctctaggggtgattaagttaggagggtggcacctcataaatgaaattagggctcatgttacaaagcttgaggaagagtgggttcattctcttctgctcttccaccatgtaaggacacagtgttcatcccctttcgcccttccattcctcctgccatatgcaaactgctaaatggtgccatgtaaggaatgggccctcaccagacaccatggctgctggtgacttggacttccagtatccagaactgtaaggagctaaatttttgttctttataaattatacagtcttgggtattttgtaatggtagcacaaattgactaagacacataccaatgttttgggggctcat

SEQ ID NO: 136477 - DNA, 467 bp, Homo sapiens
aaagtttgttgggtgcggggtatcgggggatggtggtgaaatgctatggtctgactgtgtccccaaaaatgtataygttaaaacttaatcaccaatgtaatagtataaatatgtgggggctctaggggtgattaagttaggagggtggcacctcataaatgaaattagggctcatgttacaaagcttgaggaagagtgggttcattctcttctgctcttccaccatgtaaggacacagtgttcatcccctttcgcccttccattcctcctgccatatgcaaactgctaaatggtgccatgtaaggaatgggccctcaccagacaccatggctgctggtgacttggacttccagtatccagaactgtaaggagctaaatttttgttctttataaattatacagtcttgggtattttgtaatggtagcacaaattgactaagacacataccaatgttttgggggctcat

SEQ ID NO: 136478 - DNA, 467 bp, Homo sapiens
aaagtttgttgggtgcggggtatcgggggatggtggtgaaatgctatggtctgactgtgtccccaaaaatgtatatgttaaaacttaatcaccaatgtaatagtataaatatgtgggggctctaggggtgattaagttaggagggtggcacctcataaatgaaattagggctcatgttacaaagcttgaggaagagtgggttcattctcttctgctcttccaccatgtaaggacacagtgttcaycccctttcgcccttccattcctcctgccatatgcaaactgctaaatggtgccatgtaaggaatgggccctcaccagacaccatggctgctggtgacttggacttccagtatccagaactgtaaggagctaaatttttgttctttataaattatacagtcttgggtattttgtaatggtagcacaaattgactaagacacataccaatgttttgggggctcat

SEQ ID NO: 136479 - DNA, 518 bp, Homo sapiens
attcctcctgccatatgcaaactgctaaatggtgccatgtaaggaatgggccctcaccagacaccatggctgctggtgacttggacttccagtatccagaactgtaaggagctaaatttttgttctttataaattatmcagtcttgggtattttgtaatggtagcacaaattgactaagacacataccaatgttttgggggctcattcaccacattctcaaattaaggctgggcacagtggctcacgcctgtaatcccagcaatttgggaggccgaggcaggcagatcacctgagatcaggagtttgagaccagcctggccaacatggtgaaacctccctgcaacccggctctactaaaaatacaaaaattagctgggcggggtggcaggcacctgtaatcccagctacttgggaggctgaggcaggagaatcgcttgaacccgggaggcagagttttcagtgaaccaagatcacgccactgcactccagcctgggtgacagagttttgagactccat

SEQ ID NO: 136480 - DNA, 529 bp, Homo sapiens
ttttggacaattttcttgtatgatttctttgataattctcctctcattttttttctagaacayctatgaacacagtgaaaatggatgaagatttaaatgaaacttcctcagttatgtaatccaaactacaaaaatcgaagtcaagggagatggatgccaggtgttagcctaagagctggcatatattttttggagtgctgtgaggtgtattgcaagtcttgccattatttgtttacatttttcaaaaagctaaaagtcgaaatagccaaaataactcagactatttcaaaagctcattatttgcatagtgtactcatttgagcaagaggaaagtctgactgctaagagctgctaggaaaggataaaagtgaactgtatgtgtaaagaagggaatgagaaagttgcacacaggtaataggctctttatcagccagtgctgccatccctagttgctgggaatataggctgatatataacaatatcccctttcctagacaattttctgatcaaccaggagctgcctttcctc

SEQ ID NO: 136481 - DNA, 529 bp, Homo sapiens
ttttggacaattttcttgtatgatttctttgataattctcctctcattttttttctagaacatctatgaacacagtgaaaatggatgaagatttaaatgaaacttcctcagttatgtaatccaaactacaaaaatcgaagtcaagggagatggatgccaggtgttagcctaagagytggcatatattttttggagtgctgtgaggtgtattgcaagtcttgccattatttgtttacatttttcaaaaagctaaaagtcgaaatagccaaaataactcagactatttcaaaagctcattatttgcatagtgtactcatttgagcaagaggaaagtctgactgctaagagctgctaggaaaggataaaagtgaactgtatgtgtaaagaagggaatgagaaagttgcacacaggtaataggctctttatcagccagtgctgccatccctagttgctgggaatataggctgatatataacaatatcccctttcctagacaattttctgatcaaccaggagctgcctttcctc

SEQ ID NO: 136482 - DNA, 562 bp, Homo sapiens
gcaccttgaatgtccttgccttccttctctcaattggttttccatgaatatgtcacaaatgtcactgaagtaaacaatatgagcttcgaaaattagcatctagaatttacttaaaatactttataaaaacaaatcatttttattttatgattgaaatatgtctacatgatcattttctttttaagctctttttccattaaagatgtgtcctaacattttacatggtttttctgccctctagtctattcagctacccattattaaktatttgtaaacacaaacttacatatgctaagggaacttccatttaaaggcattcaatgttgaattcctttataatgtctgcatttaataaagtaaaaggagtgagaaaaaagatctgggaacagggcactggctatgtaaggagggcaaggtgggggcagggagttgggggcttggaatttggtgtttgatgtttgaaaggagccatggctagggcacatgtcaatacattgtgtaaaccaaaaattaaattctaagctcccgactgactgatgatggacccccattctcagccaag

SEQ ID NO: 136483 - DNA, 562 bp, Homo sapiens
gcaccttgaatgtccttgccttccttctctcaattggttttccatgaatatgtcacaaatgtcactgaagtaaacaatatgagcttcgaaaattagcatctagaatttacttaaaatactttataaaaacaaatcatttttattttatgattgaaatatgtctacatgatcattttctttttaagctctttttccattaaagatgtgtcctaacattttacatggtttttctgccctctagtctattcagctacccattattaattatttgtaaacacaaacttacatatgctaagggaacttccatttaaaggcattcaatgttgaattcctttataatgtctgcatttaataaagtaaaaggagtgagaaaaaagatctgggaacagggcactggctatgtaaggagggcaaggtgggggyagggagttgggggcttggaatttggtgtttgatgtttgaaaggagccatggctagggcacatgtcaatacattgtgtaaaccaaaaattaaattctaagctcccgactgactgatgatggacccccattctcagccaag

SEQ ID NO: 136484 - DNA, 562 bp, Homo sapiens
gcaccttgaatgtccttgccttccttctctcaattggttttccatgaatatgtcacaaatgtcactgaagtaaacaatatgagcttcgaaaattagcatctagaatttacttaaaatactttataaaaacaaatcatttttattttatgattgaaatatgtctacatgatcattttctttttaagctctttttccattaaagatgtgtcctaacattttacatggtttttctgccctctagtctattcagctacccattattaattatttgtaaacacaaacttacatatgctaagggaacttccatttaaaggcattcaatgttgaattcctttataatgtctgcatttaataaagtaaaaggagtgagaaaaaagatctgggaacagggcactggctatgtaaggagggcaaggtgggggcagggagttgggggcttggaatttggtgtttgatgtttgaaaggagccatggctagggcacatgtcaatacattgtgtaaaccaaaaattaaattctaagctcccgaytgactgatgatggacccccattctcagccaag

SEQ ID NO: 136485 - DNA, 610 bp, Homo sapiens
tgaataaacaattaaatgtatgagycttgagttcatgggagacgacctggttaaagatataaaatatggtagtctttaggatacagatggtatttaatgtactatccctaaatgggatcattcagaaagtgagtatggagagaatagagatgtcagaagactaagccatggggcttgcaggtcagagaaatgaaaagaatgtgcaaggagattaagaagaaacaaccagtgaagtagtaagataaccaagagagaagactgtaactgaagaaagtattttcaggaggaattcttcaactatgtcaaatgtcactgacgaacgaatctagttagttgagggctgagaaccaaccatttgtcttagccacatggggttcattggaaatcttgatggctgcagtttgggtaaagtgatgtagatggaggcttaattggagtgggtgcgttagagagagtgagtggtaaaattgactagatggcttacacattcaaacacattcagaacttcaaaaagtaaggcaggtttctattggcacatgaatagaaagtcaggccaatataacaaaatagaattcccagaaatagatccaaacatatatgagaattcagt

SEQ ID NO: 136486 - DNA, 610 bp, Homo sapiens
tgaataaacaattaaatgtatgagccttgagttcatgggagacgacctggttaaagatataaaatatggtagtctttaggatacagatggtatttaatgtactatccctaaatgggatcattcagaaagtgagtrtggagagaatagagatgtcagaagactaagccatggggcttgcaggtcagagaaatgaaaagaatgtgcaaggagattaagaagaaacaaccagtgaagtagtaagataaccaagagagaagactgtaactgaagaaagtattttcaggaggaattcttcaactatgtcaaatgtcactgacgaacgaatctagttagttgagggctgagaaccaaccatttgtcttagccacatggggttcattggaaatcttgatggctgcagtttgggtaaagtgatgtagatggaggcttaattggagtgggtgcgttagagagagtgagtggtaaaattgactagatggcttacacattcaaacacattcagaacttcaaaaagtaaggcaggtttctattggcacatgaatagaaagtcaggccaatataacaaaatagaattcccagaaatagatccaaacatatatgagaattcagt

SEQ ID NO: 136487 - DNA, 506 bp, Homo sapiens
actgcactgcctttgagatcatgggatttcaccatccatattaacctttaagatgagggataacatttgtctttgcataagatggrgaggagggaaaagaaaagaaccccaaacacatgagaggcactgacaagctgccaatgatataaataatcactgtgttgtagtttggaatgacattgcagaaaagcctttgtaataggggactgaaaagaaaaaaccaacacagtttaaattgaaaaacataagtatgttctaagaaataaaaacacagatcggttcagcagattccagtggaagtagtgtagatagggaaatatacctttaaacattgtcctgaaggacagccaacttaggaatgcagatcccaataacctattgcatgattttgaagaggagtctgggagaaatacagacgtatttaaacctggggactaatatttccattgtttaaatgtgctgtggatagccacaactatgtaattgctacttatatctccattttt

SEQ ID NO: 136488 - DNA, 506 bp, Homo sapiens
actgcactgcctttgagatcatgggatttcaccatccatattaacctttaagatgagggataacatttgtctttgcataagatggggaggagggaaaagaaaagaaccccaaacacatgagaggcactgacaagctgccaatgatataaataatcactgtgttgtagtttggaatgacattgcagaaaagcctttgtaataggggactgaaaagaaaaaaccaacacagtttaaattgaaaaacataagtatgttctaagaaataaaaacacagatcggttcagcagattccagtggaagtagtgtagatagggaaatatacctttaaacattgtcctgaaggacagccaacttaggaatgcagatcccaataacctattgcatgattttgaagaggagtctgggagaaatacagacrtatttaaacctggggactaatatttccattgtttaaatgtgctgtggatagccacaactatgtaattgctacttatatctccattttt

SEQ ID NO: 136489 - DNA, 373 bp, Homo sapiens
ctttcctacacacattctgaagttaacagtggggcctgagaatgtggtgtttatcccagcttaayattttaacccagccaaatttgagtaagcatgatttttcccacgttgtggatgctcttccattgtcagtagatcaactaggactattttcttttccttgagtaatgaatgcaatgaatataagtcagcaagatgcaaaccttagttgacaagaatgaatctttacaagaaaggtgtcctgtcattgttctggaaatgggaaattagaagagcaaacaattatttagcagacacttattgagcacctactgtgtgctagtctctgtcacctaccaagtgagtgaggcagaacatctgcagtggagcctgt

SEQ ID NO: 136490 - DNA, 443 bp, Homo sapiens
gataaaaagaaaggaattttagacttctttcctacacacattctgaagttaacagtggggcctgagaatgtggtgtttatcccagcttaacattttaacccagccaaatttgagtaagcatgatttttcccacgttgtggatgctcttccattgtcagtagatcaactaggactattttcttttccttgrgtaatgaatgcaatgaatataagtcagcaagatgcaaaccttagttgacaagaatgaatctttacaagaaaggtgtcctgtcattgttctggaaatgggaaattagaagagcaaacaattatttagcagacacttattgagcacctactgtgtgctagtctctgtcacctaccaagtgagtgaggcagaacatctgcagtggagcctgtaatccacattttagcaaactctcaagctggttttggagggatgt

SEQ ID NO: 136491 - DNA, 573 bp, Homo sapiens
gtactgtgttagaccctggtcacactaggtgcataaatgagcaatacatcatccctgtctggaactcactggagacagatgtcataaacagacaatttcaatataacataagtgatacattagagcttagctcaggattcccaccatccatacggaagggttatcagcccagacagaggttgaaggaagtcatcctagagagggtgtgtaagttgattcatgaggttaagaaagttaacgaaagaaaagtgaataaattcatctttaaagagaaggtggatttgggtctggttgtagaattmtgccttggcatttggacagccatttgagaattgtctattggatattaagaagtagacttgggaccaagaaagatttctttctttgcaaatataactggctcatgtgtacagtaattgtacaacctatgaaactttttacaaatccacttttataaataggataaggctgagggttgtgtgtgtgtgtgtgtgtgtgtatgcatgtacgtataacaattcttcagagtactggacacctagcaagctctatatgagatctgagatttattag

SEQ ID NO: 136492 - DNA, 573 bp, Homo sapiens
gtactgtgttagaccctggtcacactaggtgcataaatgagcaatacatcatccctgtctggaactcactggagacagatgtcataaacagacaatttcaatataacataagtgatacattagagcttagctcaggattcccaccatccatacggaagggttatcagcccagacagaggttgaaggaagtcatcctagagagggtgtgtaagttgattcatgaggttaagaaagttaacgaaagaaaagtgaataaattcatctttaaagagaaggtggatttgggtctggttgtagaattctgccttggcatttggacagccatttgagaattgtctattggatattaagaagtagacttgggaccaagaaagatttctytctttgcaaatataactggctcatgtgtacagtaattgtacaacctatgaaactttttacaaatccacttttataaataggataaggctgagggttgtgtgtgtgtgtgtgtgtgtgtatgcatgtacgtataacaattcttcagagtactggacacctagcaagctctatatgagatctgagatttattag

SEQ ID NO: 136493 - DNA, 573 bp, Homo sapiens
gtactgtgttagaccctggtcacactaggtgcataaatgagcaatacatcatccctgtctggaactcactggagacagatgtcataaacagacaatttcaatataacataagtgatacattagagcttagctcaggattcccaccatccatacggaagggttatcagcccagacagaggttgaaggaagtcatcctagagagggtgtgtaagttgattcatgaggttaagaaagttaacgaaagaaaagtgaataaattcatctttaaagagaaggtggatttgggtctggttgtagaattctgccttggcatttggacagccatttgagaattgtctattggatattaagaagtagacttgggaccaagaaagatttctttctttgcaaatataactggctcatgtgtacagtaattgtacaacctatgaaactttttacaaatccacttttataaataggataaggctgagggttgtgtgtgtgtgtgtgtgtgtgtatgcatgtaygtataacaattcttcagagtactggacacctagcaagctctatatgagatctgagatttattag

SEQ ID NO: 136494 - DNA, 664 bp, Homo sapiens
tgagaaacaatggaggccaaattgcagtaaatgacgtattcaaggactgaaagaaataaactgtcaaccaagaatcttatcttcagcaaatgtatcttttaaaaatgaaggcaaagtaaaagtgtttctagatacaaatgaaaaagtaaaataaatcatttcttcagatctaccttataaaaaaaactaaaggaagttcgtcaggctgaaagcaagtaaacctagatggaaattcacatccagatgaaaaaataaggagcaaaggtaattatataattacaaaacattatatatatatgtgtgtgcatatatatacacacacatacatatgtatatttattctcttacctgatttaaaaaaaatttttataaaacaatagtatataattagattgtttggtctatagcatacagaaatgcaatatatttgacaatactagcacaaagaaggttggtgagaacaagctctattggaggaggaaaatgacacragacagtaacttgaatccatgggaacaaatgaagagaactggacatagtaaataagattaatgtaacaaagtctataaatatatcctttctttcctttcttttctcagcttatttagtagccacaaaactatacaaagtacttataacaatgtattttggggtttgtaacagg

SEQ ID NO: 136495 - DNA, 485 bp, Homo sapiens
aataggtccctccctcaattacagggattacaatttaagatgagatttgggttgggggacagagccaaagcatatcaactatgttcctaggaataaagtacatatattaattttacatatattaatttatagagctccacagagagacctgcacaataagacccatttcataactgcttatggtaaaagtaggacaagaagaacacaggtggtcctcactataaaatgagaaaaatgtaatatgtgcatgtggtagaataccayacagttaaggaattagacatatatatgccatcatggaataaagttgaaaacagcaggaaatgcatacacaatacctttcatggaaaccaaacacatacgcgtaataccaattttaagttcacatgtatatcaaaatatatatgttaagatgagtttgataattatgtacccaaaacactagagcttaagaagggaggaaaatagaaaaagtgagaggaaat

SEQ ID NO: 136496 - DNA, 458 bp, Homo sapiens
attgtgacaagccccttaggttagtcatataaaagacaattgtggaaaagaagaaaactaaagtcatacaaatgataatatttcagacttaaactgtaagtattttgtttatgaaaggacagtgtgtatatttttcagtggatctaagcccgtgcagattatgttggaataatgatagataggtagataggccagtagatggtatataacaaaaaatagttaatacatatatatatatatatatatrtatgtatatataaagcagatataaaaaaatagttaatacatatgtatgacctaaaaatccagcataatctgacatgtccactaccttaactaaaacaatatatactataaggctgggcgcagtggctaacacttctaaccccagcactttgggaggccaaggtgggtggatcacttgaggtcaggagttcgagaccagcctggccaacatg

SEQ ID NO: 136497 - DNA, 539 bp, Homo sapiens
gaactgacgctgccctcctgtacggcagcatctctcaaactgagtagtagcttccatcttggtttgggcatatgctctccagtttttagtagtcctcaccaccctacttcctgttttctctcaaatacatttttattctgtttttcttagatttgactgttttcttcttgttctttgtgggcatttgaatttgtgacccttgagttaggtagtaaatgtcagtgcgtggtaaagcttatttttgtaaatagttgtgaagaccttagatggartgggtgttctaatttgaagaattccttaaaaggattagaataaatagggagaaacaggagactagaacttcagtgccaaatacatgttttctttgtgtgttttcccccctctaaacttgtgtttcttttaaggtcaataaaatgcatgttagcatattaaaatttgttttttaataccaggtggaatccatagagctccccatggacaacaagaccaataagaggcgtgggttctgctttattacctttaaggaagaagaaccagtg

SEQ ID NO: 136498 - DNA, 532 bp, Homo sapiens
ctatcatctcttacaataattgctacctccatttctattctgaaaaccctattctccttcaatacttagttcttctccacagtacttacctcttaactaacattaggtaaattttatttattgtttgtctagaatataagctccatggaggcaaggattcttgtgtttcatttactgctgtagtcccagcatggaacagtgcatgacggacagcagatgttcaataagtgtttgttgaatgaatgaatacataaatctataaaattgtgataatagtgagaggtgaagccagctggacttcctgggtygagtggggacttggagaacttttctgtctagctaaaggattgtaaatgcacctatcagcactctgtgtctagctaaaggattgtaaatgcaccaatcagcactctgtaaaaatgcaccaatcagcgctctctgtctagctaaaggtttgtaaatgcaccaatcagcactctgtaaaatggatcaatcagcgctctgtaaaatggaccaatcagcaggacatggg

SEQ ID NO: 136499 - DNA, 532 bp, Homo sapiens
ctatcatctcttacaataattgctacctccatttctattctgaaaaccctattctccttcaatacttagttcttctccacagtacttacctcttaactaacattaggtaaattttatttattgtttgtctagaatataagctccatggaggcaaggattcttgtgtttcatttactgctgtagtcccagcatggaacagtgcatgacggacagcagatgttcaataagtgtttgttgaatgaatgaatacataaatctataaaattgtgataatagtgagaggtgaagccagctggacttcctgggttgagtggggacttggagaacttttctgtctagctaaaggattgtaaatgcacctatcagcactctgtgtctagctaaaggattgtaaatgcaccaatcagcactctgtaaaaatgcaccaatcagcgctctctgtctagctaaaggtttgtaaatgcaccaatcagcactctgtaaaatggatcaatcagcrctctgtaaaatggaccaatcagcaggacatggg

SEQ ID NO: 136500 - DNA, 608 bp, Homo sapiens
atttaatttaattactgataaggtaggatatatgtctgccattttgctatctgttttctacctgtcttttttgttcctcaagtcccccaatattgccttctttggtgttaaatasatattttttcatgtaccattttaattcccttgtcaattcttttattatatatttttgagttattttcttattggctgccctgggagttaccattaacatctcagtttataacgatctagttctgattaatatcaacttaatttcaattatatatatatataaaaaaaattgttttttgagatggagtcttgctttgtcacccaggctggagtgcagtggtgcaatctcggctcactacaacctctgcctcccaggctcaagcaattctcctgcctcagcctcccaagtagctgggactacagggaagtgccatcacacccagcttatttttgtatttttagtagaggcgggttttcaccatgttggtcaggctggtctcaaactcctgacctcaaatgatccacagaccttggcctcccaaagtgctggaattacaggcatgagccaccgtgcccagcccaatggtatatttttttaaatgctctaaatagtt

SEQ ID NO: 136501 - DNA, 608 bp, Homo sapiens
atttaatttaattactgataaggtaggatatatgtctgccattttgctatctgttttctacctgtcttttttgttcctcaagtcccccaatattgccttctttggtgttaaatacatattttttcatgtaccattttaattcccttgtcaattcttttattatatatttttgagttattttcttattggctgccctgggagttaccattaacatctcagtttataacgatctagttctgattaatatcaacttaatttcaattatatatatatataaaaaaaattgttttttgagatggagtcttgctttgtcacccaggctggagtgcagtggtgcaatctcggctcactacaacctctgcctcccaggctcaagcaattctcctgcctcagcctcccaagtagctgggactacagggaagtgccatcacacccagcttatttttgtatttttagtagaggcgggttttcaccatgttggtcaggctggtctcaaactcctgacctcaaatgatccacagaccttggcctcccaaagtgctggaattacaggcatgagccaccgtgcccagcycaatggtatatttttttaaatgctctaaatagtt

SEQ ID NO: 136502 - DNA, 533 bp, Homo sapiens
agtgtctggcaaggggctcttcctggtttgtagaccaccacctactcattgtaccctaacacagtggagagggaagaagtaaattatcttatgtctcttcttataagagcattttaatctcagcatgagggcaccaacctcatgacctgctcacctcccaaaggcctatctccaaataccataatattggggaataaggtttcaacatatgaattttgtggggacacagatattcaatccatagcattttactccaggcccctcaaaattcatgtccttctcatatgccaaatacattcattctatttcaacagcccccaaaatcgtaactcattccagcatcaactctaaagtctaaggtccaatgtctcacttaaatatttaaatcaggccaggtgcagtggcttatgcctgtaatctcagcactttgggagactgaggcaggaggatcccttgagcccaggagtttgagaccagcttgggcaacacagcaaaaccccatctytacaaaaaatacaaaaattagccatgcg

SEQ ID NO: 136503 - DNA, 574 bp, Homo sapiens
caccatttttcctcatttacttctacatttgatgtgtatagtcaatagtgtttgataatattcatatgactacttcatgtattattaccasttattcatttaaaatctaatttatctatagggcaagggtttacttgtgaaaactctgattctagaaaccattagaacttttcaaatacagattttcagtgcacttctaaccacttcaaggctggcttccaaatctgtcctagtggtactatggaaacattttagtgttgtgcatgagtcatataattataaattataacctcttgctcattttgatacttttggtattcttaaaaaaacttgaaagggcagggaaaatgcttcacggggaaaaacaatatagtaattttcttttcttttcattgaatcaatgtcaatttattttaattattctttatttgctttatttaaacatttaaaaaaaagtcttttttttttttttttgagacagggtcatgctctgttggccagactggagtgcagtggcatgatcattgctcactgcagccttgaactcctgggctccgttaatccccccctcctc

SEQ ID NO: 136504 - DNA, 461 bp, Homo sapiens
tagggcctggaatgagggtgtcaaaactctacctgttgccctatcctactgtggctgagctagtatccaagttgcaagacaaagtcttctttactcwtccctctcctctcctcaagcagaaggaaagaatttctcccagaggtgcaagctgcactgcctggggttgggggagagttggcacaagcactcccttggcctccctggctagtgtctcactagctcacctgccccccaagtccactagttccaagcttagcacagcaccaggacttgtccaggaattgcattccttgtggccgagactgcctttcaagtttatttagatccccagggcactgcccaaagcaatctacagattcaattcaattcccatcaaaatatcaacatcatttttcacagaattaggaaagaattataaaattcatatggaaccaaaaaagagcccgcatagccaaagcaat

SEQ ID NO: 136505 - DNA, 311 bp, Homo sapiens
ctctttctgttgcttcacttccaacagtgtggtttcaggtaatacgacatgtttgttacttggtttgctgatctatgtgttggaaacaatgctcaccacaggaggattgactacatagcctgctttcatagcttgtgtgtatttatccagtgccctaatagttgatactgccagtgatttactcctgtggagtaaaggtaagcatgttttagtttctggagtattatattgtacgttggagctaggtatttaagaatatttgggggtggrgagggaagactccaatttactggtggtgcttggccagtaat

SEQ ID NO: 136506 - DNA, 667 bp, Homo sapiens
tgcatctagcagtctgacagctgcagctcgaactcaccagtaactttgggaatttggttgaggccaagctgacttcactcaactgtatcatccatgcttcctccttttacaaaactactatagttttagcttaaattaaaaggaatcattatgaagggggtaatatgtaattaaataaaagagaaggcatatataaatgtgcattacacacatacmcacacacacatacatatgtatctagccactgtcagttaatatagttaaatggtgactagatccagcattatgcaagataagtgataccccaggagcaaatatttattcgaaggagtaaggatggttaaacaaaaagaaatttaataccacaatcaacatgatcacatcataaatgcaaaaagacagttgataaaattccaccactgtaagttatcaaaactctaagtcagcaatagaagaacggggggggacagaccagttctcaaaaacaagcagcaaacataattctctatggtgaaatgctacagccatttcttgtaaatcagaaacaaaacaacagtatctatcatcactatttacattcaaaattgttttggctaatctattcaagtgaattaaaaaaagaaataatattttaattatgtgattctatacctaaaaaattccaaaa

SEQ ID NO: 136507 - DNA, 621 bp, Homo sapiens
tatataatgataaaagggtcaattatctaagaagaaatagcaattgttaatgtatattcacctaacaaaagaatggcaaaatacatgaggcaaagactgatagaatcccaaggaaaaatagatgaatccgctactatatttggagacttcaacacccctcattaagaaatagacagttctagcaggcagaaaattagaaagaakgtacttgaacagtaccattaatcaactggttatcattgacatctatagaatattttattcaacaacagcagaatacacatttttctcaagctcacatgaaacattgactaatagagatcacattcagggccataaaacacacattaataaattttaaagaaataatgcaatatatagttattcaaaccgcagtggaatcaaactagaaatcagtaacagaaagatagctggaaagtcccccaggtatttggacattaaacagcatacttctaagtaacacaagtcaaagaagaaatctcaagaaaaatttaaaatatttcaaactaaatgaaaataataatacaatgtatcaaaacgtgtgggatacagtgaaagcaatgtgatatggtttggccgtttccccacccaaatctctac

SEQ ID NO: 136508 - DNA, 667 bp, Homo sapiens
tgcatctagcagtctgacagctgcagctcgaactcaccagtaactttgggaatttggttgaggccaagctgacttcactcaactgtatcatccatgcttcctccttttacaaaactactatagttttagcttaaattaaaaggaatcattatgaagggggtaatatgtaattaaataaaagagaaggcatatataaatgtgcattacacacatacccacacacacatacatatgtatctagccactgtcagttaatatagttaaatggtgactagatccagcattatgcaagataagtgataccccaggagcaaatatttattcgaaggartaaggatggttaaacaaaaagaaatttaataccacaatcaacatgatcacatcataaatgcaaaaagacagttgataaaattccaccactgtaagttatcaaaactctaagtcagcaatagaagaacggggggggacagaccagttctcaaaaacaagcagcaaacataattctctatggtgaaatgctacagccatttcttgtaaatcagaaacaaaacaacagtatctatcatcactatttacattcaaaattgttttggctaatctattcaagtgaattaaaaaaagaaataatattttaattatgtgattctatacctaaaaaattccaaaa

SEQ ID NO: 136509 - DNA, 667 bp, Homo sapiens
tgcatctagcagtctgacagctgcagctcgaactcaccagtaactttgggaatttggttgaggccaagctgacttcactcaactgtatcatccatgcttcctccttttacaaaactactatagttttagcttaaattaaaaggaatcattatgaagggggtaatatgtaattaaataaaagagaaggcatatataaatgtgcattacacacatacccacacacacatacatatgtatctagccactgtcagttaatatagttaaatggtgactagatccagcattatgcaagataagtgataccccaggagcaaatatttattcgaaggagtaaggatggttaaacaaaaagaaatttaataccacaatcaacatgatcacatcataaatgcaaaaagacagttgataaaattccaccactgtaagttatcaaaactctaagtcagcaatagaagaacggggggggacagaccagttctcaaaaacaagcagcaaacataattctctatggtgaaatgctacagccatttcttgtaaatcagaaacaaaacaayagtatctatcatcactatttacattcaaaattgttttggctaatctattcaagtgaattaaaaaaagaaataatattttaattatgtgattctatacctaaaaaattccaaaa

SEQ ID NO: 136510 - DNA, 667 bp, Homo sapiens
tgcatctagcagtctgacagctgcagctcgaactcaccagtaactttgggaatttggttgaggccaagctgacttcactcaactgtatcatccatgcttcctccttttacaaaactactatagttttagcttaaattaaaaggaatcattatgaagggggtaatatgtaattaaataaaagagaaggcatatataaatgtgcattacacacatacccacacacacatacatatgtatctagccactgtcagttaatatagttaaatggtgactagatccagcattatgcaagataagtgataccccaggagcaaatatttattcgaaggagtaaggatggttaaacaaaaagaaatttaataccacaatcaacatgatcacatcataaatgcaaaaagacagttgataaaattccaccactgtaagttatcaaaactctaagtcagcaatagaagaacggggggggacagaccagttctcaaaaacaagcagcaaacataattctctatggtgaaatgctacagccatttcttgtaaatcagaaacaaaacaacagtatctatcatcactatttacattcaaaattgttttggctaatctaktcaagtgaattaaaaaaagaaataatattttaattatgtgattctatacctaaaaaattccaaaa

SEQ ID NO: 136511 - DNA, 534 bp, Homo sapiens
gaataccagtcaactgaagtgaggtgtgaagtccagcccatatttctaggaataggcattagtgcagaattagaatatagcacaaagttaaggcaacattattgtaaatatcaaggggtaaatttgagctcctcatcttactactgaatggccagagcatttgtcataaggatgaaagagaactaagcctataaatgagagtccartggttcagctgaggataaacaagtcggcagaggttgggaatcagattgagtttaatgggtagattgtgttaggatgatcagagactaaaataaaaggatatgatcactttattcatttatcttcataggtagatagatggatagaaatataattatgtatatggatataaatgtacagatattttatatcttaaacaatttgattgaatgtaaagaatttagcacagcttcttaaatattaactactattttattgtgactaatattcaaaatgtctctaatactaatttccatgagtcatggtgaaacctacccaattgtcccatag

SEQ ID NO: 136512 - DNA, 534 bp, Homo sapiens
gaataccagtcaactgaagtgaggtgtgaagtccagcccatatttctaggaataggcattagtgcagaattagaatatagcacaaagttaaggcaacattattgtaaatatcaaggggtaaatttgagctcctcatcttactactgaatggccagagcatttgtcataaggatgaaagagaactaagcctataaatgagagtccaatggttcagctgaggataaacaagtcrgcagaggttgggaatcagattgagtttaatgggtagattgtgttaggatgatcagagactaaaataaaaggatatgatcactttattcatttatcttcataggtagatagatggatagaaatataattatgtatatggatataaatgtacagatattttatatcttaaacaatttgattgaatgtaaagaatttagcacagcttcttaaatattaactactattttattgtgactaatattcaaaatgtctctaatactaatttccatgagtcatggtgaaacctacccaattgtcccatag

SEQ ID NO: 136513 - DNA, 597 bp, Homo sapiens
tccagcatggattcactggagcccctggtgacatggacatgaaagaaaaatgtaattactcaatcagaaattatatactgggaaaattctgaaaaaaaactggcaagtaaaaacaatgaaaagctgtttattttacagctttttctatatgcccaattaatgtgctcgtaaaggtaagtgacacctctgcgtgattgtccaaaatgtatattaaattactaggtcatagattacacctgtagtgagtcttattgctaaccctacaagttgctggaatgaaggtggtattcatataattgagccagtctaatctttttggattgatttttaaaagcaataggaaattaaaacataattatttgttgaaaaattttgaaaaaattacaatggctagaaataaaggagaagcatcacgtttttagtcttaytacctttgtaggtgggatataacaaaatttaaataatatttatccacttcattaagttatttattggtaacaaattagcactgatgagaaagttttatgaactctttattccttaataagaggtgactcactaggtgtaaaaacaaataattaattaacacccacatac

SEQ ID NO: 136514 - DNA, 619 bp, Homo sapiens
gaggtgcagagaaatccaacttacatatgaagaaataaggataaaaattacagcacattttttgtcataaaccatgcaaagaaccaaacacagaaaaatatatctaccaaaattattttccaaaagcgagaataagtaaagactattctagggaaataaaaatggaggaaatctttttcagcagacctgtcctcaggaaacatttgaagttcttcaggcagaaaaaaaattaatttatgtcagaaacttagatctacataaaaaaaggtgttggaagggtaaatgaaagtagaataaaaaccgtattttttttttttttgagacagagtcttgctctgtcgcccaggctggagtgcagtggcgtgatctyggctcactgcaagctccgcctcccgggttcacgtcattctcctgcctcagccccccgagtaactgggactacaggcagccgccaccgagcatggctaatttttcttgtatttttagtagagacagggtttcaccgtggtctcgatctcctgatctcgtgacccgcccgcctcggcctcccaaaaaccgtattttttcttaattttaattgatctaaaagacaggtattttaagcaataatagtaacaat

SEQ ID NO: 136515 - DNA, 619 bp, Homo sapiens
gaggtgcagagaaatccaacttacatatgaagaaataaggataaaaattacagcacattttttgtcataaaccatgcaaagaaccaaacacagaaaaatatatctaccaaaattattttccaaaagcgagaataagtaaagactattctagggaaataaaaatggaggaaatctttttcagcagacctgtcctcaggaaacatttgaagttcttcaggcagaaaaaaaattaatttatgtcagaaacttagatctacataaaaaaaggtgttggaagggtaaatgaaagtagaataaaaaccgtattttttttttttttgagacagagtcttgctctgtcgcccaggctggagtgcagtggcgtgatctcggctcactgcaagctccgcctcccgggttcacgtcattctcctgcctcagccycccgagtaactgggactacaggcagccgccaccgagcatggctaatttttcttgtatttttagtagagacagggtttcaccgtggtctcgatctcctgatctcgtgacccgcccgcctcggcctcccaaaaaccgtattttttcttaattttaattgatctaaaagacaggtattttaagcaataatagtaacaat

SEQ ID NO: 136516 - DNA, 619 bp, Homo sapiens
gaggtgcagagaaatccaacttacatatgaagaaataaggataaaaattacagcacattttttgtcataaaccatgcaaagaaccaaacacagaaaaatatatctaccaaaattattttccaaaagcgagaataagtaaagactattctagggaaataaaaatggaggaaatctttttcagcagacctgtcctcaggaaacatttgaagttcttcaggcagaaaaaaaattaatttatgtcagaaacttagatctacataaaaaaaggtgttggaagggtaaatgaaagtagaataaaaaccgtattttttttttttttgagacagagtcttgctctgtcgcccaggctggagtgcagtggcgtgatctcggctcactgcaagctccgcctcccgggttcacgtcattctcctgcctcagccccccgagtaactgggactacaggcrgccgccaccgagcatggctaatttttcttgtatttttagtagagacagggtttcaccgtggtctcgatctcctgatctcgtgacccgcccgcctcggcctcccaaaaaccgtattttttcttaattttaattgatctaaaagacaggtattttaagcaataatagtaacaat

SEQ ID NO: 136517 - DNA, 619 bp, Homo sapiens
gaggtgcagagaaatccaacttacatatgaagaaataaggataaaaattacagcacattttttgtcataaaccatgcaaagaaccaaacacagaaaaatatatctaccaaaattattttccaaaagcgagaataagtaaagactattctagggaaataaaaatggaggaaatctttttcagcagacctgtcctcaggaaacatttgaagttcttcaggcagaaaaaaaattaatttatgtcagaaacttagatctacataaaaaaaggtgttggaagggtaaatgaaagtagaataaaaaccgtattttttttttttttgagacagagtcttgctctgtcgcccaggctggagtgcagtggcgtgatctcggctcactgcaagctccgcctcccgggttcacgtcattctcctgcctcagccccccgagtaactgggactacaggcagccgccaccgagcatggctaatttttcttgtatttttagtagagacrgggtttcaccgtggtctcgatctcctgatctcgtgacccgcccgcctcggcctcccaaaaaccgtattttttcttaattttaattgatctaaaagacaggtattttaagcaataatagtaacaat

SEQ ID NO: 136518 - DNA, 447 bp, Homo sapiens
ctgcacctctgctcctggtttgtttagggaggtctctccagccctagaagttctcctctgtgcagatgtgctttactttggagcttgcctagcctgagctaggaaagatgtcccaggtccccaaaataaacactctagacaaaaataactgaatgcggaaacagtatttgaaaatttttgaaatgcttcttgagacaattttgttgtgactatayattgcaaacaatgactgtggcttattcatctaaatctcctcagcatctagcttgtcatgagtggatactcaggagaggtttaagggatgtggaatgaatgaaggaatgaatgggatttacctctgtaattacaacacaccataaagatccaggagtaaattgagcttttgtttctatcctttaagtctagggagctgcaggatttcccaattttcaccatggccattaatat

SEQ ID NO: 136519 - DNA, 570 bp, Homo sapiens
gctgtgcagagatcacatgaagggagaggaagtgagagggaggggaactgccaggctccttttaccaacgagctctctcaggaacaaatagagtgataactttctcaccctcccacctcaaggaaggggattcatatactcagaaatctgcccccatgacccaatacctcccattaggccccacctctaacagtggggaccaaatttcaacatgaggtttgtgggaataaatatccaaactatattataatatacaccatgttatgtaataatatttatataattttaatgtataatttacagatacatttacaaatcttaagtgcacactagttgaatttgggaaaatgtacacctcgatttgtctaaagkaaacactgtttttaccagaggaagtttctcctacttcttcccagttaatccccgtctttaacactcagaggtaatcactgtggtgattcttttctaccatagattaggcttgctgttctagaaattcatatgaatggaatcaaacacattgtattcttttgcataggctttttttcactcagcattgtttttgagatt

SEQ ID NO: 136520 - DNA, 483 bp, Homo sapiens
aattttgttaagtatatttgcatccattttcataaaaggtattggtctgcaatttctttttttcttttgtaatctttgccagactttggaatgaccttatctaatgagttggaaagtatctcctcttctctattttcagaaataaagtttatataagattggtttagcaatttaccagtgaaaccatctgaacctggagttcttatagaaagggttttgataacaaattcattttctaaaatagctgtagggtggctcatattttctgtttcattgcctcaatttttgaaggacgtatttttcaaggaaaggtygtatttcatcaaagttttcatatttggtggtataaagttgtttttggtaatatcatttattatcttttaatgtctgtaggatctgtattgataacctctttttcattattgatgttgatagtttgtgtcctttctcttgatcaatctggtgtatcaattttgtgggtct

SEQ ID NO: 136521 - DNA, 435 bp, Homo sapiens
ctagcttttggggaatccaaaacaaaaaccaaaaaaaactcagtctgctcctcccatctttatccactagagggaggctattacttaacataagtcagtgtttcccaagctcagatgaagctgttttaaaatgatgagttagtggaacaatgatgagatctaatggcctgtcctgcacatttttatttaagtagatggttaaaataaatagtctcaggctgggaggggtggctcacgcttgtaatcccagcacttttggaggccgaggtgggcggatcacctgaggtcatgcgtttgagaccagcctggcaaacaaggtgaaacctcatctctactaaaaatacaaatattagccgggcatggtggcaygcgcctatagtcccagctacttaggaggctgaggcaggagaatcgtttgaactcaggaggcggaga

SEQ ID NO: 136522 - DNA, 424 bp, Homo sapiens
tcacccaacttgctggtgtcactctccaggatgttgaattttatcaaatgctttttctttgtccattgagatgattatatgttttttgtccttcagcctattgataggatgtatcacattgactgatttgtgtagttgaacaatctttgcatccytggaataaatccacttgattatggtgtattacttttttgatggggttttggacacagtttgataatattttgtggaggatttttgcatctacattcatcagtgatattagcctgtaggttttttatttttgttgtgtcctgtctgcttttggtgtcagggtaatgctggccttatataatgagtcagggagcattccctcctcttcaattttggaagagtttgaagaaaactagtgttagtttttctttaaatatttgttagaattcag

SEQ ID NO: 136523 - DNA, 553 bp, Homo sapiens
ttcatcctgtagacaaattttaacctcttcttgtatccagtggcttgaacctctccccagtctagggggcagtagtgttgcaaggctcacccaggtttttcttgaactcttaggaacagagcwtcagacactgaaatttctgcaaagagttagccagtgttactggggaagactcatcctttgaggtctcagaaaagtgtagatcaaggatctgccattccagatttattatagtttcagaaaactagactcatggcaagggaaagaagctacgtggcaaggcagaaagagctcatttccatcacatcactgttggctccatttggaccagcccccgatcaccctggcctagaaaaggaagtggggcctagacccatacatgaaaagaacgtaagatctagccttggacaatcccatatttgatcagttggccatcagggcattttccaaggtaccactgttaaatagccttgttttatttgcctcagaaaagctgtttaacagcctaacaactctggggggcataaaacgtcactgggactgctactgtgca

SEQ ID NO: 136524 - DNA, 553 bp, Homo sapiens
ttcatcctgtagacaaattttaacctcttcttgtatccagtggcttgaacctctccccagtctagggggcagtagtgttgcaaggctcacccaggtttttcttgaactcttaggaacagagcttcagacactgaaatttctgcaaagagttagccagtgttactggggaagactcatcctttgaggtctcagaaaagtgtagatcaaggatctgccattccagatttattatagttkcagaaaactagactcatggcaagggaaagaagctacgtggcaaggcagaaagagctcatttccatcacatcactgttggctccatttggaccagcccccgatcaccctggcctagaaaaggaagtggggcctagacccatacatgaaaagaacgtaagatctagccttggacaatcccatatttgatcagttggccatcagggcattttccaaggtaccactgttaaatagccttgttttatttgcctcagaaaagctgtttaacagcctaacaactctggggggcataaaacgtcactgggactgctactgtgca

SEQ ID NO: 136525 - DNA, 553 bp, Homo sapiens
ttcatcctgtagacaaattttaacctcttcttgtatccagtggcttgaacctctccccagtctagggggcagtagtgttgcaaggctcacccaggtttttcttgaactcttaggaacagagcttcagacactgaaatttctgcaaagagttagccagtgttactggggaagactcatcctttgaggtctcagaaaagtgtagatcaaggatctgccattccagatttattatagtttcagaaaactagactcatggcaagggaaagaagctacgtggcaaggcagaaagagctcatttccatcacatcactgttggctccatttggaccagcccccgatcaccctggcctagaaaaggaagtggggcctagacccatacatgaaaagaacgtaagatctagccttggacaatcccatatttgatcagttggccatcagggcattttccaaggyaccactgttaaatagccttgttttatttgcctcagaaaagctgtttaacagcctaacaactctggggggcataaaacgtcactgggactgctactgtgca

SEQ ID NO: 136526 - DNA, 553 bp, Homo sapiens
ttcatcctgtagacaaattttaacctcttcttgtatccagtggcttgaacctctccccagtctagggggcagtagtgttgcaaggctcacccaggtttttcttgaactcttaggaacagagcttcagacactgaaatttctgcaaagagttagccagtgttactggggaagactcatcctttgaggtctcagaaaagtgtagatcaaggatctgccattccagatttattatagtttcagaaaactagactcatggcaagggaaagaagctacgtggcaaggcagaaagagctcatttccatcacatcactgttggctccatttggaccagcccccgatcaccctggcctagaaaaggaagtggggcctagacccatacatgaaaagaacgtaagatctagccttggacaatcccatatttgatcagttggccatcagggcattttccaaggtaccactgttaaatagccttgttttatttgcctcagaaaagctgtttaacagcctaacaactckggggggcataaaacgtcactgggactgctactgtgca

SEQ ID NO: 136527 - DNA, 563 bp, Homo sapiens
tgacatctgctgctagtgtaatagtgtgaaaataaatcatatattattacaataaaatgtattttttctggatttatcatatttctcattttaaaatgtttaatttttttctatttttaatttttataggtatatagtacatatatacgtgtatagggtacatgaaatgttttgatgtaggcatacaatgcgtaataatcacatcagggtgagtgggacatttattacctcacttatmatttctttgtgttaagaacattccagtcatacacttttagttatttgaaaatgtactataagttattgttgactgaagtaaccctattgtgatatcaaatattagatcttatttattctattgaactatatttttgtaccattaaccatccccactcaccttgcctcccctctacccttcccagccatcattctgctctctatttccatgagttcaattattttaattattagtgcccacaaatgagtaagaacatgtgaagtttgtctttctgtgcctggcttatttcatttaacataatgtcctctagttccatccatgtcct

SEQ ID NO: 136528 - DNA, 582 bp, Homo sapiens
tcagttgtgttggtttgagaatgttttatggagtacaaggtgaatatgatactttattatggtagcaaaacgtaagatcttattagctatcctggacactccacccctgaccagctgccatggtgtatatataattatattaggtcagagtccacttaaatcattaactattaactgagaatatcatggcatgtagaagctaaaactttttttttaatgaagagagaggtcatttaaaagaagtcaactccaaagactaagtgcagttgacaagatgcctatgatttctggggagggaaattgcccactcattcctgtggcggcctctctttattatgcaaatacagggcaagtaagcactgtcatccttgcctttgggaaaggataacagamcttcttgtggcttcacagggccacccttccctagaactctcttctgtatgctcagctgtctggggaggtgtcaggggcattggatctcacctctctttcattctgaggttcagcgtaattacaacctctctcacagatgggagtcagctgacaggaaaggataccaaaggcctccaagagggagcttcc

SEQ ID NO: 136529 - DNA, 576 bp, Homo sapiens
tgaatcttcagaatacatccagtcatgacataagaagcatgaaatgagagactctttattatgaaatcacaagagtattcaatattcagcctcccccctagaagaagggacatcacagagggcagaaaccctactgagtgtgcatattacaggtaagaaaacaaaacaagtttgtaagcatccttttaaaacgagggaaacactaaaaatatgccagtaagttaaaattagtgataaaagaaaatggatcatttgatgcctattcttcctaatgaaaggtgtgtaaatatacagatattctctctattgtgctgayttcactattttatttagtgaacatataaaaatatttatgaaggctttccaaggtttacttacaacctcaattccccaatttcctataaaatcttaagttgcccaaacaagaactcttatactatagatgttttcagggcctgaatctccccagatggggaggaaattccacactccacggtcctggccaggcacagtatcgtacagtaaggccagaagactcaacagacctacagggatgaatgggctgctttgataggc

SEQ ID NO: 136530 - DNA, 599 bp, Homo sapiens
ttatttccttcttattaagtttctatgccccttaccaattttatcttaataatttgcagatttcatttggcttcatttattctcattgttgctattttgaggctttcccaactgctgcatgacattcaactctggatgcattcttgggatttttcttttcaattaaatgcttccagaaacaaaatttcggaaaatgggttcaccctagctgactcaaatctgaaagcctttccaaggagattttacagggaaaatattactggcttaaaaaccccaagcactgaattytgggctgcaatttgaatttggctttcatttttcatatctccaatgtaaacatcctagcaaagtaatggtcttttctaagatgggtacaggtttctggaatgtgcttgttcttcttattcaaaagaattcaaaagaatttcaaggtacagtgtaaatttgctttctttgtttcttttttctttctttttttttctttttttttttttttttttttgccctgaccaactgaaagcagcaaaggcctatttacattctggtttaaaaggttttcctttaatggaaatttttactcatcttccatagacagcggt

SEQ ID NO: 136531 - DNA, 573 bp, Homo sapiens
tgagaagggaatgttggatggtgcagaggaagtactcttctccttgtgtgtttgtggttcagcatcctccaatcttcagagaggattgtggctccctgagatgcaaacacatcgcggctcacacaccaaacaagtggtaccatttaaaattccactctgagggaatggtggtaattgaagccattcacaggcccacaggagcactgccaccctccaaatcgaacatttgaatgacatttaaaaggtgccagaatgtgtaatcaattcattcaaaagatatttcctgaatatctagtgtgtgcaaaattctgggatagttatttgaggagagaccaagatagcaatgaaaatgactcatggtactttactaataccaggctatcgtgcagagcgcctgatgggaatggaagaggggaagctcaagtaggaccagggacagggaagtggaagcaggcggggaaggagatggaacwgaagggcacaggaggggaggggagccacgaagcacaaacaaacaaaggagcagggaaagccgcaggcccagaggtaccaaactggttttttaaatgaagt

SEQ ID NO: 136532 - DNA, 573 bp, Homo sapiens
tgagaagggaatgttggatggtgcagaggaagtactcttctccttgtgtgtttgtggttcagcatcctccaatcttcagagaggattgtggctccctgagatgcaaacacatcgcggctcacacaccaaacaagtggtaccatttaaaattccactctgagggaatggtggtaattgaagccattcacaggcccacaggagcactgccaccctccaaatcgaacatttgaatgacatttaaaaggtgccagaatgtgtaatcaattcattcaaaagatatttcctgaatatctagtgtgtgcaaaattctgggatagttatttgaggagagaccaagatagcaatgaaaatgactcatggtactttactaataccaggctatcgtgcagagcgcctgatgggaatggaagaggggaagctcaagtaggaccagggacagggaagtggaagcaggcggggaaggagatggaacagaagggcacaggaggrgaggggagccacgaagcacaaacaaacaaaggagcagggaaagccgcaggcccagaggtaccaaactggttttttaaatgaagt

SEQ ID NO: 136533 - DNA, 572 bp, Homo sapiens
ggtaatgatcaatgactgtggtaggcaattaattcagctttgccttataaacaggtcattttggtggtattttcaagaaaccagaatttgatatcccataacaatagttgtgcatttatggattcaatctaatgacaatggcattacaatagaccttccgctagaagccttggctgacaggtaaaccacaactattcggattctttctaacataaaacaccaagattcacaagctcattgtccagtcacaaaacaagcagaacaccagctacttttctaagcaagttgaaggcccctcctagtggccaagtgctatccagccctttaagaaaacttttttttttttttcaattgactgttcaaaatcaagatggtacatccatagtgcagaatggaacactgcagcaattacaccaatatttcagactagttttggaaaactcctcgtggggcttttggggcccacactagttagatgaactgcccacattgatctaatttgctcaataatkgctcaattctccaatttattgcccagatgtagccaaatttctccccgtggacagggaaga

SEQ ID NO: 136534 - DNA, 541 bp, Homo sapiens
gagtgttcaaggcctgccagctaaagccatctgcagaacccaccaagctcttggagcagctggttcttgacaaagaagaatgggcattacatccacctgatctggccactgaccttattcatcttaagctggatacagagccctttgttaaatggaagacatgcagacaagtgctactgagcctgaagttgcattaccaagtgaaaccgtggtttaaaaaatgccccaggcataagatctgtatgctactgacttgcagagttagcaatcaaccagctccttggtattctcagtgatgccagaaggcctggtaagtgtggggccctcctagtggctgtatctcagcactgttactatggcagatgcccactcgtctctctttaaggtgtacttccaacaaggcagctttaattctttcatacaggtttgtagcactgattttgtyacacggattgccagattaactacaacaatctacacctgaccacttaaatgaattttaaatgaaaattctatgcaaactgtttccatcacaacccac

SEQ ID NO: 136535 - DNA, 422 bp, Homo sapiens
ggtaatggttgctcaacaatgtgaatgtacttaatgccatcaaattgtatattttaaaatgatcaaaatggtaaattttatgttatgtgtgtctcgccataaaaaagaacacagttgcctgggcctcactcattggggattatgattcatttggtctggagtagggctcaggcatctgagtattttacaagcagtcctggcaattccaagacacaagcaggttcaggacccactaatctagtccagcccctgcatgatacagaggggaaaacaaaggttctgaaagaaatgtctcggccaaggtcaagtaactagaagtggcagagtcaataattgattccccatctacttccaagtcctrtcttcttttcacttcattcttcaaataactgagggtctttatgactattatacaatcctca

SEQ ID NO: 136536 - DNA, 585 bp, Homo sapiens
aacaatcctgttgggcttttagctctgacatcagtcataaaaattttgtctcccaaattggttgccaagaacctatagttctttgtttcaacaaagaatgttttctgagcgtgacaattgtgtgcatataattgtatatgataataagtatatatacacacactatttacatgttatatacatacatacactgataatgtactatattttaataaagacttgaatgacctttatggcttttgttaaattagctttgtttttaaaatctcattttaaaatgtgagacagtagtacatacagtagagttgacaggaatgtatttccttatttttaaaggatatattgtgtcaggaaagaagaatcatcaactcttttgacccagtgagatttaagaaggtgggaatagagacttttataaragtttctgcctaaatatttttttaaattgtgtatgtactccaaatgatattcttatcaagtcttatgattaatatagctttacaaataattcaccattttaatgagggttgtgagaagcaagctcaatgttataggaaagaagtaaaaaaaatagccttatagaat

SEQ ID NO: 136537 - DNA, 544 bp, Homo sapiens
cacccaccttttcttactacaccaccttttcttactcgttagtgctcagctagaaattactacaaatacatagcagtatacttacagtagacttatacttgtgactccagttctttttgtggttgacagttgatatttttaaaaatatgaaaagcactctataattagatatttaacytaagtacttgtaaaaataatgggggagatattaatttattgatactagtaaaaagttagaatatagtgaatagtaaaaataattattaaaattacaaaatgaggctaaaaaactcaagtcttttgactccaagtctgaacaagtatcagacaaatgactaaacatgcaatttccagtttattaaaagtaaccattgttatgaatagagaaatctgttatatggttaatacctctgtttgcctgtaccaaatgccttgtcctttttacaatctgtaacagccagtcactaccatggcatcactgacatcaccataaatgccatcaaacacaaccaagtctgccagaagctgttcagctagtcaaaaa

SEQ ID NO: 136538 - DNA, 497 bp, Homo sapiens
gttttatgatttcctagttcagaatattctattattgtatattcaaattgcacattactgatgtgttttgtgtcaaagatatttgtgggttacctaggagaggtatatgaaaatatttttattattaattttaatcttgaggtgtagtacaccaatttttttcttgtcataaaatagcatgcagcaagttgaaccttggctttttctgaagttaattggacagaatttgcagacagcttgcaggattgtgtccaagtagattttaaaatttcagaaaaatgcaaaattatcattaacaaaattattatcgcagacaatttcatccaagtagatatagaaatagttgtaaaatgccagtttgcatctgagatgtatcacaatgacactgttttcakagttgaataagaaataagactattcaacaagtactcatgtcaccatgaaagagaaaaatgcagagctgaaggtggcatgacacattttcccattcacagctg

SEQ ID NO: 136539 - DNA, 350 bp, Homo sapiens
agatctagtgttattttgggaaactgtgggttgaccttgcaaaactcacattaacgagaaaaaaaagyacattttaaatggtgacacatctaacagggagcttaacagagcaagagaaagtgtgtaggtgttcagtagtaacaacctaatggtaccacattgtatttcatgaatgggagcaattcacaaagttcccacaaataggacctcatgcaagaacacaactgtatagtggttttctctatccttattctatcaacattttatgagtccctactaagtagcagggaggatcctagttattgtgaaaataaaaatgagtgagttacaattccttcctgcatgtagct

SEQ ID NO: 136540 - DNA, 529 bp, Homo sapiens
ggattattggagaaagaagacaaaatactgcaaaaatgattcatcacactttcatgttatagttctttatttctactcaataatttcatacaaggccaggagatcctttataccagggatggtgaatgtgcagagcatacactactatgtctccctaattataatgccaggaactgctcatgacatacatagctcttatctgttaatattatgttggcctcagaagccttctcaacacaatattccatgcagctcckacctatcagagttcacactagatctaaaatttatttacaactctagttctatctcactcaccaaagtggttctaaccctatcaaaacatcagctaccaataacattcctgccctacttactcccagcaaacagccctgaagacacctaattacatatcttctctcttattgacctcactctttccatctttgcactagtctatgaaggtgtttttctgaaacttaccagctgtcaatgtttttcaaacactctttgccccatctcttagcta

SEQ ID NO: 136541 - DNA, 591 bp, Homo sapiens
tgaattcttaacatactcagcacacatactgtaatctatgactgaatagaggcctttctctcctcagggagaatggaaggatgttattttggggaacagtgaggctacctttaccattttttttctaactcacaaaatactgcaataaagtattgctcaactcagactgaaacaattttcccatctgtcaaaatattttaaatagtatcaagctggtattactttgtcaaaacatttcatcagagacagtatctaaatttaaacaagcagttcctcgaactatgtaagtaaggtgaataagctgccactggcacggtatattttttggaaaatccacaaggtctcattagaaagtccttaaaggaaatgggtgtttaaaccaaggacgagtgtaccttgggctgaacatttcaytgtccttgaaatgatttatttcaactcctcccaaacgccatagaacaagctcagctttacaatacttctggtcaaagtctcagtaaactcacaattatgcattgaaatgtgggtaatatggattgacttagagatctccacaaacacaagcagataatttgcatatattctccaaag

SEQ ID NO: 136542 - DNA, 673 bp, Homo sapiens
atttgagaacatctaatcagatataacaattttcaaattgactaaaataagggccatagtcatacttacgatattgttcttctggaactattcgctaatagccatttctcataaattggctttagaatatacctctaaacaacatgatagtgaccactttattgcaaaacaaacccaatgcactgaatctttttatttttaaatacattttataatattgaggtcattacaggcattctctaagagctggaagaaaaaatttcctagcataggacctgctcagtatgttatagagtggacgatatttaatttcactgagytcctttccttcttcccagtttgcttgtcaaaaaaaaaactcacattccatatacccaaaactacctttcaagctgcttttaatgtttaacgcactctttgtttctgcaaagatttagcatttagtatttagatgattatacttattcattttctatttcttctgatcattgtgcttttgatttcctgatatatctgtctaccccatttctctctggtgaaagccattcaggctcagcttaactcatcaatgaagctctccccgatccccaactctgaactcccatagattgcttgtttgcacctctgacaccatgtaccttgtatagatcttttcataagttaactttctggc

SEQ ID NO: 136543 - DNA, 673 bp, Homo sapiens
atttgagaacatctaatcagatataacaattttcaaattgactaaaataagggccatagtcatacttacgatattgttcttctggaactattcgctaatagccatttctcataaattggctttagaatatacctctaaacaacatgatagtgaccactttattgcaaaacaaacccaatgcactgaatctttttatttttaaatacattttataatattgaggtcattacaggcattctctaagagctggaagaaaaaatttcctagcataggacctgctcagtatgttatagagtggacgatatttaatttcactgagctcctttccttcttcccagtttgcttgtcaaaaaaaaaactcacattccatatacccaaaactacctttcaagctgyttttaatgtttaacgcactctttgtttctgcaaagatttagcatttagtatttagatgattatacttattcattttctatttcttctgatcattgtgcttttgatttcctgatatatctgtctaccccatttctctctggtgaaagccattcaggctcagcttaactcatcaatgaagctctccccgatccccaactctgaactcccatagattgcttgtttgcacctctgacaccatgtaccttgtatagatcttttcataagttaactttctggc

SEQ ID NO: 136544 - DNA, 627 bp, Homo sapiens
attgttcttctggaactattcgctaatagccatttctcataaattggctttagaatatacctctaaacaacatgatagtgaccactttattgcaaaacaaacccaatgcactgaatctttttatttttaaatacattttataatattgaggtcattacaggcattctctaagagctggaagaaaaaatttcctagcataggacctgctcagtatgttatagagtggacgatatttaatttcactgagctcctttccttcttcccagtttgcttgtcaaaaaaaaaactcacattccatatacccaaaactacctttcaagctgcttttaatgtttaacgcactctttgtttctgcaaagatttagcatttagtatttagatgattatacttattcattttctatttcttctgatcattgtgcttttgatttcctgatatatctgtctaccccatttctctctggtgaaagccattcaggctcagcttaactcatcaatgargctctccccgatccccaactctgaactcccatagattgcttgtttgcacctctgacaccatgtaccttgtatagatcttttcataagttaactttctggcagccccataatgtgcaccctgggcac

SEQ ID NO: 136545 - DNA, 534 bp, Homo sapiens
ttgcagtgaaccgagatcacaccagtgcactccagcctgggtgacagagggagactccatctcaaaaagaaaaaaaaagatacagtagcggtacagccattgggtaagtattcccatccaaatgggagaaattggccaaaataaagggcccacaggccacatgaaaatctaaaacccagccgggcagtcattaaatcttaaagctccaaaatgatctcctttgactccatgtctcacccagggcacgctaatrcaaggggtgggttcccatggccttgggcagctccacccctgtggcttagcagggtacagcccctccagctgctttcatgggatggcattgaatgcctgtggctttttcaggtgcaaggtgcaagctgttggtggatctacctttctggggtctggaggatagtagcccttttctcacagctccacaaggcagtacctcagtggagactctgtatgggcgctccaaccccacatttcccttctgcactgcctaacagaggttctctataagggctccacccc

SEQ ID NO: 136546 - DNA, 484 bp, Homo sapiens
tttatcagttctcgcttcacttcttcggctgctttccgactatacattgagtatactatttttgttctggctctttaaagaaaaataattgggcataaaattttcaagactaaaacgatacaataacacatttggaagaaagcactgaattagactagaagacgatgaagaagaatccagtcaggaggaaattccccatggaagttcccgctaaggggcatcagtgaggtcaaaagcagaaggcaggaggaggacaagttgtggagaagagggtgacctttaacacacccctacattcccaaacttggtctctttgtgtttgttcacttatttatttgtcttaaattcttcacttcgctatcacatgtaagagtaaggtaccctgtgtgtgaacagggatgaactacaacaaacacaactataggactactgtgaagctscaacagtcccaacttagacatcaacaataattcacattaaatgg

SEQ ID NO: 136547 - DNA, 274 bp, Homo sapiens
cagtggggacacaaagtcaaaccatatcagagtcttcctcttaaaattcatggaaaggtcatctctatctaatctctctctgatgcttcttttggcagtatcactaaagacatttccatcccagagagtagatgtggaggatgtcagattcaaaaagaaaaaattatttgtcattggttacaaccacaaaaccatttactatagttttaatattgtgaatatctgttctgatcccaagagatcatcagtcaartagagaaaaatagaacaaact

SEQ ID NO: 136548 - DNA, 426 bp, Homo sapiens
ttcctgtgtggtgccctctcatccactggtctggaactctggacactgggctaacacagtgggatcatgagggaaactaacatgtcaatagagtattgttggccagtttcatatacayacacataccactctgaaggagtgacacagataatataattaatcagtaccacatggatggtgttaaaaatgcacatatatacatgcttgtcgaactaaaccagctcataaagtattgcaaattaatattttatttatttaaatatttacttatttaaaatatcaaagtactttcctttgtattatctcattttgtcttcacaatatctgtttatggcacgctactagaaactagtaaactataacacgacgaatgagagttgcttgttcaagaacatcaagcaaaattacaggcttctgtctcacaat

SEQ ID NO: 136549 - DNA, 426 bp, Homo sapiens
ttcctgtgtggtgccctctcatccactggtctggaactctggacactgggctaacacagtgggatcatgagggaaactaacatgtcaatagagtattgttggccagtttcatatacatacacataccactctgaaggagtgacacagataatataattaatcagtaccacrtggatggtgttaaaaatgcacatatatacatgcttgtcgaactaaaccagctcataaagtattgcaaattaatattttatttatttaaatatttacttatttaaaatatcaaagtactttcctttgtattatctcattttgtcttcacaatatctgtttatggcacgctactagaaactagtaaactataacacgacgaatgagagttgcttgttcaagaacatcaagcaaaattacaggcttctgtctcacaat

SEQ ID NO: 136550 - DNA, 297 bp, Homo sapiens
ttgttgaaccaaacagatacagagacctctgtaagctgaaaagtgtagaatatattccaaggctttttttctttctgtttttcccctcttttttcctcctatctctaagcgaggagtggccacagtctagagctwctctgcagcagttgtggcatgagcacctgaaacactgagaaagcaaacaaacaaaccactgtctctcttgtcagaggatcttcaaaagagttccctaacatcccaagtggatgggggaaaatttttgtttttgttctctttgtctctccagttgtgtggaac

SEQ ID NO: 136551 - DNA, 571 bp, Homo sapiens
atagtcactttatttatgatacaaggcccactacaattcagcggggaaaaatcttctttttaacaagtggtactaggttaactggacatcctatttggggtggggtaggggaggaaggaatctggaacctatttcatactgtatacaagattctagacagattacaaaccaaaatgtgaaagctacaccaaggttttcccttatattttcttcaagcttctaaaagaaaatatgagaaaaccttcatgacctacagtaggcaaagatttttttaatcagacacaaaaaggactcaacataagagactgataaatggaacttcatgaaaattaagaacttcatcaaaaaacctcaaaaagatctgtgtacacaaagataaaaatcaaaaaacgaaaaaagaggaaaagacaggtcgttaagtggtgagaaggtacttgtagaacatatattctataaagaactccatagaaytgacaaagagttcccatatatgaataaaataacccaaatattttttaatgggtaaagacttaggtattaaacaaaagagagtatctaaatctgataagcc

SEQ ID NO: 136552 - DNA, 614 bp, Homo sapiens
tggacaggaacagaggtgagcctgcctgggggttggaaatagtctatgcattgatctagttcctggatacaagattgtatacatatgtaaagatccactgaacagttaaaatatacaaatcttaatgtgtgaaaagtatatatcattaaaatgtggggagactactaccagccaaatctgtgacaatgggagcatcaaaaagaaytgcaatggattataaaacattgaattaaaaaaaccctatgcaaatataataaaataaaatggcaggagaagggatttatctttatagaacaccactaaatgtagatgaaatggcagaattagaaaattaccatttgcaatggctaatgtaataactaattcaggcaagaatcatcagtggatgcataatcagttggtaaatgttatgggggaagaggatattcaagtgtctcaaagtatcatccctcatttcacctattaattaaaagaaaaaagggcatttttataatagagacatgacagacaccaccttaaccatgtgatttaactttgcaaattcaataacaggacaaattggttttgcatgcctccagaggtaatgcaaagcaaaggacacaacatcatatgtg

SEQ ID NO: 136553 - DNA, 614 bp, Homo sapiens
tggacaggaacagaggtgagcctgcctgggggttggaaatagtctatgcattgatctagttcctggatacaagattgtatacatatgtaaagatccactgaacagttaaaatatacaaatcttaatgtgtgaaaagtatatatcattaaaatgtggggagactactaccagccaaatctgtgacaatgggagcatcaaaaagaattgcaatggattataaaacattgaattaaaaaaaccctatgcaaatataataaaataaaatggcaggagaagggatttatctttatagaacaccaytaaatgtagatgaaatggcagaattagaaaattaccatttgcaatggctaatgtaataactaattcaggcaagaatcatcagtggatgcataatcagttggtaaatgttatgggggaagaggatattcaagtgtctcaaagtatcatccctcatttcacctattaattaaaagaaaaaagggcatttttataatagagacatgacagacaccaccttaaccatgtgatttaactttgcaaattcaataacaggacaaattggttttgcatgcctccagaggtaatgcaaagcaaaggacacaacatcatatgtg

SEQ ID NO: 136554 - DNA, 614 bp, Homo sapiens
tggacaggaacagaggtgagcctgcctgggggttggaaatagtctatgcattgatctagttcctggatacaagattgtatacatatgtaaagatccactgaacagttaaaatatacaaatcttaatgtgtgaaaagtatatatcattaaaatgtggggagactactaccagccaaatctgtgacaatgggagcatcaaaaagaattgcaatggattataaaacattgaattaaaaaaaccctatgcaaatataataaaataaaatggcaggagaagggatttatctttatagaacaccactaaatgtagatgaaatggcagaattagaaaattaccatttgcaatggctaatgtaataactaattcaggcaagaatcatcagtggatgcataatcagttggtaaatgttatgggggaagaggatattcaagtgtctcaaagtatcatccctcatttcacctattaattaaaagaaaaaagggcatttttataatagagacatgacagacaccaccttaaccatgtgatttaactttgyaaattcaataacaggacaaattggttttgcatgcctccagaggtaatgcaaagcaaaggacacaacatcatatgtg

SEQ ID NO: 136555 - DNA, 581 bp, Homo sapiens
gggcaaaatccataagccttggtggcttccatgtgatgttaagcctgcagttgggcagaatgcaagagtgaaggaggcttggcagcatccacctagattttatattggaaaaatgtattggatgtattggaaagcctgggtgtccaggaagaagcctgctgtaggggtgggatccccatagagagaccctactagagtagtgtcaacggaaaatgtggggttagagcccccacacagagtccccaccagggtgctgcctagtggagctgtgagaatggtagagatattggcagtgcgcaccctcagtctgggaaagccataagcattcaactacaacccagcagggcagtcaacatggacagctccccaaaaggccatggggacagggcttactaaggccttgggagcccacactttgcaccggtrtgctcaggatgcaggacatggtgtcaaggattattctggagctttaagatttagtgtcttccctactgggtttcagacttgcatggagcctgttgccctttccttttggctgatttctcccttttggaataggaatgtttacccaatgcccaaac

SEQ ID NO: 136556 - DNA, 652 bp, Homo sapiens
aactggtctgcatgggtcataacggggtgtcccagcctgtttccttggtcagttggggaacagtgccccaccagctctgaggcgtgggagggaggcagactccactcccctggagatctaacccttgctgcagactgtccctaaaggaggggagagtgcagcccaccaaagacccccttggataaaagaaaacatgrgtgcagtgccagccactgaaggtggtaccaccaaagcctgggaatggacatggagagggggtcacacttgctccgccacccttcttctcagtgccctgtcatggatttggaagtgactcttcactttggagtctggggaatgcgggttgaaagagtctgtgtctcaagcttctccagcagctctgccctactgagggtgaatgtgctctgcagaggtgctttttgtacttctctagtgcttccacccctgcttgtacccatcagttcttactcttaagcaccatctactagactgcatcctgaattacgccaccaaataaaattacattgctacaacaaacaacctctgagaaagtcactgcatgaacctacttgcaaccaaggaacctgtacagagagttggcactctgaaagcacctagaaatgaagccaattaatcatacacaatatacatc

SEQ ID NO: 136557 - DNA, 519 bp, Homo sapiens
atattttggataaagactgctgaacctgtttgctactactcccattgagaggtggagtctaaatccccttctctcaaacctggactatcctagtgatttgattgaccaacagactgtagccgaattgatggtgcatgaaatccaaggttaggtcagaagaagtcctggagcttccatcttggtttctttgaacgtttactttggggagaggccctcttggaacccagttgccctgtagtgagaagcccacgccacaaggagaggccatggcaggtgccatgagtgacagcccagccatgtgagtcagccattttggatgttcattccagtcagcctctagatgtttgcagtcccagcagcaggctttgctggagaatttaggagaatttagaatgcagtcccagcagcatttaggttgggaggaaggscattttaaacagagggagtgtcagaaacacaaaagcatccagttagtcttgggaatgtaagtggatcaatttggctgttgcacaggagttg

SEQ ID NO: 136558 - DNA, 508 bp, Homo sapiens
cctgctgccatgtgacgaaggacatgtttgcttcctcttctgccatggttgtaagtttcctgaggcctcctcagcccttcaaaaccgtgagtcaattaaaccttcctcctttataaattacccagtcttgggtatgtctttattagcagcgtgagaacggactaacacactgcctttggcatcacatggtgttctcggtgggtgtttctgcatggtcttccccctgtgggtgcctgtctttctgtatctaaatttccctttcttataaggacrcagtcatattggattagaacccaccctaatgatcttaacttaaatatatctgcaagagcttgtttccaaataagttcacattcataggtcctgggggttaggatgaacatatcttttgggtggggggaaaaatttaacccacaacaccctcttttgccctctctagtggttccacagctggttaaggagatgattttcagattgacctgtcttctgtgtcctgcagtgaccttta

SEQ ID NO: 136559 - DNA, 508 bp, Homo sapiens
cctgctgccatgtgacgaaggacatgtttgcttcctcttctgccatggttgtaagtttcctgaggcctcctcagcccttcaaaaccgtgagtcaattaaaccttcctcctttataaattacccagtcttgggtatgtctttattagcagcgtgagaacggactaacacactgcctttggcatcacatggtgttctcggtgggtgtttctgcatggtcttccccctgtgggtgcctgtctttctgtatctaaatttccctttcttataaggacgcagtcatattggattagaacccaccctaatgatcttaacttaaatatatctgcaakagcttgtttccaaataagttcacattcataggtcctgggggttaggatgaacatatcttttgggtggggggaaaaatttaacccacaacaccctcttttgccctctctagtggttccacagctggttaaggagatgattttcagattgacctgtcttctgtgtcctgcagtgaccttta

SEQ ID NO: 136560 - DNA, 592 bp, Homo sapiens
acaataaattcagcgaggtaggtataaagaacacaagtgtaaacatatgaattaaaacctagtttctctaatacatgaagatgtttaaatggtatttatgagtggaaactgttttcctttttgacactccctagtaggccctagtggttctttaggaaatctctgtgggcagccatggtaactttggtctgtaacctctttttataaccttctattcttggcaaagaagyagttgacacagaaatcaagccagatgttcatcctggaattatggcacagggcggggggttggggagagggtgaaggagtatctctgggggagattggagctctaccaagagcagacaaattttccgcctcagcttttctttcctcccaaagtatgtcttaccttaaatttgggaacatcctaaggaaaagctaatattatatatattctttgcattactaagaatattgaataactagaaggggagatgttttggtctgttattcttagtaatggttcaagattaaaataattttactaataaaataaaaataacctttgtgactccatcatgagagagcaagcaagaggggggacgaaaga

SEQ ID NO: 136561 - DNA, 567 bp, Homo sapiens
gtgtaggccagacgcagtggctcacgcctgtaatctcaacactttgagaggccgaggccagcagattacttgaggtcargagtttgagaccagcctggccaacatggtgaaagcctgtctctactaaaaatacaaaaattagctgggcgtggcggcaggtgcctgtaatgccagctgctcaggaggctgaggcaggagaattgcttgaactcagcaggcagaggttacagcgagccgagatggcacaactgcactccagtctgggtgccagagggagactccatctcaaaaaaagtgtaaaatgttcacagaatatgagcttttattatgagaacatgatggggagggcattgtactttagtcactaaattcttagaagtaaaatacacactactactacatttgtctaggcaataagttttctctaatatgaaaaagttatgcccatatttgactatttatcatttcaaagtatcgttttcaccatgtcctctttggagacgatatcctatctgcctctcattttacagtgtttgaatatttaagctaattttatataatatctga

SEQ ID NO: 136562 - DNA, 569 bp, Homo sapiens
cctttaataaaagcactttatttggaatatttaaataaaaaactaatttagccatgtattagaagtgatcatttatgtagtagttcaaaagccccttgtcctttaaagcaaaaaatggtataatttatgaggacagactataggttctatgtgttgtcaccagaacgtgtcaggtatttttactgaatacatatctttgttatgattgggctagaagacaacagttctttttcttgccaaatttgagcatttggctttaaaatcatgatcctattcaggtcatcaatggggaatrtgtcagtgaaagtaaaattctgttatggtgcattttaggtggtttatttaaatgcatcttctggtgggctaatactaccttttgcatctaaaaaaggagtcattttaacagtgagctttaaaatgtacacaagtgtccagaattctgatcacctctataacatcagagtgtaatgataatttttaaattatttttagctgccaaagtccaggttcccctatcactcacaagctgaaacactcatgataaatttgagagactctaataaccttaa

SEQ ID NO: 136563 - DNA, 502 bp, Homo sapiens
aagttccaaaccccgaagtatggcttctacggaatgtggattgtctttgcaccastgtaaagtcgaaacatcttaagttaaaccatagaaagtcaggcaccgtctgtgtgttcaatgttacttggcccctatatgcctttttgtgtgtgaatactactctaaaacatttgtggggatcttcagagaagcggtccagcctcagttttgcacaggttttttgcccaatttttcttgcttcaacaccaacagttttgcttgaagttggggcatgctcatgaaagagaaagaagtaggttgtaacagggaagtaaaatctggctttaagcttttcgtgggtttttttttttaaaataagctgaaccgtgattgctctctcaagcccaatttcctagtgtagaggctgactctagggaggttggtttgattccaaaacaatgcagaatttctcaacaggcaccatctctcccagtaggagtggcaggcaggtaaagcaacctgccaa

SEQ ID NO: 136564 - DNA, 533 bp, Homo sapiens
atacaaatcatctgtaatgtgaaacaaaacaaaattaagagttttagctcaatttgtaggaagaaataatttctagaaaaaaattacataaaagcaaggyggatttgtaagtgtagatcttcaagttaacactgccactttagatggtaactattttaataatccctcaattttaagctactgtaaaaagatgagctgaagagttatcaaaatgcttataccagtctactttcaggaatctgttttagaacgagcgtgttgaatatattttgttatattcctcagaaacacttttaaaaatcttaaactttttaaattaccattgtggtaacaaatgacattctcaagttaaaaaataaataatattcctaaaataatgttctttcccctgagacccccttagaaggtagcggtccgtaacgcagtcagatatctaggatttccaaaacaccactcatgactattaaaggatgctgaaaaacaccattacatcaatgacagaaagggcatgtctattcttatttctggaattc

SEQ ID NO: 136565 - DNA, 618 bp, Homo sapiens
aatgggaacatcacactctgcggactgttgtggggttsggggagggaggagggatagctttaggagatatacctaatgctaaatgacgagttaatgggtgcagcacaccagcatggcacatgtatacatatgtaactaacctgaacaatgtgcacatgtaccgtaaaacttaaagtataataataataaaataaaataaaataaaagatataaacggaagttcaaaaccacaaaaaaagagaaaaatactttatctgatattattatagccactgcatctttcttttgattgggtttttcatagtatttttcaattctttaacttttaaattatttgtgtctttataattaaagtgagtttctaatagaaagcatataactgagtcctgctgttttaacaatgtcttttaatggagtgcttagaggattttcttttgatataattattgatatggttagtttaaaaagtgtcattttgttagttgcattgtttgtccaaattgttctttgtttcccttttctctctcttcctgcttttttgtattagcaaattatttttcataattttatttaatctcaaattatttatcatgccttttttaggagttgccatagaat

SEQ ID NO: 136566 - DNA, 587 bp, Homo sapiens
agccttcctcatgttgttttaaatgtcaaatatagccattagtcctctttaaatggtggattttatttttgtaaacatccaaagtttattcagagccaagtttgatgttaaatcgaccaagtcttcttttaaataaaaataattttgatcacaaaacaataaaatttagttatgtgaagaataaaagaataaatccaaagaaaattacaataaaaagggacaaaaagttttgaacagtggcaaatatcactgggttaaatgtagttttcccaacatgactaccctggagaagatgacatctttcrgtaagtttcagatgcttgctaaaattatataatattatttgccctcctatttcagtttcctagaaaactgaactcaacttattttatcccgtgttaaacaacaatcaaaacaatataatcaggatactgtgtagaaatttttttcctaatttatggcacccaaataaacacaaaagcacatcaacccatttcacattgctccagaaatacggattttctttgtatttgaaagcaatgtgtcacaagagcacaagacatggaatgtgataatctgaatattag

SEQ ID NO: 136567 - DNA, 565 bp, Homo sapiens
cctaaaacacatggaaaagctatgaagaggtcgggggacaagggccctccatatataaagaccttcattcacaaaggatgtgttgagataacattttataaactgtacttagaaatctattctcgaaactgcttgccaactcccgaaatccctttaagcaaggagaaaagcctttcagtttaacttcataaagagaaaaccataaaatgcaagtacttcatagaggttaaaaggtaaaatacattattttgaaagcataaaccaccacagggcagacaaatgactcagagcttccccagttttgttataggggaaaggctgaagctgggagaagagcctttagtatccagaggagatgccagaatatttgggaataggaagtcatggaaagaagcttctagaacatcactcttcatctgagatcagtcctgtcttctccataacagaaaaggaacaagaagcttttttttttttaattattatactttaagttttagggtacatgtgcacaacgtsgaggttagttacatatgtatccatgtgccatgttggtgtgctgcaccca

SEQ ID NO: 136568 - DNA, 565 bp, Homo sapiens
cctaaaacacatggaaaagctatgaagaggtcgggggacaagggccctccatatataaagaccttcattcacaaaggatgtgttgagataacattttataaactgtacttagaaatctattctcgaaactgcttgccaactcccgaaatccctttaagcaaggagaaaagcctttcagtttaacttcataaagagaaaaccataaaatgcaagtacttcatagaggttaaaaggtaaaatacattattttgaaagcataaaccaccacagggcagacaaatgactcagagcttccccagttttgttataggggaaaggctgaagctgggagaagagcctttagtatccagaggagatgccagaatatttgggaataggaagtcatggaaagaagcttctagaacatcactcttcatctgagatcagtcctgtcttctccataacagaaaaggaacaagaagcttttttttttttaattattatactttaagttttagggtacatgtgcacaacgtcsaggttagttacatatgtatccatgtgccatgttggtgtgctgcaccca

SEQ ID NO: 136569 - DNA, 629 bp, Homo sapiens
gagcattacaccacaaaatattctcatgtaaaagatgacaaaatatacttattgtgggaatttttctgaaacctaaaacacaggaggttagagactagctgaatgagaatttcaaatgcccatcaatagctttttcttttcagatctaatttcccactgactccttcaaaaaaaaacttcatagagaattattacagtttacctcgtggtcatcactttcttgcaaggatgaacagacacacttcaaatttgtttatccaatagaagtattcatcaaaaaaattttttttctcccaagtacccttctaaagcctagcactgggcctcctcagaccacaagacaaaggctactgtatgtgttcatggaccaaagcatgtctccatcgattccatgtgacggtccaaatcctccagctgtaaagggttctgcagcattgaacactgctttgactacaatgtgaggcccagagaggctaaacaacgtgacaaagaccactcaggcaaagccagcgtcggtgagytcgtgaggacgttcaagtcacactcaaccacagcacagtggaaacaataccacagaaatcctaaagcaaataaaagaaagctcttctttcatgttgaatgctgctatt

SEQ ID NO: 136570 - DNA, 353 bp, Homo sapiens
tttgtctctaagatgtattcaattaaagaatttatcgctgaattttgtactaagacatactaaaaccaaaagccagaacatcatattaaacatgaaattatttgatatatgcagtaaaagagaattgaaagcattatttccaaatcaatcataccacatacattcagacaactatgagtctagcatatcaagaaaaaatcctctcatggtctcgcactttgctttacatttgtttttccagtaagattcgacgttttgggtatgcamaccaaaagccaacacgaagtgaacgttgaatcattatggttaacctgagcatgctggaaaccaaggaaaggctgaatgttatttta

SEQ ID NO: 136571 - DNA, 567 bp, Homo sapiens
atattttttcactcattattctattccttttctaattgattttcaagaattttttcattctgaatactaatatcttgtcttttatttccattgcaaatatttktttacaaatttattttgagctacaggattttaactgtattccttctaagcatatagccaattaaccatgccatttattgaataatctgtcccttccttattgacttgaaattttacctttaatatagaaaaatccttataaacacattggcctatttttttaaacaattttgttctacttatttatttattaagttcttaggtcattgtttctattagtatggtttttactataataagagtgctccttgccccttttttttttctttataggacttaatgtgctatggaatattatatatttacttgctgttttattaattgttcattatttatccttcccactagaatgtaagctccatgggggaagaatgtcagttcattcacaatgaatctcgagtgagacataatagttactcaaatataagttaatcagataaatgaatgaattaattaaaaacttta

SEQ ID NO: 136572 - DNA, 567 bp, Homo sapiens
atattttttcactcattattctattccttttctaattgattttcaagaattttttcattctgaatactaatatcttgtcttttatttccattgcaaatatttgtttacaaatttattttgagctacaggattttaactgtattccttctaagcatatagccaattaaccatgccatttattgaataatctgtcccttccttattgacttgaaattttacctttaatatagaaaaatccttataaacacattggcctatttttttaaacaattttgttctacttatttatttattaagttcttaggtcattgtttctattagtatggtttttactataataagagtgctccttgccccttttttttttctttataggacttartgtgctatggaatattatatatttacttgctgttttattaattgttcattatttatccttcccactagaatgtaagctccatgggggaagaatgtcagttcattcacaatgaatctcgagtgagacataatagttactcaaatataagttaatcagataaatgaatgaattaattaaaaacttta

SEQ ID NO: 136573 - DNA, 567 bp, Homo sapiens
atattttttcactcattattctattccttttctaattgattttcaagaattttttcattctgaatactaatatcttgtcttttatttccattgcaaatatttgtttacaaatttattttgagctacaggattttaactgtattccttctaagcatatagccaattaaccatgccatttattgaataatctgtcccttccttattgacttgaaattttacctttaatatagaaaaatccttataaacacattggcctatttttttaaacaattttgttctacttatttatttattaagttcttaggtcattgtttctattagtatggtttttactataataagagtgctccttgccccttttttttttctttataggacttaatgtgctatggaatattatatatttacttgctgttttattaattgttyattatttatccttcccactagaatgtaagctccatgggggaagaatgtcagttcattcacaatgaatctcgagtgagacataatagttactcaaatataagttaatcagataaatgaatgaattaattaaaaacttta

SEQ ID NO: 136574 - DNA, 493 bp, Homo sapiens
gtttgttgcttgcctgtcctgcatcatctggctaccatgaagtgatgaagatgacaagaaagaggcagtgaccaatatggcagtgagacaacagacagagcagcgatcagtggagagacagtgagccagtagtgatcagaaaagaggcaaaaagatagcagagaggtggcaattggagatagatggagagatggtggtcagtaggacagcaagacagcaagaggaagtgatttacaagagatggtgagatggtaatcagtgccagagctgtaacactagccaaagtctctttgaagagccatcatctttcctggtgggcagcagacctgagtgaatggacaggcaaccataacactgtcacctcatgtgggacctgctattctggccrtcaggccaatgggtcactagtcatcatgtctgtccccatgtgacacctgagcccactcaagttgagggaacctgtagagaccttcacccaggtcacacgtggaag

SEQ ID NO: 136575 - DNA, 493 bp, Homo sapiens
gtttgttgcttgcctgtcctgcatcatctggctaccatgaagtgatgaagatgacaagaaagaggcagtgaccaatatggcagtgagacaacagacagagcagcgatcagtggagagacagtgagccagtagtgatcagaaaagaggcaaaaagatagcagagaggtggcaattggagatagatggagagatggtggtcagtaggacagcaagacagcaagaggaagtgatttacaagagatggtgagatggtaatcagtgccagagctgtaacactagccaaagtctctttgaagagccatcatctttcctggtgggcagcagacctgagtgaatggacaggcaaccataacactgtcacctcatgtgggacctgctattctggccatcaggccaatgggycactagtcatcatgtctgtccccatgtgacacctgagcccactcaagttgagggaacctgtagagaccttcacccaggtcacacgtggaag

SEQ ID NO: 136576 - DNA, 493 bp, Homo sapiens
gtttgttgcttgcctgtcctgcatcatctggctaccatgaagtgatgaagatgacaagaaagaggcagtgaccaatatggcagtgagacaacagacagagcagcgatcagtggagagacagtgagccagtagtgatcagaaaagaggcaaaaagatagcagagaggtggcaattggagatagatggagagatggtggtcagtaggacagcaagacagcaagaggaagtgatttacaagagatggtgagatggtaatcagtgccagagctgtaacactagccaaagtctctttgaagagccatcatctttcctggtgggcagcagacctgagtgaatggacaggcaaccataacactgtcacctcatgtgggacctgctattctggccatcaggccaatgggtcactagtcatcatgtctgtccccatgtgrcacctgagcccactcaagttgagggaacctgtagagaccttcacccaggtcacacgtggaag

SEQ ID NO: 136577 - DNA, 399 bp, Homo sapiens
ataacattaactgtgtaaagttttttatctttgaacatttatttatcrtttttaaaattaagctaagataatcataactaaatttaactttttaaaattgtacactttaatgacattaaatacatttaacttgttgtgcaaacatcaccaccatccatctgcagtactctttgcattttgcaaaattgaaggtctgtacccattaacctataatatccttttcctccttctcagtttgtggaaatcaccactctattttccgcctttatgtatttggctactctaggtaccttatataaattaaatcatacaatatttgtacttttgtgactgatttatttaacttagaataattttctcaagttattcatgttatatcatgtatcacaattttcttcc

SEQ ID NO: 136578 - DNA, 399 bp, Homo sapiens
ataacattaactgtgtaaagttttttatctttgaacatttatttatcatttttaaaattaagctaagataatcataactaaatttaactttttaaaattgtacactttaatgacattaaatacatttaacttgttgtgcaaacatcaccaccatccatctgcagtactctttgcattttgcaaaattgaaggtctgtacccattaacctatratatccttttcctccttctcagtttgtggaaatcaccactctattttccgcctttatgtatttggctactctaggtaccttatataaattaaatcatacaatatttgtacttttgtgactgatttatttaacttagaataattttctcaagttattcatgttatatcatgtatcacaattttcttcc

SEQ ID NO: 136579 - DNA, 399 bp, Homo sapiens
ataacattaactgtgtaaagttttttatctttgaacatttatttatcatttttaaaattaagctaagataatcataactaaatttaactttttaaaattgtacactttaatgacattaaatacatttaacttgttgtgcaaacatcaccaccatccatctgcagtactctttgcattttgcaaaattgaaggtctgtacccattaacctatamtatccttttcctccttctcagtttgtggaaatcaccactctattttccgcctttatgtatttggctactctaggtaccttatataaattaaatcatacaatatttgtacttttgtgactgatttatttaacttagaataattttctcaagttattcatgttatatcatgtatcacaattttcttcc

SEQ ID NO: 136580 - DNA, 399 bp, Homo sapiens
ataacattaactgtgtaaagttttttatctttgaacatttatttatcatttttaaaattaagctaagataatcataactaaatttaactttttaaaattgtacactttaatgacattaaatacatttaacttgttgtgcaaacatcaccaccatccatctgcagtactctttgcattttgcaaaattgaaggtctgtacccattaacctataatatccttttcctccttctcagtttgtggaaatcaccactctattttccgcctttatgtatttggctactctaggtaccttatataaattaaatcatacaatatttgtacttttgtgwctgatttatttaacttagaataattttctcaagttattcatgttatatcatgtatcacaattttcttcc

SEQ ID NO: 136581 - DNA, 634 bp, Homo sapiens
gacttggaaatatttgggggaccattattcttcctacccagggacatctttggggtttttttataaatgtaacaygccatattaatgtttaaaaatccaatctcaaaagtaatttacctcttaattgctctctctttttttctcctttcttttccccctccttccctttctcgatccacacaattgtaaatactaccagagaatatttcaaaaaatatattttagaaatattatcagccaactaactacggtcttttctgagccattatatattactttgtgtggtaatgatttttgaatatatttgttttcttcattagatcatgtgcctcagacacttcagccttctcttagtcttatgtttctaaatttaatatgctgccaacaggtggagcacaagatgaatgtggtttgactgtatagaagactttacagattaatagaggccttgacatgctaagaagtttgcctaaggtcaccaagaatactctctgtcttctgtctataaacattcctcatcagtacaaaaaaccaacaatgtgacacttattcattcaaaagtatttgttgaggattgtatgtatgacaggtattttttgtaagcactgaaactccattagcaatcaaaatggac

SEQ ID NO: 136582 - DNA, 634 bp, Homo sapiens
gacttggaaatatttgggggaccattattcttcctacccagggacatctttggggtttttttataaatgtaacacgccatattaatgtttaaaaatccaatctcaaaagtaatttacctcttaattgctctctctytttttctcctttcttttccccctccttccctttctcgatccacacaattgtaaatactaccagagaatatttcaaaaaatatattttagaaatattatcagccaactaactacggtcttttctgagccattatatattactttgtgtggtaatgatttttgaatatatttgttttcttcattagatcatgtgcctcagacacttcagccttctcttagtcttatgtttctaaatttaatatgctgccaacaggtggagcacaagatgaatgtggtttgactgtatagaagactttacagattaatagaggccttgacatgctaagaagtttgcctaaggtcaccaagaatactctctgtcttctgtctataaacattcctcatcagtacaaaaaaccaacaatgtgacacttattcattcaaaagtatttgttgaggattgtatgtatgacaggtattttttgtaagcactgaaactccattagcaatcaaaatggac

SEQ ID NO: 136583 - DNA, 634 bp, Homo sapiens
gacttggaaatatttgggggaccattattcttcctacccagggacatctttggggtttttttataaatgtaacacgccatattaatgtttaaaaatccaatctcaaaagtaatttacctcttaattgctctctctttttttctcctttcttttccccctccttccctttctcgatccacacaattgtaaatactaccagagratatttcaaaaaatatattttagaaatattatcagccaactaactacggtcttttctgagccattatatattactttgtgtggtaatgatttttgaatatatttgttttcttcattagatcatgtgcctcagacacttcagccttctcttagtcttatgtttctaaatttaatatgctgccaacaggtggagcacaagatgaatgtggtttgactgtatagaagactttacagattaatagaggccttgacatgctaagaagtttgcctaaggtcaccaagaatactctctgtcttctgtctataaacattcctcatcagtacaaaaaaccaacaatgtgacacttattcattcaaaagtatttgttgaggattgtatgtatgacaggtattttttgtaagcactgaaactccattagcaatcaaaatggac

SEQ ID NO: 136584 - DNA, 634 bp, Homo sapiens
gacttggaaatatttgggggaccattattcttcctacccagggacatctttggggtttttttataaatgtaacacgccatattaatgtttaaaaatccaatctcaaaagtaatttacctcttaattgctctctctttttttctcctttcttttccccctccttccctttctcgatccacacaattgtaaatactaccagagaatatttcaaaaaatatattttagaaatattatcagccaactaactayggtcttttctgagccattatatattactttgtgtggtaatgatttttgaatatatttgttttcttcattagatcatgtgcctcagacacttcagccttctcttagtcttatgtttctaaatttaatatgctgccaacaggtggagcacaagatgaatgtggtttgactgtatagaagactttacagattaatagaggccttgacatgctaagaagtttgcctaaggtcaccaagaatactctctgtcttctgtctataaacattcctcatcagtacaaaaaaccaacaatgtgacacttattcattcaaaagtatttgttgaggattgtatgtatgacaggtattttttgtaagcactgaaactccattagcaatcaaaatggac

SEQ ID NO: 136585 - DNA, 440 bp, Homo sapiens
ttgtttctttttcccggagttgattattttcatcaaatatagctatttcacttgatgtttgcttttatttaaatacctacacactgctatttcttggtttatcaattttcaataccctctattaacttctcatttctttgrtaaagacattattctcaagtgtctccccccactaatatttatgctcccaatatactgataccacaattttaaaaaatgtaatgtttactgaggcaagtatttcacaattcttacattctttttcctgtaaaaggttttgtattttctttggttaatagctgccctgattgtgttcatttgtttccactgttttcaaacatgatcaatcaattctgtaaaatttctgttactattgtgttccaaaccaccaaaacattatataatatgaattgaaactttatttcaaagagatataattt

SEQ ID NO: 136586 - DNA, 440 bp, Homo sapiens
ttgtttctttttcccggagttgattattttcatcaaatatagctatttcacttgatgtttgcttttatttaaatacctacacactgctatttcttggtttatcaattttcaataccctctattaacttctcatttctttgataaagacattattctcaagtgtctccccccactaatatttatgctcccaatatactgataycacaattttaaaaaatgtaatgtttactgaggcaagtatttcacaattcttacattctttttcctgtaaaaggttttgtattttctttggttaatagctgccctgattgtgttcatttgtttccactgttttcaaacatgatcaatcaattctgtaaaatttctgttactattgtgttccaaaccaccaaaacattatataatatgaattgaaactttatttcaaagagatataattt

SEQ ID NO: 136587 - DNA, 440 bp, Homo sapiens
ttgtttctttttcccggagttgattattttcatcaaatatagctatttcacttgatgtttgcttttatttaaatacctacacactgctatttcttggtttatcaattttcaataccctctattaacttctcatttctttgataaagacattattctcaagtgtctccccccactaatatttatgctcccaatatactgataccacaattttaaaaaatgtaatgtttactgaggcaagtatttcacaattcttacattctttttcctgtaaaaggttttgtattttctttggttaatagctgccctgattgtgttcatttgtttccaytgttttcaaacatgatcaatcaattctgtaaaatttctgttactattgtgttccaaaccaccaaaacattatataatatgaattgaaactttatttcaaagagatataattt

SEQ ID NO: 136588 - DNA, 467 bp, Homo sapiens
ttgataaataagacattgatattggtttaataaaaatagctacatctggaattatttagtacagttaccataacggccttaagcagtctattccacaggtagtaaggagctttgttttgagaaagaactgttcttatctttgtttcaaagctaaacyataaactaagttccctccaaagttactatggcctatgttcaggaataaacaaggacagctggaggttagaaacaggatggagtcagttaggtgagatatgtttcactgtctcagttataattttgcaatggtagttttataacttacataataactattgcagttttcataaaaaatctatgtaaatgattaaaataattaggtaaatgtaataggataaaaacttgtagacaaacatgacaatttaatatctaaagttaaataatagatatttcattattttggtattttttgataataatatattgta

SEQ ID NO: 136589 - DNA, 467 bp, Homo sapiens
ttgataaataagacattgatattggtttaataaaaatagctacatctggaattatttagtacagttaccataacggccttaagcagtctattccacaggtagtaaggagctttgttttgagaaagaactgttcttatctttgtttcaaagctaaaccataaactaagttccctccaaagttactatggcctatgttcaggaataaacaaggacagctggaggttagaaacaggatggagtcagttaggtgagatatgtttcactgtctcagttataattttgcaatggtagttttataacttacataataactattgcagttttcataaaaaatctatgtaaatgattaaaataattaggtaaatgtaataggataaaaacttgtagacaaacatgacaatttaatatstaaagttaaataatagatatttcattattttggtattttttgataataatatattgta

SEQ ID NO: 136590 - DNA, 504 bp, Homo sapiens
ttcactgtagctagttaagatagcatatacagagggaaaataacaagtatsagaagttgaaagactacatataaaagaggcagaacaagatgaaagaatataaagctccatccatcatccacccccgacaccctcctgcaaagacaccaatttaataactatttacttgagcaaagcaccacaggtgagcactctcagtacctgcttttaactttgtattgttacatgatgcactgaggaggaaaaaaaagtattgaattgctgatgccacccctgccacacccactggcagcagcatggtgcagagagcatttctgtgtctggggggatggagaacacagcaaactgtgaggcactgaactcagtgctgccctgttagagcagaaaggaaaactaggccaaactcagatggcactcacccatggtgtcagcatataaactagtggtgggagtagaaaggaaaattaggccaaactcagctgacactcacccatggtgtcagca

SEQ ID NO: 136591 - DNA, 504 bp, Homo sapiens
ttcactgtagctagttaagatagcatatacagagggaaaataacaagtatgagaagttgaaagactrcatataaaagaggcagaacaagatgaaagaatataaagctccatccatcatccacccccgacaccctcctgcaaagacaccaatttaataactatttacttgagcaaagcaccacaggtgagcactctcagtacctgcttttaactttgtattgttacatgatgcactgaggaggaaaaaaaagtattgaattgctgatgccacccctgccacacccactggcagcagcatggtgcagagagcatttctgtgtctggggggatggagaacacagcaaactgtgaggcactgaactcagtgctgccctgttagagcagaaaggaaaactaggccaaactcagatggcactcacccatggtgtcagcatataaactagtggtgggagtagaaaggaaaattaggccaaactcagctgacactcacccatggtgtcagca

SEQ ID NO: 136592 - DNA, 504 bp, Homo sapiens
ttcactgtagctagttaagatagcatatacagagggaaaataacaagtatgagaagttgaaagactacatataaaagaggcagaacaagatgaaagaatataaagctccatccatcatccacccccgacaccctcctgcaaagacaccaatttaataactatttacttgagcaaagcaccacaggtgagcactctcagtacctgcttttaactttgtattgttacatgatgcactgaggaggaaaaaaaagtattgaattgctgatgccacccctgccacacccactggcagcagcatggtgcagagagcatttctgtgtctggggggatggagaacacagcaaactrtgaggcactgaactcagtgctgccctgttagagcagaaaggaaaactaggccaaactcagatggcactcacccatggtgtcagcatataaactagtggtgggagtagaaaggaaaattaggccaaactcagctgacactcacccatggtgtcagca

SEQ ID NO: 136593 - DNA, 458 bp, Homo sapiens
ttgcaaactacccatctgataagkgactaataaccagaaaatataagaagctcaaacaactgtataggtagaaacctaataaccaaattaaaataatgggttaaagatttgaatatttattctcaaaagaagacatacaaatggaaagcaggcatatgaaaaggttttcaacatcactgatcatcagagaagtgcaaatgaaaactgcaatgagatatcatctcatctcatttaaaatggcatatattcaaaagacaggcaataacaaatgctggcagagatgtggagaaaaggaaacccttgtacactgtaacacaggcaaattatattacatttgttccatagaatactgctcagcaataaaaaagtagactcattatgcatgaaacacattggattaatctccacagaattacactcagtgaagaaagaccaatcccccaaaatcacatattgtt

SEQ ID NO: 136594 - DNA, 264 bp, Homo sapiens
gtccttacccatctccaaaacgagcactcaaatttccagcctgagactgaaatgtttgcatggccacactgccggatcaccaaagaatggctgactttgttgcacccagattaaaaatggtgttctgytctcagtcccaggtctgggaaaacgcctgcagcttttattcatgtcttttcctcacagcatctccaagcttcttctcaggttagctctcgtcttgggagaaaaaaaaaatgctctgcctcggcttgggttgcctca

SEQ ID NO: 136595 - DNA, 439 bp, Homo sapiens
gcagtctggggcacacagttatgggacacatagattggttctaggtcatcaaggtggctttggctgcaaggttcacagcccaggagaaattgcagctatagcagctctcctcctgctgcaggtttgagatgggggagagcaaaattccattgcttactgctgaggcactttccacagttctagctgtgaatgtccttacccatctccaaaacgagcactcaaatttccagcctgagactgaaatgtttgcatggccacactgccggatcaccaaagaatggctgactttgttgcacccagattaaaaatggtgttctgttctcagtcccasgtctgggaaaacgcctgcagcttttattcatgtcttttcctcacagcatctccaagcttcttctcaggttagctctcgtcttgggagaaaaaaaaaatgctctgcctc

SEQ ID NO: 136596 - DNA, 264 bp, Homo sapiens
gtccttacccatctccaaaacgagcactcaaatttccagcctgagactgaaatgtttgcatggccacactgccggatcaccaaagaatggctgactttgttgcacccagattaaaaatggtgttctgttctcagtcccaggtctgggaaaacgcctgcagcttttattcatgtcttttcctcacagcatctccaagcttcttctcaggttagctctcgtcttgggagaaaaaaaaaatrctctgcctcggcttgggttgcctca

SEQ ID NO: 136597 - DNA, 603 bp, Homo sapiens
ccaactaacaacagcccttcaccttttgcactttaaagaactcaatacattttgtattctgtatgtatttttaaggctgactgcagggagtcaaattcagtgttcaaaaacaggattctacttaagttctgaaaacccctgctrcaagaaccatctttctcttctttgcttcattttcctttttacctagatcagcagaaaactcatattgcttttcctctcattcaactctgaatatctttgtttctaatataacaagagctaataagtactaagttatcagagcagtcattaagaagaaaacacctacaattcatattatttgaaagacatctaaatgttgaaaagagcaaaatgttattgaaagggaaaattgatgcatagcatgacaaaggaataatgtgttcaacttaatcaaatatttgtgaaatatttatctctcatatatccatatggatatatacacacatatgtacgtaaaatatttaattcattctttctttcctttattaactctttatcaagcccttatcatttgccaagtaattttctagtgaagagtgggatgcatttgcaaatgaaatggttctcttttctagagag

SEQ ID NO: 136598 - DNA, 603 bp, Homo sapiens
ccaactaacaacagcccttcaccttttgcactttaaagaactcaatacattttgtattctgtatgtatttttaaggctgactgcagggagtcaaattcagtgttcaaaaacaggattctacttaagttctgaaaacccctgctacaagaaccatctttctcttctttgcttcattttcctttttacctagatcagcagaaaactcatattgcttttcctctcattcaactctgaatatctttgtttctaatataacaagagctaataagtactaagttatcagagcagtcattaagaagaaaacrcctacaattcatattatttgaaagacatctaaatgttgaaaagagcaaaatgttattgaaagggaaaattgatgcatagcatgacaaaggaataatgtgttcaacttaatcaaatatttgtgaaatatttatctctcatatatccatatggatatatacacacatatgtacgtaaaatatttaattcattctttctttcctttattaactctttatcaagcccttatcatttgccaagtaattttctagtgaagagtgggatgcatttgcaaatgaaatggttctcttttctagagag

SEQ ID NO: 136599 - DNA, 603 bp, Homo sapiens
ccaactaacaacagcccttcaccttttgcactttaaagaactcaatacattttgtattctgtatgtatttttaaggctgactgcagggagtcaaattcagtgttcaaaaacaggattctacttaagttctgaaaacccctgctacaagaaccatctttctcttctttgcttcattttcctttttacctagatcagcagaaaactcatattgcttttcctctcattcaactctgaatatctttgtttctaatataacaagagctaataagtactaagttatcagagcagtcattaagaagaaaacacctacaattcatattatttgaaagacatctaaatgttgaaaagagcaaaatrttattgaaagggaaaattgatgcatagcatgacaaaggaataatgtgttcaacttaatcaaatatttgtgaaatatttatctctcatatatccatatggatatatacacacatatgtacgtaaaatatttaattcattctttctttcctttattaactctttatcaagcccttatcatttgccaagtaattttctagtgaagagtgggatgcatttgcaaatgaaatggttctcttttctagagag

SEQ ID NO: 136600 - DNA, 603 bp, Homo sapiens
ccaactaacaacagcccttcaccttttgcactttaaagaactcaatacattttgtattctgtatgtatttttaaggctgactgcagggagtcaaattcagtgttcaaaaacaggattctacttaagttctgaaaacccctgctacaagaaccatctttctcttctttgcttcattttcctttttacctagatcagcagaaaactcatattgcttttcctctcattcaactctgaatatctttgtttctaatataacaagagctaataagtactaagttatcagagcagtcattaagaagaaaacacctacaattcatattatttgaaagacatctaaatgttgaaaagagcaaaatgttattgaaagggaaaattgatgcatagcatgacaaaggaataatgtgttcaacttaatcaaatatttgtgaaatatttatctctcatatatccatatggatatatacacacatatgtacgtaaaatatttaattcattctttctttcctttattaactctttatsaagcccttatcatttgccaagtaattttctagtgaagagtgggatgcatttgcaaatgaaatggttctcttttctagagag

SEQ ID NO: 136601 - DNA, 537 bp, Homo sapiens
acaatgagatgccagactcattcatcatgattgcttccccctccctaaatgctgttttcctaactgaccactgcttcttgttgaccaacacctctttcttatttttttttgttttttatttttttttttttgagatggagtctcactctgtcacccaggctggagtgcagtggtgctatctcgactcactgcaagctctgcctcttgggttcaggccattctcctgtctcaacctcccgactagctgggactayggagcccaccaccacacctggctaattttttgtatttatttttagtacagacagggtttcacctcgttaagccaggatggtctcaatctcctgacctcgtgatccgcccgcctcggcctcccaaagtgctgggattataggcatgagccacgactttcattttttcttccacaaacgcaccattattaattttcaccactgtgaatactgaaaatcgtaatgctttccttggttattctagagtcaattgtataactgttattttagaggtgtgggaaaggcc

SEQ ID NO: 136602 - DNA, 537 bp, Homo sapiens
acaatgagatgccagactcattcatcatgattgcttccccctccctaaatgctgttttcctaactgaccactgcttcttgttgaccaacacctctttcttatttttttttgttttttatttttttttttttgagatggagtctcactctgtcacccaggctggagtgcagtggtgctatctcgactcactgcaagctctgcctcttgggttcaggccattctcctgtctcaacctcccgactagctgggactacggagcccrccaccacacctggctaattttttgtatttatttttagtacagacagggtttcacctcgttaagccaggatggtctcaatctcctgacctcgtgatccgcccgcctcggcctcccaaagtgctgggattataggcatgagccacgactttcattttttcttccacaaacgcaccattattaattttcaccactgtgaatactgaaaatcgtaatgctttccttggttattctagagtcaattgtataactgttattttagaggtgtgggaaaggcc

SEQ ID NO: 136603 - DNA, 537 bp, Homo sapiens
acaatgagatgccagactcattcatcatgattgcttccccctccctaaatgctgttttcctaactgaccactgcttcttgttgaccaacacctctttcttatttttttttgttttttatttttttttttttgagatggagtctcactctgtcacccaggctggagtgcagtggtgctatctcgactcactgcaagctctgcctcttgggttcaggccattctcctgtctcaacctcccgactagctgggactacggagcccaccaccacacctggctaattttttgtatttatttttagtacagacagggtttcacctcgttaagccaggatggtctcratctcctgacctcgtgatccgcccgcctcggcctcccaaagtgctgggattataggcatgagccacgactttcattttttcttccacaaacgcaccattattaattttcaccactgtgaatactgaaaatcgtaatgctttccttggttattctagagtcaattgtataactgttattttagaggtgtgggaaaggcc

SEQ ID NO: 136604 - DNA, 632 bp, Homo sapiens
tttctttttataatttctgtagttttgttgatattttcattttgctcttatattgtttttctgatttttattattccatgtccatctttcccttcaggtctttcagcataagggaaacacagttactttaaaattttggctagtaagtccaagcctgtgtttctctagagacartttcttcaactttattgtttgtttgtttgtttgttttgaatggatcagatttttctgatgttttctgtatgccttgttatttttgttgctgtcaaacattgaatattcaaaaaaagcagattcctctctcagtctttgaagactggctctgagccaaggaagtcattctctaatcagcagagcattttttgagccttagaatcagcctgatatgaggctgaaggtcttctctggtcttttctgatcaggagtctcagatcagacttttaaaaattcatccttatgtgccgtatacagctgctttttaacatcttcatttcccaaagaggttcaacccagcttttcctaagagatttagactgtctattgtacatctctactcataatcttttacccccaggtgcctgtgcttctttgtctgcctgcagtataagagctgtgcctgcctctttcaacta

SEQ ID NO: 136605 - DNA, 536 bp, Homo sapiens
ttcaactttattgtttgtttgtttgtttgttttgaatggatcagatttttctgatgttttctgtatgccttgttatttttgttgctgtcaaacattgaatattcaaaaaaagcagattcctctctcagtctttgaagactggctctgagccaaggaagtcattctctaatcagcagagcattttttgagccttagaatcagcctgatatgaggctgarggtcttctctggtcttttctgatcaggagtctcagatcagacttttaaaaattcatccttatgtgccgtatacagctgctttttaacatcttcatttcccaaagaggttcaacccagcttttcctaagagatttagactgtctattgtacatctctactcataatcttttacccccaggtgcctgtgcttctttgtctgcctgcagtataagagctgtgcctgcctctttcaactatgttgcctgaactgagctccaacataagataaagaggcagctcccagaaaggttaaaacattagaaataatatctgttctgt

SEQ ID NO: 136606 - DNA, 536 bp, Homo sapiens
ttcaactttattgtttgtttgtttgtttgttttgaatggatcagatttttctgatgttttctgtatgccttgttatttttgttgctgtcaaacattgaatattcaaaaaaagcagattcctctctcagtctttgaagactggctctgagccaaggaagtcattctctaatcagcagagcattttttgagccttagaatcagcctgatatgaggctgaaggtcttctctggtcttttctgatcaggagtctcagatcagacttttaaaaattcatccttatgtgccgtatacagctgcttttkaacatcttcatttcccaaagaggttcaacccagcttttcctaagagatttagactgtctattgtacatctctactcataatcttttacccccaggtgcctgtgcttctttgtctgcctgcagtataagagctgtgcctgcctctttcaactatgttgcctgaactgagctccaacataagataaagaggcagctcccagaaaggttaaaacattagaaataatatctgttctgt

SEQ ID NO: 136607 - DNA, 536 bp, Homo sapiens
ttcaactttattgtttgtttgtttgtttgttttgaatggatcagatttttctgatgttttctgtatgccttgttatttttgttgctgtcaaacattgaatattcaaaaaaagcagattcctctctcagtctttgaagactggctctgagccaaggaagtcattctctaatcagcagagcattttttgagccttagaatcagcctgatatgaggctgaaggtcttctctggtcttttctgatcaggagtctcagatcagacttttaaaaattcatccttatgtgccgtatacagctgctttttaacatcttcatttcccaaagaggttcaacccagcttttcctaagagatttagactgtctattgtacatctctactcataatcttttacccccaggtgcctgtgsttctttgtctgcctgcagtataagagctgtgcctgcctctttcaactatgttgcctgaactgagctccaacataagataaagaggcagctcccagaaaggttaaaacattagaaataatatctgttctgt

SEQ ID NO: 136608 - DNA, 461 bp, Homo sapiens
ggaattctttaagtcataccttgcttttggaagctgagggaaaaacagaattgaagaaggtatgccctaggtcagcagtctgcagaaaatattgagtggaacaaatacacctcagaactaaygtggttttgtacaggatttttactaaaatggtttatacattttaagggtttataaaaataaataataatatgtgacagagatctttgtggtctccaaaatgtaaaatattaaatatctggccactacagataaaaagtttccttatccttaccctaggttgtaatcaaatggctttagaagtttgaagaggaaagagaagagtaaatgtttgatgcttgtcaaacttcatgaaaaaaagcttttgcactattttgcccatgtggacacctggcctaagggatgcatttttgccacagaatttcatagtgaaggggcaggtgttgattaaaacaaggcaa

SEQ ID NO: 136609 - DNA, 461 bp, Homo sapiens
ggaattctttaagtcataccttgcttttggaagctgagggaaaaacagaattgaagaaggtatgccctaggtcagcagtctgcagaaaatattgagtggaacaaatacacctcagaactaatgtggttttgtacaggatttttactaaaatggtttatacattttaagrgtttataaaaataaataataatatgtgacagagatctttgtggtctccaaaatgtaaaatattaaatatctggccactacagataaaaagtttccttatccttaccctaggttgtaatcaaatggctttagaagtttgaagaggaaagagaagagtaaatgtttgatgcttgtcaaacttcatgaaaaaaagcttttgcactattttgcccatgtggacacctggcctaagggatgcatttttgccacagaatttcatagtgaaggggcaggtgttgattaaaacaaggcaa

SEQ ID NO: 136610 - DNA, 461 bp, Homo sapiens
ggaattctttaagtcataccttgcttttggaagctgagggaaaaacagaattgaagaaggtatgccctaggtcagcagtctgcagaaaatattgagtggaacaaatacacctcagaactaatgtggttttgtacaggatttttactaaaatggtttatacattttaagggtttataaaaataaataataatatgtgacagagatctwtgtggtctccaaaatgtaaaatattaaatatctggccactacagataaaaagtttccttatccttaccctaggttgtaatcaaatggctttagaagtttgaagaggaaagagaagagtaaatgtttgatgcttgtcaaacttcatgaaaaaaagcttttgcactattttgcccatgtggacacctggcctaagggatgcatttttgccacagaatttcatagtgaaggggcaggtgttgattaaaacaaggcaa

SEQ ID NO: 136611 - DNA, 461 bp, Homo sapiens
ggaattctttaagtcataccttgcttttggaagctgagggaaaaacagaattgaagaaggtatgccctaggtcagcagtctgcagaaaatattgagtggaacaaatacacctcagaactaatgtggttttgtacaggatttttactaaaatggtttatacattttaagggtttataaaaataaataataatatgtgacagagatctttgtggtctccaaaatgtaaaatattaaatatctggccactacagataaaaagtttccttatccttaccctaggttgtaatcaaatggctttagaagtttgaagaggaaagagaagagtaaatgtttratgcttgtcaaacttcatgaaaaaaagcttttgcactattttgcccatgtggacacctggcctaagggatgcatttttgccacagaatttcatagtgaaggggcaggtgttgattaaaacaaggcaa

SEQ ID NO: 136612 - DNA, 486 bp, Homo sapiens
attgaaataagaatcaaatgaatgtttttatgatacttaaaactgtgattaacataagtgttactaaagtgtttattaaataaacataataagaaaaatgtaaacaatttaatatattactacctcaccttgcatttcaagggttttaataaggccacttacatcgtgatgacccaaacatttgccatctttttattcttcttttttgggaagttaaatctaacttcttgtttataatatgcgtrtaagtcactctgaattaacagttatgtcttgtaatggttaattgtatgtctcaatctgactggccatgaagtatccagattaaacattatttctaggcatgtctatgagggtaattctgagtgaaattagcatttcaattagtggactcaataaaatagattggcctccccaaagtggacagacattatctgatccactgaggccctaaatataacaaagaaacaaggaatgataaattag

SEQ ID NO: 136613 - DNA, 486 bp, Homo sapiens
attgaaataagaatcaaatgaatgtttttatgatacttaaaactgtgattaacataagtgttactaaagtgtttattaaataaacataataagaaaaatgtaaacaatttaatatattactacctcaccttgcatttcaagggttttaataaggccacttacatcgtgatgacccaaacatttgccatctttttattcttcttttttgggaagttaaatctaacttcttgtttataatatgcgtgtaagtcactctgaattaacagttatgtcttgtaatggttaattgtatgwctcaatctgactggccatgaagtatccagattaaacattatttctaggcatgtctatgagggtaattctgagtgaaattagcatttcaattagtggactcaataaaatagattggcctccccaaagtggacagacattatctgatccactgaggccctaaatataacaaagaaacaaggaatgataaattag

SEQ ID NO: 136614 - DNA, 486 bp, Homo sapiens
attgaaataagaatcaaatgaatgtttttatgatacttaaaactgtgattaacataagtgttactaaagtgtttattaaataaacataataagaaaaatgtaaacaatttaatatattactacctcaccttgcatttcaagggttttaataaggccacttacatcgtgatgacccaaacatttgccatctttttattcttcttttttgggaagttaaatctaacttcttgtttataatatgcgtgtaagtcactctgaattaacagttatgtcttgtaatggttaattgtatgtctcaatctgactggccatgaagtatccagattaaacattatttctaggcatgtctatgagggtaattctgagtgaaattagcatttcaattagtggactcaataaaatagattggcctccccaaagtggacagacattatctgatccactgaggccctaaatataacaaaraaacaaggaatgataaattag

SEQ ID NO: 136615 - DNA, 632 bp, Homo sapiens
ttgtgctgaatggatttagtgaggaagaggtactgcctactctagacttattgataagacatctgtatgtcagggaggacagraaataaatttcactaaattccatgggatttctacctcagtcaaatttctggggtacagtggtatgagtggggcctcttgagatattcctgctaaagtgaaggattagttgttgcatctggcccttccaacaaccaagaagtaggtacaactcctagcgggactctttggattttgaaggccacatactcctcatttgagtgtgtagtttcagcccatttaccaagtgactagagaagctgttgatttggagtgggactcacaataagagatggctctgtaataagttcagtcctaagtgcaagctgctcttccacttgcaccatatcattcatcagataggaatactatttgaagcccttggccacctcctataggtgcagtgggggtctttaaaattttggagcaagatcctgtcatcctctgaagatgactactctccttttgagaaacagttcttggcctgtgactagcctttagtagagactgaacgcttaaccgtctccaccaatttaccatgtaacctaagcttcgcatcataaaatgggtgt

SEQ ID NO: 136616 - DNA, 632 bp, Homo sapiens
ttgtgctgaatggatttagtgaggaagaggtactgcctactctagacttattgataagacatctgtatgtcagggaggacagaaaataaatttcactaaattccatgggatttctacctcagtcaaatttctggggtacagtggtatgagtggggcctcttgagatattcctgctaaagtgaaggattagttgttgcatctggcycttccaacaaccaagaagtaggtacaactcctagcgggactctttggattttgaaggccacatactcctcatttgagtgtgtagtttcagcccatttaccaagtgactagagaagctgttgatttggagtgggactcacaataagagatggctctgtaataagttcagtcctaagtgcaagctgctcttccacttgcaccatatcattcatcagataggaatactatttgaagcccttggccacctcctataggtgcagtgggggtctttaaaattttggagcaagatcctgtcatcctctgaagatgactactctccttttgagaaacagttcttggcctgtgactagcctttagtagagactgaacgcttaaccgtctccaccaatttaccatgtaacctaagcttcgcatcataaaatgggtgt

SEQ ID NO: 136617 - DNA, 632 bp, Homo sapiens
ttgtgctgaatggatttagtgaggaagaggtactgcctactctagacttattgataagacatctgtatgtcagggaggacagaaaataaatttcactaaattccatgggatttctacctcagtcaaatttctggggtacagtggtatgagtggggcctcttgagatattcctgctaaagtgaaggattagttgttgcatctggcccttccaacaaccaagaagtaggtacaactcctagcrggactctttggattttgaaggccacatactcctcatttgagtgtgtagtttcagcccatttaccaagtgactagagaagctgttgatttggagtgggactcacaataagagatggctctgtaataagttcagtcctaagtgcaagctgctcttccacttgcaccatatcattcatcagataggaatactatttgaagcccttggccacctcctataggtgcagtgggggtctttaaaattttggagcaagatcctgtcatcctctgaagatgactactctccttttgagaaacagttcttggcctgtgactagcctttagtagagactgaacgcttaaccgtctccaccaatttaccatgtaacctaagcttcgcatcataaaatgggtgt

SEQ ID NO: 136618 - DNA, 632 bp, Homo sapiens
ttgtgctgaatggatttagtgaggaagaggtactgcctactctagacttattgataagacatctgtatgtcagggaggacagaaaataaatttcactaaattccatgggatttctacctcagtcaaatttctggggtacagtggtatgagtggggcctcttgagatattcctgctaaagtgaaggattagttgttgcatctggcccttccaacaaccaagaagtaggtacaactcctagcgggactctttggattttgaaggccacataytcctcatttgagtgtgtagtttcagcccatttaccaagtgactagagaagctgttgatttggagtgggactcacaataagagatggctctgtaataagttcagtcctaagtgcaagctgctcttccacttgcaccatatcattcatcagataggaatactatttgaagcccttggccacctcctataggtgcagtgggggtctttaaaattttggagcaagatcctgtcatcctctgaagatgactactctccttttgagaaacagttcttggcctgtgactagcctttagtagagactgaacgcttaaccgtctccaccaatttaccatgtaacctaagcttcgcatcataaaatgggtgt

SEQ ID NO: 136619 - DNA, 593 bp, Homo sapiens
aatatatggtgctgtttttctcatagccaggactcatgggtccaagaatcaagtggtagaactggagtgacaatgttcactagcatccatagtgaccaaccagcaagattttgcttcctgtttctgtgattttatgctctgctggcctagaggtcttagttcctgcgggaggaatgcttccaccrggagaggtaacaatgatttcattgaacttgaaattaagacttccacctggcctcttagggctcttcacatctccaaatcaacaaagatggaagttacaatgttggctgagatgattgatcctgattaccaagggagatattggactgctactccgtaatggagataaggaagagtatgtctagaatacaggagatctcttatggtgtctcttaatatccccgtgccttgtgattaacttgaatggacaactataacaatctaaatagaaacctgtaacaatccatctaagcaggactactaatggcccagactcttcagcaatgaactttgggtgcttcattgaacacccaaacttcagttgaggtgcttgctgaagtcaaagagaatagaaaataggtagtggaaga

SEQ ID NO: 136620 - DNA, 593 bp, Homo sapiens
aatatatggtgctgtttttctcatagccaggactcatgggtccaagaatcaagtggtagaactggagtgacaatgttcactagcatccatagtgaccaaccagcaagattttgcttcctgtttctgtgattttatgctctgctggcctagaggtcttagttcctgcgggaggaatgcttccaccaggagaggtaacaatgatttcattgaacttgaaattaagacttccacctggcctcttagggctcttcacatctccaaatcaacaaagatggaagttacaatgttggctgagatgattgatcctgattaccaagggagatattggactgctactccrtaatggagataaggaagagtatgtctagaatacaggagatctcttatggtgtctcttaatatccccgtgccttgtgattaacttgaatggacaactataacaatctaaatagaaacctgtaacaatccatctaagcaggactactaatggcccagactcttcagcaatgaactttgggtgcttcattgaacacccaaacttcagttgaggtgcttgctgaagtcaaagagaatagaaaataggtagtggaaga

SEQ ID NO: 136621 - DNA, 593 bp, Homo sapiens
aatatatggtgctgtttttctcatagccaggactcatgggtccaagaatcaagtggtagaactggagtgacaatgttcactagcatccatagtgaccaaccagcaagattttgcttcctgtttctgtgattttatgctctgctggcctagaggtcttagttcctgcgggaggaatgcttccaccaggagaggtaacaatgatttcattgaacttgaaattaagacttccacctggcctcttagggctcttcacatctccaaatcaacaaagatggaagttacaatgttggctgagatgattgatcctgattaccaagggagatattggactgctactccgtaatggagataaggaagagtatgtctagaatacaggagatctcttatggtgtytcttaatatccccgtgccttgtgattaacttgaatggacaactataacaatctaaatagaaacctgtaacaatccatctaagcaggactactaatggcccagactcttcagcaatgaactttgggtgcttcattgaacacccaaacttcagttgaggtgcttgctgaagtcaaagagaatagaaaataggtagtggaaga

SEQ ID NO: 136622 - DNA, 551 bp, Homo sapiens
ttgaaactgggaacaatttaaaatacttattaattcatttaaaaacaacactaagcttattacgtgttaataatagtaaatgttaatattaatgttgtcatgaaaaataactgttttccaaaatggaagaggcttagaggaaaggatggcattgcgttacatttttgcaaatcttgttaataaaagtttctcagatttgtttctgcattcaacctattacagtctattgttttagatgaaatatatgaagaaaacatggcctcccacagagatgtagttggaaaagaggacttttctgcctcctgaaagggtcatggtgacgctgacattttgaaaacgactgatttaggtgataatgatccaggacattctagaatattctttttgggcttttttagagtcccattaagattgttgaggtttggtgaatcttttgagagggtttagaattaacaacagagccatatatwtgagcagcatcttacggtttccaaatagtttaaaatactttttcctcagaacaataatgagaacagcactgagaatgacca

SEQ ID NO: 136623 - DNA, 551 bp, Homo sapiens
ttgaaactgggaacaatttaaaatacttattaattcatttaaaaacaacactaagcttattacgtgttaataatagtaaatgttaatattaatgttgtcatgaaaaataactgttttccaaaatggaagaggcttagaggaaaggatggcattgcgttacatttttgcaaatcttgttaataaaagtttctcagatttgtttctgcattcaacctattacagtctattgttttagatgaaatatatgaagaaaacatggcctcccacagagatgtagttggaaaagaggacttttctgcctcctgaaagggtcatggtgacgctgacattttgaaaacgactgatttaggtgataatgatccaggacattctagaatattctttttgggcttttttagagtcccattaagattgttgaggtttggtgaatcttttgagagggtttagaattaacaacagagccatatatatgagcagcatcttacggtttccaaatagyttaaaatactttttcctcagaacaataatgagaacagcactgagaatgacca

SEQ ID NO: 136624 - DNA, 449 bp, Homo sapiens
tagacacataaaaagttcttctactggccacgtgtggtggctcacgcctataatcctagcactttgggaggccaagacgggcggatcacctgaggtcgggaattcgaccaacatggagaaaccccgtctctactgaaaatacaaaatagccgggcgtggtggcaggagcctgtaatcccagctacttgggaggctgaggcaggagaatcgcttgaacccgggaggcagaggttgcagtgagtcgagatggtgccattgcactccagcctggacaacaagagcgaaactgtctcaaaaaaaaaaaaaaaaaaaaaaagttcctctattgagaaaggcttcaacggtttttttcctcaytgtttttccttaattactctctcagtaaataaagtgccatgcctgttacttaggatgttacttagtaacatcctttgtgtgttgctttccca

SEQ ID NO: 136625 - DNA, 449 bp, Homo sapiens
tagacacataaaaagttcttctactggccacgtgtggtggctcacgcctataatcctagcactttgggaggccaagacgggcggatcacctgaggtcgggaattcgaccaacatggagaaaccccgtctctactgaaaatacaaaatagccgggcgtggtggcaggagcctgtaatcccagctacttgggaggctgaggcaggagaatcgcttgaacccgggaggcagaggttgcagtgagtcgagatggtgccattgcactccagcctggacaacaagagcgaaactgtctcaaaaaaaaaaaaaaaaaaaaaaagttcctctattgagaaaggcttcaacggtttttttcctcattgtttttccttaattrctctctcagtaaataaagtgccatgcctgttacttaggatgttacttagtaacatcctttgtgtgttgctttccca

SEQ ID NO: 136626 - DNA, 542 bp, Homo sapiens
gaaaacattttaaaggatttttgtctgattaactgtagcttttaaaatcctggtttttggtttccttgccacgatcatttaattgataaattataagtgttgtttgatatttttaaaaatgcatatattctaagttatgtattaaattatttcagcatggcgaggcatggtggctcacgcctgtaatcccagcactttaggaaggcagagtggaaggattgcctgagcccaggattttgagaccagcctggactacatgcctagaccccatccgtcaaaaaaaaaaaacaaattagccaggcgtggtggcccatacctatagtcccagctactcaggaggctgaggctgctgcagtgagccatgactgccactgcactccagcttgggcgacagagtgagactctgtctcaaaaaaaaaaaaaaatctttcagcatgtttcrtatctaagcaaagtccatctgatttacgtaagacatcttcttctgtgatgttcgaatgtgcattcatacaatacccatatgctactgtttatgaattcat

SEQ ID NO: 136627 - DNA, 532 bp, Homo sapiens
cacaagtcagacagaactgaatagtcctgtgaagactttggacactgaactgactttggaaccagactgcagaatggaggggtgggaacttgtggcttgaacctaatcaggtagattgcctggccaaaatgaaaatacctatcatctccataggatttaatttcattcaatgattttttttttagtaaatttgcaatgttttacagccatccccaaaatctaattccaaaatatctctatcaccccaacaagagactccattcaggttggcagtcacatgcactcccagatttcccctctgcccagcccttggcaatcactagtctactttctgtgtctttgagtttgcctactctggatatttcatataaatgaaatgatatatgaggttttgtgattggcwcctttcatttagaataatgttttcaaggctgattcatgttgtagtatgcattggtacttcattattttttatgcaaaagtaatattctattgtatggctataccacatttttctttgagacagagatct

SEQ ID NO: 136628 - DNA, 528 bp, Homo sapiens
agcttttagttttcttcaccctgttcagtacttctgagtatctcctatgagctcattaatctttaattttaatcatcttatttttaaaaaacaaggaccatcttgatatatgtttacttttattaaggaaaaagaatctatgaacacaggaacagaaatcaggagatcttggctctcgccctttcagtgccacaaagctgttttgtgaacctgtaaataatccatttggagtctccatgtttctcaattgtaaaatgasgatgtgctgcttctacacatttcacagggtcattgcaagaataaaatgagacaatgagaatgttggatttacatgcttgtataagaacagaagatcttttatgcctgtacacagaagaaatggaaatcatgacccacaaggcaccaaataactgactgcacacatcactaaaaaagccccaggaaaggctagccggtttgtttatcctcttacaaggacctatatgatgtgtaaggttttaagaaaacaaggtttgaacgttagacatt

SEQ ID NO: 136629 - DNA, 357 bp, Homo sapiens
atactttaaaactcaccgttttctgaaggcattctgcccaatgtacaagcagagcaggttgaaggccatgtttttcctgggctcttagagtgtttatttcatgctgaactagaagtctcaattttgctrcgtttccaggtctaaaaaatagttcaatttactaaaattgctttctaaatacacagttcagggcttacatacatatatgttaatgggtcacatgacaaattaaatcttcacatgaggattaaatccccggtaaaacctacgcactaagtgaaagcaatatttttgttttactacttacactgcttttctgtgaatcagagtacaaaccgcatcccaccaagatttttg

SEQ ID NO: 136630 - DNA, 357 bp, Homo sapiens
atactttaaaactcaccgttttctgaaggcattctgcccaatgtacaagcagagcaggttgaaggccatgtttttcctgggctcttagagtgtttatttcatgctgaactagaagtctcaattttgctamgtttccaggtctaaaaaatagttcaatttactaaaattgctttctaaatacacagttcagggcttacatacatatatgttaatgggtcacatgacaaattaaatcttcacatgaggattaaatccccggtaaaacctacgcactaagtgaaagcaatatttttgttttactacttacactgcttttctgtgaatcagagtacaaaccgcatcccaccaagatttttg

SEQ ID NO: 136631 - DNA, 357 bp, Homo sapiens
atactttaaaactcaccgttttctgaaggcattctgcccaatgtacaagcagagcaggttgaaggccatgtttttcctgggctcttagagtgtttatttcatgctgaactagaagtctcaattttgctacgtttccaggtctaaaaaatagttcaatttactaaaattgctttctaaatacacagttcagsgcttacatacatatatgttaatgggtcacatgacaaattaaatcttcacatgaggattaaatccccggtaaaacctacgcactaagtgaaagcaatatttttgttttactacttacactgcttttctgtgaatcagagtacaaaccgcatcccaccaagatttttg

SEQ ID NO: 136632 - DNA, 542 bp, Homo sapiens
gaaatgacacttggaaatgccacattgtagataacacattttcagagtatggataatakgggatagcactggaataaatgggacaaccaggaaattaaagagatcctcatgcaataacctatgaaaaaaaaaaagcatgatgaatagaatggcaaagggaagacgtgacagctgccttcaaatattaaaattattttataaaagaaatcatcaaaagaagaaacaagaccaacaggtagaaggcttgaagaatatttttattctatataaggaagtaccaagagccaaaccacctaaagatgcactgggctatcttgaaaagtaatgaatgtccatcactgaaaacgtccagtcataggcaatgcccacttactagaaacatgccaaaagtaactatatgggtgactagagcatcggcttttaattctatcaccactttcttaattggtggtggaaatgtaatttgatacaacctctttagggttagatatttggcaacagctctaaaaattataaatgcacagatatactttgatactgca

SEQ ID NO: 136633 - DNA, 607 bp, Homo sapiens
aagaactgatgcagggctgaaaacaggaacagtaagaccctaagagatgccacatcatctctatcttgcacagtaagatagagatgtaattgtaattgtccaaaacttaayatttgtggcctactttttcactatgcagttctaaattttttttttaattcagatggagtctcactctgtcgcccatcttgcacagtcaaatgaatctccctccccctaaaatcctccaaaaacccatctgatcagctgttctcaacaaacccatctgatcagctccaaatctgtggagtcccaacaagggtgaaggccgcgattatacaggacaatgaggaaaagtctagatactgaaccatgagttccccaatcttcttcccctggaacataagggtaaggaaatctctcaaaaggcagaacaaacaaaagaggagaataagagaaaaattagagaaactccagctttcaggtaaacgtcattaaaaaaagggtaagaaatggtcaaagaaataatacaagaaatgctacagaactgaaagaaatgagtttcccaattgaaaggacacttccagaaaacctttaagttaccaagaacaagaatctcatcggactc

SEQ ID NO: 136634 - DNA, 607 bp, Homo sapiens
aagaactgatgcagggctgaaaacaggaacagtaagaccctaagagatgccacatcatctctatcttgcacagtaagatagagatgtaattgtaattgtccaaaacttaatatttgtggcctactttttcaytatgcagttctaaattttttttttaattcagatggagtctcactctgtcgcccatcttgcacagtcaaatgaatctccctccccctaaaatcctccaaaaacccatctgatcagctgttctcaacaaacccatctgatcagctccaaatctgtggagtcccaacaagggtgaaggccgcgattatacaggacaatgaggaaaagtctagatactgaaccatgagttccccaatcttcttcccctggaacataagggtaaggaaatctctcaaaaggcagaacaaacaaaagaggagaataagagaaaaattagagaaactccagctttcaggtaaacgtcattaaaaaaagggtaagaaatggtcaaagaaataatacaagaaatgctacagaactgaaagaaatgagtttcccaattgaaaggacacttccagaaaacctttaagttaccaagaacaagaatctcatcggactc

SEQ ID NO: 136635 - DNA, 580 bp, Homo sapiens
ttgtttatcattacaaagtgaaaagaaatttgtttttcctcccctgctccctctcccttgagaatggtgatttttattgattttgtcctttagaaaacagttgaagttaaaatggccatgataaactcatcagagctatttsccttttaattctgcactttgctgcccattcttcctatgtagggtttggacccaaacccagagacagccatagctccaggagcatttttgtttggaggtaagctaaggctttccactgccctcaaagattcttcatttgggacccacagtgtccccctaggaagaatctgggaaggctgagcaattggagccttctttgtaaataggtggtatgccccatctggcggctcacactgtgaccacagaggagagggacccagaggctgcctaagggccctggaaaccatgagacagtctctctcaggcctgtcactcacttccttgtctcctccttcatcttcattcatcatcatcaccctcatgacatttccatgagggattttcttgcataaaagcaactcaataatgaaatagttgcaaatccaggcatggcaataga

SEQ ID NO: 136636 - DNA, 590 bp, Homo sapiens
attttaaaagattgatttcagacgctccaaaaattcacgagccaagaaaaactatcatagttgttcactttctccctaatgttaactgccgaaaagagcttctttttaaatatttttttcttccttgagactgaagagacataaaaataagtctggttttgttattagtacatggataaaatatgtattgaagaaaacacatctttaattttttaagagtctgtttttcattagcttatcttgatagtttaagttaatcattattttcagccatatatgatttagatattatgtcattaattcatgtacagtccatctgagtaatgattgtggttttctactttacaaattcatctacttcaccaagaaaccaagagagtcaaattccatgcaacatctggtttccattgaatgtaattgccatttgcagagttataatcatgtgttattgtaagggccacmgtgtcaatcactctcctaatggggaaaattcaatgcctaaatacctgggagaacaagaagctgacttaaacaggtgcattcagacactaggttttaagtagaattctaacctacccatttaaataaat

SEQ ID NO: 136637 - DNA, 388 bp, Homo sapiens
ttggctatattctaccctaggccaagcaaatcagaatctccagggaggggcacaggaatctgtgcttttaacaagtaccttgttaaacattagrcaagttggaaaacctaatctaaatccatcacaaaacaatgattgggcatctccatgtttttaaaaaatttgtatggggcaagcagaaatatgaagcaggatatatgccctcagggactttatattcaatttggagattatatatgtgtgcatatatgtatacatatgtataaatgtgtttatatatgtatgtgagtgtatacacacacacgaaaacataagtcaccatgaaactttgtcattaaaagtaagagatcagtaaaaacaaaatgcatagaaaaaatatccccaacaa

SEQ ID NO: 136638 - DNA, 574 bp, Homo sapiens
agtataattattaaaatcagaaattaaccttgatacagtactattgtctagtctacagattatagccacattttgcaaaatatctcaccagcatcctggatagcaaaagttttgtgggtttggttttttttagaacttttttttcctggatcttatccaggatcacacaktgcatgaccttgacatttttgaagacaactgggtttgggcttctctgatgtgttctgattaggtccaggttgtgcatttttagccagcataccacagaagtgatgatgcgtccttctctgtgcattttatcaggaagcatatgatatctatttgtcacattactggtgaggttaaaaaaaaaacatatttttaaactgtgtactttgtttacgaggtaacatgtctctccgctgcccaggaagctcccaaagggaggagtggggctcccttcatgtctatgtcctctgccagcctgacacagcactgcacattggctttgtgctcagtaaactcttgctttgctttctcctttttgatccatctcttctggtgattctttcatgtttactccttataatgagag

SEQ ID NO: 136639 - DNA, 574 bp, Homo sapiens
agtataattattaaaatcagaaattaaccttgatacagtactattgtctagtctacagattatagccacattttgcaaaatatctcaccagcatcctggatagcaaaagttttgtgggtttggttttttttagaacttttttttcctggatcttatccaggatcacacattgcatgaccttgacatttttgaagacaactgggtttgggcttctctgatgtgttctgattaggtccaggttgtgcatttttagccagcataccacagaagtgatgatgcgtccttctctgtgcattttatcaggaagcatatgatatctatttgtcacattactggtgaggttaaaaaaaaamcatatttttaaactgtgtactttgtttacgaggtaacatgtctctccgctgcccaggaagctcccaaagggaggagtggggctcccttcatgtctatgtcctctgccagcctgacacagcactgcacattggctttgtgctcagtaaactcttgctttgctttctcctttttgatccatctcttctggtgattctttcatgtttactccttataatgagag

SEQ ID NO: 136640 - DNA, 511 bp, Homo sapiens
gcttgagatggttaatattgagtgtcaacttgattgcattgaaagatgcaaagtaaagttcctgcrtgtgtctgtgagggtgttgccaaaggagattaacatttcagtcaatggactgggagaggcagacccaccctgaatctgggtgggcaccatctaatcagttgccagtgcggctagaaaaaagccggcgggagaagatggaagaagctgacttgctgagtcttctggactttgtctttctcccacactggatgcttcctgcccttgaaaatcagactccaagttcttcagcttttggactcttggacttacaccagtgatttgccaggagatcctgggccttcagccacagactgaaggctatgctgtcggcttccctacttctgaggttttgggactcaaactggtttccttgttcctcagcttgcagaagacctattgtgggactgcaccttgtgatcatgtgagtcatactccttaataactcgcctgcatacatatatctatc

SEQ ID NO: 136641 - DNA, 503 bp, Homo sapiens
tggttaatattgagtgtcaacttgattgcattgaaagatgcaaagtaaagttcctgcgtgtgtctgtgagggtgttgccaaaggagattaacatttcagtcaatggactgggagaggcagacccaccctgaatctgggtgggcaccatctaatcagttgccagtgcggctagaaaaaagccggcgggagaagatggaagaagctgacttgctgagtcttctggactttgtctttctcccacactggatgcttcctgccctygaaaatcagactccaagttcttcagcttttggactcttggacttacaccagtgatttgccaggagatcctgggccttcagccacagactgaaggctatgctgtcggcttccctacttctgaggttttgggactcaaactggtttccttgttcctcagcttgcagaagacctattgtgggactgcaccttgtgatcatgtgagtcatactccttaataactcgcctgcatacatatatctatc

SEQ ID NO: 136642 - DNA, 503 bp, Homo sapiens
tggttaatattgagtgtcaacttgattgcattgaaagatgcaaagtaaagttcctgcgtgtgtctgtgagggtgttgccaaaggagattaacatttcagtcaatggactgggagaggcagacccaccctgaatctgggtgggcaccatctaatcagttgccagtgcggctagaaaaaagccggcgggagaagatggaagaagctgacttgctgagtcttctggactttgtctttctcccacactggatgcttcctgcccttgaaaatcagamtccaagttcttcagcttttggactcttggacttacaccagtgatttgccaggagatcctgggccttcagccacagactgaaggctatgctgtcggcttccctacttctgaggttttgggactcaaactggtttccttgttcctcagcttgcagaagacctattgtgggactgcaccttgtgatcatgtgagtcatactccttaataactcgcctgcatacatatatctatc

SEQ ID NO: 136643 - DNA, 556 bp, Homo sapiens
cacatgctgtcaggaagtatttcatgatttctatcctattttcttttcctttgagtttgaacaccacaggtcttgtttaatgaggccaggtttttcgtggaagttttgggattgaaccaaggaagagaggatcaggaacagtcagaaagctgtgcacattttcaacaactaccgacagcagtgagtgcttgggaagcagtgagatcataggctgggaagatgggaaatcatcaggaatcccgggctgatgaaactttagaggtctttggaaagctcccctgattatcacctcctcttctctctctcctaatttacctccaggaactacagacctttatctcacagtgagagccaaagcttcaaaagggtgattagtactgttgccaaaggaggaacagtcaatatcagctcttttccaaacccagtccttgatagaaatgctctctgtaaactcagatgaagagatgacatctgttctgattattgtgatatagcccactgcagagcacaaagcacakagtagatctttaataagtatgtgtccagttgagtggca

SEQ ID NO: 136644 - DNA, 507 bp, Homo sapiens
gagctaatgtgcccaaagtcacacaactactaggggcaaattaggactagaacccaggcctcctgatgccttttcctttttggcctttcactctgcattttcggttttcacaggaatggaaatctactcttatcatcatagcagaygtgaatcttcttttatgaatgaatgagaataaaaaaatcaagcacgctaaggaaaccaaaaaaggtttatgtgcagctgttcactatttcattcatcctcccagccattcccctcacagacatttcctgatgccacctggctgaactgcaatgtgccccgcccatccagagacgtttgtgttcccacatcagcagcgtttcctgccttcaaagatcatcagccaccaaagtctgaaaaactaacatgatttgtttacatgaaggaaagatgctcaaaggtctgagtcgagacccgcagaattaagctcactacattttcaagcttgaactgtggtttccgtgctgaaagtttcaaactgtc

SEQ ID NO: 136645 - DNA, 597 bp, Homo sapiens
tacttcccaaatgtaatagaaactctaaagccatttatttaagatttcaataaaccccaagcttgagaaatattataatagcatagttcaaaagcagtgattaagaaaaaaaatcttaaaagcagccagaagacacataggaagaaagactagacagattttttatcagaaacttgtcttcatcagctagaagacagtggaacaacataaagacaaaccaaaacaaaaccccaaactacctgttaacctagacttatatatctagtaaaaatatctttaaaaaataacccccccaaaaaaagactttttcaaatatgcaaaacctgaaacacttaatcacagtggacctgcactacaagacacatttracaaaattcttcagacctaagataaatggtactagatagaaagggaagtctacacaaaagaatgaatagcccataaaatggtaaccacataagattttttcctattatctaaatctctttaaataattcttgactgcttaaaaataataacaacatagtgtgatgtttataataggtataaaagtaaaatgtatgacaatagcacaaaggccaagaaggaagaaatgga

SEQ ID NO: 136646 - DNA, 552 bp, Homo sapiens
atttgctgaaacatgtcttccctgatcctttcacacccctgtgccgatcacggagttactcttctgtgacatgtctaycccttgttcattccgaagtagagcctttcaacatgcagagactgcaaagagcagaaaatgccttggccccaactcaatgttgtcatgtggtaacagaccacaaacctaagccacttccgccttgttgttgaactcttggcacatgtgtgttgcgtttctattttattggctctttagtggaactgcaaaaagatttgtggcctcctttcatctagcgagagaaaacaagcaaccacttctcttttcacaacctaaaatcctccttggtatccgtattgcagaagggaccttttcacagtgtcagatctttccagataactgagaatttccgtaaataaaaacaaataattcattgtggctataagatttataaaatgtacataaatctccctgtctttatagaaagaggaaactgattataacgcaccttattgggaagactctgcggtatcactggggactcctcgcttacta

SEQ ID NO: 136647 - DNA, 426 bp, Homo sapiens
atgcgttgacttccttccttcccccaacccacctaaatgacaaaaagcagyggcatgcagttatttgacacccagatgcatcatcttttaatactccctttttatgacaaaattgctttcagtactaatcgttatttcattaatttgtttcacagtttgaaacaaaggtttactttgtatacaaaaattttcatttaaaaatacttagtgaaataaatcatgtatgaactaaaattagtacttaccacaaaaatattacagctatttggtctgttgatcattgttttcaatttaaacacaaataaaactcaaaattatcagataaaatgagataatggaagtaattcaagttctgtttcttctttatcatcactgcactgtcattgttcatttcaaatctactcttttcaacgcaagcataggtag

SEQ ID NO: 136648 - DNA, 580 bp, Homo sapiens
ccaaattaatcaaaatttgacctttacaattatcggttttaggtttcgcttttctggatggtaacctttctgaaatgtgcttctctcttctctgcatcttaaaagaagaatatcaaacacttccttgacctgaggcttgtcattatgaacatggtaatacaagggtgtaatatatacacctttggagttcattgaaggtatttaaggtgttgactattttccaatccatgaagtgacctcagctgactgttctttgaatccttttttgctgttgtttcatgaaatcaatagcttattttttctattgttcagcagtatttcatcttatggatataccacaattcatttatcaatatttaaaaaatgtgtatatgctacaaatatacaattcgttgctaatattttttgctttagactaggggttagaaaaagatggcctgcccctctacaagtcacgaccaactactgcctgattttgcatggctcatgagcttcagaatagcttttacatttatcaacagttaaaaaatcagaarcagaataaacacccctatgtaatacatccatgtaacgaaatttc

SEQ ID NO: 136649 - DNA, 529 bp, Homo sapiens
tgactgaagagcccttgggatttgagtgaatatcagtggtagccaggcagtacttaccacatgcctagccagtagtggccacaaggaaaaactcctctgcttgaggaaaaggaagagaagactgggaaacactttgttttgtagcttgggtgccagctcagctgtagcaaaatagagcacaaggtagcttctgaaagttcccaactccaggccttggttctgggatggcatctctggaccctcctagggctgggggggatcttgccatcctaagggaagaacasaagcctagctggattcaccacctgctggttgtagagcccttggaccttgaatgaacataggctgtagccaggcagtggtcaccaagggccttagatgagacacagtgctgtgctggttacaggtctgacccagtgcaatcccagtgatggtgtttgcatcacccctcccccagctccaggcagctcagcgtagagaaagagattccattcatttgggggaaagtaagagaaaagtatctctgcct

SEQ ID NO: 136650 - DNA, 517 bp, Homo sapiens
cctcctcctcctcctccccacctggccaaaataaagacctgcaggaaggaatagtaaatagaatgggagttctgcttggaaagggatcactgaaaggagcagagcagatcttgagggaactccagagaaagaaaaagaaaggaagcactacctagagggaagtacagtgaagaacttcccacaccactaacacaagagtaaatatgctttatcctggcaattgtggaggtgttctctacttatgccccctaaaagaaggccatacattgacacaatctcttcacttccatggaagccagagtcagcccagtgacttgcrtgagaagccagagaacagataaagagaggatccctatatcctaacattgcccttcgcacataaatgtgaacagttaacaaagattattagacatttgaggaaaaccaagaacatggattaacaggaaatattaagatttgtaaaaggcagaacatttattctgaagaaaagagatcctatcagatacagaaaaaagtt

SEQ ID NO: 136651 - DNA, 535 bp, Homo sapiens
agtaatctaggtaaattaatttttacaaaacgtaattaggttaatataacaataagtggttgtaaaacaaatgtatatataataatttagaatctacagttaaattaaatcatagatattcattaaatgtttgggtcacctagctttttaaaacaattacaggaaaayatttttctaaaaaacaatatgttcttattaaaaggaaatagtttgtctaattcaaaggttatttaaaggttatttataaaacaaggtaaaatgaaccagtaaataagaaagatgtaaagaaagataagtacaaagtaatacttttggtaagaaaggttaaaaggaaaataattttacatgagaaggaatcgtgtggtaaaatttttgtcttaaaacaaaataattggttatttaagaaagagggatgtttaggataaaacaggaagtccaagggtgtcataaatggtttgtataagtcataataaggtttgtaaaaagacaatttatggaaaaaacactttatgtaatcaagctggttataattaaa

SEQ ID NO: 136652 - DNA, 535 bp, Homo sapiens
agtaatctaggtaaattaatttttacaaaacgtaattaggttaatataacaataagtggttgtaaaacaaatgtatatataataatttagaatctacagttaaattaaatcatagatattcattaaatgtttgggtcacctagctttttaaaacaattacaggaaaacatttttctaaaaaacaatatgttcttattaaaaggraatagtttgtctaattcaaaggttatttaaaggttatttataaaacaaggtaaaatgaaccagtaaataagaaagatgtaaagaaagataagtacaaagtaatacttttggtaagaaaggttaaaaggaaaataattttacatgagaaggaatcgtgtggtaaaatttttgtcttaaaacaaaataattggttatttaagaaagagggatgtttaggataaaacaggaagtccaagggtgtcataaatggtttgtataagtcataataaggtttgtaaaaagacaatttatggaaaaaacactttatgtaatcaagctggttataattaaa

SEQ ID NO: 136653 - DNA, 593 bp, Homo sapiens
agccatgctttcctgaaagccctatgaactgaagctagaccacttaatctttagaagaaagtaacagcaacctatttatatacataaatcatttttatagctgcctactcatgtatggacttcatttggggagctggggagactgagggaaagggtaaaaagtcaggaagtttacaggaaccagaacwcacacatccagcttcctaagcacagaaaactggagaagaagcatgctgcttccattatgaaaccactctgttggtaatccgtactgttatttgatggtctattatttcgatgtctaaacttaaagcttaagaaacttagagaaatctttaaaaactactgaactaaattttttattactactttatttatttacttatttgtaagtttattattagtgatcacttccataatatctttatatcttatgtaacaataaatccagatgtaagaaatttaaataagttatctttctttgttaatcagattggtaaagctttaaaagttagtgggtacaagtgtttgcaaaaatgtaagaggaaaaggcaggctaatttatgtaataatggtaggggtataaattggct

SEQ ID NO: 136654 - DNA, 593 bp, Homo sapiens
agccatgctttcctgaaagccctatgaactgaagctagaccacttaatctttagaagaaagtaacagcaacctatttatatacataaatcatttttatagctgcctactcatgtatggacttcatttggggagctggggagactgagggaaagggtaaaaagtcaggaagtttacaggaaccagaacacacacatccarcttcctaagcacagaaaactggagaagaagcatgctgcttccattatgaaaccactctgttggtaatccgtactgttatttgatggtctattatttcgatgtctaaacttaaagcttaagaaacttagagaaatctttaaaaactactgaactaaattttttattactactttatttatttacttatttgtaagtttattattagtgatcacttccataatatctttatatcttatgtaacaataaatccagatgtaagaaatttaaataagttatctttctttgttaatcagattggtaaagctttaaaagttagtgggtacaagtgtttgcaaaaatgtaagaggaaaaggcaggctaatttatgtaataatggtaggggtataaattggct

SEQ ID NO: 136655 - DNA, 608 bp, Homo sapiens
tgctaatctagtgctctctcccaaccccactttgctcattccatggcttgtaatgaaagttgttcaactgaagatttgtcttgactgctggaatgtctcagatgtttgacttgaacgatgaaatgcctagctgcctttcagctcatgcacagtctagcaagtcttctcattagcatattcggctcagtctttgccyatcaagccctggcctccttcctggaataaatcacggctttaactccagggcctgcctgggcctcctacccttccagcgccatggccagcactgccaacattggcctggatcacagggccatcgtgtcgctgcacttcagtcttcaacctgggagatgaaacctgaactgctcttgggagctgggtgcaacttcttggggaccagcagactctgttaccagaaacacagctgcaaccttcagagctgtgaagtgaaggccagaggggcctgggcattagaggtcagaggctggtagcctggggatctgtgccctcagagctggaaagctggagggctacaaactttgggttccttcctagactctggtttatgaatgctattaattcaaagagtacaaaagagcgggcacaac

SEQ ID NO: 136656 - DNA, 609 bp, Homo sapiens
ctgctaatctagtgctctctcccaaccccactttgctcattccatggcttgtaatgaaagttgttcaactgaagatttgtcttgactgctggaatgtctcagatgtttgacttgaacgatgaaatgcctagctgcctttcagctcatgcacagtctagcaagtcttctcattagcatattcggctcagtctttgcctatcaagccctggcctccttcctggaataaatcacggctttaactccagggcctgcctgggcctcctacccttccagcrccatggccagcactgccaacattggcctggatcacagggccatcgtgtcgctgcacttcagtcttcaacctgggagatgaaacctgaactgctcttgggagctgggtgcaacttcttggggaccagcagactctgttaccagaaacacagctgcaaccttcagagctgtgaagtgaaggccagaggggcctgggcattagaggtcagaggctggtagcctggggatctgtgccctcagagctggaaagctggagggctacaaactttgggttccttcctagactctggtttatgaatgctattaattcaaagagtacaaaagagcgggcacaac

SEQ ID NO: 136657 - DNA, 318 bp, Homo sapiens
accaaactgagatacagtgaaaagcataaattagcagcagctgcagcccaattaggcaaagatttccacgagggaaagcttacttgtaatttacctaaacaaagcctttctttttgttgagatttgctgcttattattttttcttattaaaatgactacaaagagtaaccaaragcatcattatatcaggaaaagaaattcttccaatctaaacaattttttgaaaggatatttttagttgcatgtttgtgtttgtaacattttaaaaaaaattgacaatttttaaaaatcaaagatacacatgcactgttaaatgtg

SEQ ID NO: 136658 - DNA, 616 bp, Homo sapiens
aaagaaattcttccaatctaaacaattttttgaaaggatatttttagttgcatgtttgtgtttgtaacattttaaaaaaaattgacaatttttaaaaatcaaagatacacatgcactgttaaatgtgtcaaagcttatgataaaacacagtaatttcaagctcaatttagtcatttcacaatgtatacaatatctcaaaacaacattgttgtacacaataaatatatatatttgtaaattwaaaaataaatttaaaaaaccccagtaatttctagctccaatcctcatcaccttctcagaggccacaattttcaaatcttttagctatttcttctggtatctctatatttctagataatatgcttctactgtgatttcaggatttatgcattttttatgtatctgttgacttcctatgataaagatttaccactaccaatctccctttcctccataattccaaatataattacagctatgagagggggtaggtgaggataaagacagtatgtggtcatgctctaccacatattgtgaagtgcacgcatatatacaatataaacatatattattatgtataatataaataaaattatatataatttgttttatataa

SEQ ID NO: 136659 - DNA, 583 bp, Homo sapiens
gattgcgctgggagtagggtcatacatgggcaaaatcagggtggcggattcactgactgggtaccggtttgaaccagtgatgaatgcattggccatataaagttagtattggctccatttcctctagctgtgtccctttggaaatctggtcctttttgttcggtcatggaagtggagtttccagttggggttcatgaggaggtggctggtgccaaaccagctaaggcatagcagctccggacccagtggtacagcacgattcttcagtcatacaaacccagcccttcacgaacacttttcagaacactccctccagggctcagtcccacattgtctagtattcattccccgccccctttaaggagcccagctacactttggctcagcttcctcttgcttgggtggagaccctagaccctttcatttccagtgatgttcttaacycctcccgcttttaacctcacccagtgtgcctgttccatattccagggcctctgtcctatttccccatcacactccagttctgtgtctgtggcagcctcatgggctggggcagaaactttgccagactcctctccctgta

SEQ ID NO: 136660 - DNA, 503 bp, Homo sapiens
agatctagggcacaagcagggcaggctagggcagggcaatggcaagaccaggccatggcagggccagcccaggatagaacagggcacaggcagggcagggccagggccacggctggggcaggacaaggaccaggactggrgtccaggccagggcaagggtatggccagggcagaggtagggccagagccagggtctgggcaggaccaaggcaggtctattgcagggccagggttcagaccagggccagagcagggctgggacagggccagggccagaaccaggaaagggcaatgtcaggacaagggccgtggcaggaccagcaatggggctggggccaggacagggacagggacagggtcagggctagggccagaatagcatgccagggtagagccaggccaaattagggccaggacagggtcaggaccagggctgggccagggtatggccttaagtagcgaagggtcagggccagggtccatgccagtgccagtgctggtcc

SEQ ID NO: 136661 - DNA, 521 bp, Homo sapiens
agttcatccagtcagcaaccttctccatgtatcatatttctcagctatgtgacttagccaatgctggaaagaaaactctagatatacttacacaagtatcacaatttcttcaagaaggccctggaactggaaccactaaaggtctcctaataggagttgacatggcttaatagaaactgcagtctcttagtttctgcacttgaacaagaatttaaatggctacagcccatttttatgacatcacacactaaactatggtaaaaaagaccaaagtattttctcttaaaaacagaatgaaaacagttatcacttataagctgctattatatatttcattgagaaraacactattcctgtcatcaaagtaaaattaaaacactttctaagtgtaaagattgttaatgactgaaatttctaagaacagaataggaaaaactatattcaaataagttcagatggttattggttttaacatacaatattttgataagtatgagtattaaataactataatcacactg

SEQ ID NO: 136662 - DNA, 521 bp, Homo sapiens
agttcatccagtcagcaaccttctccatgtatcatatttctcagctatgtgacttagccaatgctggaaagaaaactctagatatacttacacaagtatcacaatttcttcaagaaggccctggaactggaaccactaaaggtctcctaataggagttgacatggcttaatagaaactgcagtctcttagtttctgcacttgaacaagaatttaaatggctacagcccatttttatgacatcacacactaaactatggtaaaaaagaccaaagtattttctcttaaaaacagaatgaaaacagttatcacttataagctgctattatatatttcattgagaagaacactattcctgtcatcaaagtaaaattaaaacactttctaagtgtaaagattgttaatgactgaaatttctaagaacagaataggaaaaactatattcaaataagttcagatggttattggttttaacatayaatattttgataagtatgagtattaaataactataatcacactg

SEQ ID NO: 136663 - DNA, 521 bp, Homo sapiens
agttcatccagtcagcaaccttctccatgtatcatatttctcagctatgtgacttagccaatgctggaaagaaaactctagatatacttacacaagtatcacaatttcttcaagaaggccctggaactggaaccactaaaggtctcctaataggagttgacatggcttaatagaaactgcagtctcttagtttctgcacttgaacaagaatttaaatggctacagcccatttttatgacatcacacactaaactatggtaaaaaagaccaaagtattttctcttaaaaacagaatgaaaacagttatcacttataagctgctattatatatttcattgagaagaacactattcctgtcatcaaagtaaaattaaaacactttctaagtgtaaagattgttaatgactgaaatttctaagaacagaataggaaaaactatattcaaataagttcagatggttattggttttaacatacaatattttgataartatgagtattaaataactataatcacactg

SEQ ID NO: 136664 - DNA, 586 bp, Homo sapiens
ggtgcatgcctgtaatccagcactttgggaggccaacacaagcagatggcttgaggccaggagtttgagacctgcctgagcagcatggcgaaaccccatctatacaaaaaatattaaaaatagccagatgtggtggcacatgcctgtggtcccaactactcgggaggctgagtgaggtaggaggatcacttaagcctgggaagtcgaggcttcagtgagctgtgatcatgccactgcactccggcctgggtgacacagtgagaccctgtctccaaaaaaaaaaaaaaaaaaaaaaaaaaatccatttgatataaagaaagaaaaaactagagcgctacgcacaacataggaaaagtagttttctttctggttggatcagaggatatatttcctttgtgtttttctgtaatttacagattttttttcctcagtgagcaagtattacttttataaacygaaaaaaaacctgtatttttcatcgagtatttaattaacttatgaagaaggttattcattgtggcattgtttgagtataaatataacgaggtccaacaacagaagacaggttaaataaatcatgttatgt

SEQ ID NO: 136665 - DNA, 586 bp, Homo sapiens
ggtgcatgcctgtaatccagcactttgggaggccaacacaagcagatggcttgaggccaggagtttgagacctgcctgagcagcatggcgaaaccccatctatacaaaaaatattaaaaatagccagatgtggtggcacatgcctgtggtcccaactactcgggaggctgagtgaggtaggaggatcacttaagcctgggaagtcgaggcttcagtgagctgtgatcatgccactgcactccggcctgggtgacacagtgagaccctgtctccaaaaaaaaaaaaaaaaaaaaaaaaaaatccatttgatataaagaaagaaaaaactagagcgctacgcacaacataggaaaagtagttttctttctggttggatcagaggatatatttcctttgtgtttttctgtaatttacagattttttttcctcagtgagcaagtattacttttataaactgaaaaaaamcctgtatttttcatcgagtatttaattaacttatgaagaaggttattcattgtggcattgtttgagtataaatataacgaggtccaacaacagaagacaggttaaataaatcatgttatgt

SEQ ID NO: 136666 - DNA, 566 bp, Homo sapiens
aaagtagttttctttctggttggatcagaggatatatttcctttgtgtttttctgtaatttacagattttttttcctcagtgagcaagtattacttttataaactgaaaaaaaacctgtatttttcatcgagtatttaattaacttatgaagaaggttattcattgtggcattgtttgagtataaatataacgaggtccaacaacagaagacaggttaaataaatcatgttatgtccatgctgtgaaaactatgcaactgtttaaaaaaatgagacacatctatatgtaccattawggaagaatcccaaactataaggatccactgaaaaacaaaaggaaaaaaagatgaacaaccactttggaaagcagtttggcatgatttactgaagtcaaaggtatgtacatccaacaattttaccccttggggtgtatatatatatatatatatatatatatatacacacacacacacacacacatatacgtacatctctacacccaacagaaatgtgttcactgtgctacaagagccatgtacaagaatgctctttatagcatccttcat

SEQ ID NO: 136667 - DNA, 604 bp, Homo sapiens
atccatttctataaagttcaaaagcacagctgaaacaaaaatagaatatctaatggaagcaaagcaagtagttaccatgaaggtcagggcagtatttacckgtggcaggagggatggtgcagtaactgggagggagaatgaagggggttcccaatgtactggctcagtttacaccaatgctcacttcatgaaaattcattcatttcagttttttccacttttctatatgtattgtacgtcataataaaatagacttaaaaagcaaaatgcagaatatgtacagaatgtcaccatctgtgctttaaataactagatccataaatagaaggagaaagagatactaatgaaaagggaaccagagagcatgaatgaccaggagactatttttctgttttaacttttttactttcgaagtttggaccaagtatatcactatctgatcaggaggtggggggcgttgtcagcccaagcagctgccaccgtgagcagtggacacaggaccagcttctggggatgatcctgtcctctcctagcacagccccgtgcacggacagggcatccatgccatccgtgtcacccagggcaggtcactaagcctcccgca

SEQ ID NO: 136668 - DNA, 604 bp, Homo sapiens
atccatttctataaagttcaaaagcacagctgaaacaaaaatagaatatctaatggaagcaaagcaagtagttaccatgaaggtcagggcagtatttacctgtggcaggagggatggtgcagtaactgggagggagaatgaagggggttcccaatgtactggctcagtttacaccaatgctcacttcatgaaaattcattcatttcagttttttccacttttctatatgtattgtacgtcataataaaatagacttaaaaagcaaaatgcagaatatgtacagaatgtcaccatctgtgctttaaataactagatccataaatagaaggagaaagagatactaatgaaaagggaaccagagagcatgaatgaccaggagactatttttctgttttaacttttttactttcgaagtttggaccaagtatatcactatctgatcaggaggtggggggcgttgtcagcccaagcagctgccaccgtgagcagtggacacaggaccagcttctggggatgatcctgtcctctcctagcacagccccgtgcayggacagggcatccatgccatccgtgtcacccagggcaggtcactaagcctcccgca

SEQ ID NO: 136669 - DNA, 526 bp, Homo sapiens
cagagcagccccggaccccgccagcccctcccactgactccagtgcaggtcagtgaaggtgactatgacagctctggtaatcctggaagaacccccaggattgaacacagctcttgggctctgattacagccaattaccataatggagagaatatctggattctcccctaatttcctctcctcttaaaattttcaattaagagcctaatcttgatggaaaatggctgctttctggagtaytctccgcagtgctgattcctcattgctaagtgctttttctagacagatagaggctctcgatgattccagataaaatcagagcaaaggagcttacccaaagaaaggaggagagcagagcagcaataggctatgccccggagccctccccactgctggagacaccaggtgggtgaggggtctcttgggcccttccagcctgcagagctgctgagagtcaggcctggctgccaacaaagcagctgaagtcttgagaaaacttcctgattgcattagcgaggttgcaaca

SEQ ID NO: 136670 - DNA, 507 bp, Homo sapiens
agtggcagaacaagggcaaccagggtcagacacggtggaaggagggaagtcccagagccgagcatgggtggacatcagaggggtgtgggctgcaccatctgggtgcaggggccagcaggcagtgcgggtccacccagcccagggccagcctttcccagcagtcgcgtgcagaaacctggcacacgtcatggggcagcggtcccatatcataggccctcctggtgttagcagtcaggagggtgcctagaaaagcctcccacagccacagggacagcaggatctgagcccaccctccacaccagragcctgcccagcaccgtagcgaggcccgggtgccctgctcaggaatgagctctgcttccagcttggccatcctagttccaccctgtctgtaacttagccgaccaggaagatggctgtgatgaccacagaaaatcctgacacagagctggcatgaaggagctgtgcctgtgggagcttcagagtcctcaggccaggctggcccct

SEQ ID NO: 136671 - DNA, 507 bp, Homo sapiens
agtggcagaacaagggcaaccagggtcagacacggtggaaggagggaagtcccagagccgagcatgggtggacatcagaggggtgtgggctgcaccatctgggtgcaggggccagcaggcagtgcgggtccacccagcccagggccagcctttcccagcagtcgcgtgcagaaacctggcacacgtcatggggcagcggtcccatatcataggccctcctggtgttagcagtcaggagggtgcctagaaaagcctcccacagccacagggacagcaggatctgagcccaccctccacaccagaagcctgcccagcaccgtagcgaggcccgggtgccctgctcaggaatgagctctgcttccagcttggccatcctagttccaccctgtctgtaacttagcygaccaggaagatggctgtgatgaccacagaaaatcctgacacagagctggcatgaaggagctgtgcctgtgggagcttcagagtcctcaggccaggctggcccct

SEQ ID NO: 136672 - DNA, 507 bp, Homo sapiens
agtggcagaacaagggcaaccagggtcagacacggtggaaggagggaagtcccagagccgagcatgggtggacatcagaggggtgtgggctgcaccatctgggtgcaggggccagcaggcagtgcgggtccacccagcccagggccagcctttcccagcagtcgcgtgcagaaacctggcacacgtcatggggcagcggtcccatatcataggccctcctggtgttagcagtcaggagggtgcctagaaaagcctcccacagccacagggacagcaggatctgagcccaccctccacaccagaagcctgcccagcaccgtagcgaggcccgggtgccctgctcaggaatgagctctgcttccagcttggccatcctagttccaccctgtctgtaacttagccgaccaggaagatggctgtgatgaccacagaaaatccygacacagagctggcatgaaggagctgtgcctgtgggagcttcagagtcctcaggccaggctggcccct

SEQ ID NO: 136673 - DNA, 509 bp, Homo sapiens
tgcgtgtccacctcacccactgagttccaggagcaggcgtgtatcctgctcgccctgactcagcagggagggctgagctctggagcctgagtgcacccagacctgccccatggcctcctgtgcctctgtgtcctcctcaccctcgactcaccaaggagccctgaggacgtgagaactggaacatgcccaagacccacatcggggcctggcacacaccaagcgcctagtgaacgcttgatgactgaggacagcatcgcttcttctaagagggaaaaaaaggaaagtcaaccagagacaatttgtaaaagatggcttttgactgaggccttgaaggatgggcaaggatgggcaaggggaggggggactcaaagtgcaggatgagaaggctctaggtgcctgagtgcctgtgcatgtgarcatgcatgtgcatgtgtgtgcatgtgtgtgtgcatgagacttgcagccttgcatgtgtgcgtgcatatgcatatgtgtgttcatatgcgcat

SEQ ID NO: 136674 - DNA, 584 bp, Homo sapiens
attcttcatctaatctaagcataaaaattaacagttttccctgggcctttgggttgtcatttctgaagcctcccatgtcacataaaacttggattaaataaatttgctctgtttttctcttgttaatgtgtcttttgttataggagtgttggccgtgacccttaagatggataagtaaaggactcacaccttcacagcyctacagccccatctccaataagtagccacacctgccacttctacccacaaatacctggattccgctcatctcttcccattgtcattcctaccactcaattccctgtcaccatcatctcctgatgggtcttctggagcagcttcctcactcatctctccagttcatcccttgcttctaccagtctatccttgctacggtaaaacgggcatttgagaaaggcaattacacggttacccctcccctgctcagcactctccaatttgatggacaccaaaatccttgccttggtccccttggtcctgcgtgccctcctctctggcctcatctcaagccactgccctcgtgctgcactcttcctctgtaatccacactgctggcttctttt

SEQ ID NO: 136675 - DNA, 564 bp, Homo sapiens
tttttttttatatttagggggaacgagtaccggattcttacatagtcaaaaagctccttatagagaagctyggaactttcaatacaactttgccttttctgccattttaattttccatttaatttaaatgtattctctcatttgaccttcatactctgtggagaaatattcctatttcggcttgtattgacaagctgttttcacacagcccccacatcacccaaccaaccagcaagaaacagataaagaaactgaggcccagggaggctaagagtcctgccaggatcattcacctttcaaggtaaggagccagttccagacctgggtttgtgcagctccaagctcccccgtctttctacaatgctagatttagactatagcaatctagcaagtgtggccacacaatggtcaagttggatttagatgatgttccctataaatccattctcctctcccgtgtaagcaaggcaaagtactccaggccatggggagtccctgaagactcgatgaactgcagtggccacatcaggaggttgcaggttgaccagaactcaccgacacagc

SEQ ID NO: 136676 - DNA, 564 bp, Homo sapiens
tttttttttatatttagggggaacgagtaccggattcttacatagtcaaaaagctccttatagagaagctcggaactttcaatacaactttgccttttytgccattttaattttccatttaatttaaatgtattctctcatttgaccttcatactctgtggagaaatattcctatttcggcttgtattgacaagctgttttcacacagcccccacatcacccaaccaaccagcaagaaacagataaagaaactgaggcccagggaggctaagagtcctgccaggatcattcacctttcaaggtaaggagccagttccagacctgggtttgtgcagctccaagctcccccgtctttctacaatgctagatttagactatagcaatctagcaagtgtggccacacaatggtcaagttggatttagatgatgttccctataaatccattctcctctcccgtgtaagcaaggcaaagtactccaggccatggggagtccctgaagactcgatgaactgcagtggccacatcaggaggttgcaggttgaccagaactcaccgacacagc

SEQ ID NO: 136677 - DNA, 564 bp, Homo sapiens
tttttttttatatttagggggaacgagtaccggattcttacatagtcaaaaagctccttatagagaagctcggaactttcaatacaactttgccttttctgccattttaattttccatttaatttaaatgtattctctcatttgaccttcatactctgtggagaaatattcctatttcggcttgtattgacaagctgttttcacacagcccccacatcacccaaccaaccagcaagaaacagataaagaaactgaggcccagggaggctaagagtcctgccaggatcattcacctttcaaggtarggagccagttccagacctgggtttgtgcagctccaagctcccccgtctttctacaatgctagatttagactatagcaatctagcaagtgtggccacacaatggtcaagttggatttagatgatgttccctataaatccattctcctctcccgtgtaagcaaggcaaagtactccaggccatggggagtccctgaagactcgatgaactgcagtggccacatcaggaggttgcaggttgaccagaactcaccgacacagc

SEQ ID NO: 136678 - DNA, 564 bp, Homo sapiens
tttttttttatatttagggggaacgagtaccggattcttacatagtcaaaaagctccttatagagaagctcggaactttcaatacaactttgccttttctgccattttaattttccatttaatttaaatgtattctctcatttgaccttcatactctgtggagaaatattcctatttcggcttgtattgacaagctgttttcacacagcccccacatcacccaaccaaccagcaagaaacagataaagaaactgaggcccagggaggctaagagtcctgccaggatcattcacctttcaaggtaaggagccagttccagacctgggtttgtgcagctccaagctcccccgtctttctacaatgytagatttagactatagcaatctagcaagtgtggccacacaatggtcaagttggatttagatgatgttccctataaatccattctcctctcccgtgtaagcaaggcaaagtactccaggccatggggagtccctgaagactcgatgaactgcagtggccacatcaggaggttgcaggttgaccagaactcaccgacacagc

SEQ ID NO: 136679 - DNA, 357 bp, Homo sapiens
atcaattcccagacttgagccagttcacaggcccacaaccccttaagtgaaggggaggctgggtgatcttggggaagtacgctgctacrttgccaaaaatttacattgttaatctttttcccagtcttccccaaagggacctacagccttctgccaggatgactgtgacttaaagaaaagaaaattctcagatatttggggaattactggacactggctctcatttgacactattatcactatgttgcctaggatggattcatgctcctgggttcaagcagtcctcctacctcagcctcccaaagtgctgggattacagacatgagccactgtggccagcagagctttgaaactaga

SEQ ID NO: 136680 - DNA, 357 bp, Homo sapiens
atcaattcccagacttgagccagttcacaggcccacaaccccttaagtgaaggggaggctgggtgatcttggggaagtacgctgctacattgccaaaaatttacattgttaatctttttcccagtcttccccaaagggacytacagccttctgccaggatgactgtgacttaaagaaaagaaaattctcagatatttggggaattactggacactggctctcatttgacactattatcactatgttgcctaggatggattcatgctcctgggttcaagcagtcctcctacctcagcctcccaaagtgctgggattacagacatgagccactgtggccagcagagctttgaaactaga

SEQ ID NO: 136681 - DNA, 426 bp, Homo sapiens
aaattttctctgtgaagatgatttacatgtgtgattttttaagattatttttaaaaaatactttctggagaaaatrccccttttaattagcaaaagatatgcctcttaagactccagtgctagcaagcatgcaggagacaggtgctctccgatatcagtgcggggaaagtaaacgggcaccaccttctggaagagaagctggctgtcatatggagggccctctcatcacaggaaggcagatgctgcaagtaaatgacgaaacaggtcaccaaagccctgaaggcgatgcagtctctgacccataattccattctttccattctacccttctactcaaagggacaaataaaaaaatgtaatcaaagagtcaggtaaggccaggagtggtgactcagccctgtaatcccagcactttgggaggccaag

SEQ ID NO: 136682 - DNA, 426 bp, Homo sapiens
aaattttctctgtgaagatgatttacatgtgtgattttttaagattatttttaaaaaatactttctggagaaaataccccttttaattagcaaaagatatgcctcttaagactccagtgctagcaagcatgcaggagacaggtgctctcygatatcagtgcggggaaagtaaacgggcaccaccttctggaagagaagctggctgtcatatggagggccctctcatcacaggaaggcagatgctgcaagtaaatgacgaaacaggtcaccaaagccctgaaggcgatgcagtctctgacccataattccattctttccattctacccttctactcaaagggacaaataaaaaaatgtaatcaaagagtcaggtaaggccaggagtggtgactcagccctgtaatcccagcactttgggaggccaag

SEQ ID NO: 136683 - DNA, 426 bp, Homo sapiens
aaattttctctgtgaagatgatttacatgtgtgattttttaagattatttttaaaaaatactttctggagaaaataccccttttaattagcaaaagatatgcctcttaagactccagtgctagcaagcatgcaggagacaggtgctctccgatatcagtgcggggaaagtaaacgggcaccaccttctggaagagaagctggctgtcatatggagggccctctcatcacaggaaggcagatgctgcaagtaaatgacraaacaggtcaccaaagccctgaaggcgatgcagtctctgacccataattccattctttccattctacccttctactcaaagggacaaataaaaaaatgtaatcaaagagtcaggtaaggccaggagtggtgactcagccctgtaatcccagcactttgggaggccaag

SEQ ID NO: 136684 - DNA, 642 bp, Homo sapiens
gtggcttcaaaacaatgaaaatttattctctcacagtttgggaggccagaagtccaaaatctagacgtcagaagagccaagttccctctgaaggctccaatggggggtcatcgccagcctcttccagtttctgctggttgctggcaacccctagcattccttggcttgtggctgtatcactccaatctttgcctctgttgtgacttgaccatctttcctttgtatctgtgtctcttttcctcttcttataaagacaccagtcataatgggttaagggcccaacctactccagtatgacttcattgtaatttacatcttaattaaatctacaaagactccatttccaaatagggccacaatcagaggaaccaggggttaagatttcaacagatcttctggtgagcaaaaatttaatctataacacacaaatgatagtcaagatatggaattaacctgtgcatccatcaatggatgaatgaayggacaaagaaaatgtgtgtatgtatacacattgtatacatacacaacagaatattattcaaccttaaaaagaaggaaatggccgggcacaatggctcacgcttgtaaacccaacactttgggaggccatggtgggtggactgcttgtgcccaggagttcaa

SEQ ID NO: 136685 - DNA, 599 bp, Homo sapiens
atattatatattatatattaattatagaatatattatatattatatattaattatataatatatgttacacattacatattatatataatatattayattatgctatatcttatatattatatatgttatatatgtatatatattatatgtacacatatacacatacatacacacatgtatactttaatagctaatatcttacactggtatatttatattacatatgattatatacaaatatttttgtactttatgtttgtgctctatatacagatgtaattagttgtttatgttatatataatataaacatgatgtatattcttattttcctgtgaggacccactgtcttcttaatacactgtcttctgaccaaagtcttccacacaaatcagcagttactatatatatatataatatttatatacacatatacacatacatacacacatatgtatattttaatagctaatatcttacactgatatatttatattacatatagtaatatactaatatttttgtactttatgtttatactatacatacagatgtcgtgaggtatttatattatatataatatattaacatgatgcacat

SEQ ID NO: 136686 - DNA, 399 bp, Homo sapiens
ttgacaatcagcccgaagactttgtggtggggctgtcctgtgtgttgtagggtgttagcagtatccctgggtgcagtagtgtaacaatcaaaaatgtgtttggtagcayaaaagtacaactatagttaacaacaatttattgtatattttagagtaactaacatagtgaaattagaatgttcctaacacacaaaaaagatacatacctgagggtatgaatatctgtcaccctgatttgattattatttattatatgtttatatcaaaatatcacatgtaccctgtaagtatgtataaatattatgtataatttagatttattttaattttaataaaaaataaatattaaaaaatgtcttcagatattgctaaatgtcccctcaaggaacaaggtcccca

SEQ ID NO: 136687 - DNA, 399 bp, Homo sapiens
ttgacaatcagcccgaagactttgtggtggggctgtcctgtgtgttgtagggtgttagcagtatccctgggtgcagtagtgtaacaatcaaaaatgtgtttggtagcacaaaagtacaactatagttaacaacaatttattgtatattttagagtaactaacatagtgaaattagaatgttcctaacacacaaaaaagatacatacctgagggtatgaatatctgtcaccctgatttgattattatttattatatgtttatatcaaaatatcacatgtaccctgtaagtatgtataaatrttatgtataatttagatttattttaattttaataaaaaataaatattaaaaaatgtcttcagatattgctaaatgtcccctcaaggaacaaggtcccca

SEQ ID NO: 136688 - DNA, 399 bp, Homo sapiens
ttgacaatcagcccgaagactttgtggtggggctgtcctgtgtgttgtagggtgttagcagtatccctgggtgcagtagtgtaacaatcaaaaatgtgtttggtagcacaaaagtacaactatagttaacaacaatttattgtatattttagagtaactaacatagtgaaattagaatgttcctaacacacaaaaaagatacatacctgagggtatgaatatctgtcaccctgatttgattattatttattatatgtttatatcaaaatatcacatgtaccctgtaagtatgtataaatattatgtataatttagatttattttaattttaataaaaaataaatattwaaaaatgtcttcagatattgctaaatgtcccctcaaggaacaaggtcccca

SEQ ID NO: 136689 - DNA, 558 bp, Homo sapiens
ggaatgtgttttaagactttttgtttctaatgtcttagttttctagagaaaaaaaggtaaaagattgacattattctcatagtcttttactcttttctcaaaggtcttagttcaggtcctaattttctttcaattatactcatttatttaaccagtctcctttaggtggtcatttgggttgtatacatattcttgtctgtgttttatcagcactgtattatataatttcatgtatgtacaaatawatatttgaaggataacattctaaaattgctgagttaaagggtatatgcatttataaacttgacagatattaccagttgtcctctataaagtgaaactggtttatatcaccacagctaacatataaatgtctgttttctaccatattattaaattactgaactttatccatctgatggaaaaggagaaatctgattgtactttattttttatatttttaatatttttatgagacttcttggcatgttggccaggatggtctcaaactccagcctcaagcaatcctctcacctcagtctcccaaagttctgggac

SEQ ID NO: 136690 - DNA, 558 bp, Homo sapiens
ggaatgtgttttaagactttttgtttctaatgtcttagttttctagagaaaaaaaggtaaaagattgacattattctcatagtcttttactcttttctcaaaggtcttagttcaggtcctaattttctttcaattatactcatttatttaaccagtctcctttaggtggtcatttgggttgtatacatattcttgtctgtgttttatcagcactgtattatataatttcatgtatgtacaaataaatatttgaaggataacattctaaaattgctgagttaaagggtatatgcatttataaacttgacagatattaccagttgtcctctataaagtgaaactggtttatatcaccacagctaacatataaatgtctgttttctaccatattattaarttactgaactttatccatctgatggaaaaggagaaatctgattgtactttattttttatatttttaatatttttatgagacttcttggcatgttggccaggatggtctcaaactccagcctcaagcaatcctctcacctcagtctcccaaagttctgggac

SEQ ID NO: 136691 - DNA, 558 bp, Homo sapiens
ggaatgtgttttaagactttttgtttctaatgtcttagttttctagagaaaaaaaggtaaaagattgacattattctcatagtcttttactcttttctcaaaggtcttagttcaggtcctaattttctttcaattatactcatttatttaaccagtctcctttaggtggtcatttgggttgtatacatattcttgtctgtgttttatcagcactgtattatataatttcatgtatgtacaaataaatatttgaaggataacattctaaaattgctgagttaaagggtatatgcatttataaacttgacagatattaccagttgtcctctataaagtgaaactggtttatatcaccacagctaacatataaatgtctgttttctaccatattattaaattactgaactttatccatctgatggaaaaggagaaatctgattgtactttattttttatatttttaatatttttatgagmcttcttggcatgttggccaggatggtctcaaactccagcctcaagcaatcctctcacctcagtctcccaaagttctgggac

SEQ ID NO: 136692 - DNA, 558 bp, Homo sapiens
ggaatgtgttttaagactttttgtttctaatgtcttagttttctagagaaaaaaaggtaaaagattgacattattctcatagtcttttactcttttctcaaaggtcttagttcaggtcctaattttctttcaattatactcatttatttaaccagtctcctttaggtggtcatttgggttgtatacatattcttgtctgtgttttatcagcactgtattatataatttcatgtatgtacaaataaatatttgaaggataacattctaaaattgctgagttaaagggtatatgcatttataaacttgacagatattaccagttgtcctctataaagtgaaactggtttatatcaccacagctaacatataaatgtctgttttctaccatattattaaattactgaactttatccatctgatggaaaaggagaaatctgattgtactttattttttatatttttaatatttttatgagacktcttggcatgttggccaggatggtctcaaactccagcctcaagcaatcctctcacctcagtctcccaaagttctgggac

SEQ ID NO: 136693 - DNA, 615 bp, Homo sapiens
atataaagttctatgccaaagcatgtttggcctgacaagttgggctgtcacttccttttgacaagactttcatttttatcagctttaaatgcatgtgtcattactattctggttaggtaacataattatcccactgcagaatatataatttcaaaagagtcttgtggatatttgatgccttttcctctgaaaacaattgaattgttttcagaccacttttatttcagtaagataaatgtaatcyttcctttaattgtaatgtagaatttaagagcatattgaaatgaaaagaaaagctcaacactacctatattttgaaagttataagagactagataagttggattttatgtttcttgtggtaccgaatagaaacaaaggtcattcaaactaagtttgaatgagaattaagtttaatggctcacttgctaaacctgagttgcacaatcctcacaattccttagggatgtggcaaggtcatccttaaatgtaaagttcttgctcacttaatggaaagcactgtagatacataaataacattgttacctgtcttagtgggtcagtataaaagacgggggtggtggtatatgtgagaatagtgaaatttatagctag

SEQ ID NO: 136694 - DNA, 615 bp, Homo sapiens
atataaagttctatgccaaagcatgtttggcctgacaagttgggctgtcacttccttttgacaagactttcatttttatcagctttaaatgcatgtgtcattactattctggttaggtaacataattatcccactgcagaatatataatttcaaaagagtcttgtggatatttgatgccttttcctctgaaaacaattgaattgttttcagaccacttttatttcagtaagataaatgtaatctttcctttaattgtaatgtaraatttaagagcatattgaaatgaaaagaaaagctcaacactacctatattttgaaagttataagagactagataagttggattttatgtttcttgtggtaccgaatagaaacaaaggtcattcaaactaagtttgaatgagaattaagtttaatggctcacttgctaaacctgagttgcacaatcctcacaattccttagggatgtggcaaggtcatccttaaatgtaaagttcttgctcacttaatggaaagcactgtagatacataaataacattgttacctgtcttagtgggtcagtataaaagacgggggtggtggtatatgtgagaatagtgaaatttatagctag

SEQ ID NO: 136695 - DNA, 615 bp, Homo sapiens
atataaagttctatgccaaagcatgtttggcctgacaagttgggctgtcacttccttttgacaagactttcatttttatcagctttaaatgcatgtgtcattactattctggttaggtaacataattatcccactgcagaatatataatttcaaaagagtcttgtggatatttgatgccttttcctctgaaaacaattgaattgttttcagaccacttttatttcagtaagataaatgtaatctttcctttaattgtaatgtagaatttaagagcatattgaaatgaaaagaaaagctcaacactacctatattttgaaagttataagagactagataagttggattttatgtttcttgtggtacmgaatagaaacaaaggtcattcaaactaagtttgaatgagaattaagtttaatggctcacttgctaaacctgagttgcacaatcctcacaattccttagggatgtggcaaggtcatccttaaatgtaaagttcttgctcacttaatggaaagcactgtagatacataaataacattgttacctgtcttagtgggtcagtataaaagacgggggtggtggtatatgtgagaatagtgaaatttatagctag

SEQ ID NO: 136696 - DNA, 552 bp, Homo sapiens
aagcttgtgcaaggggattataagaactgattttactttaacccttcctgctttataaaaagatcttgttgatggcaaaaagacaaacgctttagcaaactgtactgtacaccttgcatttgtttgtattaatattagttgttttattttttaatatggagtctcactctgttacccaggatggagtgcagtggcgcaatctcggctcactgcaacccctgcctcctgggttcaagcaattcttctgcctcagcctcccgagtagctgkgattataggtgccatcaggcccggctaatttttgtatttttagtagagacagggtttcaccatgttggtcaggctggtcttgaactcttgacctcaagtgatccacccgcctcagcctcccaaagtgctgggattacaggtgtgagccaccacacccggcagtattagttgttttatattgtagactcttaattgatgtggactatgtgttgtaaaatccctaccctgaagtacaatgcatttagatgtccccccgccctttttaacttaaatcctttttccc

SEQ ID NO: 136697 - DNA, 552 bp, Homo sapiens
aagcttgtgcaaggggattataagaactgattttactttaacccttcctgctttataaaaagatcttgttgatggcaaaaagacaaacgctttagcaaactgtactgtacaccttgcatttgtttgtattaatattagttgttttattttttaatatggagtctcactctgttacccaggatggagtgcagtggcgcaatctcggctcactgcaacccctgcctcctgggttcaagcaattcttctgcctcagcctcccgagtagctgtgrttataggtgccatcaggcccggctaatttttgtatttttagtagagacagggtttcaccatgttggtcaggctggtcttgaactcttgacctcaagtgatccacccgcctcagcctcccaaagtgctgggattacaggtgtgagccaccacacccggcagtattagttgttttatattgtagactcttaattgatgtggactatgtgttgtaaaatccctaccctgaagtacaatgcatttagatgtccccccgccctttttaacttaaatcctttttccc

SEQ ID NO: 136698 - DNA, 289 bp, Homo sapiens
aatgcaaacacaatcatgttattctctggtgaaattatctcatatattcctatcgcatttaaaattaattcagaatcatcccatgattatcaaaaccctacatgctcttccacaacatggtttacttccaagatatctcttcaactttttttttcactstactgaattggtgactaatagtcatatttttgcttttgctcaaaaagtcttgacttgtaaatttttcagtttctcctttatccacaggtaactctttcctcataaggcgaattgcttgcttccttgagtt

SEQ ID NO: 136699 - DNA, 289 bp, Homo sapiens
aatgcaaacacaatcatgttattctctggtgaaattatctcatatattcctatcgcatttaaaattaattcagaatcatcccatgattatcaaaaccctacatgctcttccacaacatggtttacttccaagatatctcttcaactttttttttcactctactgaattggtgactaatagtcatatttttgyttttgctcaaaaagtcttgacttgtaaatttttcagtttctcctttatccacaggtaactctttcctcataaggcgaattgcttgcttccttgagtt

SEQ ID NO: 136700 - DNA, 289 bp, Homo sapiens
aatgcaaacacaatcatgttattctctggtgaaattatctcatatattcctatcgcatttaaaattaattcagaatcatcccatgattatcaaaaccctacatgctcttccacaacatggtttacttccaagatatctcttcaactttttttttcactctactgaattggtgactaatagtcatatttttgcttttgctcaaaaagtcttgacttgtaaatttttcagtttctcctttatccacaggtaactctttcctsataaggcgaattgcttgcttccttgagtt

SEQ ID NO: 136701 - DNA, 475 bp, Homo sapiens
tctccccggatggctgagggttgtcattggctgtgtccttccttgtgcatgacaacaggagacatagaaggtctgtaagcagccctgcaagccaggttctgagcaagccctcctgtgtggggccctcttacctggacataggtgtgtaaaccaaaaatgaaactctaagctccctaaccaactgaatgaactcctcctctcagccaagcacacaccaaaatcaacctgaartacaatgcagcccatgatcggaacggatgattggatatgccttaacttaccctcttccctttaaaattcaggcacaactgaccagcttttaatatgaagacagagaccttgagactgacaaagaaaactctttatagcaataagataccaatgtgacagataccacgtcctaagagaaatcaaagtattttccccaagatattgttatttaatgtattgaaaaatgcctctgcaaagctggttc

SEQ ID NO: 136702 - DNA, 475 bp, Homo sapiens
tctccccggatggctgagggttgtcattggctgtgtccttccttgtgcatgacaacaggagacatagaaggtctgtaagcagccctgcaagccaggttctgagcaagccctcctgtgtggggccctcttacctggacataggtgtgtaaaccaaaaatgaaactctaagctccctaaccaactgaatgaactcctcctctcagccaagcacacaccaaaatcaacctgaaatacaatgcagcccatgatcggaacggatgattggatatgccttaacttaccctcttccctttaaaattcaggcacaactgaccagcttttaatatgaagacagagaccttgagactgacaaagaaaactctttatagcaataagataccaatgtgacagataccacgtcctaagagaaatcaaagtattttccccaagatattgttatttaatgtattkaaaaatgcctctgcaaagctggttc

SEQ ID NO: 136703 - DNA, 563 bp, Homo sapiens
aggaagccagggtgtgtggacatagagagagagagagagagagagagagagattgtgatgtatgtacaggactaacactgagacctggttatgtaatggtgtagtactgagtatcatccccaaatagtgaggtttcattccawgaagactatgcatgtatctcatttgggaaaacagcttttgcaggtgtaaattaaggagcttgaaacagggagatggtcttagattaatcaactgggacttaaatgcaaactcaagtgtcctaaaaaaaacaagaggtagagagacatttagcatagactgaagtggagaaggcagtgtgaacacagagacagagattgcagtgatgtgtccacatcccgggagagagaagccaccagaagctggaagagctaaatcagactgctccctagagcttcagaaggagccagaactgatgactccaagatcttagcccagtgaaactgatctggacttctgaactatgagagattccattcctgttgtttgaagctaccacatttttgagaacttgttacagtagcccgaggacactaacacaa

SEQ ID NO: 136704 - DNA, 563 bp, Homo sapiens
aggaagccagggtgtgtggacatagagagagagagagagagagagagagagattgtgatgtatgtacaggactaacactgagacctggttatgtaatggtgtagtactgagtatcatccccaaatagtgaggtttcattccatgaagactatgcatgtatctcatttgggaaaacagcttttgcaggtgtaaattaaggagcytgaaacagggagatggtcttagattaatcaactgggacttaaatgcaaactcaagtgtcctaaaaaaaacaagaggtagagagacatttagcatagactgaagtggagaaggcagtgtgaacacagagacagagattgcagtgatgtgtccacatcccgggagagagaagccaccagaagctggaagagctaaatcagactgctccctagagcttcagaaggagccagaactgatgactccaagatcttagcccagtgaaactgatctggacttctgaactatgagagattccattcctgttgtttgaagctaccacatttttgagaacttgttacagtagcccgaggacactaacacaa

SEQ ID NO: 136705 - DNA, 554 bp, Homo sapiens
gtaagcttccaactggcaactccaaatgactattttcagtatacaacttacttggagtctacttagcatcttcagttattgaacttcctcctttaactcacttccaaaatactactctctcctccttccttctctatttctttgttggctcttcttcctctgccttctcttcaaatatttctacttcctctcactccttctagttctcttttctgtttccacaatacttgttctatcaactactcctttcacttcattcacaataatactgatgattcccaagcatatatctctcatcatgcgtccccctcacatatctgctctttaattcttctttttaattcattkgataccttctaaaagtctctcacaattcagatagtccttcaagccaggaacatgggagtcattctcaaattatctttctcactcaccccctgtcccatctccaaatttttatataagcttcagatttcatggactgtacttaaaaattttttatagttgatgtgtctctatttcagcagctactgtgttatcatttctcatcttag

SEQ ID NO: 136706 - DNA, 614 bp, Homo sapiens
ttgctcttaggaaatatacacagaggtagttagggasaaactagcaaatgatttaggggaaaaagtgatacctacagagagagcaaacacaataaagcaaatatagcaaaacattttcaattggtgaatctgggtaaagggtatacaagattcttgcaactcctctattagtttgagatcattttagataaaatatttttggctgggcatggtgactcacgcctataatcacggcactttgagaggctatagcaggaggtctgcttgagcccaggagttccagaccagccctggcaacagggtgagaccctgtctctctaaaaaattaaaaatttgtctgtgtggactggagtatatctgtattcccagccacttgggaggctgaagtggaaggatcacttgtgcccagaaggttggcaccacaatgaacaatgactgtgccactgcactacagcctgggcaacagagcaagaccctgtctcaaaaaaaaaatttaaacctcccacattccctgttacatgtaagataaaagtttgaactccttggttaggctctctgtgatctgactcttgccccctctaccattatcggtcatcaactgagaggaggaccac

SEQ ID NO: 136707 - DNA, 614 bp, Homo sapiens
ttgctcttaggaaatatacacagaggtagttagggacaaactagcaaatgatttaggggaaaaartgatacctacagagagagcaaacacaataaagcaaatatagcaaaacattttcaattggtgaatctgggtaaagggtatacaagattcttgcaactcctctattagtttgagatcattttagataaaatatttttggctgggcatggtgactcacgcctataatcacggcactttgagaggctatagcaggaggtctgcttgagcccaggagttccagaccagccctggcaacagggtgagaccctgtctctctaaaaaattaaaaatttgtctgtgtggactggagtatatctgtattcccagccacttgggaggctgaagtggaaggatcacttgtgcccagaaggttggcaccacaatgaacaatgactgtgccactgcactacagcctgggcaacagagcaagaccctgtctcaaaaaaaaaatttaaacctcccacattccctgttacatgtaagataaaagtttgaactccttggttaggctctctgtgatctgactcttgccccctctaccattatcggtcatcaactgagaggaggaccac

SEQ ID NO: 136708 - DNA, 614 bp, Homo sapiens
ttgctcttaggaaatatacacagaggtagttagggacaaactagcaaatgatttaggggaaaaagtgatacctacagagagagcaaacacaataaagcaaatatagcaaaacattttcaattggtgaatctgggtaaagggtatacaagattcttgcaactcctctattagtttgagatcattttagataaaatatttttggctgggcatggtgactcacgcctataatcacggcactttgagaggctatagcaggaggtctgcttgagcccaggagttccagaccagccctggcaacagggtgagaccctgtctctctaaaaaattaaaaatttgtctgtgtggactggagtatatctgtattcccagccacttgggaggctgaagtggaaggatcacttgtgcccagaaggttggcaccrcaatgaacaatgactgtgccactgcactacagcctgggcaacagagcaagaccctgtctcaaaaaaaaaatttaaacctcccacattccctgttacatgtaagataaaagtttgaactccttggttaggctctctgtgatctgactcttgccccctctaccattatcggtcatcaactgagaggaggaccac

SEQ ID NO: 136709 - DNA, 320 bp, Homo sapiens
gcactaactcagtaatcatgtggaagataagaacaacaatatcaccaacaagacatccaatmttcaatggcagatactctttcctttcaagtgaaaaaaaaacagtatggcatattctctaacaaacccagaatttctaatatttgcgttcttccttctttctttccatcttcctttctcttctcttcccttcccttgccttcctccttcctttcttcttttcctcttccttttcttttcttttttctttacctttctttcttttcttttttctccttcgttccttctttccttctttctttctttcctcttattcttcc

SEQ ID NO: 136710 - DNA, 599 bp, Homo sapiens
gccaaaataatgcaaatgcaaatcttacactcatttctatgtaggtttcatttaatctttgaaattaaaatgaaattaaaagatagtgatcttttgatgaaattagactaaaatgaactataacaaaataagaacttacttatattctttatatggtcaataaagatgtgatagtggaaaaaaacaagatcaaatgaaggtgaggatttaggaagttggaaagatagctgaaactacaaaatggtatatagccagtgaacaattagacacactgattgatgaacttcagcttttggcttggtgagagcataaaatgagagcagctgaggtttgccaatttgtaatctccttgtggacaaacaggggaaaacacatctcagcctaataagatttctctactaaagagtctagacttgatccatttgtccttgcaattcaaaagctaattcaaatactgatttgatgtattgtgtgaacaaccattgctgattatcatcgcatacctggcattctcttgtatctgatatctaaaatatttggtaattcctggactttctcttttcaaacccagkacggtttaatttgagtcttagaacagt

SEQ ID NO: 136711 - DNA, 534 bp, Homo sapiens
gctgttctcatgatagtgagtgagttctcaagatacctggttgtttaaaagtgtttagcacctcccgcttctctttctccctcctgttgtggctatgttaagacatgtcttcttccccttcaccttcagccgtgattttaagtttcctgaggcctctttcctgtacagcctscaaaaccatggccaattaaatctcttttctttataaattaccaagttttaggtatttcttttttgagacagagtctcgctctgttgcccaggctggagtgcagtcacatgatctccactcactacaacctccgcctcccaggttcaagtgatccttctgcctcagcctcccaagtaactggaactacaggtgcatgccaccacgcccggctaattttttgtatctttagtagagacggggtttcaccatgttagccaggatgttctcgaactcctgagctcaggcagtctgcccgccttggcctcccaacgtgctgggattgcaggtgtaagccaccatgcccggcctaggtatttatagca

SEQ ID NO: 136712 - DNA, 534 bp, Homo sapiens
gctgttctcatgatagtgagtgagttctcaagatacctggttgtttaaaagtgtttagcacctcccgcttctctttctccctcctgttgtggctatgttaagacatgtcttcttccccttcaccttcagccgtgattttaagtttcctgaggcctctttcctgtacagcctccaaaaccatggccaattaaatctcttttctttataaattaccaagttttaggtatttcttttttgagacagagtctcgctctgttgcccaggctggagtgcagtcacatgatctccactcactacaacctccgcctcccaggttcaagtgatccttctgcctcagcctcccaagtaactggaactacaggtgcatgccaccacgcccggctaattttttgtatctttagtagagacggggtttcaccatgttagccaggatgttctcgaactcctgagctcaggcagtctgccygccttggcctcccaacgtgctgggattgcaggtgtaagccaccatgcccggcctaggtatttatagca

SEQ ID NO: 136713 - DNA, 563 bp, Homo sapiens
gaattcaacccgcacaatgagggaagcaatagcactttcaaaaggcatggtagtgttttttctctgcaagcaaagcatagtagtgggaaatggtgctattaaaatgggattattaaatataatgaaacgatggaattttataatggtgggaccatgcagtgccacttaatcactatagacagcctacgtagagtaagcctaatccgtagcaggaccagagcagtaccaagaatggtttgacctacaaagatcttgaacaatcttttgctagcatatcatgaaattctcaggattgccttgctgccccttcaccttctgccttgattgtaagtttcctgaggccttctcagccatgtggaattgtgagtcaattcaatctcttttctttataaattacccagtytcaggcagttctttatagcactatgaaaatggactaatacagtagccttcttaaggatttatataaacgaggttttatattactcatggccccacatgtaattcccaaaattgagtcaattcacaggcccaggaatctttaagagaaagaaagtttaggc

SEQ ID NO: 136714 - DNA, 615 bp, Homo sapiens
gttacaatgagctgagatcatgcctcttcactctagtctaagtaacagagcgagaccctgtctcaaaataaacacatttttgagatatattatggaattgaatttagtaactgatagttatatgcttatgcttatggtgatttgccatccgtatctaaaagttttcttctgtgtgtcatcatttctcaaaaaaggcccagaattgaagagctacgaaatgacttcaatttcaggaaaagccaataatcatttgcataacactcaaataagaaaaaaaaatgttatacaggcaactgaatctccacacactttcagtgaatattgtgactttgttaatcctcagttcatgacaaacaatttgccagaaacttggtgagctcctgttgagcacaaaatgattgaataattgctttgaatagtaaactgtaacatgataaaactttcccatatcttttcttcataaacattctggttatattgagttgctttcatagatatttctcatagtttattaccttatcaatttagatatttgctgttgttattagacacagrcatacatcattttattgtagtgtgctttcatgtacttctcagacactgagttttcacagg

SEQ ID NO: 136715 - DNA, 510 bp, Homo sapiens
actataatagacaatgtatatgcgtattagttcattctcatgctgctaataaaaacatacccaagactgggtaatttatgaaggaaagaggcttaattgactcgcagttcaacatggctggggaggcctcaggaaacttacaataatagtggaaggggaagcaaacacatccttcttcacatgtggcaggaagaagactgaaagccgagcaaagggggaagttccttataaaaacatcagatctcatgagaatttactcactatctactcacacgctattctygtaatagcatgagggaaaccacccccatgattcaattacctcccactgggtccctctcaccacatgtgagtattataggaactacagttcaaaatgagatttgggtggaaacacagccaaacgatacctataaggtactaatctaagcattttgtgtaaattatgttatttcatctttaccactattaagacttacggtatacaaatgagtaatatgtggctataag

SEQ ID NO: 136716 - DNA, 534 bp, Homo sapiens
agatctgcatgtctttaaatcaagtgctttacctactacatcatctttctttcatcaatgactaggaaaatggtgcaacagataagtctgtaacaattttttatcctatgtaaaccaaaaaaagtatcagacagttgtcmatcaattaaaaaatttattttgcaaaggttaaggaggcacatgcgggaaacaggcccatacctttctacaatgatgattttgagggcttcaatatttaaaggggaaagggttaatactggggacagagcaagaaatttttaaaaggtgtaggtagatgaggcaaacggttgcattcttttgagtctctgatcagccattcatgtgtgagggaaagatagagaaatagtcacttatgcattcatctggctcagtgaatctgcattttcacatatgataaaataaatgtagggcagaggaagcaatcagataggcatctgtctcaggtgatcagagggacgattatgagttctgaccttttttccatacctgtgaagataaggtatcaatttacat

SEQ ID NO: 136717 - DNA, 622 bp, Homo sapiens
ggacttggtgggcattttttgcccatccaaattgtccttccaatgcccagacttcagggttgattccctcctcaagtaggggatgacaagtgggtaacttgttccccatattcatgtagataatagctccagctttggctcatatatccctccctaataagggtgtgggactttcagccatgacaagaaaggcatgtgaaaagagcaaagtctcccaattgcaactgagaaggtggaagaaatacctggttacaggctgtcctaggattccttggatggtaacggactttgaggacagtcagctgggacaggagattaacactgacaaggccgcaccagtgtccaggaggaagtcaattttgtggccctcaatggttaaacatacccagggctcagtgagggtgatgacatgagctgrtgcttgccctgggcaccctcagttctattgttggatcatctggttgggggcttctggcccagagaacctttgtcctctggggcagtgtgccttccagtgattgcctcagcgtagtggacatgggcaagggggcagcttgtttctggttggacaatcttttttaaggtgtcctagtaaaccacaccaataacaagccctaccagg

SEQ ID NO: 136718 - DNA, 557 bp, Homo sapiens
ttgtaatttctgaatttatattcattgtctataaaatgagactgatttaagcacatttcctagaaaatataaatatgaatgcagagagaaggagaagcatgcactgacttacatactcacacaccacaacccacacaggtattctagaacatcataaaagatgattgctgtaatctacaatacatcaggtatagattttatcaagttttttrgctcttacagataaaaattttcctataaatgggtaattattattttaatatgtttatacaatttcaacttatgcaatcattttcattaattttttctgcttttaaaatgagtagataaattaacctggctttacaaaaccagtaaattaacaacaatagcaacaacaataattagcatttaggaatactaaaatgttacagagttccctaagacatatggtgtagcctatagctcctacactacaaacttgtacagcatgctactttactgcatactgtgagtaaacgtaacacaatagtaagtttttgtgcctttaaacatatcttaacatagaaaaggtatgg

SEQ ID NO: 136719 - DNA, 579 bp, Homo sapiens
caagattagattgtagggaggcaagactacaagtagaaagaccagttaggagactactgccattgtccagatagtaacagtggagatggtgagaagtgtctggattctggatatattttgaagctggaactgataggatttgcttatgaatcaaacatggagtggaggagacaaacaaggagtcaagggagatgctgagttttaggtttgagtgactagaaggttagaattgccttttgctaatctggggaaaattgtrgaagaagttaggttcaaggaaggaaaccactactgaaattttgttcatgtttcattttccatgtcaattaaacataagagttattaggtatccaactgttgttgaatatagaggtccaggcaataaatacaaacataagagacagtagtatataatgctattttaagtcttgaagactggatgagatcatttaggggataagtgtagctagacaagagatgagaaaagactgagctttggggcaatacttatctaaatgtcagagagagagattagaaaacaacaagtgaggctaggaagggaggtaaaaaagctaaaga

SEQ ID NO: 136720 - DNA, 579 bp, Homo sapiens
caagattagattgtagggaggcaagactacaagtagaaagaccagttaggagactactgccattgtccagatagtaacagtggagatggtgagaagtgtctggattctggatatattttgaagctggaactgataggatttgcttatgaatcaaacatggagtggaggagacaaacaaggagtcaagggagatgctgagttttaggtttgagtgactagaaggttagaattgccttttgctaatctggggaaaattgtggaagaagttaggttcaaggaaggaaaccactactgaaattttgttcatgtttcattttccatgtcaattaaacataagagttattaggtatccaactgttgttgaatatagaggtccaggcaataaatacaaacataagagacagtagtatataatgctattttaagtcttgaagactggatgagatcatttaggggataagtgtagctagacaagagatgagaaaagactgagctttggggcaatacttatctaaatgtcagagagagagattrgaaaacaacaagtgaggctaggaagggaggtaaaaaagctaaaga

SEQ ID NO: 136721 - DNA, 556 bp, Homo sapiens
ccatatgattacacacagacccaggagaatatataaaagatgaagtctcaacttttcatcactatttttattattgatatttattgcatatcaatagagtcctaggaaatagagttgctagtaaatcctaatgctgtcctaaaggtaatatggaaatctgtgtatcgtaaaacccatacagtgcttcagtgggtgattttcttctgcacctaccaagctctggtcatattcctgctgaattctacattatacaagtaaaaaagttatatcctagtagggcaattttcaatgtataattataataatgcccatgttgcctgcactctgtatgaattactaagtaaggttaaaatggaatcacagagtgcttttcaataaaattagggcatccataaacgattcttrtgttaattatttagtattagcttcatacctaaagaaaatcaggcaggtactggggtgttgctcctgcttctcataatatataaattttattatcaaattactgtagcagaaagtgttttcatttctttaatgaacaaaatgatcacatttc

SEQ ID NO: 136722 - DNA, 445 bp, Homo sapiens
agtaattgggtttcactaatatytgattttccctttcaaatgaaatgcttgatgtggtagcaacaaaatgatcatactaaatcaccggtggactataacctggcaaaataactacgtctctatattttgtataactagcccataccaggattcatggcttagaatgaaagcataaatgtaggaattcagtggctgggattcctatttccttttgtcaagagatacttacaagatgaccaaaaactacctaatcctccttggcttcatttcaaaaatagccactgttagctctcaagaataaccacccatgaacatcctactaaaacgtccacaaaataatctcggtagatggagaagttttaaagggtgggaatagaatgcttatcatcttggagcacaggtgcctgtgattttagatctgttaaactacagaccccactaaaat

SEQ ID NO: 136723 - DNA, 627 bp, Homo sapiens
attacacttttcttaccacccaaaatcttatgaaatgtttggaaataccaataacatccttaaattaaaattcataaaactttcagaaatatttgagcttggcccaagatactcccactagcccttatggccatacaatccactccccgaggatgaatcaattgtcaccttatgaactggctagctggaaggttcatgcattttgaaatttttactttgtaaaatttttttgtagacatggggtctcactaygtgttgcccaggctgatctcaaacttatggcctcaagcaatcctctcacctaggactcccaaagtgttttgccactgtctgtaattcaaagccattcttcatgtatcccaaattgtagcctctgccttccatcttactggctgctggatgtgtcaatgatcaccagatccccgtgatagaaacctctgggaaattccaatctcaccaaactagactatagggaattacagctaatgacatttccacttgcactgacatggataaatgaccttaaacaaatcaatctgtgcgtcgctagtgtcccctctcccagaaaagtataaccaattactacaatctactgatcagactctaggtaattctaaatttgaattc

SEQ ID NO: 136724 - DNA, 610 bp, Homo sapiens
caaaaaaaaaaaaaaaatccagctcattataatggagtgatctgtgtcttcaagagctaagtaaattgacctaagttcaagagagaatttagtagtgacattaaaagtcattttaaagaaaatttggaaagaagcatgacactgaatgcaatactaagacccttttgatgaaacataacaaacaagcactggcctcagcctgttaaaaaggtggttgagatgtgttttggaagacccctcaacctttcctaacaktcccatcctcccaactctctaaatgcccaagtttatctgattccctcttgctaatgtgggaatcatccgttcatcaactcattcaacaagccagagtctaccatatgccagtgactgtccaagaacagaagtgccctgctcttcactgacatacaggaaattaagaactaaacaaataattacacaaaattattcctgaaagtgataaatgccactaaggaaatgaaaaagtgtggtgtaatagaaagtgcttatgggagtatgaacgtaggtggtggataggaaaaacttccttgagaaggtgacattcaagttgagacttaaatggtaagaaggagccagccatgtgaagatc

SEQ ID NO: 136725 - DNA, 540 bp, Homo sapiens
cagtttccagtcatttccaaagttacttaggccaacatctctttttccttactccctccagtgaggttatgtcatacatttgtaattgagttagattcctttgcccattccttcctggtttatatgctttcctgttgcacttattaatagcttgtttcttttcatggctttctggtatcacctgttgaatagatgcattacagtgtgtttattgaaggtttatgtccatcacctattgaaggacatcttggttgcttctaggttttgatgattatttataaagacactatggtgtgcagatttttgtgggacatatgttttcaatcagttggctaaatgcttagatrtgtgactttcaaagtggctataccattttgcattcccactggcaatgaatgagagttcttgttactccacatcctcattagcacttgctattgccgattcctttcatccttaggaatatctaaatttaaacacatgtaatttttaggtttaaactattctgtatcttctggccacagttaaagctacctgagg

SEQ ID NO: 136726 - DNA, 576 bp, Homo sapiens
aaccagcagaaaaaaaaggaagaagaaaaaataaaacatgtcaagacaataatgtgatcaataggttaaagagaggcattgatcatttttttgaaagttttttccctttataccctccattgtgcaggtcaagtgtctcctaggatggagaggaggggctctgcctaaaggaagaaggtcaatgccagactctgagtctcaaagactaaaattaatgagtatatagtgaaacaataatattaaaggtcagaatttgtagctaaagaaaaagattctgagattttattatcattactacaaattccctatttctatatcaaaactaaccatgttgaactctgatcacagagttttactataagccatagtgtattgaggatggaggataagaagttcctaccagacaggaaaaacagttcttccatttctcattagcagaggctggagacagaaaggragaaacatgagttagaaggagtatattcccagccaggggtgaccctcaggcagtagaaaggaggtaggtgtggtgcataccctcaagtgtatgaggaaactctagtgtgaggcatgctt

SEQ ID NO: 136727 - DNA, 613 bp, Homo sapiens
caaaaacatggagatcaaaatagacttgggggtattatagccaataaagaccctgtagcaagaggatggccaacttgtatgcaaaccattaacagcttatgctttgttaaggcaactaaagacattgcaatgggaacatcccttactatcttcatctctcattctatggaggcactgctgaactcataccatattcagtattactcagttctcagactggcctcacatgaggtcctatttcttttagctccttatrtcaccatatctaggtgtaacaatgtaaaccctgcaactcttttgcctttgttttaagatgagctgctgcacaacagcatagccctaattgatcaatgtctttctcccaggtcacatctattgagatatcccccttgcaaatactaatattgttgtttggcttataaatggaccttacttaatggatgaatctggattctatagggctggatacactatagtgtctttaactgaagaaacaggaagtgcctatcttccaaaagccacttcacctcaacaagtggaattaataatattaaataggtcctgtcaattggcagaaaaatatattcactagtatttatacagacagtagata

SEQ ID NO: 136728 - DNA, 598 bp, Homo sapiens
atggctccaaagctggcgagtccaacaattattaaaatgtcacagaagcagtttgtgatcttaaaacatctagcaaagacagtatctggcttgcttaattcagagtaagtgtctaaattctgaagacaattttattttattttaccaataatctttaccactgtctttatttcccaaagattactaaagtcacatgacattttaaagtttttctatttttctaataaaatattgtgtttagctgcttatttttctttcagccaattaattagagctcttttctatattttggtagtgaaacatcacacacacaacacatataaatacacagagagacagacagaagcaggtgatattatttttcatttgccagttttaagtttctttttcttgttttagaygatcggtctcttgattacctgttccctttcccaaacaattgccagccagacagcttcaaatttacattttcgtagaaatatttattaggtgaaacaaaatagagaattcatattctatttagagtgaggaaaaatggtgtgggtaaaagttcagtcaagacagccagcaaaggcagacactcttacaaatggaaatt

SEQ ID NO: 136729 - DNA, 535 bp, Homo sapiens
tatgcaatgtatttcttaaataatataatttaaaagccaaaattactccctgatctgtgggcagctgaatggatgttatgttagcaggcatgaaaatgacatttctctccttgtacatctccatcagagctcttgggtgaccaggtgcattgtcaatgagcagtaataatttgaaaggattctttttgagcagtaggtctcaacagtgggcttaaaatattcagtaaaccactctgtaaatagatrtgttatcatctagcctttgtagttctatttatagagcacaggcagaatagattcagtataattcttaagggcttaggatttttttaaatggtaaaggagcattagcttaaacttaaagttaccagctgtattagctcgtaacaagagtatacctgttttttgaagctttgaagccaagcatggacttctcctctatagctaggaaagtcctagatggcatcttcttccaatagaaggctgtcttgtctacattgaaaatttgttgtttagtgtagccaccttcatcaat

SEQ ID NO: 136730 - DNA, 564 bp, Homo sapiens
gtggctatagccttatgcaatgtatttcttaaataatataatttaaaagccaaaattactccctgatctgtgggcagctgaatggatgttatgttagcaggcatgaaaatgacatttctctccttgtacatctccatcagagctcttgggtgaccaggtgcattgtcaatgagcagtaataatttgaaaggattctttttgagcagtaggtctcaacagtgggcttaaaatattcagtaaaccactctgtaaatagatgtgttatcatctagcctttgtagttctatttatagagcacaggcagaatagattcagtataattcttaagggcttaggatttttttaaatggtaaaggagcattagcttaaacttaaagttaccagctgtattagctcgtaacaagagtatacctgttttttgaagctttgaagccaagcatggacttctcctctmtagctaggaaagtcctagatggcatcttcttccaatagaaggctgtcttgtctacattgaaaatttgttgtttagtgtagccaccttcatcaatgatcttagctagatct

SEQ ID NO: 136731 - DNA, 565 bp, Homo sapiens
gtgcatcaccatgcttagctaatttttttttttttttgtatttttttggtagagatgtggtttcactatgttggccaggctggtttcaaactcctgacctcaagtgatctgcctgtcttggcctcccaaagtgttgggactgcgcctggccgctactttcaaatttatctttctaaccagaaatgatggtaagcacatgatgaaagcagctcttggacgtattcatatttcttttcattccccagtttcttaagtttgggtgtagatgagatagcatataggtagttgttgatacgtaaacctagtggaaaagctgcattaactgaaagttgtcattttgtaataggtaaacctagtggaaaagctgcattaactgaaaattgtcattttgtaatasgtaaacctagtggaaaagctgcagtaattgaaagttgtcattttgtaataggtaaacctagtggaaaagctgcattaactgaaagttgtcattttgtaataggtaaacctagtggaaaagctgcattaattgaaagttgtcattttattaggacactaaatgttacta

SEQ ID NO: 136732 - DNA, 467 bp, Homo sapiens
aactatatcaactaaaatattcttcaatttcaatttgaacaaatacattaggrtatgtgtcagtaacccctcaaataagacattatgcagtcccaaagacatgagaataatacaatagactttggggacttggcgggaagggtgggaggtgggcaagggataaaagactacacattgcgtgcagtgtacactgctcgggtggtgggtcaccaaaatctcacaaatcaccactaaagaacttactcatgtaaccaaatgccacctgtaccccaataacctatggaaaaataaaaaaaaattttaaaaatttttaaaagagtcctttaaaaaatattgtatttactaatattttattatttgtgcctcttaagtgcttgaaactgtgcttatctttctatggtagaaatgtaaattattattttcttagatttatagcatgtatcataaaaagctatctggccagactg

SEQ ID NO: 136733 - DNA, 467 bp, Homo sapiens
aactatatcaactaaaatattcttcaatttcaatttgaacaaatacattaggatatgtgtcagtaacccctcaaataagacattatgcagtcccaaagacatgagaataatacaatagactttggggacttggcgggaagggtgggaggtgggcaagggataaaagactacacattgcgtgcagtgtacactgctcgggtggtgggtcaccaaaatctcacaaatcaccactaaagaacttactcatgtaaccaaatgccacctgtaccccaataacctatggaaaaataaaaaaaawttttaaaaatttttaaaagagtcctttaaaaaatattgtatttactaatattttattatttgtgcctcttaagtgcttgaaactgtgcttatctttctatggtagaaatgtaaattattattttcttagatttatagcatgtatcataaaaagctatctggccagactg

SEQ ID NO: 136734 - DNA, 552 bp, Homo sapiens
tagaaaaaggatgccctactcatggaatggcagatagttcaggaccagtgaaatataaaatgctcatatcgcctgtgagtatcgtggaaaacactgaacagggagatggaagcttcttagccttccagagttttatcgttttggtaatgtcatggcctggcatgattttagstagaagagtggcatgattatttattgcagaaagaccacacacaagaatttggagatggtttgaagtgtgtgtgattaagacagggatattaaccagctgtatgagagagaaagaataagaacctgatctaagataaatgggtgtgaagatggagaagaggggatgcatttcaaaaaggacactgattcaatagggtctaattattaatataatagaagggggaaattggtcgaaataaaagaaatggtgtttggtggcaccactgaacaataaataagatatttggtggtgagaaaaaaaatacagcaagtttagttgtgagaagttaaggtgatgaccttatctttcatattagtgaaatgcctgtggtgacatccaga

SEQ ID NO: 136735 - DNA, 583 bp, Homo sapiens
gtgcctatttggcctctaggggaaatttctagaatagcatttgcagtttccaaagagggtaacatgtcttcaaagtttctctattgcttatagattgaatgcatgcccttaaaaattcatgttgaaacttaatctgcattttggcatattaaaagatggagtctttggagcagttattaagtcatgggggtgctgccctcatgaatgaactaaggctcttatgtaaagggcttttgggtgtgagttcactctcactcttctgcmatgtgagaacagtgttcatacgtcccttgtgttcttccaccttctgccatatgggggcagagcaagaggacccttaccagatgccagtgccttgatcttgtatttcccagcctctagatctgtgagaaatatgtatgtgttctttataaattgccaagcctgtggtattttgttttagcaacacaaagacacatgaaagaagcatcattttttccatgaaataaccatatccttacttcccattacaaaaaaaagaagctcacctctaataaccactaatacaagcaaaggggcgatcaaaacagcatgtttcaaaatt

SEQ ID NO: 136736 - DNA, 532 bp, Homo sapiens
cttcctgcctgcccagctacttcttccacagtctcccaagtcagtaaatggcaatcctcttcttttactttattcaaatgaaacaaacaaaataatccttgacttcactctttaatggtgcatattcaatctatcagtaaatcatgttgactgtatttcaaataaatccagaatcagtttctccccaactccagcatgaccatcctggatatattatcatgtatctctgggattaatttaatatctcccaatttgctgtgttacagttttttttttctgaacagcatttcgagtggtccttctgaaaataaaatgagcttttatcaacactattaattttgagatgcctgtgacaatgctatgttaaaccctccaatggttctctgtctcattagggtctttgctcarcaactgtctgctctctggctttctgcttaactctgacctcttttccactctcttctccagcttcctgttttcaaacatgtgatatgttgcttccacatcaagattaattgcacttgtgtttcct

SEQ ID NO: 136737 - DNA, 558 bp, Homo sapiens
tgacttcttccatgcctggarcataacatgtgctgtgtagtattagttatgtgaataaattatggataaatatcttcagtgacttttaaaccctctgctctctcacccatctggctggccccatgttaactctcatgccactttccaatccttgttcatgtctattattttgttggctaagtacctcattcattaatagaattttacatataagctaaatgtttatttaaagtatttggcctgtttcacattgaagttttgtcttttggagcagtgaggtggtgagcagtgcctgaactcagggttttccatttggaaaattagtgcttttagtttttgattttttaaaccgtattttttgtataagatgctattataaaccagcccaatttcagggataaaaaatgtaaaaaaatggcagctgccagttttaagacaccgttgattatcctcaactcagcaaagtgaaaggtatgtatgtttgaatcaagaaaatacagtagttggcttttctactgcctgcattatgttatccaggatgagagggaactaaaaata

SEQ ID NO: 136738 - DNA, 617 bp, Homo sapiens
tatgagctctgatctcctgcttgaaaagttctttcagtattataacaccctctcctacttgccagactgtttgaattttgctaagcaataatgtattgaatgtgatgtttctttctatgtgtgtatgattataattaatccaaaaagtaaacaacctagatccggaagtaattttatagcttatagaacataatgagaatcacacatcttatttargtgctttcttactagaggagctccataatcacttataaatccagtgtaattatttccttacttttctttcggttactgctccataagatttcaaagaatgcctacctctaaagttcactcttaattaaataaattcatcctaataatacctagaaatacccatattaatctttttaaaaggcagtgacgttatagagtcagaaggtccttgtgaacagttcatatctttagagatggtctcatttattttgactgtgtctatattttatgattgcttatgtagcattttcaactttaaaattcatgtcaatgaatccttctcaacaccagctgccatctcagttaaatcttaaatagacaaattgctcatatttcatgtacagttattcttgaagaagctt

SEQ ID NO: 136739 - DNA, 485 bp, Homo sapiens
agtctgggagacacatctctaactgcatttctctatgtcatagagatcagtgtggctcaaagaatggtccacagattggtgctgctctgtaacccgagtaggatgggtgcagaaattgagtgtcagcattggaaaagctttcacagcaacttgacggaaaaattatatattgattaattctaaaagcaatgaatttgcctttgtattttgcatgtctttttttcatttcaatttttaagtggttaattttcttgtattttgtaaaaggtttgttccataatcsattggaaaaaaaaaataaaactggttcctcctgacaaatagctttagaagtgctgccaaatagtacgggcatacacaacaaagtttactgaatttgaaattaaacaaaatgagtgcacagtagggcgactttagttaacagtaacttattgtttatttcaaaataactaagagtggaaatggaatgttcctaaaccaaaaat

SEQ ID NO: 136740 - DNA, 587 bp, Homo sapiens
cagctctagattcttgctccccttcccttcagttcctcaaacatgtcacattcttttcttccttaggtcctttgcacaagctgtttcctctgcctcactcttccttctgtgttttgcctgatgacttctatttagttttccatgttcatgctttgatggcacaccttcagagacctgacaagtctgccaatttggatatcataccaacttcattttcatggtgaacttcacagcagtgattttatactgtatttatatgtctattcttcacttaaagaaaaacatattagactttagcctgcaggacagcaatatgtacatctcttttattcattaatgtatctggcatgcctagaatatctggcatattgcagataataaatcattgttgaataaatgaatgaagagatasaataatatcttctttaatctttctccattaccattaccaagaatttgcttgattatgtcaattgagagctcacaagtgtcacaggatcctttgggtgtcacttttccagcatgaaacctctgtggctggtggtatcagcctttgcccaagttttgcttgggcccactgggctcat

SEQ ID NO: 136741 - DNA, 453 bp, Homo sapiens
gtattgagtctgcatgaatgatgtgaaacccattgataaaatttatatgaatttcagaaagatagggataacaagagaggattatagaaacttatacaagttattaattttctttgttcatagttcctgaacatcagttataacactgaagtcttagaaattagtttctttagyttcagggcttttaaacctaaattgttatgttacatttttctaccaagatcacaaaatgttaaataatggtacatcgcctgggtaggctaactgaaaactttttattgatatgaaatgtcagtaacttgggtgactatttagcagaaaggtcaggtgtttttcaaggtcatgtaaaatatggagaataatccttggtttgcaatgtttgaaacttaagaggataagcacagtataataattagtctcaaatttcatggtttatgagaatatgtgttgcta

SEQ ID NO: 136742 - DNA, 558 bp, Homo sapiens
atatgattccatttgtatgagacatctaataaagtcaagcttatggaagaaaagtagagaatggtggttgccaggagctggcgagaagaacaaatggggagttgttaattaacaggtataaagtttcacttatgaacgataaatacttctataaatctgttatagaacattttgcatataagtaacaataccctattgtaaacttaaaaatatgttacaaggatagatctcctgttatgtgttcttatcacaatattttttaaagcaaaagtcatcaatgggtgatttttatggtgttagataatggctaawgctaaaaaatacaaaactgtaaatccatacaaagtaactcagttctagagttattaagcgaatgttggaatatcttcttaatgacgcttcagagatggatagagcatcattttagttttgcacaaagaatgcactgttactgcccttattttctgaaatgtgttttgtagcgttataagtatatatatcacaatattgtctgctgatttcattaagtgaaataaattaggcaaagaaaaacagata

SEQ ID NO: 136743 - DNA, 407 bp, Homo sapiens
gcctatagcaagagcctcctaatttgtttgcttcctcatttaactctctccattctatcaaccacaaaactgtcaatggaattgacatatataaataaaatacataaataagatcatatggcatccttctaaaaaccctccaactgctttcattatatttagaataagatccagcgacctactgttccctgtgtcaacctatgtagtataatccatgcccaccacaacacctttccaaactgctatcttataaaggcttgyttccctttacttgtttttcctatactcatggcttgtttccttttacttgtttttcctgtacgcatggcttgtttcccaaacatactggattcattcttgtctccaggtgtttacacttgttgattcctctgtttgtaatgctttta

SEQ ID NO: 136744 - DNA, 607 bp, Homo sapiens
attatattatatcaagtataaaatttatacatacacatatatgtaagtactatatttttttcaattaaaaacaaattttccctgtaaatagcagcatagtaaatgactctgacctgttatttcaacaaacaacagtactaggaggcagttacagtracttaattataataactaaaatattatgcagtctaaacaactgtggaataaatcaaacaaacaaaaaggatttccgttctgtggcctattagatcaagaagttaatatttattactttgctctttttttaataaacaaaaataagttgtatggaacaaatctgtctataaattaacatgcatttggggtttgtagttaatcatggcttgttttgttgtaatgaatttcctatcaatatacataaatgtacattttgcattatggtttaatgacacagtcattagaagaagaaaattgctaaccaaatcagctaatgaaaatggtagattatgtgcaaaaccactcagattatactataatattttaaaacgtgtagattttgaggattttatttaataaatattttagcttaactattgtttaattatggaacatattgtattttattaat

SEQ ID NO: 136745 - DNA, 586 bp, Homo sapiens
tttggttacctatcaacaaggaaaagaaaattccccagtaggccacaatatccccactcctcactggaccttgtaggttcctttagtttagccttttaatacttgtccaaacttaattgcctttaaattcaataacatctcttgtgacttctgatcaacacatcttgtttttactcacatgtctttccaaacagtcctataacacttggaagacctttctccatcacagttttcgattaataagataattcagaaactrcagtaagctgagggcagcaccaaaatctggtatcaaagagtcttttagtgaaacatcaacacttctcaaagaccacttttgaatatcaatgtaattattctagtgtttgaagagccattctcggctaaataaaccagaaaaagattgttatcaggatctttaacaatcctcttccttggcagaagtaaggggaagaacaaaaatgcaagggatatatttattctagtttcagaaaatgtgtatttcctccttcaagaagttttgtgagttcttataacttcctggtgttgaaacacaatattacacatctctcatcctgtgcattga

SEQ ID NO: 136746 - DNA, 283 bp, Homo sapiens
ctactttaccaatctgaatattgcagttttctgaggtcatgttcaattccaactcctctcagcttctagtaaaaaacctgagtataatttgtcaagtttacctgattggtagtatatgttttcacgtagcaaagctttcacattttgctgcttctgtaagcctggttgttggtacttaacattaaaaagtcagaactactaattatttatttyttgaagaaaaaagaaaacattgtaacttttctaaaatgattcggtgtgacatgatcaccagagtgacatc

SEQ ID NO: 136747 - DNA, 586 bp, Homo sapiens
atactagggtgcaatatttcaggtttcataagactggtattgattgtgaccactctcattttttattgtgtaagttcatatggggttattttcaaaatgttaacaaggcaaaaatatattaagaaatagttgaataagcacatgtgaattgtgttgtaaacaaaaagttagaataaaaaaatccacttatttgaattatgcagaatagaatacatacctagaaataaaacaaaaacgtcttatcatgagtattaagataaaatttaaggcataaactcacttcttagaataagtaactcccaactaactttctaggattttaaaacataacacagtgaaaacatacataaacataactctacattttatttattcttaaagtttaagtgtattatacaagaagaagagtttatattcgagagacagaaaaagtcagaatttttgtttggatcaccaatatatcatagcttacaaaaaarctgtcttaattaaaacccacaacataatttttttagatttttaagaaagattctattattcttctttatacttaaaaatggatgattcctactttgcccacttttat

SEQ ID NO: 136748 - DNA, 600 bp, Homo sapiens
ctgctacggaagcttccgcagagccggccgggctttcccagtcctccgtggggtaggtaaagaagggctccgtgggagagggggctgatgacgggacctcgggcagcgtagcagacgcagcttacacagttcgccctcagccccggttctgatccgcggcctcatgtcggggacgtagttcgtgacattcccatattagcgagaacagaacgactgtttttgcgctccctccaccgcaaaaaaaaaaaaaaaaaaattcctctgcttgttccattcgtacacagaatgtaacccaagcttgtgtcaaagataaatcatagccagccagtaagtaaagcgctgaaaacrgattttattcagtaactactgcaggtaaagagctgagctccatcccggtttgtgcagaggtgactttgggcgttttaaagggagaatgagcgaggcgggagtgtaggggctctgtagagtcagagaagtgtagtatagtgaagtcagtgcaaatgtgattagccggctgtgtctgctagctcgcagttgtcttagggagaattctatcctcccgcagagactgggagacaaaggccctatccttcctaatga

SEQ ID NO: 136749 - DNA, 600 bp, Homo sapiens
ctgctacggaagcttccgcagagccggccgggctttcccagtcctccgtggggtaggtaaagaagggctccgtgggagagggggctgatgacgggacctcgggcagcgtagcagacgcagcttacacagttcgccctcagccccggttctgatccgcggcctcatgtcggggacgtagttcgtgacattcccatattagcgagaacagaacgactgtttttgcgctccctccaccgcaaaaaaaaaaaaaaaaaaattcctctgcttgttccattcgtacacagaatgtaacccaagcttgtgtcaaagataaatcatagccagccagtaagtaaagcgctgaaaacagattttattcagtaactactgcaggtaaagagctgagytccatcccggtttgtgcagaggtgactttgggcgttttaaagggagaatgagcgaggcgggagtgtaggggctctgtagagtcagagaagtgtagtatagtgaagtcagtgcaaatgtgattagccggctgtgtctgctagctcgcagttgtcttagggagaattctatcctcccgcagagactgggagacaaaggccctatccttcctaatga

SEQ ID NO: 136750 - DNA, 523 bp, Homo sapiens
gagaattctatcctcccgcagagactgggagacaaaggccctatccttcctaatgattagatttcgaaggaatggctytcagggccttgaaagaaaagcttccgagttagttgcaagggatacgtatttacaattatatgccctttccaggaaatgctctaagggagttcgggacctactatcggggtatgttggccaaaataaataggaaattttccaggcagcgttgagctttctcaggcaggcactttaaagggggggccgaggtcatcctaggatacagccttatgctgctagaaactatgctagagtttggtcaagtctgtggagttcagggatttgtacagagttgtcctgagaggacagttctgcaggtctcacttggcatcaaggctcaccactctctggatctgtctttcctttccagccctgccctcacctcccctcccgcttcccctctcccccctctcctcttcccttcccttccctcccttctttcctcccttcctccctccctcccgcg

SEQ ID NO: 136751 - DNA, 522 bp, Homo sapiens
gagacaaaggccctatccttcctaatgattagatttcgaaggaatggctctcagggccttgaaagaaaagcttccgagttagttgcaagggatacgtatttacaattatatgccctttccaggaaatgctctaagggagttcgggacctactatcggggtatgttggccaaaataaataggaaattttccaggcagcgttgagctttctcaggcaggcactttaaagggggggccgaggtcatcctaggatacagccttatgctgctagaaactatgctagagtttggtcaagtctgtggagttcagggatttgtacagagttgtcctgagaggacagttctgcaggtctcacttggcatcaaggctcaccactctctggatctgtctttcctttccagccctgccctcacctcccctcccgcttcccctctccccyctctcctcttcccttcccttccctcccttctttcctcccttcctccctccctcccgcgcagtacatgttttctgtggtgtttgag

SEQ ID NO: 136752 - DNA, 418 bp, Homo sapiens
caaggttcagtataaggaaattgacttcattttccaaagctaacagtggggaagtggttcaggctcctgccttaatgaaactgcttcaaaattcttgggcaaaatgctagggtttaagaaggggaagtttggtatggaggatatgtggtgggtgggkggtggtgggtgggggcgtgagaggtggtgctggtctacgtggcttgttttgatgacttatcttgagttattgtcccatcttgagaatgggttgacaccatctcaggcttgaccaggttgtaaattagctgctgccttgaagtaatcttctggtgggagataattccataggcacccagattgtctcaagattcaatccctggaacttctaagcaaacataattagataagttagcaatgcaaggaagtacctggtagaaag

SEQ ID NO: 136753 - DNA, 600 bp, Homo sapiens
ttgacaccatctcaggcttgaccaggttgtaaattagctgctgccttgaagtaatcttctggtgggagataattccataggcacccagattgtctcaagattcaatccctggaacttctaagcaaacataattagataagttagcaatgcaaggaagtacctggtagaaagaaggagagtaaagcttattatttcattactaataagttgtagaaaggactgcagaaagaaaaagaaaaaaataacaaaaatagggtccttggttacaacacctcactatcaaatgccattctatttctatggaactcaagtgacatattcattctagctacttcctattgcaaaggggtgtagttaaaaggtattggaatggaactgatctacttggaggtgaaagtgttctcaggtacctgggctcagatgaaacctgttgcagcattatggtggagagccttgcaagtccctgagaaagtctatctwgtatcccatgcaaaaggcgctgcagcagtaaaacccacagcacagaagtatccctatttcccacaattatagtgagaattaccagtaactgttcccatcaggatggtcctgacccaaact

SEQ ID NO: 136754 - DNA, 343 bp, Homo sapiens
atcaggctgggcacagtggctcacacttgtattcctaacactttgggaggctaaggtgtgtggatcatttgaggtcaggagtacaagaccagcctggccaacatggtgaaaccccatctctacraaaaataaaaaaattagccggacatgatagcatgtgcctgtgatcccagctaccagggaggcttgaacctggcaggcagaagttgcagtgagccaagatcgtaccacttcacttcagtctctgtgacagagtgagactccatctcaaaaaaaaaaaaaaaaattaatcttctataaaccttttataacttacttaaacttcgtttttttaacttaaaat

SEQ ID NO: 136755 - DNA, 343 bp, Homo sapiens
atcaggctgggcacagtggctcacacttgtattcctaacactttgggaggctaaggtgtgtggatcatttgaggtcaggagtacaagaccagcctggccaacatggtgaaaccccatctctacaaaaaataaaaaaattagccggacatgatagcatgtgcctgtgatcccagctaccagggaggcttgaacctggcaggcagaagttgcagtgagccaagatcgtaccacttcacttcagtctctgygacagagtgagactccatctcaaaaaaaaaaaaaaaaattaatcttctataaaccttttataacttacttaaacttcgtttttttaacttaaaat

SEQ ID NO: 136756 - DNA, 594 bp, Homo sapiens
atgttataatgtaaactcctagcaacttttattcttaatgaaagataaaggaagtaagcaattttaattatataccaggtgtagaacctaggagacaggatagaacttcagataatgtttgactttttccagcatagccagggagcacagctaagtccatgtgtgccctggctttacttagaatttaatggctccaaagctggcgagtccaacaattattaaaatgtcacagaagcagtttgtgatcttaaaacatctagcaaagacagtatctggcttgcttaattcagagtaagtgtctamattctgaagacaattttattttattttaccaataatctttaccactgtctttatttcccaaagattactaaagtcacatgacattttaaagtttttctatttttctaataaaatattgtgtttagctgcttatttttctttcagccaattaattagagcccttttctatattttggtagtgaaacatcacacacacaacacatataaatacacagagagacagacagaagcaggtgatattatttttcatttgccagttttaagtttctttttcttgttttagacgatcgg

SEQ ID NO: 136757 - DNA, 603 bp, Homo sapiens
atttaatggctccaaagctggcgagtccaacaattattaaaatgtcacagaagcagtttgtgatcttaaaacatctagcaaagacagtatctggcttgcttaattcagagtaagtgtctaaattctgaagacaattttattttattttaccaataatctttaccactgtctttatttcccaaagattactaaagtcacatgacattttaaagtttttctatttttctaataaaatattgtgtttagctgcttatttttctttcagccaattaattagagcycttttctatattttggtagtgaaacatcacacacacaacacatataaatacacagagagacagacagaagcaggtgatattatttttcatttgccagttttaagtttctttttcttgttttagacgatcggtctcttgattacctgttccctttcccaaacaattgccagccagacagcttcaaatttacattttcgtagaaatatttattaggtgaaacaaaatagagaattcatattctatttagagtgaggaaaaatggtgtgggtaaaagttcagtcaagacagccagcaaaggcagacactcttacaaatggaaatt

SEQ ID NO: 136758 - DNA, 568 bp, Homo sapiens
tttggtggctatagccttatgcaatgtatttcttaartaatataatttaaaagccaaaattactccctgatctgtgggcagctgaatggatgttatgttagcaggcatgaaaatgacatttctctccttgtacatctccatcagagctcttgggtgaccaggtgcattgtcaatgagcagtaataatttgaaaggattctttttgagcagtaggtctcaacagtgggcttaaaatattcagtaaaccactctgtaaatagatatgttatcatctagcctttgtagttctatttatagagcacaggcagaatagattcagtataattcttaagggcttaggatttttttaaatggtaaaggagcattagcttaaacttaaagttaccagctgtattagctcgtaacaagagtatacctgttttttgaagctttgaagccaagcatggacttctcctctctagctaggaaagtcctagatggcatcttcttccaatagaaggctgtcttgtctacattgaaaatttgttgtttagtgtagccaccttcatcaatgatcttagctagatct

SEQ ID NO: 136759 - DNA, 565 bp, Homo sapiens
tcagaagaatcattttggtggctatagccttatgcaatgtatttcttaaataatataatttaaaagccaaaattactccctgatctgtgggcagctgaatggatgttatgttagcaggcatgaaaatgacatttctctccttgtacatctccatcagagctcttgggtgaccaggtgcattgtcaatgagcagtaataatttgaaaggattctttttgagcagtaggtctcaacagtgggcttaaaatattcagtaaaccactctgtaaatagatrtgttatcatctagcctttgtagttctatttatagagcacaggcagaatagattcagtataattcttaagggcttaggatttttttaaatggtaaaggagcattagcttaaacttaaagttaccagctgtattagctcgtaacaagagtatacctgttttttgaagctttgaagccaagcatggacttctcctctctagctaggaaagtcctagatggcatcttcttccaatagaaggctgtcttgtctacattgaaaatttgttgtttagtgtagccaccttcatcaat

SEQ ID NO: 136760 - DNA, 525 bp, Homo sapiens
gctaacaggaggcttggatcagctcacggtgttgctaagccaggatgtggtttggggttattaatgagcactgatggctcttcattgccacgtactgagtgctgtgccatgggtcagatactgtgcccagttccctatcatggaatcctctcacacaatcctgtgaggaagagacgcatctctcaacttacaaatagaaaacgaaggtttggtacttaatccagggttagggagttttgctctaggaagcaaaaccacctaagtgccctaatagggactgctcaaatagccatgaatggagtcattgctatttttctactgttttcaccacaaacaagactaattctgaataataaactcctgaacagtatcctgtgagtaccagcacattcttccaaggtcatccttcagccctccctttagtgatgaagattttgaatgccagagggggccagtagcgaagcagtattgctcacragatgcacaagctgcccccacccctcattagggcaggaccaagagcca

SEQ ID NO: 136761 - DNA, 555 bp, Homo sapiens
caacaacaaagaagacaaattacatgatcatatcaatagatgcagaaaatttatttgacaaaattgaatatccactcataattaaaactttcacaactgcagattgcaaacactggagttacctggagcaggaaacacattttgtgaacagactgactagaatccattgagttatctagccagaagctctgcctgatagcagagcccagccagtgaccttaccagatattggatcccagaaaatacacagctggccaaaatcagtggcccagacaactagaaaactcacaacagctctgcctgcccagggtcagtgagggtcatcatcagttgtcccttgcagaatcacagactacattaaagtgaaggtccatctctagcaaagaatacctgtgaagacmagagagaggctgtcatctcaaatgttcagacaacaacacaaggatgcaggaattatgaagaatcagggaaccatggcacttccaaaataaactaataaaatttccatggtagacccacaaaaatggagatctatctataaaatgacagacacag

SEQ ID NO: 136762 - DNA, 471 bp, Homo sapiens
aatgttccgaggcagcccgacccttgcctgcctaagaaaatcagcctctgctcctcattctaagcccttatccaacgtccccacctgcaagaccagttcctgagggtcggcatgaagaagaggaaaagcacgtggaggatagagtaaaatacgtagactaagagagaaagtaggatgcggtgatggaagtgagagccgcttggaaaaaactgggagagaggaggaggargtggcgcttggagcagcaaagactctgcggtgtgtgcgcgtgcgcgcgagaaagaatggggaaagtaatagatactcgaaaggctgactgggttgatgaatggaattcccctccgtaatttttggagtcataatttttgccccttggactgtgcttcttgaagtgcagcgtgcctggagcccgggccgtggggccactcggctacggatgctatgtgatctaaccaggacccaggaaggggc

SEQ ID NO: 136763 - DNA, 524 bp, Homo sapiens
aatccaacagcatatcaaaaagataattcaacacgatcaagtggktttcataccagggatgcagggatggtttaacatacacaagtcaataaatgtgatataccacatcaaaagaataaaaaacaaaaattacatggtcatctcaatagatgcagaaaaagcatttgacaaaatctagcatcactttaggattaaaaccctcagcaaaatcggcatagaaaggacataccttaaggtaatagaagccaactataagaaacccacagccaacattgttatgaatagggaacagttgaaagcattctccctgagaactggaacaagacaaggatgcccactcccaccacgtctattcaacacaatattggaagtcctacccagagcaatcagaagagaaagagataaagggcatctaaattggtaaagaggaagtcaaactgttgctgtttgctgatgacatgatcgtatatctagaaaaccctaaagattcatctaaaaaactgctagaactggtaaatgaattc

SEQ ID NO: 136764 - DNA, 571 bp, Homo sapiens
tctccttagtcacagtcagagagggtgatgcgacacactgggcttcactgtgctcgtgaagcggagccagggtgaaaggatcatatggcctaaccctaaccctaatgggagtaacttcacctgcgtcccacaggccccgcaagagtgacgctgccaggcaggcgccgccctgttcggttcctgctgctgtcgctcctcgctccccaccacctccagagctccggtgggtcaccatggaaagggaagccgctgcctgcaaggccagcagacacagaggtcaccctccaattttttcgggtaacattctgtaaggacagaacaccaggaggctactcctaccaccaggagcatgtcaggtaaacatccagagagatgaaggaagaaaaaattttattttagccaccaagaaatacaagccgttytaaagattatacttaaaagaaaaaaaaaacaaaaaaaggaaggaaaaaggggaccgatgatcttgcaatcacggaagttgtagagagctggctgcctagagacactgtgcccttccctcctccctcttttcctcttatcaaccagaggc

SEQ ID NO: 136765 - DNA, 524 bp, Homo sapiens
aatccaacagcatatcaaaaagataattcaacacgatcaagtggttttcataccagggatgcagggatggtttaacatacacaagtcaataaatgtgatataccacatcaaaagaataaaaaacaaaaattacatggtcatctcaatagatgcagaaaaagcatttgacaaaatctagcatcactttaggattaaaaccctcagcaaaatcggcatagaaaggacataccttaaggtaatagaagccaactataagaaacccacagccaacattgttatgaatagggaacagttgaaagcattctccctgagaactggaacaagacaaggatgcccactcccaccacgtctattcaacacaatattggaagtcctacccagagcaatcagaagagaaagagataaagggcatctaaattggtaaagaggaagtcaaactgttgctgtttgcygatgacatgatcgtatatctagaaaaccctaaagattcatctaaaaaactgctagaactggtaaatgaattc

SEQ ID NO: 136766 - DNA, 522 bp, Homo sapiens
agcttggcttcatcatcccattaccgttgcagtgatgttaactttgatcacttgattaaagtggaggaagccaggaaaagttactttcttcttctttgtaatttctaagtataatgtggggaggtgcttggagatgacgtaagtatcttgtgccttatcaaattttgtttattcagttacagtcatgagtcacttaacaatggggataccttctgagaaatgtgttgttgggggattttgtcattgtgcaagcactatagagagtacttatatatacccagacggtacagcctactgcacacctatgctactgtatggtatagcctrtagctcccgggctaaaatcccgcacagcatgtcactgtactgaacgctgtaggctgggaactgtaacaggtggtaagtatttgtatatctaaacatatctaaatgtagaaaagggacactaaaaatacagtatcataagtttatgggaccactgtcattatgtggcgatgactgcatttctgatcgtcagcaaag

SEQ ID NO: 136767 - DNA, 549 bp, Homo sapiens
actgctttgcaacaggagggtgasagagtcaacttcaggggcctgctctgacttggggcagagagagaggtctgtgtagtgccgcggaaggacctgtggcaggggcgtcaggtgacctgctagtcccttttggcactgtgtgacttcaggcaaattgcttccactttttgggctttggtttcctcaattgcgaaatgagaagttcgagttaggggcgttctctcttttcagcagtgctgaaattctgtaagtgcatggatctttctgaacagagaggctcctagtcttggggcctttggcagagctgtccagcatcgaggtgggatcctgttggctcttcaggcatctgctgggatgccatctgaaatgctggggaggtccttccagcactggaattggaacgttctttgcccagtgaccactcctccaggcagcttgatttcttggaacagagcagagggcaacagctgtcagggttgggctggccagaatctcccgtctctgtcccagtgactcaggtggggatacgcttggcaggattggagccaa

SEQ ID NO: 136768 - DNA, 560 bp, Homo sapiens
ccgtcttcagcactgctttgcaacaggagggtgacagagtcaacttcaggggcctgctctgacttggggcagagagagaggtctgtgtagtgccgcggaaggacctgtggcaggggcgtcaggtgacctgctagtcccttttggcactgtgtgacttcaggcaaattgcttccactttttgggctttggtttcctcaattgcgaaatgagaagttcgagttaggggcgttctctcttttcagcagtgctgaaattctgtaagtgcatggatctttctgaacagagaggctcctagtcttggggcctttggcagagctgtccagcatygaggtgggatcctgttggctcttcaggcatctgctgggatgccatctgaaatgctggggaggtccttccagcactggaattggaacgttctttgcccagtgaccactcctccaggcagcttgatttcttggaacagagcagagggcaacagctgtcagggttgggctggccagaatctcccgtctctgtcccagtgactcaggtggggatacgcttggcaggattggagccaa

SEQ ID NO: 136769 - DNA, 609 bp, Homo sapiens
tggtccacattcaagtacgtgacaagacttagttttcttctggaccagtgttagagcttagaactgtggagaatagaggtggtaaaagggatgaaggccttctccttgggacttcccttttacactccatgctctttgttaagctacttttactctgggaatgagagagaaagagcattgctgcactgtctgctggagatggccggggttgtatatatgttcatgaaagttataacttcacttcaggttgctttcacctaaagctaaaaaggctgtgatatatgaatcttaaaaatggcattctattattgtttaatcaatttcaatcccattgaaagtctcttttccatggacatcaggaaaycatttaaagcctcctcttaatgcacagcagaggctcagcaagtgctgtcaactctaatacaatttagaagttacagattcataagagcagctttgagtcttagcagcattcctgctagcatcctagtaaaagtagggctgtgtgtctagattaaaatggaaagttctgatttggcatctatatgtttttctatctaacactgtatatctgcatttaaaaaaacattttggtgcctgattatttga

SEQ ID NO: 136770 - DNA, 609 bp, Homo sapiens
tggtccacattcaagtacgtgacaagacttagttttcttctggaccagtgttagagcttagaactgtggagaatagaggtggtaaaagggatgaaggccttctccttgggacttcccttttacactccatgctctttgttaagctacttttactctgggaatgagagagaaagagcattgctgcactgtctgctggagatggccggggttgtatatatgttcatgaaagttataacttcacttcaggttgctttcacctaaagctaaaaaggctgtgatatatgaatcttaaaaatggcattctattattgtttaatcaatttcaatcccattgaaagtctcttttccatggacatcaggaaatcatttaaagcctcctcttaatgcacagcagaggctcagcaagtgctgtcaactctaatacaatttagaagttacagattcataagagcagctttgagtcttagcagcattcctgctagcatcctagtaaaagtagggctgtgtgtctagattaaaatggaaagttctgatttggcatctatatgtttttcwatctaacactgtatatctgcatttaaaaaaacattttggtgcctgattatttga

SEQ ID NO: 136771 - DNA, 578 bp, Homo sapiens
ctccccttgcttattcctttcaacattcctcactttactagcctgtcttggttcttctcttacttatcacaacatctcatgcctttgctttttctctgtgcttcccagtcccaaacctgccattacttgatggctatgtggaggtagatgatcagattctgtgcaagcttcttcaggggaagatgttactaagaatatggttgtgcaacatgttattattaaagcatattgaagtgcttgctctgttggcactttgctacatactgtaggagatacagcagaacataaggcagagacttgacctcagggagtttataattattaataatcgtctctaatgtacaagcagcccccactccaccatgttctaagaaaatagttaggaaatcccaggcaaggagaataatgttatgtgtactgtggtggtaagaagtggatgataatgaaattttcaattttctcaaccccagtccagcaaaagcattaagtacctccaataataagtgggtctttgcatragaaaagccatgaaatcatatgacaggatcatcaaatacatgtatatacacaaatcagtt

SEQ ID NO: 136772 - DNA, 585 bp, Homo sapiens
taaggcatcattttgtagtgcggatagcctgtgattttgaatggcagcatagaatgcaattgagaagaatcttttgtaaaatatttcaacagggatgaagagaagggtccttgggcctacctgataagggttcaacatgggaaaactgaatggccgctcttgggaaaggggactctttgagtcccaacaagctctagtgttgaatgttttcatactaataacatgagcgtgttttttaaagagtrttgtggtgaccagatttgccaaggagataggaaatctgagtaatgagtgaagctgcctgtcaatcataaggtaatttgataggtgaaacagaaacaggtctcttgagaaatggttggccacagggtgcgacacctcatgaaatttcttgctggtgaaactctcttcctttgctgagaaggtctcatttgctgagctttcacagatgtagaaatatggactcagcaggttgcaaagccaattgacagtttcaatcgtgtcacttacaagaagaatttgataaccaattcagaaatgaattgtgctcctttcctctcttgattagcatacctcaccaaactc

SEQ ID NO: 136773 - DNA, 524 bp, Homo sapiens
gtgagacccgttcactatcacgagaacagcatgggaaagtcctgcccccatgattcagtcatctctcaccaggtccttcccacaacatgtgggaattatgggaactacaagataagatttgggtggggacacagcccagccatttcatcttccaaaatatttgtaccatattagcttttcaccagcagtgagtgagagttccagttgttccacatgcttactaatatttggtatgatcagtcttttaaatttcacgcattctattcagtggtgtctattgaggtttcagtttccattttgtaatgacaaacaatgctgagcttattttcatgtgcatrtttgccatccatatatcttctttattgttcatatcttttgctcattttattgtgaagttgttggttttcttattatccagttttgagaattctgtgtatattgcgaatacaagtgctttatcacatatgtgctttgcaaatattctcccctagcctgtggcttgtattttgtaacagtgattttga

SEQ ID NO: 136774 - DNA, 607 bp, Homo sapiens
aaaactcatttatggaaactcacccagaaatagcacaaatgatagaaatagtagacaaagacattaaaatcattatagggccaggcacggtggctcatgcctgtaatcccagcgctttgagaggcctatgcaggcagcagattgcttgagctcaagagtttgagaccaacctgggaaaatggctaagccctgtctctattaaaaatacaacaaagttagccaggagtggtggtgtgcacacatatagtcccagctacttgggaggctgagttgggggaattgcttgaacctgggaggcagaggttgcagtgactcgagaccatgccattgcactccagcctgggtgacagagcgagactcyatctcaaaaaaaaaaaaaaaaaattgttataaccacattttacatctctaaggagttagacaaaagattgaacaagtttagtagagagacaaaagatataactaagatccaaacagaatctccaaagagaaaaactttttatatctgatacgaaaagtacattggaagggaataatggcggattgtatattacagaaaaaaaagattagcaaacttgaagatgcatcaataaaaagtattcaaaat

SEQ ID NO: 136775 - DNA, 399 bp, Homo sapiens
gaattcacctgtccctcatccatccaccatgcattcacctgcccctccatccacccaccatgcattcacctgtccctccatccagccacccaccatgcattctcctgtccctccatccagccaccrtgaattgacatgtccatccatccaccatgcattctcctgtccctccatctatccaccatgaattgacctgtccctccatttatccaccatgcattcacctgtccctccatccatccaccatgcattcacctgtccctccattcatccacccaccatgcattcacctgcctctctatctgttcatttttttttatcaatccattcatttattacatagatattaagtttctactgtgtgccagggacagttctgggtactttcacatacattct

SEQ ID NO: 136776 - DNA, 399 bp, Homo sapiens
gaattcacctgtccctcatccatccaccatgcattcacctgcccctccatccacccaccatgcattcacctgtccctccatccagccacccaccatgcattctcctgtccctccatccagccaccatgaattgacatgtccatccatccaccatgcattctcctgtccctccatctatccaccrtgaattgacctgtccctccatttatccaccatgcattcacctgtccctccatccatccaccatgcattcacctgtccctccattcatccacccaccatgcattcacctgcctctctatctgttcatttttttttatcaatccattcatttattacatagatattaagtttctactgtgtgccagggacagttctgggtactttcacatacattct

SEQ ID NO: 136777 - DNA, 399 bp, Homo sapiens
gaattcacctgtccctcatccatccaccatgcattcacctgcccctccatccacccaccatgcattcacctgtccctccatccagccacccaccatgcattctcctgtccctccatccagccaccatgaattgacatgtccatccatccaccatgcattctcctgtccctccatctatccaccatgaatygacctgtccctccatttatccaccatgcattcacctgtccctccatccatccaccatgcattcacctgtccctccattcatccacccaccatgcattcacctgcctctctatctgttcatttttttttatcaatccattcatttattacatagatattaagtttctactgtgtgccagggacagttctgggtactttcacatacattct

SEQ ID NO: 136778 - DNA, 399 bp, Homo sapiens
gaattcacctgtccctcatccatccaccatgcattcacctgcccctccatccacccaccatgcattcacctgtccctccatccagccacccaccatgcattctcctgtccctccatccagccaccatgaattgacatgtccatccatccaccatgcattctcctgtccctccatctatccaccatgaattgacctgtccctccatttatccaccatgcattcacctgtccctccatccatccaccatgcattcacctgtccctccattcatccacccaccatgcattcacctgcctctctatctgttcatttttttttatcaatccattcatttattacatagatattaagtttctactgtgtgccagggacagtkctgggtactttcacatacattct

SEQ ID NO: 136779 - DNA, 497 bp, Homo sapiens
tgaggaccagagaggtaaaataactcacctaaggtcacacagctaataaagtgcaragctaggatcagaacccagatggtgtagctccagaacccacatcctaactaccatgtctgctaccctttggaaatgaatgaatggtgtgtcttaatgcaccaggtccaatcatagcccttttccatacaccagctcacttaccactggggagagtcctgtgacgtagacaagcgaatacccccattttacggaagaccaacctgggagataagtcacacaccacatccctcacatggtacaggctccatgtaccataactggaccaggatagcaccaaggacattgcctcctgaataaggatgctgtgactcagaaaatgcttatttctttctatgccaaaactcaatttctacaaattcattttggatctatcagtacacacctagaatgcccaagaggtctcttgcctctttccccactctgggcctcagtttcctcaa
